United States Patent Application Publication US 2012/0017292 A1 - sequence listing, part 14

SEQ ID NO: 60868 - protein, 314 aa, Zea mays
  Coding DNA Sequence Number=SeqID_17493
  Homolog annotation: Hit_ID=A2XFR6; Match level="QueryCoverage=39%, HitCoverage=37%, E-value=5e-07, Identity=34%"; Hit description =Putative uncharacterized protein
MVKPQGEQSDPERRCDPVDGCRDRRALRGLERFLECLSVRTGSLDDHSGKQCNHEGDDDEDDGFDYNYGNGLWYSFHLERMARLRHTARKSVIPFLPSHLAERPLRRPVTGQSSHFERLHHRMHEEQERQRHELEQQGSSSSPQQEHICEAYPDRWEATCLVHRPKDSLRGAEVCSEHYSIYKRYSAEAAIQDAARHALSHYCSLFGGVTDGLDLRYYPRRPHGNTGGVIVSPVGEDNPRLSSTDNLAAVLNTDLDHALDELSRACVEIAQLRAECAERRHLEDGSPAPSGLCTRIAHLSVDTMPMATPTAGPG

SEQ ID NO: 60869 - protein, 147 aa, Zea mays
  Coding DNA Sequence Number=SeqID_17494
MGKSKKGSGSSPRSGDKRKREPTPPSEDFGDSEYSEEEFSSKSEGSPAPISPPVSSDDSDDSQGIAAEVWTYIRAVERAGLEGSDELEYSSDEEEEGSGGDGGDDDDDDGGDGGGGGDSGRGGDGGSKGGNGSGSKGSSKGSNKASG

SEQ ID NO: 60870 - protein, 152 aa, Zea mays
  Coding DNA Sequence Number=SeqID_17495
MGKSKKGSGSSPRSGDKRKREPTPPSEDFGDSEYSEEEFSSESEGSPALVSPPASSDDSDDSQGIAAEVWTYIRVVERAGLEGSDESEYSSDEEDSSDSSEEGSGGDGSDDDDDGGDGGGGGDSGRGGDGGSKGGNGSDSKGSSKGSNKASG

SEQ ID NO: 60871 - protein, 185 aa, Zea mays
  Coding DNA Sequence Number=SeqID_17496
  Subcellular localization annotation: CTP_CleavageSite=91; ConfidenceScore=5.68e-01
SQRPSVICPQAPSAQSAAASPQFTTQYSALHCLGVQRGSALADLPSVRRRRTAQAKPQRQSLKASRTAPRHRSALRRSALQACRLQPIAARSSMLACGLGEWALLWPLVAVPACSTARSTEYGKEYGPKNQASSGSGPSTRASGVCNEPEIQVGVQVNNSEDANGLRIPIDSFAPILEMMLEGLS

SEQ ID NO: 60872 - protein, 31 aa, Zea mays
  Coding DNA Sequence Number=SeqID_17497
MAAQLQLRLSSTGGGVFPRARDGDGRVINKR

SEQ ID NO: 60873 - protein, 32 aa, Zea mays
  Coding DNA Sequence Number=SeqID_17498
MTCLAQLLHEPEPKLKNKPYQRGPTCTFYPYI

SEQ ID NO: 60874 - protein, 56 aa, Zea mays
  Coding DNA Sequence Number=SeqID_17499
  Homolog annotation: Hit_ID=Q53PV0; Match level="QueryCoverage=91%, HitCoverage=6%, E-value=2e-20, Identity=88%"; Hit description =Putative serine esterase
METAHEVAIYIDRFHNLDLFQQGWYRVKISALWEDDENRAPISPARVTQYEENMSP

SEQ ID NO: 60875 - protein, 155 aa, Zea mays
  Coding DNA Sequence Number=SeqID_17500
  Homolog annotation: Hit_ID=Q8LN48; Match level="QueryCoverage=48%, HitCoverage=27%, E-value=4e-08, Identity=37%"; Hit description =Putative uncharacterized protein P0031G09.3
MVAMQIQHHTLHHTQEFGTILVSLGASLEDYVEFKKSQTNKTLDALKELSMRKCMKEMEAMDGFIDEEKSYAVEVFESEINREAFMSTMNHNVRRMWLKCKIRSQSINDLDRVLSISQFILNTKFLHRQLLFWYPEALLQLGYMEDIMYIRKMAG

SEQ ID NO: 60876 - protein, 132 aa, Zea mays
  Coding DNA Sequence Number=SeqID_17501
MGARTSGEASGGPYGELDLFGAPPSMNLADDHSPEVGSGAGMPSRTRAQNGAGTSRGGEETPNLPPVPPTLAEAIAALVNATADNTRFLREMARHQFHQQGGRGQPQGPRDTMYLEFSETRPPLFVKEEEPL

SEQ ID NO: 60877 - protein, 64 aa, Zea mays
  Coding DNA Sequence Number=SeqID_17502
MAGGAELAGVGVLLGKVRRVRDELPRTGEGFIGALGHGWVQARGRSRPRVAHAQRAATPLEWLV

SEQ ID NO: 60878 - protein, 88 aa, Zea mays
  Coding DNA Sequence Number=SeqID_17503
  Subcellular localization annotation: CTP_CleavageSite=33; ConfidenceScore=5.15e-01
MGSRHSACSAEAECRGQGSAQGTRSRLARARPRAKTADPGRFTPRPRAPSSNGHTFGSPEAQSSQRSNLGQIATSIDHIAGAFNARIA

SEQ ID NO: 60879 - protein, 102 aa, Zea mays
  Coding DNA Sequence Number=SeqID_17504
MRRQPESTVADLGGCAESGGCYKPIPPKRISPRDSRLVSKEFRVFGLQIIFSFPGCFFLGVVTPSDFAHSDGVPPGDSVCKLQNLRWLLYVCQILLDSQTLH

SEQ ID NO: 60880 - protein, 387 aa, Zea mays
  Coding DNA Sequence Number=SeqID_17505
MDEGTPLGGLESEGNAEPSHGLHTVLSSLWGRGHLAHRLRIRFPEDEGVRRPKQSNQPRRLTGPAGRGSARGLTALGAVSAVPTTLPRPRGSVPRPPGGATWCFDYDKTPEGDTSSRLPRKGRSSSPRLTRRWRGSSSTLGVNSTFGEVRPSLGRQHGRRISAPKDDVSTTPRPSPPGSPPGTRPEQTARPAAPKPQPAVPRGHQPSSWPRQLDSGVGPASGRPGQAPADEASFFEPTPPLSTLTPLPSAPAHRRAAEEQLTFGQAVRLADRRVPVRTTPHTGGPAGQQNADRWLTAARSGSSDNDLRSGRPNSSSDDLRVDAAATRPSPTTPLEGRRQATKAVESEVSPWVTPAISSAEKPLPDASVGGGTESSAEAAQAGEPDTR

SEQ ID NO: 60881 - protein, 179 aa, Zea mays
  Coding DNA Sequence Number=SeqID_17506
MAITERGFSPRLVARTALATGTCGFSNTGKEFRELPSSIAPTPDFHATSTSNSIDPDHLADLGRRRNTWRRDPMANLLRTELLRRKNSDGHEMEKVRLRNNRHMVTCERQLAVGIDGGMTATDELDAFRLGAISILLASGAEAVSHERKEGLDTEKQELGHGKQRRVWQNHPNYSSLSA

SEQ ID NO: 60882 - protein, 115 aa, Zea mays
  Coding DNA Sequence Number=SeqID_17507
MGSTRSKINGHHLMNTEQTSDGDAMHGDGSDANRSLAAVSGGGMVESLARCMREGVAGENGSRENFYGWAIAYGEDPGTRPPCAELVDTGGGRSLSAWKELLASGPEHPVTRDRK

SEQ ID NO: 60883 - protein, 84 aa, Zea mays
  Coding DNA Sequence Number=SeqID_17508
MEDGIVDLEQAASNRRQSRGTECMETLSAKDQQEFEEHKKQQIKEAQAMFLANFKVDQNQKVVRQRVTDLVSLRPITTTPKPPA

SEQ ID NO: 60884 - protein, 131 aa, Zea mays
  Coding DNA Sequence Number=SeqID_17509
MAAKKATSKATTSLDDAAKAALTEKKSKEALISDAPQDAPENNDGAVNSKHPRIENPPLKAPFTCAVLRASLRTPIRFHPSEADDIIEDGEVLGILVEGQLKLLALHIKTITCKNRRRSRPSGSAPTCKPK

SEQ ID NO: 60885 - protein, 230 aa, Zea mays
  Coding DNA Sequence Number=SeqID_17510
MNQPIPTGGIDSSIVSHVSNKPTLPPQTHIEEFTKKQITELWGREIKPNSKQLNLQGYLNRGHNMVKATLLDSQKRKIGALIAQLGSCTFTPRTEKTSAEVVEIVLCAKNKWVLLYGPYPEGDSTDVGDDRGKQVKPRADEGTSKGKAPPAATRKRKLGMGDDATGPRASEIVFEALMGICAVPGEVMSSPELRETSSCMMKVTGGRWHSNAPIPRAAGDYFLHPVWLVM

SEQ ID NO: 60886 - protein, 663 aa, Zea mays
  Coding DNA Sequence Number=SeqID_17511
MDKDRQGAAQKRQATVRIHEARPTKQRGTAKAAASGGGKPPLAVKAGASAPNKAPEATAGAGGSKSTKVAPPASGVAEASKAARALPLAGKRVADFGTDITVDDYLGGPDEGQLAIVAPGAAIATAAKAPKAGGEALGAGGEVSVLALVRDEAGAATRRLKVVTEALSQATEALSQVADFASRTASGALTAAVSAEVERLRTQHADAVREKSASDSKCRKLTDRVAALEREKADLRRQLAAERREANEVVAKGQAAQAEAKLARAEGNLAKELAEHLQERLTALESRAKEAEAATHAEAERTRTQLMDTYRELGARTGDFEVPDRESRLRCLQRVQEELLELPAVVGGLMSYASLVNCEGAMNALSREGCRHFEAFDQADEDFDRDIYKVEDPVVKESAGALYDRMWGLYGREVVRERAEAARAQAEHGERVDDFGALNSALPDPELTLAEAATGVALETTLETAEDAPGVPTSAVAGEGLPPKVAEGAPDAPAAAAPSAEDSAAVVVQEFGPAHATATTEFLAASTAEGGNEYGGSVSEFFDFTDSGSSVEWSEESSEEDLDYFAALDVAAAEASPHAADAPDVPGPSTGRRRRRAVAKRRVSAEEGARLRVSRVGRQELLSLPAAASTGEGELRSLFAGEELRIMLFNYREMGIIPKVEPM

SEQ ID NO: 60887 - protein, 285 aa, Zea mays
  Coding DNA Sequence Number=SeqID_17512
  Gene Ontology: Mol. function=hydrolase activity, hydrolyzing O -glycosyl compounds; Cellular component=cell wall; Biological process= carbohydrate metabolic process
  Homolog annotation: Hit_ID=A2X3G4; Match level="QueryCoverage=92%, HitCoverage=92%, E-value=1e-116, Identity=70%"; Hit description =Putative uncharacterized protein
  Pfam annotation: Domain name=Glyco_hydro_16; Domain location=21-204; Score=319.4; E_value=6.8e-93; Accession=PF00722.12; Description =Glycosyl hydrolases family 16
  Pfam annotation: Domain name=XET_C; Domain location=227-280; Score =39.2; E_value=1.5e-08; Accession=PF06955.3; Description=Xyloglucan endo-transglycosylase (XET)
  Pfam module annotation: Pfam domain module=Glyco_hydro_16::XET_C; Domain location=21-204::227-280
MALLLVAVTAAAVAGLAAANFRDDCDIPWEPQNARFTSDGNGLSMALVSNSSGCMLRTKKQYVYGTVSTLIQLVPGNSAGTVTTYYASSVGDNHDEIDFEFLGNVSGQPYTFHTNIYANGVGNKEIQFKPWFDPTTGYHNYTISWSPCMIVWYVDSVPIRVFRNYQQSYGVAYPTSRPMHAYSSIWAAEDWATQGGRVKTDWSKAPFVANYRNIHLDICDCPGGYACSTNCAAAAAPNSGACQLSPEQRGLMQSLQKDYAIYDYCVDSKRWVNGVKPTECGLPQY

SEQ ID NO: 60888 - protein, 195 aa, Zea mays
  Coding DNA Sequence Number=SeqID_17513
  Subcellular localization annotation: CTP_CleavageSite=69; ConfidenceScore=5.18e-01
MARYSLNAGTGCLLPGSASLSSFPQPWWGRADVPWPALVSRDEPMSAPSSISAPLPTPFFPFSLCSRSLAAMEPPWCLETAGVFHLAGNLLIQTRCLSSLVACSEHPSPTSSLASPAKLLLGQALLMPVAPIPIQILCPFSSAAALLWGFLIALIVSLQPGVRSPSATLSKPMLVVDVALCPFNETPSRVDNPCD

SEQ ID NO: 60889 - protein, 86 aa, Zea mays
  Coding DNA Sequence Number=SeqID_17514
MKLTTQYTKRISWAPYLGLQSIRSSAPRSVAPSYEAVSPPRRCQDGGLENTWLMDTGCSCHMTGSSKWFSSLDPVIGKEYITFEDK

SEQ ID NO: 60890 - protein, 1440 aa, Zea mays
  Coding DNA Sequence Number=SeqID_17515
  Gene Ontology: Mol. function=2 iron, 2 sulfur cluster binding; Cellular component=peroxisome; Biological process=electron transport
  Homolog annotation: Hit_ID=O23887; Match level="QueryCoverage=95%, HitCoverage=99%, E-value=0.0, Identity=94%"; Hit description =Aldehyde oxidase
  Pfam annotation: Domain name=Ald_Xan_dh_C; Domain location=656-766; Score=178.5; E_value=1.7e-50; Accession=PF01315.13; Description =Aldehyde oxidase and xanthine dehydrogenase, ab hammerhead domain
  Pfam annotation: Domain name=Ald_Xan_dh_C2; Domain location=777-1315; Score=900.5; E_value=7.7e-268; Accession=PF02738.9; Description =Aldehyde oxidase and xanthine dehydrogenase, molybdopterin binding domain
  Pfam annotation: Domain name=CO_deh_flav_C; Domain location=483-591; Score=167.5; E_value=3.6e-47; Accession=PF03450.8; Description=CO dehydrogenase flavoprotein C-terminal domain
  Pfam annotation: Domain name=FAD_binding_5; Domain location=302-475; Score=201.4; E_value=2.2e-57; Accession=PF00941.12; Description=FAD binding domain in molybdopterin dehydrogenase
  Pfam annotation: Domain name=Fer2; Domain location=73-144; Score =34.5; E_value=3.9e-07; Accession=PF00111.18; Description=2Fe-2S iron- sulfur cluster binding domain
  Pfam annotation: Domain name=Fer2_2; Domain location=152-240; Score =173.9; E_value=4.1e-49; Accession=PF01799.11; Description=[2Fe-2S] binding domain
  Pfam module annotation: Pfam domain module=Ald_Xan_dh_C::Ald_Xan_dh _C2::CO_deh_flav_C::FAD_binding_5::Fer2::Fer2_2; Domain location=656 -766::777-1315::483-591::302-475::73-144::152-240
MEAKLLDLALIASTYLSRPWRLALQLRRRFRILAAGDVSACINNTGRLAGGSEQGEEEMGKGAGAAEPSTVVLAVNGKRYEAAGVAPSTSLLEFLRSQTPVRGPKLGCGEGGCGACVVLVSKYDPATDEVTEFSASSCLTLLHSVDRCSVTTSEGIGNTRDGYHPVQQRLSGFHASQCGFCTPGMCMSIFSALVKADNKSDRPDPPAGFSKITTSEAEKAVSGNLCRCTGYRPIVDTCKSFASDVDLEDLGLNCFWKKGEEPAEVSRLPGYNSGAVCTFPEFLKSEIKSTMKQVNDVPIAASGDGWYHPKSIEELHRLFDSSWFDDSSVKIVASNTGSGVYKDQDLYDKYIDIKGIPELSVINKNDKGIELGSVVSISKAIEVLSDGNLVFRKIADHLNKVASPFVRNTATIGGNIMMAQRLPFESDVATVLLAAGSTVTVQVASKRLCFTLEEFLEQPPCDSRTLLLSIFIPEWGSDYVTFETFRAAPRPFGNAVSYVNSAFLARTSGSLLIEDICLAFGAYGVDHAIRAKKVEDFLKGKSLSSFVILEAIKLLKDTVSPSEGTTHHEYRVSLAVSFLFSFLSSLANSSSAPSNIDTPNGSYTHETGSNVDSPERHIKVDSNDLPIRSRQEMVFSDEYKPVGKPIKKVGAEIQASGEAVYVDDIPAPKDCLYGAFIYSTHPHAHVRSINFKSSLASQKVITVITAKDIPSGGENIGSSFLMQGEALFADPIAEFAGQNIGVVIAETQRYANMAAKQAVVEYSTENLQPPILTIEDAIQRNSYIQIPPFLAPKPVGDYNKGMAEADHKILSAEVKLESQYYFYMETQAALAIPDEDNCITIYSSTQMPELTQNLIARCLGIPFHNVRVISRRVGGGFGGKAMKATHTACACALAAFKLRRPVRMYLDRKTDMIMAGGRHPMKAKYSVGFKSDGKITALHLDLGINAGISPDVSPLMPRAIIGALKKYNWGTLEFDTKVCKTNVSSKSAMRAPGDVQGSFIAEAIIEHVASALALDTNTVRRKNLHDFESLEVFYGESAGEASTYSLVSMFDKLALSPEYQHRAAMIEQFNSSNKWKKRGISCVPATYEVNLRPTPGKVSIMNDGSIAVEVGGIEIGQGLWTKVKQMTAFGLGQLCPDGGECLLDKVRVIQADTLSLIQGGMTAGSTTSETSCEAVRQSCVALVERLKPIKESLEAKSNTVEWSALIAQASMASVNLSAQAYWTPDPSFKSYLNYGAGTSEVEVDILTGATTILRSDLVYDCGQSLNPAVDLGQIEGCFVQGIGFFTNEDYKTNSDGLVIHDGTWTYKIPTVDNIPKEFNVEMFNSAPDKKRVLSSKGKYLLTMFHPLSTFSTLMRTSSNSASGEPPLVLAASVHCAMREAIRAARKEFSVSTSPAKSAVTFQMDVPATMPVVKELCGLDVVERYLENVSAASAGPNTAKA

SEQ ID NO: 60891 - protein, 472 aa, Zea mays
  Coding DNA Sequence Number=SeqID_17516
  Subcellular localization annotation: CTP_CleavageSite=32; ConfidenceScore=5.21e-01
MEPGGGTAVGAVESLLTSSRFRKGAESRHRHRAAQTARHSRPLTARPRPPAPRPSLSRADLSHWQPDPTRQLLLPRPSLTGAIAAERPSPRRLAINARQPPRQTPPLCPSRPLILSLPEPSRRRLLHARHHGSSSELAVPSIPLPLPGAYKRDSRARALHTSPGHLLHPSPSSIELAAPPCFPPTAPMENPWVIRTSYCLEEEGFPHLLRSCALRLGIRKKPEYVWKEYRENGMEKCSMAVYLGESRNYPNHPPFQITFIGHRFPDTCQSIARKALKQMCQNYSRETFETPLRYFPPSNKNTPTWKKRLQALSGGDPIEDDPTIVYMAGYLHTLDNHYDELSSHCTHLNSRVESLEQQVKELTQEKVSLQESLSIVEGEEANTREAYRTLKIDFDKKLKALAPKKKIQKKTTNQGCQTEKKKKKAPLALPPPRIDDWSDEEDVSLASLDDLLKAFGDTLDKELASTSKNALV

SEQ ID NO: 60892 - protein, 567 aa, Zea mays
  Coding DNA Sequence Number=SeqID_17517
MNKNTGIRSAITNGTPVPPPQVRTTPLDGGGPAEQQKTDGRLAVAHSGSNDDDPRSGWPNCSSEGLRADAAAILPSPTPTLEGRGQGPSALRQIPTQILPDEWGTDLRAERGSRLQAGGGTGSQADEPDALRLTTSAVDQPCVVEVRPARRARERPLPRTPQERPTHGPTREVELRLSPASTLARMMNILEAEGGTKIAARLASPHPGAGGHRLGDRERGDTPKRILPREGTRLRASLLIRGSKAGPSEGFDSRLRSRGLYTHYWSEVRRPAPRKGSTAASGYSGSAPTTDQGGNDLVTESHQREASSPRTPSPGDRVRQITRSSPETPCSTPIEGNMALSPLLLAERRRRGRLGGCSRKPSSGRTVDSVNIPARELGTRPYTRATANSHEGTTRPAEALREALRPRRSETTPPRPRGLYPAGALARTHRNKTQPRKAGPLAKKCDESLQASANTPFEARGLLSGTIIRGTLKAPNSQLPQKTTNSALPDPGLGLGLSPRRRRTPLRPTQGSDLGSAPEDDELRFARPQGSDSALASADGLHLARTRGSDSTSAMEDRLDFGFGGAS

SEQ ID NO: 60893 - protein, 120 aa, Zea mays
  Coding DNA Sequence Number=SeqID_17518
MGKNNKRKREPTPPSEDFGDSEYSEEEFSSESEGSPAPIPLRESSDDSDDSQGLAAEVWTYIRAVERSGLEGSDEEDSDGDGKDEDGDGDDDDDEGGGGGDEVAAERLVDDVRVLEITAE

SEQ ID NO: 60894 - protein, 372 aa, Zea mays
  Coding DNA Sequence Number=SeqID_17519
  Gene Ontology: Mol. function=sequence-specific DNA binding; Cellular component=nucleus; Biological process=regulation of transcription, DNA-dependent
  Homolog annotation: Hit_ID=A3C783; Match level="QueryCoverage=100%, HitCoverage=100%, E-value=1e-43, Identity=60%"; Hit description =Putative uncharacterized protein
  Pfam annotation: Domain name=GATA; Domain location=275-310; Score =64.8; E_value=2.9e-16; Accession=PF00320.18; Description=GATA zinc finger
MASEWEMAAMGVELGMGMGGTYHHNASSITTAPTSSHHSGGAGYSAAHHHHYYGMPPVGGDATAMRVDDLLENLDLSTGAGAHEFFPTAAAANKGHHHSGGAMVGEPSPTANSSDHQTSLLSFADEFYIPSEEAAELEWLSKFVDDSYSDMPNYSSATHAAMAAAAAAAAAAANTAGTRAGGTSGGQDSCATAAPGRGARSKRSSRAAAAAWHSLVPRPPSQPSPSTSCSSSDFTPASTNNKPARPSNGGSRGRKSPGPAGEVVAVGVEGGVRRCTHCASETTPQWRTGPLGPKTLCNACGVRFKSGRLVPEYRPASSPTFVLTQHSNSHRKVMELRRQKELVLIRGTHRDASAAAAGSAGPELMFRDYGVC

SEQ ID NO: 60895 - protein, 59 aa, Zea mays
  Coding DNA Sequence Number=SeqID_17520
  Subcellular localization annotation: CTP_CleavageSite=5; ConfidenceScore=5.08e-01
MARARATAAPPTARPVALTPRQDWRRFRQEQRATLRLRRNNRAKKGTGKGGYPEKDPSP

SEQ ID NO: 60896 - protein, 757 aa, Zea mays
  Coding DNA Sequence Number=SeqID_17521
  Gene Ontology: Mol. function=2 iron, 2 sulfur cluster binding; Cellular component=peroxisome; Biological process=electron transport
  Homolog annotation: Hit_ID=O23887; Match level="QueryCoverage=100%, HitCoverage=55%, E-value=0.0, Identity=76%"; Hit description =Aldehyde oxidase
  Pfam annotation: Domain name=Ald_Xan_dh_C; Domain location=600-711; Score=164.8; E_value=2.2e-46; Accession=PF01315.13; Description =Aldehyde oxidase and xanthine dehydrogenase, ab hammerhead domain
  Pfam annotation: Domain name=CO_deh_flav_C; Domain location=420-533; Score=138.8; E_value=1.6e-38; Accession=PF03450.8; Description=CO dehydrogenase flavoprotein C-terminal domain
  Pfam annotation: Domain name=FAD_binding_5; Domain location=239-412; Score=187.5; E_value=3.3e-53; Accession=PF00941.12; Description=FAD binding domain in molybdopterin dehydrogenase
  Pfam annotation: Domain name=Fer2; Domain location=10-81; Score=39.8; E_value=9.9e-09; Accession=PF00111.18; Description=2Fe-2S iron-sulfur cluster binding domain
  Pfam annotation: Domain name=Fer2_2; Domain location=89-177; Score =167.8; E_value=2.8e-47; Accession=PF01799.11; Description=[2Fe-2S] binding domain
  Pfam module annotation: Pfam domain module=Ald_Xan_dh_C::CO_deh_flav _C::FAD_binding_5::Fer2::Fer2_2; Domain location=600-711::420 -533::239-412::10-81::89-177
MGKAPAAVVVAVNGQRYEATGVDPSTTLLEFLRTQTPVRGPKLGCGEGGCGACVVLISKYNPATDEATEFSASSCLTLLRSIDRCSVTTSEGIGNTKDGYHAVQQRLAGFHASQCGFCTPGICMSIFSALAKADKVASRPTPPTGFSKLTTSEAEKAVSGNLCRCTGYRPIVDACKSFAADVDLEDLGLNCFWRKGDEPATVSKLPGYSSAAVCTFPEFLKSEIKSSRENADGAAVAVSSDGWYHPQSIEELHRLFDSYWFDESSVKIVAANTGSGVYKDQDLYDKYIDIKGIPELSVINSSVKGIELGSVVSISTAIEVLSDGNLIFRKIADHLSKVASPFVRNTATIGGNIIMAQRLPFESDIATVLLAAGTTVTIQTASKRLCLTLEEFLQQSPCDSRTLLMSIFIPKWDSDGITFETFRAAPRPFGNAASYVNAALLARTSTDAASGKNIMEDICLVFGAYGADHAIRASKVEDFLKGKSLSSSVILKAVQLLKETVSPPEGTTHPEYRVSLAVSFLFTFLSSLTNSMNETAKVNVINGSLTNRTTNISGGYSLKENLEVDRNYLPIHSRQEMVFGDEYKPVGKPIKKVGAELQASGEAVYVDDIPVPKGCLYGAFIYSTRPHAHVKGINFKSSLASQKVITVITAKDIPRGGQNIGSSFPMLGEEVLFADQVVEFAGQNIGIVISETQRYAYMAAKQAVVEYSTENLQPPILTIQDAIQQSSYFQIPTFLSPKPVGDYNQGVSKADHTLSAE

SEQ ID NO: 60897 - protein, 165 aa, Zea mays
  Coding DNA Sequence Number=SeqID_17522
MDEQSANLEKRNRKKKKKRRLGCVQPRGCFGLVHRTVSGGAPDSVRCARLPRPKRPLSGFSPATSAKIHRTVRCAPDCPLHMDGRREWRAAPYVAWPWVRSFDAVAGPGHCGPGHIDQLSQQPEDSYVSRAAVPRHLLGRISCPRLELCAYTGSGHWPVMAGYVE

SEQ ID NO: 60898 - protein, 195 aa, Zea mays
  Coding DNA Sequence Number=SeqID_17523
MDAIQVKGSVHSRDAISPRPSPASDRNSRPRWIHASPEGLLKQRAHLRLARGPARAGFAVKQPWPDRHTNRPYRSSIQCKDRLTPYPDARSSVDRAEVTAVISPPLTDLTGKQRRLHCSDCCATRQGLGLNLDLRRRSPPRLTPGLGLNLDLGRRSPPRPTPGLGLSLDLEGVTALLDLGLGPTTSQGGTSLPYT

SEQ ID NO: 60899 - protein, 209 aa, Zea mays
  Coding DNA Sequence Number=SeqID_17524
  Subcellular localization annotation: CTP_CleavageSite=74; ConfidenceScore=5.61e-01
MTPPRSRLSPSPGVGRGGDRLPRSRLSPSPGVGRGGDRLPRSRLSPSPSVGRGGASYGARGWTWLLSASPWRVAQQSEQCRRHCFPAILALNAPAIRSVGVAIWPRLLHDEACPSWASGESKLYADGDYQSSLGVLGGVRQAVRGVVMVAARFAEGFAGLRIATVEGLRTGGYHSEVGGGRFATDMALTEVCGGGVSGGRAGGGRGSLQ

SEQ ID NO: 60900 - protein, 166 aa, Zea mays
  Coding DNA Sequence Number=SeqID_17525
  Gene Ontology: Mol. function=tryptophan-tRNA ligase activity; Cellular component=cytoplasm; Biological process=tRNA aminoacylation for protein translation
  Homolog annotation: Hit_ID=Q3EBU1; Match level="QueryCoverage=17%, HitCoverage=7%, E-value=5e-09, Identity=100%"; Hit description =Uncharacterized protein At2g25840.3
MAKRVVSGVQPTGSVHLGNYLGAIKNWVALQAHDVSSILNFSENCTLEFLTPYLDGIVNKLLVLLQTAPASARPTSRNPASANLRESHVRRKPPAPHLAVIPACPQTFDRRDPQARKSLRESRRDHHNATNRLPHALHDPWNPAAAPEQTLPQSVRRVPEQSRASR

SEQ ID NO: 60901 - protein, 227 aa, Zea mays
  Coding DNA Sequence Number=SeqID_17526
  Homolog annotation: Hit_ID=A3C4M6; Match level="QueryCoverage=50%, HitCoverage=20%, E-value=2e-18, Identity=48%"; Hit description =Putative uncharacterized protein
  Pfam annotation: Domain name=Nodulin-like; Domain location=90-203; Score=-104.1; E_value=7.9e-05; Accession=PF06813.4; Description =Nodulin-like
MGPHAIVGPTWPEAAESHSTGAVYYACTASLGGPDMQRQRSAFTVSPTVLTAPAATTSSRYHAPSPRKNRRNRTPRFPARRSRASATDPCRDSPPRRITCIRNFRWSRGPISGLLKGYVGLSTAIFIDTCFALFADDPASFLVMLAVVPAAVCALAMVFLREGTAAADEEDDGRCFARTAPSRRDRQRTVEGSDARLKWAAGPRRGRSGGWRAPWREPPPRSLVALA

SEQ ID NO: 60902 - protein, 192 aa, Zea mays
  Coding DNA Sequence Number=SeqID_17527
  Homolog annotation: Hit_ID=Q6AUY2; Match level="QueryCoverage=96%, HitCoverage=62%, E-value=1e-12, Identity=35%"; Hit description =Putative uncharacterized protein OSJNBa0004G03.14
MEKPFVSHCDMEMELVKMAMLRHEETFRQQVHELHRLYRVQKQLMGGLSRPSSELISCRRRQTRRRRQPRRRALDLQLHHHLPAVVIAPPPAEDAGLELTLAIGGGGRCRRRRQDEIETSTGTATTPLGSGSDISGGSLLTTAASSTDTGGGSPPYQRAVPAFRRLQEAAAAKQPPRSPWLVQCVSGGLEMA

SEQ ID NO: 60903 - protein, 253 aa, Zea mays
  Coding DNA Sequence Number=SeqID_17528
  Homolog annotation: Hit_ID=Q6J9V9; Match level="QueryCoverage=47%, HitCoverage=32%, E-value=4e-18, Identity=50%"; Hit description =Putative uncharacterized protein
MQVACNCTTRMHPFDFDASSMEAQAHTSCNRRAGYYVRKTALSLTPILRLLDCGTGAVTQGDPAHSPTVPTRRIGHGSVSRGRRRDDRYGQKWADSNGGSRRAEAAVKSSAGSRPLLGQQESPLPRDRERGTPKGILLCEGSGPRALLLIRGLKAGPSEGFDSRLRALGLRAHYWSEVRRLAPRKGSTAASGHSGSMPTTDQGFEGWPPEGFYSRLRTRRARDDSGYVRYMVEARATLPRYPGTFPRPAGAIL

SEQ ID NO: 60904 - protein, 314 aa, Zea mays
  Coding DNA Sequence Number=SeqID_17529
MVGRSKPGCSLCPALSFKDLHHPCWGGGRAEPELYLPYGPAGHLPLQHSGERALIGLVEGVDFDNAGPIGRRHRQLQHAWFAGSAGSGTASGATSHRWAECGYLPAVRAAIAPRASGDRPRRRSLLGRRSCSWAVLPLLRHDASVRRPVLARLGGIEWGSVGGQVATVVGAEVVAAGEVFVADEIVGAICGPTSGSLALIACPRPSSGDVGEGLVATTSASRSSLLLFGRPEQRSLSLLQEWAAASHLEFVIPHALQCGGLFVPAEWNWSSVCNGTLSAGVCSLWLSGPAHLGILGVIPCFFLISNTRTRLLAS

SEQ ID NO: 60905 - protein, 95 aa, Zea mays
  Coding DNA Sequence Number=SeqID_17530
  Subcellular localization annotation: CTP_CleavageSite=18; ConfidenceScore=5.37e-01
MAAVCDRSLARPAWRCLLAGMLRGSGPNGPRLGNRSGFFPALSVRSALWAGRSVMAQGRLLLLVGPISSLGETLGCSGSADNPGRPPYDVELPKG

SEQ ID NO: 60906 - protein, 192 aa, Zea mays
  Coding DNA Sequence Number=SeqID_17531
MEQRPGLERLLETTHLVLDGKLFVNTQQSPTWRANCRRFDPGVSLDRRVNCRCMSQPRWVGARRNTRGKTRGRSEPKVGRGGDSSEVEVESKPRGRARRRPSSEVEVESEPWGRARRRPSSGVEVEAEPWGRARRSFLWRPRLDLAAVSLTLAGGTAVGAGQAALFSCQVSQWRGEVTAVTSALSTGERASG

SEQ ID NO: 60907 - protein, 266 aa, Zea mays
  Coding DNA Sequence Number=SeqID_17532
  Gene Ontology: Mol. function=DNA binding; Cellular component=nucleus; Biological process=regulation of transcription
  Homolog annotation: Hit_ID=Q6YYW1; Match level="QueryCoverage=35%, HitCoverage=13%, E-value=2e-23, Identity=59%"; Hit description =Putative NAC2 protein
  Pfam annotation: Domain name=NAM; Domain location=131-260; Score =85.6; E_value=1.6e-22; Accession=PF02365.6; Description=No apical meristem (NAM) protein
MENTDMVVIPTFRAVVRSDHGAMSHRGGDVAPPQPNRHPVFELTQQARHKRRSWWPFVTDRGEEKQYVGPRDSYGTQLRPSGKTLAHLPRQMKTLISSTPAASSAPAPCSPPPAATTALRPPPLASLHRPAPPLVDRPSPTDEELVSYYLRRRVLGHRLRVDAIAEIDLYRLEPWDLPSLSRIHSRDAQWYFFARLDRKVAGAGAGGRGGPGNMTNRATPRGYWKTTGKDREVHRRDKPVRQLGNRLLPWTRSSKTRDLEPEPRWR

SEQ ID NO: 60908 - protein, 26 aa, Zea mays
  Coding DNA Sequence Number=SeqID_17533
MLVVDVALRAGPFGEMSRLVWTTPCD

SEQ ID NO: 60909 - protein, 267 aa, Zea mays
  Coding DNA Sequence Number=SeqID_17534
MMTTSSVVGRSKPGCSLCPALSFKDLHHLSWRGGRGRSGPASAWAGDPLLRPEFGGEGHPPALWRRRPPAMRGKANYCCLARVQHSVLRPGDCGRLHRGSHNTSYAMRVILVFWDGPVLILVVRTGVRTCRCALGRPPLAGAVLVGRWPLSSVLRWWLPLERLPIASVAASAGETVSASCAPGLRHFGFNGWFSSPVRGRERGPFSNSVCHEAVAAAVLPPETEVVAALLVQRSPASHPEFVVPRPSGVEVVHTRGSGTGVPFVMAP

SEQ ID NO: 60910 - protein, 158 aa, Zea mays
  Coding DNA Sequence Number=SeqID_17535
MRCQVHLTETRDGTVAWIGSGCQRGTFTADDTSAVIHAVAGPTCARDGQIRAHEREEEIEVTEEETPPPSESQTGNCFYFDICRSEPDSPVNEGKPRRADRGPFNWSHASSWHTLESLFLSRVRKRKIFVAFAPRWYQMRKNKTEVREDLVLHIGSFA

SEQ ID NO: 60911 - protein, 396 aa, Zea mays
  Coding DNA Sequence Number=SeqID_17536
  Homolog annotation: Hit_ID=Q6QP51; Match level="QueryCoverage=30%, HitCoverage=67%, E-value=4e-30, Identity=55%"; Hit description =Putative growth-regulating factor 1
MKILEAERWLKGANPREVALLQQQQDEGNAGGSPHSHPKRREQSLHRRAPGSSPYDTGAGSPTSCKLTRNGRSQTTAHRACNRPAVTSTPPSSPKPAVERADRHAGGVQPHHSCAPFRLHRFRWVSVKARAHMSCNRRNGYSVQGNHTATHANAASSRLRNQYRDSRQPCAWLNSANRAQRSRAKRASFCLCHDDRVKKAAPEHSGSKLITDQGFKGWPLGRVRQPPQSTRALRPLLIRGSKAGPSKGFDSCPRARRARDDPGYVCYMAEARATLQSGHTLGTPEAQLKQASSRSNLGQITSPTDPSGATGNSASPGLNLGLGRWSPPRPTPGLGLNLGLGRWSPPRPTPGLGLNLGLGRNRVLADPGLGIRRSLCLARPWARTNRATGDTSLPYP

SEQ ID NO: 60912 - protein, 62 aa, Zea mays
  Coding DNA Sequence Number=SeqID_17537
MEEEGQGTPWEELEKFWAPSMNQRKDGVGCCHVGEEDREKKKVTARGGSAKQPRARERDPYL

SEQ ID NO: 60913 - protein, 156 aa, Zea mays
  Coding DNA Sequence Number=SeqID_17538
MMVLVSVVTTSFTILLLFSLPLCLHFCTTPFSAEDVGADASSPYSSDTSLDTDSRSDYCMSTRTFHIMRAPSFSPSSDVPFIFPAFILFFLPNLLPPPTAAAASRPTLVDAGTGRVGHAPGLSLCVPSRRTWRRLPRLGYLGDEEPRSEILDNQDP

SEQ ID NO: 60914 - protein, 559 aa, Zea mays
  Coding DNA Sequence Number=SeqID_17539
  Gene Ontology: Mol. function=protein dimerization activity; Cellular component=nucleus; Biological process=regulation of transcription, DNA-dependent
  Homolog annotation: Hit_ID=Q10PC3; Match level="QueryCoverage=67%, HitCoverage=95%, E-value=1e-108, Identity=55%"; Hit description =Transcription factor HBP-1a, putative, expressed
  Pfam annotation: Domain name=MFMR; Domain location=1-237; Score =246.2; E_value=7.1e-71; Accession=PF07777.2; Description=G-box binding protein MFMR
  Pfam annotation: Domain name=bZIP_1; Domain location=313-376; Score =83.0; E_value=9.7e-22; Accession=PF00170.12; Description=bZIP transcription factor
  Pfam annotation: Domain name=bZIP_2; Domain location=313-367; Score =32.9; E_value=1.2e-06; Accession=PF07716.6; Description=Basic region leucine zipper
  Pfam module annotation: Pfam domain module=MFMR::bZIP_1::bZIP_2; Domain location=1-237::313-376::313-367
MGKGDVATRSKSQKSPAIQNEQSTPANPPTAYPDWSQFQAYYNAAGTAPVTPPFFHPSVAPSHQGHPYMWGPQKAATTVPTEKSPNPVLPSLTGRVKAAYSAKAHLGLRVAHNRAMMSPYGTPPPYAAMYAQGTPYQQAPMPPGSHPYSPYPMQLPNGTVQTPTSGAGGTATDKSNKNKRKASLKRSKGSLGSLDVVAVKNNKSPAKPSTSSSNEGSSQSMQIECVRGAIWNTLQLVLSVYMGSRVKDNSEQGQGNAQNIRYNSYVLLSHQMLGVNVLKALSLSPHNHLQAPTSAPSSNSRDIVLSDPTIQDGRELKRQKRKQSNRESARRSRLRKQAEWEEVANRADLLKQENSSLKEELKQLQEKCDGLTSENTSLHVLADVDATKLQRHIQQPTSMAGAWHKRPCRLRCGLLQRVAEQSSSGPFSGGAGHFGRGVFGNGCAQWAELVMGAVLGGTRLTLEGDEVSARLGAVLGHGQRFSTMLGVSKRGKMGNGWRYRMGRGTPPIIGTEDKGEEGLMVGPNLSLSSVVAKTTETSIKGEKLKALEDEKSNGNWYKD

SEQ ID NO: 60915 - protein, 163 aa, Zea mays
  Coding DNA Sequence Number=SeqID_17540
MGKGTKRKREPTPPSDDFGDSEYSEEEFSSESEGSPAPVSPLASSDDSDDSQGIAAEVWTYIRVVERSGLEGSDESEFSSDEEDSDGGEDEDDDDDDGDDDDGGDGDDDDGGDGDGDDSNGGGGSGGKGSTRGGSSTGSTRGDSSKGSTRDGGGKGSSSKASG

SEQ ID NO: 60916 - protein, 334 aa, Zea mays
  Coding DNA Sequence Number=SeqID_17541
  Gene Ontology: Mol. function=P-P-bond-hydrolysis-driven protein transmembrane transporter activity; Cellular component=chloroplast outer membrane; Biological process=intracellular protein transport
  Homolog annotation: Hit_ID=Q10PB3; Match level="QueryCoverage=99%, HitCoverage=99%, E-value=1e-157, Identity=83%"; Hit description =Translocase of chloroplast 34, putative, expressed
  Pfam annotation: Domain name=AIG1; Domain location=38-223; Score =130.2; E_value=6.1e-36; Accession=PF04548.7; Description=AIG1 family
  Pfam annotation: Domain name=MMR_HSR1; Domain location=38-163; Score =32.8; E_value=1.1e-06; Accession=PF01926.14; Description=GTPase of unknown function
  Pfam module annotation: Pfam domain module=AIG1::MMR_HSR1; Domain location=38-223::38-163
MASPIPREWVGLQQFPAATQTKLHELLGKLKEEDVSTLTILVMGKGGVGKSSTVNSIVGERVASVSAFQSEGLRPMMCSRTRAGFTLNIIDTPGLIEGGYINEQAVDIIKRFLLGKTIDVLLYVDRLDAYRMDTLDEQVIRAITNSFGKDIWRRSLVVLTHAQLSPPDGIDYNDFFTRRSEALLRYIHSGAGINKREYGFSEKYYQEDFPLPIALVENSGRCKTNEHGEKILPDGTLWVPNLMKEITVVISNGSSPTHVDQKLIDGPNPNNRRKLFIPLILAVEYFLVVKGIRRAIHADIANGKVDDWEQRYRDLVGSRDLVEQKGSTSRNRKA

SEQ ID NO: 60917 - protein, 281 aa, Zea mays
  Coding DNA Sequence Number=SeqID_17542
MQATCNRTKGAHPFDSDASSMGAQAHTSCNQRAGYYVREAAPPLAPIPRLLDCGTSAATRGDPVHGPTVPTEHIDHGSVSRGRRRERDRERGYSERDPSPRRKQAPSPPTDQRFEGWPLGRGNSAAYPTPTAVPLDRVRLIAAKSSLGRHGKLRLARPRARTQPRPRKTNSASPDPRARTQPRPWKTNSASPDPGLGFSLGLGRRTPPRPTPGLGLSLDLGRRTPPRPTPGLRLSLDIGRRTPPRLALGPRLDLDLGGASALPDLGLGPATSQGRPSLPYP

SEQ ID NO: 60918 - protein, 99 aa, Zea mays
  Coding DNA Sequence Number=SeqID_17543
MGKNRKAKEILLVGLSPEGRRPRHAGMRSRSEVVATGYTGWRLPGTQTFERGGTSSGCVHRLEATSSAAAAKINPPAPLPSREAQSSECGGTSSGCVRR

SEQ ID NO: 60919 - protein, 85 aa, Zea mays
  Coding DNA Sequence Number=SeqID_17544
MVAARFAEGFAGLRIATVEGLRTGGYHSEAGGGRFAADMALTELRHCISELTDASSRIGSTTCLQRVVLETHLHKPQKNLFRFGA

SEQ ID NO: 60920 - protein, 111 aa, Zea mays
  Coding DNA Sequence Number=SeqID_17545
MATGSGAQGIPWDQEWLVACQDDDATSDAAASGSRDGDSGDSGASLRFGGEAQWVDAGGDSGARTWVRCGVDSSGGVDVLQRLCGRCVGGCGCGGRLNVCRGSKVRARAGC

SEQ ID NO: 60921 - protein, 187 aa, Zea mays
  Coding DNA Sequence Number=SeqID_17546
  Gene Ontology: Mol. function=phosphatidylserine decarboxylase activity; Biological process=phospholipid biosynthetic process
  Homolog annotation: Hit_ID=Q5JN42; Match level="QueryCoverage=74%, HitCoverage=23%, E-value=7e-56, Identity=77%"; Hit description =Phosphatidylserine decarboxylase-like
  Pfam annotation: Domain name=efhand; Domain location=29-57; Score =9.3; E_value=1.9; Accession=PF00036.23; Description=EF hand
  Pfam annotation: Domain name=efhand; Domain location=65-93; Score =29.8; E_value=1e-05; Accession=PF00036.23; Description=EF hand
  Pfam module annotation: Pfam domain module=efhand::efhand; Domain location=29-57::65-93
MLLHAFDSGSRQFLFACIVFISLCSTLQEITFLTLQWDYDEDGTLSLLEFSDLMKAFGNKLAVAKIEELFRQADTNSDGIVDIDELAALLAAQQEEEPLISNCHVHGEDLGKYDNINDMVHMTLCLDEGTGNQIMTGGFLTDKHASYGWMFKLSEWAHFSTYDVGLYSGSTTSHILVCSVTPYGTLT

SEQ ID NO: 60922 - protein, 232 aa, Zea mays
  Coding DNA Sequence Number=SeqID_17547
  Gene Ontology: Mol. function=nucleoside-triphosphatase activity; Cellular component=endoplasmic reticulum; Biological process=cell division
  Homolog annotation: Hit_ID=Q6SKR1; Match level="QueryCoverage=30%, HitCoverage=11%, E-value=4e-27, Identity=85%"; Hit description=Cell division cycle protein 48
MVMGIGVEKTLMEVILCIREDMYIIDLEDETIDAEILNLMAVTNDHFKTALGTSNPSALHETVVEVPNVSWEDIGGLENVKRELQENSSTRMTVSLLVVAIVFYIKDNISHDSDLYDILSMVSLVGVMNICTYLVYRIGEPSDLTQVTLVSKLYSSLGALKFLITNHVFTRYGLQKLFGLDCLALTSDQTPIYPDLPSNMKSRCWRKWLRSEKYLAEPRNTNRKKLYTCDSV

SEQ ID NO: 60923 - protein, 124 aa, Zea mays
  Coding DNA Sequence Number=SeqID_17548
MAVMDSTSEKMYLCQDLVDVGLLTEDPLTGHMPRHGQVLADPTGSQGQPCPSIVGDAVLDVLSQMTCFSGRCSACPLLPDILPELHKLSCFLIEPGLHLADLLELPRRIAVLWHTKMVAFVETP

SEQ ID NO: 60924 - protein, 305 aa, Zea mays
  Coding DNA Sequence Number=SeqID_17549
MKSRMALGLPSPEKSQPESGSSSSSEPGGPYKANAQQVLRERAGVVRLLGVGVLRGNDARLRLRREVNARRVTRWGTGVVDSLDSQRGATSCLAMVAPPPPPSAGKVTGQTRMLLFRHARKTSSIPPPAGRLKAAIVVVARRRKEYHVVAAVEGHELKTPETEHRPRLERLLETTHLELDGKLFVNTQQAPTWRANCRRFDPGGGCACSRGLQAFVRERERESLSVSPSSRAATSSYEGPGPSFYRRKEKAQAILALNAPAIQSVGEAIWPRLLLREACPSWASGESKLCADGGYQPSLGVLGYP

SEQ ID NO: 60925 - protein, 283 aa, Zea mays
  Coding DNA Sequence Number=SeqID_17550
  Gene Ontology: Mol. function=glutathione transferase activity; Cellular component=cytoplasm; Biological process=auxin mediated signaling pathway
  Homolog annotation: Hit_ID=Q9ZP60; Match level="QueryCoverage=79%, HitCoverage=100%, E-value=1e-100, Identity=77%"; Hit description =GST7 protein
  Pfam annotation: Domain name=GST_C; Domain location=153-250; Score =49.9; E_value=8.9e-12; Accession=PF00043.16; Description=Glutathione S-transferase, C-terminal domain
  Pfam annotation: Domain name=GST_N; Domain location=60-133; Score =71.7; E_value=2.4e-18; Accession=PF02798.11; Description=Glutathione S-transferase, N-terminal domain
  Pfam module annotation: Pfam domain module=GST_C::GST_N; Domain location=153-250::60-133
MPTHGFAEVTAYTVPVIWFMMIVPDLCKLLQEKQQAAAAATLQQQAGRAQNQAASRNMSPPVKIIGHFTSPFSHRVEAALRLKGVPYELVQEDLSNKSELLLAKNPVHKKVPVLLHGDRAICESLAIVQYVDEAFDGPPLLPADPHDRAVARFWADFMDKLVVPFWMAHWAEGEAQKALVEEAKQKLALLEVQLQGKRFFGGDTLGYVDIAAGVLGPWLSMVEEVTGVAVLDEDEYPALRRWSEEYNSYEALRQCVPDRDQLVAFYTENKDKYKMFAKAWLKQ

SEQ ID NO: 60926 - protein, 46 aa, Zea mays
  Coding DNA Sequence Number=SeqID_17551
MAVMGSTSEKMYLCQVRKQQTFVVSVPRWFQKKKSKSKAAGGRVPP

SEQ ID NO: 60927 - protein, 150 aa, Zea mays
  Coding DNA Sequence Number=SeqID_17552
MAGCSTPLSFELELSSARFSYHTNHGGRQISSHPDSCQRRALRCWLRTSPGHQGGAQGRAKSGGWLVEVEFLARVTRHRYGPPRVVGSPPVLANLGEDPTASLYLVFISCSSSYLKLDYCVDRAESRLWRSTVGRYRRRRCLGERRACVG

SEQ ID NO: 60928 - protein, 165 aa, Zea mays
  Coding DNA Sequence Number=SeqID_17553
MAGCSTPLSFELELSSARFSYHTNHGGRQICSHPDSRQRRALRCWLRTSPGHQGGAQGRAKSGGWLVEVEFLARFTGHRYGPPRVVGSPPVLANLGEDPTTSLYLVFISCSSSYLKLDYCVDRAESRLWRSAVGRYRRRRCLGGAPGVCGVEEKGLAVDLRSWGH

SEQ ID NO: 60929 - protein, 145 aa, Zea mays
  Coding DNA Sequence Number=SeqID_17554
  Homolog annotation: Hit_ID=Q6K5U3; Match level="QueryCoverage=28%, HitCoverage=32%, E-value=4e-10, Identity=75%"; Hit description =Putative uncharacterized protein P0477B05.16
  Subcellular localization annotation: CTP_CleavageSite=92; ConfidenceScore=5.31e-01
MARGRSQKNKKTTPKENNEDSAVDKLMPSPNASTYTHGSNLRSVSSLPPRSGFGSSAGALPHPLSMGNIAHLATEGSSGREEGFAMKTCLCRAAEVEMHKSKGNLSGILHKGFKPDKCKTPLWMAVAWIKLMRNRKEENGLLDLQ

SEQ ID NO: 60930 - protein, 116 aa, Zea mays
  Coding DNA Sequence Number=SeqID_17555
  Gene Ontology: Mol. function=glutathione transferase activity
  Homolog annotation: Hit_ID=A2WZ31; Match level="QueryCoverage=88%, HitCoverage=41%, E-value=1e-21, Identity=52%"; Hit description =Putative uncharacterized protein
  Pfam annotation: Domain name=GST_C; Domain location=2-98; Score=3.0; E_value=0.053; Accession=PF00043.16; Description=Glutathione S -transferase, C-terminal domain
CLKSLWLALWTEGEAQEAAMKLARENLALLEEQLQLNGKKKNNRFLGGDSIGLADIAGAGVLAHWLGVLEEVAGVSVVGGDGEYPAVRRWGREYLADEAVRACQPSGTSSWPTSTP

SEQ ID NO: 60931 - protein, 409 aa, Zea mays
  Coding DNA Sequence Number=SeqID_17556
  Homolog annotation: Hit_ID=Q6JAD6; Match level="QueryCoverage=60%, HitCoverage=34%, E-value=4e-99, Identity=74%"; Hit description =Putative uncharacterized protein
MNCSVSGAPVWARLPSARAARAFNALQRDSAAVDLFSTWIQESFLRAQMSAQIALRVHRLLDLPAFLLAAGADSEVHLSYLLGLLTLLTTSGRYVEEWVRVFYATVWIDPDHHWMRFRFEQEDVTIHASQIRQLFGFHESSTRLHSLCYGTYDPPRRPHGGVAPGTAHIAALFRPPFSDGSRRSPVDFTTATKFLFQLMRQTLLPRMGYREATTHIQLWLLGALVSHSEFDVVDSLICEIEDTVLDAQAQHPLPPLTCSASVAQQRQRPSFRCGLARAQPPPCTGPTSSASGPALAHAARPTALAIVFNCCLNFLLLPPAAMKPEIAIASPELLVASPDRRLLIAAAQPGHRRVAAPAQAHCCWRRGLAQPPQPGRTPLWNRRSSFGDQMIQLFEFYKAEDLEHLFGEG

SEQ ID NO: 60932 - protein, 127 aa, Zea mays
  Coding DNA Sequence Number=SeqID_17557
  Subcellular localization annotation: CTP_CleavageSite=43; ConfidenceScore=5.69e-01
MRFRVLQFHIMRAPSFSPSPDVPFVFPTFVLFFLPNLLPPLTVAATSRPTLVDAGTGRVGHAPGLSLCVPSRRTWWRLLRLGYLGDEESSGILPMSPPDVQVFVMSFSGNEQFVGIIVSHRNAQATD

SEQ ID NO: 60933 - protein, 98 aa, Zea mays
  Coding DNA Sequence Number=SeqID_17558
  Subcellular localization annotation: CTP_CleavageSite=54; ConfidenceScore=5.08e-01
MASHCPLSWLSSRWLWRVGPLVRSRSDPLVFLSAPTPLCLGGKLRRVPTELLVVWAEGEDHWVTGISPPRNRICSAPWADYLGASIAGENAFSNLAMA

SEQ ID NO: 60934 - protein, 266 aa, Zea mays
  Coding DNA Sequence Number=SeqID_17559
MWNGKRAVFLLNDVFKKCMMKGIHPHHLSLNLNSYGPNPKVMKAREHQEDKEGESFVWFGHGGGLTPSGITVKTLLFFYQIEGSLVIRTSYCSEVEGFPHLLWSCVLRMGIRKKSKYVWKEYRENGTEKGSMQQKYPCLEENTSGLSGRDPTEYDPTIVYMAGYLHTLDNHYDDLSSHCTHLNSWVESLEQQVKELKKEKASLQESLEMAEGEEANTREAYQTLKMDYDKKLKKLAPTKKIRKKTRAKDARLSGRGKPLQLYLPPG

SEQ ID NO: 60935 - protein, 445 aa, Zea mays
  Coding DNA Sequence Number=SeqID_17560
  Gene Ontology: Mol. function=transcription factor activity; Cellular component=nucleus; Biological process=regulation of transcription, DNA-dependent
  Homolog annotation: Hit_ID=A3ATE9; Match level="QueryCoverage=29%, HitCoverage=54%, E-value=6e-34, Identity=59%"; Hit description =Putative uncharacterized protein
  Pfam annotation: Domain name=AP2; Domain location=217-268; Score =80.9; E_value=4.2e-21; Accession=PF00847.11; Description=AP2 domain
  Subcellular localization annotation: CTP_CleavageSite=76; ConfidenceScore=5.51e-01
MRISLRVLISSELGTSLCTAAPSLARASVRKSKSSALSLTHARIDRSSSTHRRRRQINGQLTKVDPRRRHGKRPLPADEEEEEEEELPPPPAKYEQLDQEEKHHVVVSQLQAGATFSGGRGSSSSSVAGPSPEAYAQYYYSARADHDASAVASALAHVIRASPDQLPPQQAACLYGAAGAPVLRQGEGDHPQPQAAAHHHPGGHVAAEEEQGAGLRRHYRGVRQRPWGKWAAEIRDPKKAARVWLGTFDTAEDAAIAYDEAALRFKGTKAKLNFPERVQGRTDLGFVVTRGIPDHHRHPRAAAVNLAAMPQAQAQPHLQHGRPTVMPYPYPYPDLMQYAQLLQGGRGGGDHAAAVQQQLMMMGGRGGNLPFSFSPPSSWSAPPQILDFSARQLITQPGPPSSPAAPGGAAPSTPSSTTTASSPSASASGSAWPYGGEHHRNKKDA

SEQ ID NO: 60936 - protein, 151 aa, Zea mays
  Coding DNA Sequence Number=SeqID_17561
MRRGRRGRSWPRRTDGKHKRALSPPSEDFGDSEYSEEASSESDRSPAPASPPASSEDLGDSMGLSTMARAYWRSIERAGLGGSDESGVSSDEADSSDSSEEWSGDDGEDEGDGSSDDNGEGDGNDGDGDDSDDDGDGGDGGDKGDGGDGSS

SEQ ID NO: 60937 - protein, 153 aa, Zea mays
  Coding DNA Sequence Number=SeqID_17562
MGKNNKRKREPTPPSEDFGDSKYSEEEFSSESEVSPAPVSPPASSDDSEDSQGIAAEVWTYIRAVERSGLEGSDESEYSSDEEDSDDGGEDEDDDDDDDDGGADDGDGDGDSSGRGGNGGSRGGNGGSGSGNGGSSRGSGGGGSSKGSNKASG

SEQ ID NO: 60938 - protein, 159 aa, Zea mays
  Coding DNA Sequence Number=SeqID_17563
MQAACNRTKGAHPFDFDASSMEAQAHTSCGWKQQSSRQQAHASSWDSERTLSHGVKTTRPCSVPQTARARTTAAPRTTRPVALTLRQDRRHLWQAKQATLHLRHNDRVKKGTGKGDTPKGILLREGSGPRALLLIRGSKAGPSEGFNSRLRALRLRAYY

SEQ ID NO: 60939 - protein, 315 aa, Zea mays
  Coding DNA Sequence Number=SeqID_17564
  Subcellular localization annotation: CTP_CleavageSite=41; ConfidenceScore=5.63e-01
MSSHSPHASRPSTFRALGWGALALLSSCRRWRNATSRKLVPFSHRSTSRIFIRQPGCIPSPVVTQDGDHQFEGGEKQAGLRPLPLPQLQGCSSSVLGMGVHRVGACLRAGSGLLLPSVIGGKGVRRSWRWQLPRVWLSGLSGFGAASGATSHRGSRKRFLRRQDSRSHPRTDLQLYGLGSLSSPLEWGRGRGTCRSSVYPEVIAAAVWPPGAEVVVAAGLGGRRNPRPLFDEPGPEAAVSAQTEAELARKRKLRRPGLGRVVHWRDQRLSRVVEATSRAGVLGGQLAEASGWPAEPSARAGFLEETLAAMARAWC

SEQ ID NO: 60940 - protein, 68 aa, Zea mays
  Coding DNA Sequence Number=SeqID_17565
MSTYVLLVLDRYVTKCPFPHLYLCCPDHRRLAIDVEGIAMPMRALTGRLAARVSSLFLALVPGYISHH

SEQ ID NO: 60941 - protein, 108 aa, Zea mays
  Coding DNA Sequence Number=SeqID_17566
MDKTVHAGQILMRRPDVVGTVVTLNNVKASVPCWLKGIFRLKPIALLVGRSGQPKWSNDEDITCNMSTTTPAAPPHQVPHPLLAGPITRARARDLNFVMLLKNEGPEE

SEQ ID NO: 60942 - protein, 68 aa, Zea mays
  Coding DNA Sequence Number=SeqID_17567
MDVLMIRYLGEDQQGLGKGQGPKNQMDKDKGPKLNDDECVSQMELKEMMRAMTEAFKKYQDSVATSYE

SEQ ID NO: 60943 - protein, 39 aa, Zea mays
  Coding DNA Sequence Number=SeqID_17568
MVVGAAVLTSVKDEQATVESEVQQVEVAEQELIEGKLCP

SEQ ID NO: 60944 - protein, 176 aa, Zea mays
  Coding DNA Sequence Number=SeqID_17569
MVVFAQNTLSVARFRMIGDTTSRRYERRGGLSIYPAVTPTLERISPKLRGFGNDAQQRRARDEDREATEDGLWDPVHRRFRHGKLGREGIRDGFPSGSCASDIHGGRWGRRPGCRLDGPTWQRHMRTRRSRAVELARGARGAVKGGACGVSDRRARLVSGSSEPCTRCWRSWLRRG

SEQ ID NO: 60945 - protein, 138 aa, Zea mays
  Coding DNA Sequence Number=SeqID_17570
MTEGELRAGRGNSGEESRSGRGDLGHAKAGTSYNRVSGEVEQRGQSARERELARNGTGERVWVWVGLKRELGTSRGGVQRVATVDDELDGALDFANGGRRRSFHARRRKSRNDGIDGGALVVLRLEKEVPRHAHESVE

SEQ ID NO: 60946 - protein, 166 aa, Zea mays
  Coding DNA Sequence Number=SeqID_17571
MAPVLLHGGTKFQWWRRGGWLTAKQEAGIGLKGPLYAVGSINPVPRWPRKEVGRAREASRGPRRRAGSGGASSGELRRTPTTNDELRQQRQARECEEMRVSSGRRGRERFGEAETEKGVRARATDADNPAPLGRERERESVRGKKSPLTGGTHLSGGAGARPGWAD

SEQ ID NO: 60947 - protein, 37 aa, Zea mays
  Coding DNA Sequence Number=SeqID_17572
MGTNRDIGVNRSAKVTGDELPIQPEDGTLRGLVWEEV

SEQ ID NO: 60948 - protein, 194 aa, Zea mays
  Coding DNA Sequence Number=SeqID_17573
  Subcellular localization annotation: CTP_CleavageSite=51; ConfidenceScore=5.58e-01
MAPRNSSSLHGRPPLLCARAPLFPCSMPTPPAPSPSRSSSRVFFLPLLSTVCSKQGAQLHLSPWHPYFPVGSLESEQAQQEHSPMTPSSSSPRLSSQAQPSPMALCSRCHGASPPCLATRLPPSVCAAAPAQLMLAMCLTKCTTSHASSIPQSSTVLRLASSSNFAVALPHDQHPHSSPRPLSPPLHSANVVPA

SEQ ID NO: 60949 - protein, 143 aa, Zea mays
  Coding DNA Sequence Number=SeqID_17574
MCGSPSGMVGVGRSACAGGGARRRRGVRPIQGTIDQSIGSESFTRYQGRSEDLENFRANGEANRSAGVTWGDWSGLATVAEALAAMAGEKKLAGAKEGCLAGDGAGEHGRGRGSGKRSGVWHNVDHEATQREVEFKRGLAPNL

SEQ ID NO: 60950 - protein, 47 aa, Zea mays
  Coding DNA Sequence Number=SeqID_17575
MVNLVAMLNTELNHSLDELGKHPYRSPPSGRFDYGTPDCRTRIDLDP

SEQ ID NO: 60951 - protein, 139 aa, Zea mays
  Coding DNA Sequence Number=SeqID_17576
  Subcellular localization annotation: CTP_CleavageSite=57; ConfidenceScore=5.27e-01
MLVDYTTILDRPGVSVKGPTQQGTKRVVEVTPASGVTSDVSSDPPLWLRLRLLRALRAVARTATSIVIISVSVGVSSSSRDALWLCRGHLWLRFRGRRPLRLHLPLRRGGRVLLLLLLASALLLLVQATMQSLQLAGLT

SEQ ID NO: 60952 - protein, 82 aa, Zea mays
  Coding DNA Sequence Number=SeqID_17577
MAMTLVRETGATAQHGYDDVEQAWQSTHEQKQESKEKAPGTRRLTISDWEVSKAREIDNARRAGWMLGQRAEHKWTGGSQYE

SEQ ID NO: 60953 - protein, 221 aa, Zea mays
  Coding DNA Sequence Number=SeqID_17578
MDRELGGHGREGAPCMLPCGRRSTGCCHEEEETGKKGSRARRRRMLRFAHSGRAQSKCSGSFTGGQRCHRCKELKSGSPCNSVYARRRSDEVRRWQSGTSGEMVFGLRAREALRGHGNASRGVGLDGGGPEWPVHGGRARAAAGTPCAGRTLANSCSGRAESERGSTVVALGGYIGTGAGVVAGSGIVRRGRMGPSAGACSGVPEQVEHGVPWVFGRPFVN

SEQ ID NO: 60954 - protein, 179 aa, Zea mays
  Coding DNA Sequence Number=SeqID_17579
MSSSLSKKANFFGHVRDRSHGKSDVERICKEVFEDLSNKNTGLLDINSLHPRPRPYLLARSQVLPEPKFTGLRLEHAAPLLSITTRASATVASSLQSLPGRVSHSDSFAIIPWNFPSSRTRQNFTGDPRSSLPDFGRPWPRVNRAIRPTPTTAADDPYLDVIARDSRTSPDPSPEQPRH

SEQ ID NO: 60955 - protein, 71 aa, Zea mays
  Coding DNA Sequence Number=SeqID_17580
MVDLAGTAEGIDESARGGVGDRAPGQGRGEAGALWRCLLVRPLGAGVTLGFGSGKVLSYIKISETSIESIT

SEQ ID NO: 60956 - protein, 86 aa, Zea mays
  Coding DNA Sequence Number=SeqID_17581
MANYRDMSLPAVGEGYGCPQKMSARRCFCERRWRGPGAQRGDAGDDVHSTRNAAGATRVEEPGHTPPGSRAPSLAHGRTSVNGGGR

SEQ ID NO: 60957 - protein, 168 aa, Zea mays
  Coding DNA Sequence Number=SeqID_17582
MRACDDPLAEARRLGGHWGGSRLVLSGAGSGISAAAGLPEQRGSAEDANDGRPATGDAVREEASLDNGGRQWRHDREPARRRVPAAAAICGGVVASPHATWPREARMLEPAGPAKDTVAAEEMERRGSGLEGWRLPRRRSASGLDVADAHIMGFTVHHLHPQRRTNLL

SEQ ID NO: 60958 - protein, 250 aa, Zea mays
  Coding DNA Sequence Number=SeqID_17583
TGSKLDENPRRQPLGEDISELQRGRDAQNPNVIGGDTLANEVQVDLHMLRALMMHGIGGDVDCPDVVAVDKGGTLKGVVELLKKLALARRPRPRCWPQRGTRPPHWSRRRRAATWRPGDEVSAQEHDITGSGPARVGTYNPVSVDAPVGRRVDDRGPVVLRELRLSVDRCGAGLVVRHASPLQDVNGVLALVEEETLSPALRCDAMAEEVGGCREHNVVDIEQEVDGVVVAPVDEQGCVRLGLVEADGGQ

SEQ ID NO: 60959 - protein, 341 aa, Zea mays
  Coding DNA Sequence Number=SeqID_17584
  Gene Ontology: Mol. function=sequence-specific DNA binding; Cellular component=nucleus; Biological process=regulation of transcription, DNA-dependent
  Homolog annotation: Hit_ID=A2Y7M6; Match level="QueryCoverage=94%, HitCoverage=24%, E-value=3e-51, Identity=39%"; Hit description =Putative uncharacterized protein
MTTEQRLELQQRIMDVGEKGKIPFKDCVRIARELNLSVEQVLRLSYERQSRLHEQPSFTSKQKQQRVGSGLTPVRRKRRADGTSLKLLKRTVQASGSAEQILEQPIVDEEVPMISRYLEKERSLKRRRLFPQISNRSQENSLDSDCEQFNWDDFEVPEIKSALNEVLELIQTEKIDQAKRIGPVNQKNINNDNDVTKDTICSQELPNNQAILGETKTSAVSESGFCDPEKSCRHSNAESENMEVFCKPQEKIIKDHRNKIIERGIWKSLAVANALELLKLVFLNTSLGSNVQASLAATLQLYSESEIFTAVSFLKEKKFLVSVSELMFPLEYLLFSMMCPT

SEQ ID NO: 60960 - protein, 483 aa, Zea mays
  Coding DNA Sequence Number=SeqID_17585
  Gene Ontology: Mol. function=sequence-specific DNA binding; Cellular component=nucleus; Biological process=regulation of transcription, DNA-dependent
  Homolog annotation: Hit_ID=A2X7J3; Match level="QueryCoverage=80%, HitCoverage=22%, E-value=1e-158, Identity=72%"; Hit description =Putative uncharacterized protein
MRHFLSTCDNYLSDGSDDYNSDDEGYDSTRECFHVRHKEHGEGNQLVMPREANTPALAPHAGEQMEQVSSKDLESPSSQSKLLLLEEENHDKPIGHHIQNNRDASAAVSQLVEEGCNQIAIKLNKRVRFFLGVGFRPKKKFVLKVELHKWLERLEKKDGKIMDRKTLTRTLNKLQQEGSCKCIKVSAPLVTNYARSRLFDVILHSSVRDVSPELVEQFRTRQRNFDTESRAGAAAKVKQNQHMTAIPGLRISRRVKVYKPLLLEAMYANGFIGAKMIRAKLFHKFLWAYVNSLPNWCNAFGCTKAGQYDKSLNQSCLLFSMEAAMKEMPLELFLQIVGSAKKIDNMITLCRLGKTLSEIPTEEYNQILDTHANGRLSRLVNILDKLKLVQLAKEFLEDAGVSSNAMYTHSMELRPYIEEPMPRILPSSQLNNHRKIRHDFVLSKKEFVDSYWETLECCYLTAGLADPLSAFPGSSIPEDYRIR

SEQ ID NO: 60961 - protein, 297 aa, Zea mays
  Coding DNA Sequence Number=SeqID_17586
MNKIKDLSSPRRGGGKRKARVTAELTSMTEGGNHNTGEGKRSRHVVARLRVELDAITENRVHAQSKATKMPRTSWSSCRRIRIAFPTELSRARKVVAPAVRAKAGSRTSGAMGWVGPPVIGVGGALVREWAKAGQFSGGDGQKGVRRPLAEARRLGGHWGGSRLVLSGAGSGISAAAGLPEQRGSAEDANDGRPATGDAVREEASLDNGGRQWRHGREPARRRVPAAAAICGGVVASPHATWPREARMLEPAGPAKDTVAAEEMERRGSGLEGWRWSWPGAGRGWQRLEVGGRKREI

SEQ ID NO: 60962 - protein, 150 aa, Zea mays
  Coding DNA Sequence Number=SeqID_17587
  Homolog annotation: Hit_ID=O48967; Match level="QueryCoverage=98%, HitCoverage=31%, E-value=3e-22, Identity=43%"; Hit description =Putative uncharacterized protein
MVHIVEHHDFMPGDFLVEEEAASSTSRATNHPAPGAAAVHSARQHTPAQASRASRAAPGALSAARELLRHPPSSTASSEAMKQWRDDVDRLLGMAHSGSTRPRPRSSRHQHEASASVRSRSVRAASTEDLRAKLDRRHVGEDAPASLGEI

SEQ ID NO: 60963 - protein, 134 aa, Zea mays
  Coding DNA Sequence Number=SeqID_17588
MEGRTNACNAWAISERHNVRSAYSIDMPPLFPRGRAAKSPYVRLRPLAYVTGSVPRGSIGAPPERGAEVYVDPAVSGPDPTQRGLGPVPGVRFVPVEVLDLAWRSDSRARIIYKSYSCHGIKCHVTKYSDVSPH

SEQ ID NO: 60964 - protein, 147 aa, Zea mays
  Coding DNA Sequence Number=SeqID_17589
MPGFEIYDNDIPQPTRQPISKWEVKKSPALELRPHWTQPGNSARGYRAASVADLHGGVGLRKRPQVARRPAVRSRLNQQQQQQQQQQQQQQQQQQQPARWRSEQDRTPHPLWMIHMTNNHAPIFRYPEFQAQLIQRMHGFTSTYLPD

SEQ ID NO: 60965 - protein, 400 aa, Zea mays
  Coding DNA Sequence Number=SeqID_17590
  Gene Ontology: Mol. function=catalytic activity; Cellular component =nucleus; Biological process=regulation of transcription
  Homolog annotation: Hit_ID=Q6YUX6; Match level="QueryCoverage=100%, HitCoverage=99%, E-value=8e-85, Identity=49%"; Hit description =Putative TCP-domain protein
  Pfam annotation: Domain name=TCP; Domain location=54-239; Score =156.7; E_value=6.3e-44; Accession=PF03634.4; Description=TCP family transcription factor
MDVAGDGGGGRRPNFPLQLLEKKEEQPCSISAAVGASAGGNGNGSGAVGGEMQQVRKAAPKRSSTKDRHTKVEGRGRRIRMPALCAARVFQLTRELGHKTDGETIEWLLQQAEPAVIAATGTGTIPANFTSLNISLRSSGSSFSAPAHLRAALPASPATAARFGRADAWDRVVGLAFPSEGPASSSSSPSPLLLNFNSGSVGLDAQQSPSAAAAAAAADMTRKRRWEQEMQQQQQQQAQQYQQQMAGYTQSQMPGTVWMVPSSNNTQGGGTPSSGGSGGCTGESIWTFPQMGSATAAAAVYRGSVPSGLHFMNFPAPVALLPGQQLGLGSVGGGGGGSGGGSGGEGHMGILAALNAYRTQVVTDPAASQGGGGGGGGSGQQQQHGGGRGDRHESMSTSDS

SEQ ID NO: 60966 - protein, 299 aa, Zea mays
  Coding DNA Sequence Number=SeqID_17591
  Gene Ontology: Mol. function=galactosylgalactosylxylosylprotein 3 -beta-glucuronosyltransferase activity; Cellular component=membrane; Biological process=metabolic process
  Homolog annotation: Hit_ID=Q4VYU4; Match level="QueryCoverage=41%, HitCoverage=29%, E-value=3e-31, Identity=54%"; Hit description =Glycosyltransferase
  Pfam annotation: Domain name=2-oxoacid_dh; Domain location=95-278; Score=-162.7; E_value=0.083; Accession=PF00198.14; Description=2 -oxoacid dehydrogenases acyltransferase (catalytic domain)
  Subcellular localization annotation: CTP_CleavageSite=28; ConfidenceScore=5.52e-01
MPLLASSPPHPPVSSALPAPPNVVLSVPSSHRATTDPRLEAQAVPRRWGSETHLQDADLLPNSKATIRHRGNLPWRRAHLKHCGKPVSAAAAVEVFEEHKGSELLIDTMDSVPPLYRTAACGVGTMRQQDSRSRMMNNNSGVDAGGPGSGMGLGVPDVPLGCRDGKSFTYKNSINIAIAVAIDGGLITSVLQDAGKLIAGEIEIKGVELQESCSLSFFSMVGIFIGIIQLFSVDVYKKIVSKNKMLLFHEGVIETETVGTRVKESEAVLVEKEVELIDEPQIQESPPVPALLDDEVDFA

SEQ ID NO: 60967 - protein, 326 aa, Zea mays
  Coding DNA Sequence Number=SeqID_17592
  Homolog annotation: Hit_ID=A2XLE0; Match level="QueryCoverage=15%, HitCoverage=9%, E-value=2e-18, Identity=84%"; Hit description =Putative uncharacterized protein
MSTNGQWGLVGFTAHSCSFHEFECLDKSPFRYFLGELYGGNSLGSTIAVGNEKKRQRVYNTMFHVPWRCERNTEEIGSTDETDEDPDETNEESYTSDAVQMMQGTGIAEDASTEDDDFSGDLPPEFENIMIFNGVETESDIAPPVLEENKDAVVSATKTAKSLDGFALKTGQEEEGPEEVDATEKAMEVVDNVVKSLDEEVESKEMQKQQPHDYNSMSLGVVTASIRAMIHYHSYMSLRNLKATHKKYLIAAKEEEVTEGKRLPLEEVLGTSNFVHIEPVRMTSSLKVIEMLQSSNGIQHVPCASISALISRDGNANWNWSLVSID

SEQ ID NO: 60968 - protein, 155 aa, Zea mays
  Coding DNA Sequence Number=SeqID_17593
MEGRTNVYNAWAISERHNVCSAYSIDMPQLFPRGRAAQRPYVRLRPLAYVTGNVPHGSIGAPPERGAEVYVGSDTFPWGSGSTVDTLEDIVFSGHVAALEPSTWWGRVLFTTRLEIAARALHLHTVVRDTLFQGTDSGPRAHLRGGYEPAGGAKA

SEQ ID NO: 60969 - protein, 191 aa, Zea mays
  Coding DNA Sequence Number=SeqID_17594
  Subcellular localization annotation: CTP_CleavageSite=27; ConfidenceScore=5.09e-01
MEGQSCLLSSGAPDSPVHHRTATVAVRSAGARVTWSRYLPSSLSVAQQVDLAYWPTPEIVIEPPPLGSRTPAQDCRSAPDPLWASPSYFATLNATSPSSSSHTSSPTSPAADESTISSNPKALGDSATTSPVLLLASLLLLAWKTRIRCFRPRGSTTKNGMFSQRWTPQSIIVKRGHQIKGNSFTSLSRED

SEQ ID NO: 60970 - protein, 200 aa, Zea mays
  Coding DNA Sequence Number=SeqID_17595
MASLAHPERFQPEVALNLVHNLLGWGAPAFAGRIHVGASPLGDLAAGEFVLFVSYLSCGLTLPISPFFLLLLEELGRCSDERVLRSDLPEMESELRCGSIFRVNFTSISCGQAAERCALPRLHLFGFNGLDVASNDEGTFALTHASRKPPPLASCSTGLPLAPLFPVAATVFRVSGRPAPSGCGGSCAMTALREDAHGRW

SEQ ID NO: 60971 - protein, 151 aa, Zea mays
  Coding DNA Sequence Number=SeqID_17596
MAVGELRCRWVHRTVWCATGHCPVAVGAEVSVASMAHPDSPVNYSGLAVVNSRSWRVPEAPFLGAPDTVRCTPDSPVNYSGAHLDFPEGDEFDWESSGAPDTVRWHTGQSGVPDQRCLRLSLCSFVEPNTLSFYWLSVNLWHLYNLYTRAN

SEQ ID NO: 60972 - protein, 96 aa, Zea mays
  Coding DNA Sequence Number=SeqID_17597
  Homolog annotation: Hit_ID=Q7XBD4; Match level="QueryCoverage=46%, HitCoverage=4%, E-value=4e-09, Identity=66%"; Hit description =Cinful1 polyprotein
MKTSFANVGAYSNEHNFIRGDPEGVIECISGEAKAFEEILSDREDHSTVDCASFRFLPEIPLLMGLLAPFWLLTPVNRQVVVVAEVEAVAKKPVAD

SEQ ID NO: 60973 - protein, 308 aa, Zea mays
  Coding DNA Sequence Number=SeqID_17598
  Gene Ontology: Mol. function=structural constituent of ribosome; Cellular component=ribonucleoprotein complex; Biological process =translation
  Homolog annotation: Hit_ID=Q8RYR6; Match level="QueryCoverage=100%, HitCoverage=99%, E-value=3e-92, Identity=56%"; Hit description =Fertility restorer-like protein
  Pfam annotation: Domain name=PPR; Domain location=173-207; Score =37.8; E_value=3.8e-08; Accession=PF01535.11; Description=PPR repeat
  Pfam annotation: Domain name=PPR; Domain location=208-242; Score =27.8; E_value=4e-05; Accession=PF01535.11; Description=PPR repeat
  Pfam annotation: Domain name=PPR; Domain location=243-277; Score=7.5; E_value=0.99; Accession=PF01535.11; Description=PPR repeat
  Pfam module annotation: Pfam domain module=PPR::PPR::PPR; Domain location=173-207::208-242::243-277
MSLQIPVRSGALRRLLLLGGAEGLLRTYSTGDRRRRVIREARQEEEDEAFLRTLNFGADPENNPLPPPPRHGRGLSDASAGKQQQQPERSAQKVVGETLLEKLKLGDGPSAAAAIGGGDEPRQSEDEPAPAQPVDVDEIFRKMKETGLIPNAVAHARRAVQERPEKGAIPEVVIYTAVVEAFCKVAKLDDAVRIFRKMQGNGVIPNAFSYWLLIQGLYKGGRLDDAVGFCVEMFEAGLAPNAETFVGLLDAVCKTKGVDEGENLVRSFQDRNFAIDEKSIRDHLDKKGPFSPVVWEVIFGKRKSDRPF

SEQ ID NO: 60974 - protein, 76 aa, Zea mays
  Coding DNA Sequence Number=SeqID_17599
MLTTGFGFKGAKAATVWHQPWTAAKVFAQAREWAEESDACDEQCGDEDDGYDYAYGNGEDEVVEEDFQEFQEYDEF

SEQ ID NO: 60975 - protein, 189 aa, Zea mays
  Coding DNA Sequence Number=SeqID_17600
MWTPPPAGSIETDFAAVAWLLRSNPGRGPRWAINAKVVAPRRLTMHGRCCAPWIPRPAVAPSSAAAVTSLASHRGAIARALSIPNQADSIGASPENVEGFQRICACGVLRSCREFLAAVNSPPQVRLVPWTSLWSLSLPSVSPFSVLPSSELCVGPAIDVVGAQNGRAAWLRRVVGRGRGGAADCVGGV

SEQ ID NO: 60976 - protein, 426 aa, Zea mays
  Coding DNA Sequence Number=SeqID_17601
  Homolog annotation: Hit_ID=A3BT24; Match level="QueryCoverage=50%, HitCoverage=44%, E-value=2e-33, Identity=46%"; Hit description =Putative uncharacterized protein
MTLHGDDLRERHSPHRPRGHPFETGSLVYAPLTEGERIYADASCWHRDDRVLDLVEVECAILSSRSTSSRHCFMTPIEAVELGGCHYNSLAADNAPGVALDGVRDVCAAVCCRAACTAAMPGTRRLGTCGEASRRRDDEHSAPLGTGALFVNKLDRRAVYWGRAWTRVSTGPLLKQGSSPFRDFAKARTLLGGTWGLLERPGMPSWELRTCADLAKSTKVSKMGAKSEATVAAGKAKKPPAANSTADAGAKPTKLGKKAPVLADAKAKANATVIGKEQSAAEVEVEEDMVLTKQAEEGTNDLISKFQDLPSRLQEMLMPDLACLSQHSKAYLSAANVGIADVVRLILGGRWATVAASAASVAMFLPLFMLTALVRRMGPYLPLLHRALLLAQAYLAIYFTTLALTAAATGLEPLRFVHATSPAAYA

SEQ ID NO: 60977 - protein, 466 aa, Zea mays
  Coding DNA Sequence Number=SeqID_17602
  Gene Ontology: Mol. function=protein binding; Biological process =apoptosis
  Homolog annotation: Hit_ID=Q9ZSX4; Match level="QueryCoverage=43%, HitCoverage=86%, E-value=4e-61, Identity=64%"; Hit description =Putative uncharacterized protein
  Pfam annotation: Domain name=BAG; Domain location=191-262; Score =21.6; E_value=0.003; Accession=PF02179.7; Description=BAG domain
  Pfam annotation: Domain name=IQ; Domain location=170-190; Score=25.8; E_value=0.00016; Accession=PF00612.18; Description=IQ calmodulin -binding motif
  Pfam module annotation: Pfam domain module=BAG::IQ; Domain location =191-262::170-190
MACGIYLQLVRLAGGPALHAGWPNRPRSCIVFWPYVLKAFVLGPSRWPAGKGTDLAKSKFSKTGAKSKAVVVAGKAKKPPAANSTSPYHYAYPYYRYQHPDPSRGVDGFFPAAAEAMLEAVKVDPSWSRVESSRSVSVPVRFVGSDPEPVRRAARMPPAAVLRKRAPSSEAAVIRLQAAARGFMARKSVRAVREVEREAAEVGEKVAREAEALRGDARARIAVGEALMKMMLRLDVVRDAREYRKRVTKRVLALQDVVDALEPKSALYSEVVAEENESEVTSEMADDGAEAAEMPVAAEHSGGIEVNAAAETVANMEVDGGKANSEAVPEAVKESENKQDDMHINDDQTEVSDEGKWKMVADEAERTTEATRSTEALPQAPMTSEVTRMTWEAGAADSVLDTRKVMEMVEALCGQNTQHCAVIGALAERVGALDRAVRLVENAERRRRRGKKLKKDGKGNNRCYTN

SEQ ID NO: 60978 - protein, 98 aa, Zea mays
  Coding DNA Sequence Number=SeqID_17603
MACGARPARLRRARGSLCGLLAVACAARSQQRPAACPARQPTWPAYAAACPTRWLSASQCGACGLAPSPVRGQPARGALVAACAARPSRPRRARSSGL

SEQ ID NO: 60979 - protein, 129 aa, Zea mays
  Coding DNA Sequence Number=SeqID_17604
MQDVARRALSQYCLLFSGVANGLDLKYYPHRSTDSAGGLIVSPVRKGNPRLNNMVNLATVLNTELDHALDELGKARAEITELRVERAARHYLDGGPPAPVGIQHPYRSAPRGRYAYGISDCRTQIDLEP

SEQ ID NO: 60980 - protein, 285 aa, Zea mays
  Coding DNA Sequence Number=SeqID_17605
MNTQFIKYMKKAGAFVRPNDITGHWELTVAELLSLANDSPSGIVPHNGNICGLLLALELLGCSGWLLGQGDEVPSFSSAGIDFLLVGCSDGTTIAAAAEGATSDTVAGADADADVLEVKGVNQISQKTVLPLSIYIDILGHMLATKVVPELLPGNGFRVCMGGKAGTIQNLLTIIALSSVQLTLHGTQAIFGVHGASVASELASEVEVGVAAAAPAALLLKSGQFLGLSGFASGTYVQCSSRVAVVTTTEVPPPEMPATPVEHAFHLYACFQTSIEGTHISDLTM

SEQ ID NO: 60981 - protein, 183 aa, Zea mays
  Coding DNA Sequence Number=SeqID_17606
TVLLALASPELLVAAVQAAFWRATRVASLPACPTDGAAPSCLLRAPLVICRVHRFAELWGLHVSPSTLLPNNMCLASQQHLAAALAQPFVPHHRCVLGASIAVLHLADCSQSQRTPSSTAFVTSVMRPCLAVVSSGKSFTGDPLSRPLSFRSLRSAYPPQSASIASSARLALAPRPVAAAVER

SEQ ID NO: 60982 - protein, 48 aa, Zea mays
  Coding DNA Sequence Number=SeqID_17607
MESHDLRAEWESRLVGGDENDGFDYDYGAGEDEAVEGDFQEFQDYDEF

SEQ ID NO: 60983 - protein, 121 aa, Zea mays
  Coding DNA Sequence Number=SeqID_17608
  Subcellular localization annotation: CTP_CleavageSite=60; ConfidenceScore=5.00e-01
MTAHQDSTVDIVSASHAAPFYDGAATLPWRKSPTSPRLALRCPESQWTCVTHSYKRGEAAAAAEEYYDEELLDPEARFVEFGGRQSLSTPNRPSGFSTESPVTTPAKDSSDGGVSLAHSSL

SEQ ID NO: 60984 - protein, 57 aa, Zea mays
  Coding DNA Sequence Number=SeqID_17609
MESHDLRAERESRLVGGNETDGFGYDYGAGCQHCNHCSGEDEAVEGDFQEFQDYDEF

SEQ ID NO: 60985 - protein, 46 aa, Zea mays
  Coding DNA Sequence Number=SeqID_17610
MAVMGSTSENMYLCQVKKRQTFVASVLRWYPKMNTKTRVAGGKALH

SEQ ID NO: 60986 - protein, 168 aa, Zea mays
  Coding DNA Sequence Number=SeqID_17611
MDFTSGSERTDLYARAAADARGGCVESVAKLAAWKTDLVPLAHMAVIPVSVGCEEVSSSSRMQKTHGTTIGPFDDVALIQRERSETSCSAINRLERPLLKPYQILSFGASNPRFGSAITIEVGADGIALITIANLPVVDAPSPEASRGEMRDPWRQSWRRVAGGRWCW

SEQ ID NO: 60987 - protein, 128 aa, Zea mays
  Coding DNA Sequence Number=SeqID_17612
MAVVLVSDFIFLCLWVEHDPMEIIETVKIEEANFLVHYFGVSRAESFFIFLLINSRRVAINGESNVGLEDDDVSVTPRGKKRGRRSAMAQLGIGLLVVQNLSGINGVLFYASSIFKAAVSFQDVGIES

SEQ ID NO: 60988 - protein, 265 aa, Zea mays
  Coding DNA Sequence Number=SeqID_17613
MKLWKETSRSSKTTTSSRRGLAATPSRLPMKAAFIYVSFPHFDLLWLDLDTLHESPSSPSYPPALLSVRFAVPWPALNRRTWSIEYRCVVYQHSRGVYPDRWEATCLVRRPENSLQGAEVCSEHYSISERDSAEVAMQDAARSALSHYCSVLGGVADGLNLKYYPRHPSGSTGGVIVSPVGEDNPRLSSTVNLAAVLNTELDHALDEPSRARAEIALLRAERAERRHLDDGSPAPVGTQHPYRSPRRGRQPYGNPDCKTKINLEP

SEQ ID NO: 60989 - protein, 120 aa, Zea mays
  Coding DNA Sequence Number=SeqID_17614
MDLDSATEAAEHALEDHNEQMDEMALFGHNVDVVVDIDAVEPTPTMAWIVTGSSSPAATGSGSTSRDTRTRKRLPTSRVWTDFDEVMKGKCALGPFLSILVIECQLKCLKCEFMQWMNKV

SEQ ID NO: 60990 - protein, 228 aa, Zea mays
  Coding DNA Sequence Number=SeqID_17615
MGTDELTANQEPNKEKPKIYSPASLVIAPGSAHTSQGRRMGGSSRGSILRTHYSSQSPAVGEFRAIYFVALSLVLLCAYEANSKQEKPTTSEGKKASDEINRNGQYCIHPLQTRRCSSGVGAMRRPTATRSTPPHAHIGRRSTISGERFEPQVMVELVDLIKRPMDQYAAGARGGNGDAPDYVSLSPRVLDASASAHTPGTPASAAAAAIAGDHYRRGIRRQYCATNP

SEQ ID NO: 60991 - protein, 124 aa, Zea mays
  Coding DNA Sequence Number=SeqID_17616
  Gene Ontology: Mol. function=nucleotide binding; Cellular component =protein complex; Biological process=microtubule-based process
  Homolog annotation: Hit_ID=P38557; Match level="QueryCoverage=46%, HitCoverage=12%, E-value=2e-19, Identity=75%"; Hit description =Tubulin gamma-1 chain
MQLISTHHSLVFDSSYNRKQVTDLLDWMFQNPLHSVGDKVDNRHELYRRSLLIDLEPRVINGIQNSEYRNLYNHENIFVAEHGGGARNNWACGYHQLVRAASSTYIRPIRLCDHFDKKQWHVID

SEQ ID NO: 60992 - protein, 150 aa, Zea mays
  Coding DNA Sequence Number=SeqID_17617
MAQRHISLSVIRAEDARTGVEEQPAPPTGPGEDPGRALCRQVPMSGPTQATPTDDINFVAAANAVPVNENLSGSETRSWSSVGDEFGSPFSWTEESSDEDLDYFVALDVAAAESVPRLEVREESDPPVGAMTERHRRRKVVSKHNIGEVS

SEQ ID NO: 60993 - protein, 185 aa, Zea mays
  Coding DNA Sequence Number=SeqID_17618
  Homolog annotation: Hit_ID=Q5GAU8; Match level="QueryCoverage=17%, HitCoverage=23%, E-value=2e-09, Identity=87%"; Hit description =Putative uncharacterized protein
MTNAEKEVATERRMDSPPRCDCGDRAVIDEDYEKQFCCPNIDYPYGWRKCRFREWLYGPLSHWPEPEETRKCSWESYDDKGEVMHTIESKRIMGQKMRCGSRLVDSYINDRIRDMRREAKSAFYDSVGVSRPGVPKPTSECAACPQPRWVERVGEREGGRGEVAGDGRERGGDLAAFVFVPRPGR

SEQ ID NO: 60994 - protein, 432 aa, Zea mays
  Coding DNA Sequence Number=SeqID_17619
  Gene Ontology: Mol. function=kinase activity; Cellular component =ornithine carbamoyltransferase complex; Biological process=amino acid metabolic process
  Homolog annotation: Hit_ID=Q6QP54; Match level="QueryCoverage=18%, HitCoverage=34%, E-value=7e-11, Identity=51%"; Hit description =Putative kinase
MALPVDVAGPRPRPGDVGAPPKLGSNLSSVAEAEPEPLGRARRRSFGRGQGGVRALGSGEAEFVVFGGRARVRALGSGGAEFVVFRVLARVRALGLGGAEFAVFRVLARVRALGSGGAEFAVFRVLARVRALGSGGAEFAVFRVLARVRALGSGGAEFAVFRVLARVRALGSGGAEFAVFRVLARVRALGSGGAEFAVFRVLARVRALGSGGAEFPMAPLARPDCLSDSLCRVALKSEWRRRRCPSVRPRSQGLGRAGDVSAVKRGASGETEVPRDSPKHAEYRRLKAADEKRAQDAREWEAAQAEKQMLDNLADRLKRKAGLHEEEEDDTSRLSELIALAEAGLRAQEEDDEFMSQAAEEVEAAYYKKKSDEAGAEDELFSQAADEAEANYYKRTGDKCDAGQYSKCNEVVVEDCATDDSEDELLIDCDSD

SEQ ID NO: 60995 - protein, 95 aa, Zea mays
  Coding DNA Sequence Number=SeqID_17620
MGKDKRGRGSPHRAGDKRKRDPSPPSEDFGDFEYSEEERARLEGSDESEVSSGEEDSFGSSKERSGDDSDDDSRGGEGDDDDNGGGGGKDDSGGG

SEQ ID NO: 60996 - protein, 397 aa, Zea mays
  Coding DNA Sequence Number=SeqID_17621
MATAKDEASLIKRRWGLSERKSPAGWRREASRIRDGEHSGPHGTGALFADRLGQGLDTCQHRTLTHAGVLPILGPCCGPDPTRRDLGPIRGTPHAFLGAPDLVPTVAPGPALGEDASMQVGPESDWRLACCSCAPVDAITADPPMVTPTATPIPMADWPVTFVLNVTVGPCAAKLSGRTTAGRLYTSCAARFVFLTSGCSENEGAQNRGAVARSLCGGSPSSCFGGAADLVFFLLLLEEHDLVGVVALLPSLGFKDFHLAARMMFIICAGEDGEPSWGPTFRMGWRPASSSSIRGRRALTSLAEEANFGYAGPAGCRRLKGKCAFGPFLSILVIECKHKCLNVKMCPWLNKVQITSKAKGCFGLGHRTVRCAPDSVRCARPARGKLAALGFFSGDFG

SEQ ID NO: 60997 - protein, 233 aa, Zea mays
  Coding DNA Sequence Number=SeqID_17622
MAASMRAPLRRGPRPRPPTGGDNEAIKAKELEARRQVALMVSSAKATTSAVGNLTSGGDHLNTDDSSHLCTGGLPATAAASARAKRSSLLSSYRSEDKTIQEHGRHPHGPRPDQAAGGSVGGGTEAIQAKEPDMRQLTAPAAGRPRVTEVRLLRKAGERPSPPNAGGRSSSQENESPYKERATAPAVMRPFIFAETSGREGEPPRRKRTTASRLKIAPPLVPIPRLLGAVAED

SEQ ID NO: 60998 - protein, 125 aa, Zea mays
  Coding DNA Sequence Number=SeqID_17623
  Subcellular localization annotation: CTP_CleavageSite=50; ConfidenceScore=5.41e-01
MPEPPERRHARAAPSSRRSSTATPELPSSAAGRAASPHRPLLKRVSRRLRRAAARCGCRSLAGVDVQLPVPRMQQDVQPPICAVGPSTAGLSSSQSTRDTFEDVAHDDDDDTGAGAVGQEEIGPS

SEQ ID NO: 60999 - protein, 192 aa, Zea mays
  Coding DNA Sequence Number=SeqID_17624
MAQSDHKPHRVFVGSYRPKLDPVQSPNEALARREWDGIGHRPQATGHRPRLRKGPPRTLNTTAREHSGHHSCAALHCTGTARFSTAHDDASGTRVATPAAARSPGPGSRVFRRHFAPATTGNTIWVRPPCGRTYAASRHAAPRRVWGKSGGGTGEHTDAQVQGICTDEVARYRVRRNALMLRWAWVIHVDRE

SEQ ID NO: 61000 - protein, 125 aa, Zea mays
  Coding DNA Sequence Number=SeqID_17625
MAHWTHFTCFDFEGLCLLCVYSILVNLPVFERFKSQDWDGKLGRREPCKVQRKTNARQPRRRTDGMSGRSPQTDQIANLPQQRYYPASRLHCTTGGSYWGGTGWGGGGGKERTASLCSLSLCACV

SEQ ID NO: 61001 - protein, 305 aa, Zea mays
  Coding DNA Sequence Number=SeqID_17626
  Gene Ontology: Mol. function=sequence-specific DNA binding; Cellular component=nucleus; Biological process=regulation of transcription, DNA-dependent
  Homolog annotation: Hit_ID=Q6K498; Match level="QueryCoverage=83%, HitCoverage=91%, E-value=2e-74, Identity=61%"; Hit description =Homeodomain leucine zipper protein
  Pfam annotation: Domain name=HALZ; Domain location=138-182; Score =71.0; E_value=3.9e-18; Accession=PF02183.9; Description=Homeobox associated leucine zipper
  Pfam annotation: Domain name=Homeobox; Domain location=83-137; Score =74.3; E_value=3.9e-19; Accession=PF00046.20; Description=Homeobox domain
  Pfam module annotation: Pfam domain module=HALZ::Homeobox; Domain location=138-182::83-137
MKRPRGATPSLSAMPNHQEGIHCSGLLWGWVMSWRECVRNEDLSPCACVFPDDGYGVLGMEADVDVDVDEEMMAFGGGGGGEKKRRLSAEQVRALERSFEVENKLEPERKARLARDLGLQPRQVAVWFQNRRARWKTKQLERDYAALRRSYDALRLDHDALRRDKDALLAEIRELKAKLGDDEDAAASFTSVKAEPAASDGPAPAGVGSSEISDSSAVLNDADPPVAEAPAPAPEVQGTLLVAPAGPVAGAAAANHGGVFFHGSFLKVEEDETGLLDDDGPCGGFFAVEQPPAMAWWNEPAEHWN

SEQ ID NO: 61002 - protein, 26 aa, Zea mays
  Coding DNA Sequence Number=SeqID_17627
MGRIFTTSQIELAGWADVTTRTSRVR

SEQ ID NO: 61003 - protein, 77 aa, Zea mays
  Coding DNA Sequence Number=SeqID_17628
MEFALHFSSVYPELKLSKPSDPTELHRKPEITLAGLRSPAPARGPSSLYLPYTLGHLTGAISPPVSPSALSSAAGTV

SEQ ID NO: 61004 - protein, 220 aa, Zea mays
  Coding DNA Sequence Number=SeqID_17629
MKLALASTIRSPPRFASDSENVSAPCLPPPVDARGGERGFEFEMGESATAAYIMGWEMAKWGTSGSRCGDFGKTQRLLFGPCQKEKPARGFVEVDPIWGPAGQGVGACASSPYSSDTSPDIDSRNGYCTTTRMFHIMCAPSFSPSSDVPFVFPAFARFFLPNLLPRPRSQPLADAGMGRVSHASGLSPCVPSRRTWWRLPRLGYLGDEEYRSEILDNQGP

SEQ ID NO: 61005 - protein, 145 aa, Zea mays
  Coding DNA Sequence Number=SeqID_17630
  Homolog annotation: Hit_ID=Q69T56; Match level="QueryCoverage=89%, HitCoverage=64%, E-value=2e-16, Identity=42%"; Hit description =Putative uncharacterized protein P0664C05.19
MGDLCLRAQDKVEAAAGDAVVYGGSVGVADARMEDEMAPVEPLPEPPDEGGPVAWPMPEFCPLTVDGALKESFLETLWKDAAPEMERPAREADEALSPESRPSSSKRHRSGTASPSSRSSPYRNILQVFQQCRQDVVGETLTKNY

SEQ ID NO: 61006 - protein, 101 aa, Zea mays
  Coding DNA Sequence Number=SeqID_17631
MRRFILLITKGALNRMVQTPLCQAICSPAPISSREPNDKAHITVSEDDEEIDVLGEGVLANIYNMEDVVGTHDNVIMNTSHDIVLQMELVMGQFVRNVLEP

SEQ ID NO: 61007 - protein, 542 aa, Zea mays
  Coding DNA Sequence Number=SeqID_17632
  Gene Ontology: Mol. function=sequence-specific DNA binding; Cellular component=nucleus; Biological process=regulation of transcription, DNA-dependent
  Homolog annotation: Hit_ID=A7QJZ6; Match level="QueryCoverage=91%, HitCoverage=69%, E-value=1e-152, Identity=55%"; Hit description =Chromosome undetermined scaffold_109, whole genome shotgun sequence
  Pfam annotation: Domain name=START; Domain location=53-278; Score =160.5; E_value=4.6e-45; Accession=PF01852.10; Description=START domain
MSVSSLDLSVGGMPGQGLGGPSLDLDLLSGCSSGLPYHMPAPVTEMERPMMVDMATRAMDELIRLAQAGEQIWVQGMPGDAREVLDVATYDSLFAKPGGAFRPPEINVEGSRDSGLVFMSAVALVDVFMDTNKWMEFFPGIVSKAQTVDVLVNGLCGRSESLIMMYEELHIMTPVVPTRELSFLRYCKQIEQGLWAVADVSLDGQRDAHYGVPSRSRRMPSGCLIADMSNGYSKVTWVEHLEIEHMLPINVLYRNLVLSGAAFGAHRWLAALQRACERFASLATLGVPHHDVAGVTPEGKRSMMRLSQRMVSSFCASLSSSPLQRWTLLSGTTDVSVCVSTHRSTDSGQPNGVVLSAATSIWLPVPGDHVFAFVRDENARSQWDVLSHGNQVQEVSRIPNGSNPGNCISLLRGLNANQNSMLILQESCADASGALVVYSPIDIPAANVVMSGEDPSGIPLLPSGFAILPDGRPGSSGAGASSSAVPLAAAPPPPGCVVTVAFQILVSNLPSSRLNAESVATVNSLIGTTVQQIKAALNCAGP

SEQ ID NO: 61008 - protein, 203 aa, Zea mays
  Coding DNA Sequence Number=SeqID_17633
MAVKFTREKIERSIELVKDPILKMKTDRKVQGRANREASHGKELGTAGGCSSPAKGPTKSWAVGGGSVVAARFLLAKELSLRRHLMTTIILYLLYNTNGASAAALGQRHVCVTEMRCEVVLPPGLRSWASAVHCNCYIVSCIILGYEPKASFTAAGSRGLARSAQRGARQEKRVRVVRFGDTKLKLFWGFGQSSIVLSIVYLK

SEQ ID NO: 61009 - protein, 406 aa, Zea mays
  Coding DNA Sequence Number=SeqID_17634
  Homolog annotation: Hit_ID=Q6J9V9; Match level="QueryCoverage=15%, HitCoverage=32%, E-value=5e-07, Identity=44%"; Hit description =Putative uncharacterized protein
MAERYQLPRSCAPPTTRRKDGGYPPSGGLEGGKTRCIREHEDMVAFQGGHPPFKGGSPYLRPQPSWAESSSTHSKVLPYGAGAGSHTSSKPAQSRRSQTAVRGAYNRPAVTSDSPLLPRPTGERGGQPCRRHATAPSGRTSPTPNTPNMEAQAHASCNPARRMLRACNSTATCAATAPPRLRNQYRDSRRPSARPSSASLARRRSGRRFAFAIRTASKKGPGKGDTPKRILSREGTRLRASLLIRGSKAGPSEGFDSRLRSRGLYTHYWSEVRRPAPRKGSTAASGYSGSAPITDQGFEGWPPKAHRRHHVRRPSRATWRFPSLLLAERRRRGVCKKVESVPDRPLALCRGSGAALANPAPAEPLTASTYQLENLGPDRTPGLRPARMRDDQTSRSITRGIKTSEE

SEQ ID NO: 61010 - protein, 132 aa, Zea mays
  Coding DNA Sequence Number=SeqID_17635
MGSRHSACSAEAECRGSFVLLSLVTLLRGEVAFGAIYAQHEVANDVEHISDNVIVNECPSDVWTQVMMNIIQQVHLAWLIVCDHARRMILILQSHQLHLIAPCDKVTQKVSSCNAIEHRIASMNMALEKRDR

SEQ ID NO: 61011 - protein, 67 aa, Zea mays
  Coding DNA Sequence Number=SeqID_17636
MSQVGGSLAPEMRPICSRLQNLVQRALSIVRAWLHIYTQEPRAPEETGRGRDNDNYELYAAATVWQI

SEQ ID NO: 61012 - protein, 142 aa, Zea mays
  Coding DNA Sequence Number=SeqID_17637
MAGGIELAGAKGRWLAGEGTYRETFNQIMAYHEMKVAINQSPDYNNTNHFAFSTIYINLVSCNQARQAAEKATDIRRNCKARNPKVTIEVKHTEAEAKDAVIEAEAVPAWTAKKATDDIVLKICEESMMKWCRVTKKIDEMM

SEQ ID NO: 61013 - protein, 42 aa, Zea mays
  Coding DNA Sequence Number=SeqID_17638
MTSAAPNPLRKQGNVSRIHAATSAMLLQGSRHFSDGHRDLGE

SEQ ID NO: 61014 - protein, 389 aa, Zea mays
  Coding DNA Sequence Number=SeqID_17639
MGAHGEPSLPVTRSPSPEAEAEAEAWGRARRSPSPEAEAEAEVGVNRGRDPLLRPKLRPRLGSGEAELPVAPEAKLEGGRDLPLSAFPWWLAQLPKRGEQRCFPVRMLVTPISTTLQRPDGRNSGQGSIHSRDTLSAHPSPASGRNGKQRRLRCSDCRATCQGLGLDLASERQSPPRPTPGLGLDLASGRQSPPRPTPGLGLDLASRRQYPPHLTPGLGLDLGSDDGLRLARPPGSDSTSPPEDSLRLARPQGSDSTSPRTTVSASPDPRARTQPQPRTTVSASPDPRARTQPRPRRSHRLARPWARIDHVTGGYIITLPLASSGYGEQDRRPIWLAPVKQVMMAPRVLHDDGGSQPPTEARIRQQGSDSPDSCTSTGLKRSSDGHDAT

SEQ ID NO: 61015 - protein, 372 aa, Zea mays
  Coding DNA Sequence Number=SeqID_17640
  Subcellular localization annotation: CTP_CleavageSite=55; ConfidenceScore=5.34e-01
MVAPPPPPSTGKVTGQTRMLFFRHTGKTSSIPPSAGGLTAAIVVVARRRKEYHVVAAIEGHELETPKTELRLGLERLLETPHLELDRKLFVNTQQSPTWRANCRRFDLGGSLDRRPKVERGGGSSEVEAESGPGGRARRRPSSEVGVESEPGGRARRRPSSEARSSLSPGVGRGGDCLPEARSSPSPGVGRGGDRRLSRGRVRALGSGEADTVFWRRGRVRALGLGEAETVFRRRGRVRALGSGEAETVFRRRGRVRALGSGETETVFRRRGRVRALGSGEAEIPMAPEAGLGCCQPHPGRWHGSRSSAGGAVFLSGQSVEGRSDSSQFGLVDGRACVRIRCQAILALNAPAIRSVGVAIWPRLLVREAFPR

SEQ ID NO: 61016 - protein, 85 aa, Zea mays
  Coding DNA Sequence Number=SeqID_17641
MSRAGVLGEQLAEAMERPVRSSAWARFLEETLAAMAQARIVYPSESYFSRKVMSELVCPRLQNLGDDERPFLGRHELMAPSGVLS

SEQ ID NO: 61017 - protein, 681 aa, Zea mays
  Coding DNA Sequence Number=SeqID_17642
MVRSPAFALNLQNRDPAAFVREAEDGAVWLVGRYVPRTEGQGSWDIRGSNDRLNRVFELNQLPYGGYPGQDDVDRRGKKPVVETGDDPAPAAAPSSKKRKLGTAMGGLGVSDGFARELMRTCAAPEGRMTSPELRESSARMLRVTGGWWPRNVPIPRAVGEDFFTSRMVREWKVFPYGQNIAAIVSAVMDKDRQGAAQKRQTVVRLHEARPKRQWGAAKAVAPGGGKPPLAAKLGGPILSKAPEAEAGAGGSKSTKAVPPTSRVSEVAKAARELPSSGKRVADFATDISVDDYLGGSDKGQLAIVAPAAAAMGAAVVLKAKGGALSAGGEMSALAAVRDEAGAVSRRLKEVTEALSQVADFANRTASGALTAVVSAEVERLRTQHADAVREKSAADSKCRKLADKVAALEGEKTDLRRQLAGERRETNEALAKAQAAQVEANLARAEGNLARERAKQLQERLIALESRVERAEAATRAEAERTRKQLMGSYHKLGARTGDFEVPDREPGLRCLEWVQEELQALPTIVEGFMSYASLVTCERAMNALSREGCRHFEVFDQADEDFERDIYKVEDPVVKESAGAIYDRMWGPHGCEVVRERAETVRAQAARGERVDDFGALNSALPDPEPIPAEAVSGAVLEAPPEPAEGAPDAPASAAAGGDLPPEIAEGSRFWACARNRHY

SEQ ID NO: 61018 - protein, 147 aa, Zea mays
  Coding DNA Sequence Number=SeqID_17643
  Subcellular localization annotation: CTP_CleavageSite=76; ConfidenceScore=5.42e-01
MGHAHVWAQPHPREKTLPRPKNGFSLGRRLRLAQAQPRPTSLAAATNSPRIPQDATPATVLTTSYTTACPGAGPSMASGETSVSPEHGLSLDNIDKRTPDATSPPCAETTDIGMATETARLMSSLLLHHTGRITMCFAPYLSLFQQL

SEQ ID NO: 61019 - protein, 116 aa, Zea mays
  Coding DNA Sequence Number=SeqID_17644
MAAVRLARRWKHRGPAPSTVRGLQICGEGQIWGRESFSIRRPTILHCSLRTATALRFMVQEMEEEEVSASTGFYTQGPSPTSDNPSGGLRGFGHWLVARLLRPEKKEPSQDFADGS

SEQ ID NO: 61020 - protein, 144 aa, Zea mays
  Coding DNA Sequence Number=SeqID_17645
MGKSKKGGSSSHRSGDKRKREPTPPSEDFGDSEYSEEEFSSESKGSPAPASPPVWTYIRSVERAGLTGSNELEYSSDEENSSDSSEEGGGDGDGGDGDGDGGNDSGDGGEGDGDDGGKGSGSDSGDGSKGGSRGSYKGSNMASG

SEQ ID NO: 61021 - protein, 424 aa, Zea mays
  Coding DNA Sequence Number=SeqID_17646
  Homolog annotation: Hit_ID=Q6QP51; Match level="QueryCoverage=37%, HitCoverage=95%, E-value=2e-18, Identity=36%"; Hit description =Putative growth-regulating factor 1
  Subcellular localization annotation: CTP_CleavageSite=48; ConfidenceScore=5.18e-01
MGMHPFDFDASSVAAQAHTPCNRRASYYVRKTAPPLTPMPRLLDCGTGAATRGNPVHGPTVPTKHIGHRDWERGYSERDPSPLRKRAPSPPTDQGLAPRKGSIAASEHSGSAPTTDQGFEGWPPEGFDSRLRTRRARDDSGYVRYMAEARAMLPRNSRPRWIHALPEGLLKQRANLRLAEAQLGLRHHRKLRLARPRGSAPASTSKDGLRLARPQGSDSTSTSEDGLRLARPQGSDSTSTSEDGLRLARPQGLDSTSTPEESPPRPTLGSDRPRYRGYIITLPLASSGYGEQDRRPIWLAPGSSAPPTATTSHEQGTNTSPTATPAWPSYEKAAAREDGLTSRLSLSPSRTLVTPYCKRIRPGRRTTRAAGPPAVETPTILIMPRKMEGPTFAPYSCDFCLLPAAKWSSSSVHPTGRRYKTVAI

SEQ ID NO: 61022 - protein, 94 aa, Zea mays
  Coding DNA Sequence Number=SeqID_17647
  Subcellular localization annotation: CTP_CleavageSite=31; ConfidenceScore=5.29e-01
MVFNLQTTSQLSQSSNGNTVFNKIERTEYTKSMVRAARDYFFRSADMFNQRLIQPLICTRRHMRCGRLYNLTISMPKASTTYTQAKQKAKKLRS

SEQ ID NO: 61023 - protein, 32 aa, Zea mays
  Coding DNA Sequence Number=SeqID_17648
MGKRGGGLRHPTICSGKPWGKGRLGQAALIDT

SEQ ID NO: 61024 - protein, 156 aa, Zea mays
  Coding DNA Sequence Number=SeqID_17649
MGRGRRGRGWPRRVDGKRKRAPSPPSKDFGDSEYSEEASSKSDRSPAPASPPASSEDSDDSMGLSTAARAYWRSISTLGSEWSDSDGDDEGDGSGDDSGEGDGDDSSGDGSEGDNGKGSGDDGDSKGDGGDGNGGGGSDGDMGDSGSKASGIAPLV

SEQ ID NO: 61025 - protein, 233 aa, Zea mays
  Coding DNA Sequence Number=SeqID_17650
  Gene Ontology: Mol. function=nutrient reservoir activity; Cellular component=extracellular region; Biological process=cell wall organization and biogenesis
  Homolog annotation: Hit_ID=O49002; Match level="QueryCoverage=54%, HitCoverage=55%, E-value=5e-59, Identity=88%"; Hit description =Germin-like protein 6
  Pfam annotation: Domain name=Cupin_1; Domain location=67-221; Score =114.1; E_value=4.3e-31; Accession=PF00190.13; Description=Cupin
  Pfam annotation: Domain name=Cupin_2; Domain location=99-183; Score =21.8; E_value=0.0021; Accession=PF07883.2; Description=Cupin domain
  Pfam module annotation: Pfam domain module=Cupin_1::Cupin_2; Domain location=67-221::99-183
MKGPCTPTCCTLLCASFFCFLLAGSEDEPPVIGSTSFGSEAAPAWSLNEAISSKSGSEFTGGDENTSVTQNQMPSQREQYGGTVHLFIGTSRFSLEDLRRRSIDPTAPLGQNPPHTHPRATEILTVLEGTLYVGFVTSNQADRSNRLFAKVLNKGDVFVFPQGLIHFQFNPVHDKPAVALAALSSQNPGAITIANAVFGSKPPISDDVLAKAFQVQKGTIDWLQAQFWENNHY

SEQ ID NO: 61026 - protein, 159 aa, Zea mays
  Coding DNA Sequence Number=SeqID_17651
  Gene Ontology: Cellular component=cytoplasm; Biological process =protein transport
  Homolog annotation: Hit_ID=Q336S7; Match level="QueryCoverage=23%, HitCoverage=11%, E-value=3e-09, Identity=72%"; Hit description =Autophagy-related protein 3
MALQMPRLENLRRSTAERAMSWAPCPCPRAAPPAPWRSTAGHRRSIRTLAPSGLAQPPTTSDPSTPSPAPDHARAASAPYELPVTGPYTVSVFLEKGFLSIPGFILADDNLIAKCPSWFWCILYSSRPALVIFIPKYVFYANLNVLLCSITRSRVRSAL

SEQ ID NO: 61027 - protein, 235 aa, Zea mays
  Coding DNA Sequence Number=SeqID_17652
MAVTYTYKNSDGLDVPSYFSNRGLRCNCSEVVVEVATLDVLSALTRALQGDAGILVCTPTVEFCPQVLSRAALTEGKCIDADTSCWRRDDRGLGLVELECAMLSRQSTSSRHCFMAPGEAVKLGGWRNNSLAADSAPGVALDSLDVCAGVCCRAECTAAAPGTGRNIVDVILGVAGAIFLHPNIRDLHGIGVQGKLPWQRISDDGHSAPCSTGVLFGNGLDRHAACRMAWTPPAS

SEQ ID NO: 61028 - protein, 125 aa, Zea mays
  Coding DNA Sequence Number=SeqID_17653
MARTAHQSCSDPPEAFSPSISPLCPWIHGPFPVIEFAVAPSSSLPNSGDPGTPLAHAFLNSGDLTTAERSRAARSRSPLPDNEQLVVPECVAEDPSEQQPGEGKGLRLFPEYLSVRTCLGSDNPG

SEQ ID NO: 61029 - protein, 327 aa, Zea mays
  Coding DNA Sequence Number=SeqID_17654
  Subcellular localization annotation: CTP_CleavageSite=55; ConfidenceScore=5.17e-01
MDPTYQLCPPPRSPWTGACALAHLHPLSRPAHAASRHRRPRARVLGHPAHRRPLQASLSSAPSHLERLHRRLHEELERRREEQEQDQEQQDSSPSPQREVAYERPPSPAPQPEMPPAPPQGIPAAGGDPDGDGDNDDAGGSSSHGTERSEEPELEGWIARPITRDAARGCHFHDALDTLLCRAFNQHTWSIEYCCVVYQHRRGLYPDQWEATCLVRRPDDDLWGAEAFSEHYSITERDTAEAAMQDLMGLDLKYYPRRSTGSARGVIALPVGEGNPRLNSMVNLAVVLNTELDHALDELGKHPYHSPPRGRFDYGTPDCRTRIDLDP

SEQ ID NO: 61030 - protein, 237 aa, Zea mays
  Coding DNA Sequence Number=SeqID_17655
  Homolog annotation: Hit_ID=Q6J9V9; Match level="QueryCoverage=48%, HitCoverage=30%, E-value=5e-13, Identity=46%"; Hit description =Putative uncharacterized protein
MGLGVCGSLCQVWVRPLGRSARHYGTGGYEIDGFGYEYGAGGRKQQSNRLQAHVPSWGSRGTLSHGVKRHARTGKGDTPKGILPREGSGPRALLLIKGSKAGPSEGFDSRLRALGLRAHYWSEVRRLAPQKGSTAASSHSGSAPTTDQGFEGWPPEGFDSRLRTRRARDDSGYVRYMAEARATLPRGSGAALANPAPAKPLTASTYQPENSEPDHAPGLRPVRMREQPDRPRRHEKR

SEQ ID NO: 61031 - protein, 250 aa, Zea mays
  Coding DNA Sequence Number=SeqID_17656
MYAQGRADMSRTSHAHAGAELRTRYAGAPRPRELKLRRGGAALRRGGTRQMRAGPEPPVAREPAGAASSSGAPCVHGPRWGSARTVVATPGTGAARAGEVALRKGGRVAMGGGRGWAARHGRAMAGERAAPASRGRAATAVPRSSRGGSGDGWGKADESKGGVRRGRARAGPRRGLSAAGRGERSAPGGGKVGAASGTLPRSGRAPLGGASGGVRRVGRGGIGTSASMTASVEAGLARLPGRLGIPPRVE

SEQ ID NO: 61032 - protein, 438 aa, Zea mays
  Coding DNA Sequence Number=SeqID_17657
  Gene Ontology: Mol. function=nucleoside-triphosphatase activity; Cellular component=plasma membrane; Biological process=cell division
  Homolog annotation: Hit_ID=A3ADF6; Match level="QueryCoverage=93%, HitCoverage=94%, E-value=1e-117, Identity=66%"; Hit description =Putative uncharacterized protein
  Pfam annotation: Domain name=AAA; Domain location=151-329; Score =55.0; E_value=2.6e-13; Accession=PF00004.20; Description=ATPase family associated with various cellular activities (AAA)
MGQDGVGGGVIGALLYAALAVLALRLVLSYKSAAHAVRRAWRWADEWAQAYQYYEVPRLAVDGAENPLFRKAAATSSPSPTRWRRAAASCGSTPTPAVARRGGRPRPSPHPATLDTVAMDPDLKARVRADLESFLKGRAYYHRLGRVWRRSYLLYGAPGTGKSTFAAAMARFLGYDVYDVDLSRGGCDDLRALLLDTAPRSLILVEDLDRYLRGGDGETAAARTARVLGFMDGLSSSCGEERVMVFTMSGGKDGVDPAVLRPGRLDVHIHFTMCDFEGFKALASNYLGLKDHKLYPQVEEGFHAGARLSPAELGEIMLANRGSASRALRTVISALQHVAPSPPPQRTVTAARPPRLTSRWSGHLDEASVATATSEASAAGQSPRGGGGFAKDAPIREIKKLYGLIKYRSRKDAGVVPVDDSAASPDGRDSDVSPEKDR

SEQ ID NO: 61033 - protein, 1602 aa, Zea mays
  Coding DNA Sequence Number=SeqID_17658
  Homolog annotation: Hit_ID=Q10IG0; Match level="QueryCoverage=94%, HitCoverage=69%, E-value=0.0, Identity=64%"; Hit description =Expressed protein
  Subcellular localization annotation: CTP_CleavageSite=49; ConfidenceScore=5.64e-01
MGSTGLGSILFMSPGISGHRHSSMQSSFPAPFRCLSSSGMILCHCSTCSAALVSVHCSKGNISVSSEGQPAAVAWAHGYNEDDYLGMESASTPVKEKGGSPLGLAIFHSAAEILEVLVVDSTASSLESWIGFAVDLHKALHSSSPGSNRKDAPTRLLEWIDAGVVYQRNGARGLLRYSAILASGGDAHLSSGNVLVSDSMDVENVVADSNSRDGQVIDNLLGKLVADKYFDGVALCSTSVVQLTTAFRILAFISDDKPVASSLFEEGAITVIYVVLMNCKSMLERLSNSYDYLVDEGAELSSTTELLLDRTHEKAIVDLMIPSLVLLINLLHILRETKEQYRNKKLLSSLLQLHREVSPRLAACAADLSFMFPTFAIGFGVVCHLITSALACWPLYNWAPGLFHCLLENTEATNASVPLGPKAAFSLLCLLGDLFPDEGIWLWKVELPSLSAIRSLSTGAVLGPQVEKGVNWYLHPEHVTILLVRLMPQLDRLARIIDNFATSVLMVIQDMLRVFIVRVALEKIECAVVLLRPIFMWLDDKVDKTSLSERDTFKVHQLLQFTVKLSEHPTGKALLWRMGFTRILSKLLQNCSRASFPYDNQTFGRAHSKNDLMLKWRIPLFKSIAYIFSIDPCNNEKADVEESLNEKSVHECSSVMHDLMMFCQVLPVGREMLACSLAFKELVYSYTCRSAVTLILSQIHTSNKDVLEKDESDPNHNSPSLDGWNCFSSLFKCWKKLVKYVGSNERTDYLVETIYSLTLGAITLSQYGENLEGLLILRYLFGLPSDPSGSLESSGESPSEIELFMKTYEEKICQGIENSATAVGKTLLRKLLNSIKLLRSILENSGQSADTVQMVLEEGTDSLSEIARSVVMTAHLMPSLANVSVNDESPFLFSNMWKVIVDSEEPLDCQEGEFAKRLVWELPDSSLDRQLAPGQSARRKLALGESASRRVRDNQLPEPTGQFSRGLNTSNASSGHTRRDTFRQRKPNTSRPPSMHVDDYVARERNIDGASSASNIVNSTPRGTLSGRPPSIHVDEFMARQRERQNHAPAPTGDAPQAKSQTTSLDDSLRTKPENLRQPKTDLDDDQEIEIVFDEESGSDDKLPFPQPDDSLQSPPVIIGENSPGPVIDETENQENERVPFFQRATSIPKDDENLGIGISSQTAMLSEANSSLELKHSVSSPGKNSFRDHAEESNYDSIGVSGRPSLQADHQQLSRRHEKRSPRKFSETSLSNGFHGREHRHSNNHPPLPPMPPPISSVSMQNTDSVNRQSSSFSARDRPTPNPSGYPTQSFDSSMPSAFTGLQGQTQYMLAGAGSSSANELPNVEAKLLWNTFPANRIPLETFSSGLPARPMPPLTPYSAVATQHATMNSGSPANLYSQGSVVQPSPTASIISDSNLAMNSASGSMLASNLLPSFASQFLMSRPSMPTPFFGTPLQQVQFSSGLPQNISNPQPPVSIQPRPPPPPPPPQQPHPSQTLQQLGAIQLPHQDQQHSYPHSAILPQVTLQFPNQLPIPQVQLYHQSQQESGQTLRQVGEQSQLQNQGMQADSFSQQQQDSGINLNQFFSSPEAIQSLLSDREKLCQLLEQNPKLMQMLQDRIGQL

SEQ ID NO: 61034 - protein, 117 aa, Zea mays
  Coding DNA Sequence Number=SeqID_17659
MRQINPKVPNQPVSQAEWQKLGSDAGVRAATTEEMSSANDASACPIRLWHRNLILDSIEGLQCRHRHSWKSSTDGHRAPRWAVLSTAARTACVGAILTPAPTSAPATQHADDTSSSL

SEQ ID NO: 61035 - protein, 253 aa, Zea mays
  Coding DNA Sequence Number=SeqID_17660
  Gene Ontology: Mol. function=protein serine/threonine kinase activity; Biological process=protein amino acid phosphorylation
  Homolog annotation: Hit_ID=A2Z9D5; Match level="QueryCoverage=26%, HitCoverage=9%, E-value=1e-21, Identity=80%"; Hit description =Putative uncharacterized protein
MPYPSKGWRPIFIALDAALPHLLTHTTQQDCPLDAKETTEDSQKRLLSSRCSRLIPSRRRRAADDGTVPGAACGGDLRKGEGSRRRAMQGWSGRRWAVQGYVDSSGDKSKRSVVEIKGRFSVTSENVDLAKVQEGPLSSLSRKSPEGSLLRKSASTGDYFVNPKLMAVAGSREAHISPFSWLGRRKLGVINGDWGMLKLKEAERHDLNIKRKKDLLEDQIQDVMKAAHKSQATTSGPTHNPEIHQQTPKKPKA

SEQ ID NO: 61036 - protein, 158 aa, Zea mays
  Coding DNA Sequence Number=SeqID_17661
MTDDTVGQVINWGVEEELSCVNASCMRPNCTKAAAPLNEIGQCTSSTVYCPIPSGVWVTVETPMLRSLRLGRSAPLATLQKVETQQARTDCIVEILAPLQSRHCRLYASCKEDEDDYESGLTVKPEPQLTDSRENATCLMNVAVLCNIYAQSSVDLGG

SEQ ID NO: 61037 - protein, 62 aa, Zea mays
  Coding DNA Sequence Number=SeqID_17662
MGGKTGAAAVGLPELNNRYVLSGKMEKTETNDRDGFFIACRVVYIQVFPRGVSLGNNCPWMD

SEQ ID NO: 61038 - protein, 137 aa, Zea mays
  Coding DNA Sequence Number=SeqID_17663
  Gene Ontology: Mol. function=structural molecule activity; Cellular component=cytoskeleton; Biological process=multicellular organismal development
  Homolog annotation: Hit_ID=A2X6S3; Match level="QueryCoverage=100%, HitCoverage=36%, E-value=9e-44, Identity=62%"; Hit description=Actin- related protein 3
MANLDFYIDDEALAQSCASSSHSLSHPIRNGQVGAPTVYCRVQLLSPLTAPETREYTGEIMFETFNMPGLYIAVQPILALASGYTTTKCEMIGVVVDVGDGATHIVPVVDGYVIGSSIRSIPITGKDVTQFIHQLLK

SEQ ID NO: 61039 - protein, 141 aa, Zea mays
  Coding DNA Sequence Number=SeqID_17664
  Gene Ontology: Cellular component=microtubule organizing center; Biological process=microtubule cytoskeleton organization and biogenesis
MRFTHRILSSRLTPAVLPDEHALAESINRRLGPLLYMLDSLSSQYRAAAAMASCLPNLLVAVPPRNATSLPLEALSADEVAGSSLGTGAGGLPVAVGGWPGAGVAGMPAATATIARLHVPLPKAAHHSPCSSQRHPDSRRR

SEQ ID NO: 61040 - protein, 265 aa, Zea mays
  Coding DNA Sequence Number=SeqID_17665
MSKNTRDTRFIPRFGHTTKVPYFLVEAPTKSRVSFNPNPPFADHKACHWYFNPSITEAEPYYEVTFPNPIEREDKELKVLLESGLESLPDEGCTNSTSWLLMALLKCEWFCFDNIAKRIIGKPCASLLTSATSTSNIPPDLAAIVSLKFTFAVVYNEMSFQVSEKELFIKSVIASHGRDLTFPSPKLKIPVQPSTPTQLLGAAKQPVSPSSALSKLSTAISPENSPQTEDNLQNEDQNILAFESPPKRARRKSLKFDCDKNLHDE

SEQ ID NO: 61041 - protein, 172 aa, Zea mays
  Coding DNA Sequence Number=SeqID_17666
  Homolog annotation: Hit_ID=A2Z762; Match level="QueryCoverage=54%, HitCoverage=12%, E-value=8e-19, Identity=58%"; Hit description =Putative uncharacterized protein
MGLSISYPPDDYLPAVEDDMGRLFIWSLSFDDMEAAADSPSYSPSALPPAFGSGKLIMEGSLGFFERRETDSVQMQNVLSIRNPKPPNREACSSVSPGHENLHNSIDEAIMLKLYHALWRMLSGSTVGIFPSTYDLWDSLFEKWSPIAYGLLEKFMNTPATEFKVIFQNNHI

SEQ ID NO: 61042 - protein, 387 aa, Zea mays
  Coding DNA Sequence Number=SeqID_17667
  Gene Ontology: Mol. function=DNA-directed RNA polymerase activity; Cellular component=chloroplast; Biological process=transcription
  Homolog annotation: Hit_ID=O82725; Match level="QueryCoverage=58%, HitCoverage=34%, E-value=3e-45, Identity=70%"; Hit description=DNA -directed RNA polymerase
  Pfam annotation: Domain name=Actin; Domain location=5-257; Score= -222.8; E_value=0.011; Accession=PF00022.10; Description=Actin
MARWALQRTLSGGELGNHGEVQCIFNYLQCDPEDHYFLLTESPLTAPETREYTGEIMFETFNVPGLYIAVQPILALAAGYTTTKPPADQTPDSSPPAFKHVLRQPIIENGRLKKKHWVIDHLVHEGFESTARHVDIPYLPMLALDILGSTKWRVNRRVHDVVETIWSQGGGIAGLVDKANNQRTLMKCRNGSTSIKKAKKTNRELHVRDVTLSSNSRAATRKVWVVLVEDTLANKYGGGIEKLSHEGKLAFVENQLFDIFDSAANPIDGNYWWTNAEDPFQCLAACMDLSDALRSPSPYHAVCHLLIHQDFRIAPPPPRIVAPHLRHFRHRALDTTSHGSSCVTWKIGGGKGGAEVDDVSGVKEGKGMQFNQQLRTKSDAYVPIQRG

SEQ ID NO: 61043 - protein, 159 aa, Zea mays
  Coding DNA Sequence Number=SeqID_17668
  Gene Ontology: Mol. function=sugar:hydrogen symporter activity; Cellular component=integral to membrane; Biological process =carbohydrate transport
  Homolog annotation: Hit_ID=Q8W545; Match level="QueryCoverage=58%, HitCoverage=37%, E-value=5e-37, Identity=82%"; Hit description =Putative Na+/myo-inositol symporter
MAVAGAIFGVAFGGWMNDKFGRRPSIILADALFFGGAVIMAFSPTPRVIIIGRVFVGLGVGMASMTAPLYISEASPARIRGALVSTNGLLITGGQFLAYLINLAFTKVPAQLNIQLLPSSTNLENIVLQSARDLAVDAWHYRGSCPGPVRTDANATRIT

SEQ ID NO: 61044 - protein, 163 aa, Zea mays
  Coding DNA Sequence Number=SeqID_17669
MSQDGGMDVELRHRSRDMSVASSGKDSADTGRNSSTEFLRRREAMDTVDQLRHSVHRRSEVTRNLKTKLEKYLELHQKGASGVELCEYREVLGSDCLFSFSDEGFLYRLRPGIRSGFSPLVELCKGLVVSPCLLTLAVFKGLRNPRQIRDHGLWVKMRNLCKV

SEQ ID NO: 61045 - protein, 82 aa, Zea mays
  Coding DNA Sequence Number=SeqID_17670
MDVELRHRSRDMNVASSGKDSADTGRNSSTEFLRHREAMDTVDQLRHSVHRRFKIPAVDLGSKCPRSVPVRSVDDLISTIHI

SEQ ID NO: 61046 - protein, 299 aa, Zea mays
  Coding DNA Sequence Number=SeqID_17671
  Gene Ontology: Mol. function=protein serine/threonine kinase activity; Cellular component=cytoplasm; Biological process=protein amino acid phosphorylation
  Homolog annotation: Hit_ID=Q53PY9; Match level="QueryCoverage=87%, HitCoverage=66%, E-value=1e-71, Identity=52%"; Hit description =Second messenger-dependent protein kinase, putative
  Pfam annotation: Domain name=Pkinase; Domain location=4-241; Score= -79.5; E_value=0.00075; Accession=PF00069.16; Description=Protein kinase domain
MEAAIQSLSQKKMQGEFIPRREVDELSVALGNKEHPGRVRGSSSKFYAAEVVAALEYIHMMDIVYRDLKPENVLVRADGHIMLTDFDLSLKCDPTAPTLAHVISDPLSLAARSGAAASCAISSCIVPAASCFQLFPGRGRRRRCWRTKKLSSNSGNNFASSGGGGGSSGSGLELEFVAEPVELRSMSFVGTHEYLAPEIVSRQGHGNSVDWDLVTALLAKDPARHLGATVGVAAIKRHPFFAGVNWALLRCAAPPYVPPPFSVVANAKAGGRSNGNAVVDDDDDDVSDDSCPGTPVEYY

SEQ ID NO: 61047 - protein, 27 aa, Zea mays
  Coding DNA Sequence Number=SeqID_17672
MDERACWLVMWHGEGSWAARDLGPNRF

SEQ ID NO: 61048 - protein, 62 aa, Zea mays
  Coding DNA Sequence Number=SeqID_17673
MAKVKKRVLALVDELISYEELQHVDASVSWAELQLNSTSAVNLFDHTPAELASGQLSWGFLS

SEQ ID NO: 61049 - protein, 769 aa, Zea mays
  Coding DNA Sequence Number=SeqID_17674
  Gene Ontology: Mol. function=transferase activity; Cellular component= nucleus; Biological process=metabolic process
  Homolog annotation: Hit_ID=A7NZV5; Match level="QueryCoverage=32%, HitCoverage=61%, E-value=5e-87, Identity=60%"; Hit description =Chromosome chr6 scaffold_3, whole genome shotgun sequence
MDPSSRTDSVLTLALANQTRSLLAELDTRLHSIDAKRETRESALESRSAEAAQSMADFSSNLRTDVAAHLTAADAVVDALLGQIEADAVTRVSTASASTPSTPVVAVGIAIVADNWGGGFDGGEDSIEQHYTVPSIVADNWGGLFDGDNVVANALDAIPTDTLSRLTCLARRDHAALQELESPPTDEVMRACDAFLLLVGGDHFMPVLRGALFVICSSCVSLFQLPVNFAVSSRGTRRLLCSSCPKVLSYSYRNPARKKMQLQSPFGGDAYNTDEFEQADPESYSKEYGLSFGISHSISTEDGILTTISISTSTILHTSLVHTLPGASVPSLAMLSSMSLVHASLGAHQVFEELSSCTDNVFNNSIGFTPALMAYGIDIRVIHAIKSRRSPVGKVLTILQANSLSSKEVERRSCISLEEFICNYFSCDTPIIISGTIDHWLARTKWNDIEYLKEIVGDHIFAVEVGKNYVCREWKQELITFSQLLDRMTSIVCSSNLTYRAQHPWFEQLKELSEYMMVTECCYAGAGELQSLNAWFGPEETVAPLHHDPHHNILAQVLGKKYIRFYRAVIAGDSYPHTATMLSSTSQVDLDNIDLKEFPTVESLEFIDCILVEGDLLYIPTKWWHYVRSLPTSFSVSFWWHYKVVDYWLDRGKSGFDVYKYRLLRIEGQEPMGTVNYRVADSSLRCVKLVVSLQHLPSTGSSSGDCAVSLRRWLKLPSATSLEASTSLDSEVHSVLLVGSALLCLTSAKGLWVFGSMPFCQSFFLTLEF

SEQ ID NO: 61050 - protein, 77 aa, Zea mays
  Coding DNA Sequence Number=SeqID_17675
MTSSPRSGTQIDEYRQYDASGNKSREKLGTLTDSAHARTVRATTADRPDREPSGLRAGPSALLFLAFNICPLPFGES

SEQ ID NO: 61051 - protein, 498 aa, Zea mays
  Coding DNA Sequence Number=SeqID_17676
  Gene Ontology: Mol. function=DNA topoisomerase type I activity; Cellular component=chromosome; Biological process=DNA unwinding during replication
  Homolog annotation: Hit_ID=A7QSU2; Match level="QueryCoverage=96%, HitCoverage=55%, E-value=1e-156, Identity=54%"; Hit description=DNA topoisomerase
  Pfam annotation: Domain name=Topoisom_bac; Domain location=3-183; Score=-134.3; E_value=0.00021; Accession=PF01131.11; Description=DNA topoisomerase
  Pfam annotation: Domain name=zf-C4_Topoisom; Domain location=240-280; Score=30.7; E_value=5.4e-06; Accession=PF01396.10; Description =Topoisomerase DNA binding C4 zinc finger
  Pfam annotation: Domain name=zf-CCHC; Domain location=479-496; Score =20.2; E_value=0.0013; Accession=PF00098.14; Description=Zinc knuckle
  Pfam annotation: Domain name=zf-GRF; Domain location=386-427; Score =60.8; E_value=4.6e-15; Accession=PF06839.3; Description=GRF zinc finger
  Pfam module annotation: Pfam domain module=Topoisom_bac::zf-C4 _Topoisom::zf-CCHC::zf-GRF; Domain location=3-183::240-280::479 -496::386-427
MVVMMTRHILLFIQPNFQKRLYEFVVRHFLACCSQPAVGAETTVEIDIAGEQFNASGRVILAKNYLDVYRFDSWGGTLLPTYNIGQQFVPTTLTLDSGVTRPPPLLAEADLLSCMDKAGIGTDATMHDHIKKLLDRCYATKDENTRFSPTNLGEALVMGYDEMGYELWKPYLRSMMEADMKSVSVGTKSKSEVLESCLQQMKACFLDARVKKAKLLDAMGTFFARSNRPINETQNPVEVVRPCGACNGSEMLLKRRASGEFMVGCRSYPQCRNVVWLPGSLSEAAVTNQVCPICAPGHLRVPFVDPDLCWLLFSFPIAIPLKLYGNSTTPTGPVYKIQFKFRRRDIPPNFDVDHLGCVGGCDDILKDLMEISRFGSRSQAATPGQVLCTSCGALCISRIANTEANRGRRFYKCQDPGCGFFKWEDEVDNGTGRGRRGRGSSRQASASASAGRRGGGRRGRGRNADGGMFVSATGDTVLGCCFNCGDPSHFANACPNRR

SEQ ID NO: 61052 - protein, 103 aa, Zea mays
  Coding DNA Sequence Number=SeqID_17677
MTISSKFDSLPNSSDNSGEEFLTVCSSSGGNPEHHRDPLDESFVTALPVRQSNFWFIVNLRKNLMSSSNAGLKGLVGRKTRVDGERSSEGAMRISTVHTSLSK

SEQ ID NO: 61053 - protein, 587 aa, Zea mays
  Coding DNA Sequence Number=SeqID_17678
  Gene Ontology: Mol. function=sequence-specific DNA binding; Cellular component=nucleus; Biological process=regulation of transcription, DNA-dependent
  Homolog annotation: Hit_ID=Q10RB5; Match level="QueryCoverage=100%, HitCoverage=100%, E-value=0.0, Identity=64%"; Hit description =Associated with HOX family protein, expressed
  Pfam annotation: Domain name=Homeobox; Domain location=336-394; Score= 0.9; E_value=0.0088; Accession=PF00046.20; Description=Homeobox domain
  Pfam annotation: Domain name=POX; Domain location=143-285; Score =212.3; E_value=1.2e-60; Accession=PF07526.2; Description=Associated with HOX
  Pfam module annotation: Pfam domain module=Homeobox::POX; Domain location=336-394::143-285
MATFFSTSTNQRDLAGGGGDMSSFHHYAYSDPPAGGLMPFPATIVSSEGHVAHGGDDGGRGAFVDVNARDGPTGGAEMGLQTQLLMANAASAVQHQGLSLSLGTQGVPVSLYQYRQAEAGMAAAAFLSPNQASVAATRSAQSIYVQNSRYLKAARELLDEVVNVQDAIKRKGDKSQQGKDSGGGGGGGEGKDAETSDEKAGEHEGNSSAPELSPSERQDLQNKVSALMALLDQVDRKYRHYHHQMQMVMSSFDAVAGAGAARPYTALALQTISRHFRSLRDAVGAQVQSLRRSLGEKDGSAQGGGLPRLRYIDQQLRQQRAMQQFGMMQQPQHAWRPQRGLPESAVSVLRAWLFEHFLHPYPKDSEKLMLARQTGLSRGQVSNWFINARVRLWKPMIEEMYREEFGAEMDSHSSSENAAGNKGKDEAISSEDHEEFQSPSSAAAAAVPLPGHLSAFKSEAIGVMDAAGIGASSSLDGAVIGPYATSLNLGGGGGILQEALAHHHHHHGGADARFVQAYGDMAGFGGYDGGSVSLTLGLQHCNEAGAGAGPAEPQALLYGSAGDFDFISGSEDRQRFGSSQLLHDFVA

SEQ ID NO: 61054 - protein, 317 aa, Zea mays
  Coding DNA Sequence Number=SeqID_17679
MRCRRLLGLGCPRLLLRRRGEGTRQARMSFFRHVGKTSSIPPPAGGLSAAIVAVARRGKEYHVVAVVEGHELKTPETEHRPGLERLLETTHLELDGKLFVNTQQAPTWRANCRRFDPGGSLDRRVGRGGVRRLPGPSPSPSPRVGRSGVRRLPGLSLSPSPGVGRSRVRRLPGLSPSPSPGSGEAESSSGAEPESEPWGRAKRSSSSSGAEPESEPWGRAKRSSSSSGAEPESEPWGRAKRSSSSSGAEPESEPWGRAKRSFLWRLRPDLAAVSLTLPSGTAVGAAQAALSSCQAGQWSGEVTAVTSALSTEGRASG

SEQ ID NO: 61055 - protein, 398 aa, Zea mays
  Coding DNA Sequence Number=SeqID_17680
  Subcellular localization annotation: CTP_CleavageSite=68; ConfidenceScore=5.24e-01
MSSRSPHASCLSTFRAPRWGSPWFFRLVIVGETQLRGSWYLSAIVRLQGFSSGSPAASPCRWSPKTVTSSSVVGRSKPGCDLGPAPSFKDLRHPGWGGGLAEPKLYLLHGSADHLFFQLLVVETILQLCGGGVLQPCRGRRTVAAQLGCNIPSSVLAFVARTGVRACRCALERPALAGAALVDRWTSPSVSTWWQLKKASPLSGPSAPPTDRPLALLALMSGSRPLSGDANESLPVAVSVLGPWLLLQRSLAGRPELVAPQALRAPAGPSTGGTSVGVELPRPRAGLMSSGDNWLRLRGDRPSRLLEPDSWKRPWRRWPERGADVVLRSGDPPTVSPSEARSDRAEGVVDAEGAAAPFNRQGPSLQDRKVMSERGSPLLAPEGGSGFLPRQGRPFLDG

SEQ ID NO: 61056 - protein, 155 aa, Zea mays
  Coding DNA Sequence Number=SeqID_17681
MRLLKWYLFLTCGGGVRQQGCLDCALNKQKCRGENISNPQTQPNPTVDGGLIQIFHGVFYAKCLGRRGPESAHDNLQSDPFAKDPAVDNPHLIPAVYNPSNAPKIIFLLSLRSRTTARHTGIRMASDEPHGRASEDRRVNTEGEPGHGSATTGVR

SEQ ID NO: 61057 - protein, 143 aa, Zea mays
  Coding DNA Sequence Number=SeqID_17682
  Gene Ontology: Mol. function=carboxyl- or carbamoyltransferase activity; Cellular component=ornithine carbamoyltransferase complex; Biological process=amino acid metabolic process
  Homolog annotation: Hit_ID=Q8SA97; Match level="QueryCoverage=100%, HitCoverage=24%, E-value=2e-17, Identity=40%"; Hit description =Ornithine carbamoyltransferase
MALPVDVAGLRPRLGDVEAPLKPRLSLSSVAEAESEPLGQARRRSFGRGQGGVRALGSGGAEFVVFRDLARVRALGRAERSFLWCIWQGLTACQSHSVKWHCSRSGAGGAVLLSGRPLQLYADGGYQLRIRSLEGTPNYGPRQ

SEQ ID NO: 61058 - protein, 86 aa, Zea mays
  Coding DNA Sequence Number=SeqID_17683
MADSVKFRIGQSDICVLCLCASEVSEALRVVRSISTVVGCSERGHAACCSSGVTLVPSPLSALHRLGRSGAGSPVFPCGRVVDRSL

SEQ ID NO: 61059 - protein, 81 aa, Zea mays
  Coding DNA Sequence Number=SeqID_17684
MAAAIDVLLMTEQHRIPTVTRFVVLSHFGVVVRSYMRLNGRRKLNWNPGLSKQSVGDARLLVPEAQAPGSSKRSSRSKQGK

SEQ ID NO: 61060 - protein, 242 aa, Zea mays
  Coding DNA Sequence Number=SeqID_17685
  Gene Ontology: Mol. function=transcription factor activity; Cellular component=nucleus; Biological process=regulation of transcription, DNA-dependent
  Homolog annotation: Hit_ID=A2YFS9; Match level="QueryCoverage=41%, HitCoverage=21%, E-value=1e-21, Identity=57%"; Hit description =Putative uncharacterized protein
MRPPAPRPESKSVTATPRAARSDAHTEPDTAIVGKSKVRLQAAARTGWIGSFSYQRCGQTCLAASEIGNQHSTHFPNLNLKLTRDSYLLKTENDSSPPPDASSVCPDWFCTPSEEAAEVYDIAAIKFRELNAVTNFDMSRYDVESILSSDLPVVGGATGRAAKFPLDSLQPGSAAAMMLAGAAAASQATMPPSEKDYWSLPRPALPAAAGAAVPCFCFTRLYGSGGVNVGLHEWAPSSGQLI

SEQ ID NO: 61061 - protein, 420 aa, Zea mays
  Coding DNA Sequence Number=SeqID_17686
  Gene Ontology: Mol. function=oxidoreductase activity; Cellular component=integral to membrane; Biological process=electron transport
  Homolog annotation: Hit_ID=Q10CG2; Match level="QueryCoverage=76%, HitCoverage=84%, E-value=1e-160, Identity=83%"; Hit description =Amine oxidase, putative, expressed
MEDGSELRFDHGAPYFTVTNGEVARVVGGWEARGIVAEWKATFACFDLATGKFTDFEKEGTAKKYVGVPAMNSICKSLCLEDGVVAKFGVTVGKMDWLQDRSSWSLASLDGKDLGYFDYVVATDKNIASPAFSGLTGRPPPLDLSSFPRLPTALQDIPVRPCFALMVAFSEPLATVPVHGFSFNNSNSLSWAFCNSSKPGRACVPPNRQSWVLHSTTEYASKVINNIGPRKPSAEALAKVAEELFREFQATGLSIPRPIFLKAHRWGAAFPAIAISGDDKCVWDKSTNLAICGDFCTSPSVEGAVLSATRGVSEILECLRCPSRVVGFCFATDEIFFSKKLPLSDNLCVWHSLGMRGKLQAPEQCFVSIDYSCSSPNGFNPKRGYFSQLQHTPFSHGYDTSHGIEITPYDSNDVRGRRMA

SEQ ID NO: 61062 - protein, 226 aa, Zea mays
  Coding DNA Sequence Number=SeqID_17687
  Gene Ontology: Mol. function=hydrolase activity; Biological process =lipid catabolic process
  Homolog annotation: Hit_ID=A3ANC5; Match level="QueryCoverage=71%, HitCoverage=42%, E-value=6e-39, Identity=54%"; Hit description =Putative uncharacterized protein
MSSRRHAIFRPVQLQNSLRHQVSGRLAGYALLRSIQAHRRGRRRRGARQPHGGRHHARAQQPGATFPLAAGVDDLLVVSIGSGEADQRGAASSASQIVRIAAEGVADTVDQAVAMAFGHNRTTNYIRIQATGTPRGASRGAAAEAEEMLAQRNVESVLFRGKVVAEQTNAEKLERLAHELVKERDRRRASASASPAAAAPALVKHHRPSAAPSYSSLVSHTLASIM

SEQ ID NO: 61063 - protein, 256 aa, Zea mays
  Coding DNA Sequence Number=SeqID_17688
MQPGCTPPPAVTQDGDLQLDGGGKRAGLRPLPLPQPQGFSSPGLGRGVCRVGVGPRVGGGPLLHSVIGGKGDRRPWRWQLQRAWLSDASGFGAARGVGVCHGSLKSTRPEVSAAAVRPPGAEVVVVAAAGAGDGAPFVGLLLLRRPTPIEWGDSPVDYLNRFTKHESPRVKVTSEHEQRRSWLENENLVGRSLAGLSVSGTDAGVDQPRPRVGLAPLGDGRPRPQRSNLAEVVVDAEDAAAPFQRQDSSLQDQIVL

SEQ ID NO: 61064 - protein, 127 aa, Zea mays
  Coding DNA Sequence Number=SeqID_17689
MAERYQLPRSCVPPTMWREDGGYPPSGGLEGGTYGRRSGRRFAFAVITAPKKQGPGKGDTPKRILPREGTGLRASLLIRGSKAGPPRGSTAASDRVGPTPTTGQRFEGWPPEGFHGRLRLLGLRAHY

SEQ ID NO: 61065 - protein, 154 aa, Zea mays
  Coding DNA Sequence Number=SeqID_17690
MVLEPHDVQTIRHKEYEIARRLGAHEHAWLHPMVERLVYRRLVTPSYGSHYWPTPSSPYMEEENNTIHPVPTTVPTTRIKLTTISHDLPRVQPRAQQGALPRPTSGLGLSLGLGRRSPPRPTPGLSLGLRRRLRLARPRPRTDYATGDTSLPYP

SEQ ID NO: 61066 - protein, 105 aa, Zea mays
  Coding DNA Sequence Number=SeqID_17691
  Homolog annotation: Hit_ID=Q2L6T8; Match level="QueryCoverage=81%, HitCoverage=40%, E-value=1e-14, Identity=46%"; Hit description =Uncharacterized protein At1g01020.2
MSDAQATGDGPRCVGCGGRVKTLFVQYSPGNIRLMKCDKCKAVADPYIECEFMGILYRSTLIHIALDTCCWRCIIGKHRIYIHVTPGSAIFSQIIFRYYKVVEIK

SEQ ID NO: 61067 - protein, 433 aa, Zea mays
  Coding DNA Sequence Number=SeqID_17692
  Gene Ontology: Mol. function=microtubule motor activity; Cellular component=microtubule associated complex; Biological process =microtubule-based movement
  Homolog annotation: Hit_ID=Q2R2P7; Match level="QueryCoverage=27%, HitCoverage=18%, E-value=8e-36, Identity=67%"; Hit description =Centromeric protein E, putative, expressed
  Pfam annotation: Domain name=Kinesin; Domain location=1-186; Score= -82.2; E_value=8.2e-10; Accession=PF00225.14; Description=Kinesin motor domain
MNPPCEPVARDRQQPPPPRAAHHVFDGAANNERIYGTVVRELVGAIGGGFNGTAFTYGQTSCGKTFTMNGSDADPGIIRRAVRDVFDTVRQADDREFLTRVSYMEIYNEEINSLLTLEGQKLRIHESLDYVEAEHRQRVRGARVPQEEEEGRQRQGGREEDGEGAAQRQEPPQKKQFWAPAPLTTKSWADVEDDDHYFATTASPRPVWGTAGEPAKEEDDVDDVVRAALQEVATLGNKVEKEAFASLHFLWSCGMKMEDMAFFFAELALMQYGYGLVTRLPSLVAASAVYAVRLTVKRAPSGPTPSSTTLLCTRCSEERPAKGSGSWSSPVGSVPAGGQPRADNGSTTIEIALKIAFRKFSLDHGIMASSENSTRNERNIKLKVLVLNGSYHGDTLGAMEAQAPSSYTSFSSVAMWFSVPTAVFFVPAFSLVA

SEQ ID NO: 61068 - protein, 1347 aa, Zea mays
  Coding DNA Sequence Number=SeqID_17693
  Gene Ontology: Mol. function=histidinol dehydrogenase activity; Cellular component=chloroplast; Biological process=amino acid biosynthetic process
  Homolog annotation: Hit_ID=Q10CF6; Match level="QueryCoverage=56%, HitCoverage=97%, E-value=0.0, Identity=58%"; Hit description =Expressed protein
  Pfam annotation: Domain name=Histidinol_dh; Domain location=926-1339; Score=898.1; E_value=4e-267; Accession=PF00815.11; Description =Histidinol dehydrogenase
  Subcellular localization annotation: CTP_CleavageSite=25; ConfidenceScore=5.07e-01
MEAVQTVRDLIRFFRVSSPFAFAPRARALSERTNPLLNRSSGPSVVTRLQPDAGNGAGFYDGAYSFLDTTKACATRFSSGSVTSDDSPAVTPRLLSLMSSSSPDNCSSSSEWPDRAAASRSNRYLFDANAQARCAGYLDLMRLEVDAQLGRLRGGVTGLESYALPGNGRAIGGAHLGMSLDVMLIEIDERFNTLKLLMGSVFRQAKEMLGSVNSSVSDLQSENELQLEVFGAIIGECVSGLQEELERKLYEQISITNTMGRNWKEAITQFAAMREDLGALCKLLLPLAPEAHISNGKNESPGSKSNRWKYNFFGKKSREDRSPRAEDSKSFRKQKSFGAKDVISEKSDFHHLNGMTREQVITYFKSEISKMKRMHESALQEKTEELFRLKREKGSHSLKNDIEFEPLRKKIPELVLRMDQIISKNIKVPAICMTHDELDERCRLMSRIDALFYENQHFRGLLADRMKDVKALSSQLSEASTELSMQMLSEEELLRQIDKVREDCEDLRIECDVREGMYQTVTKHLLDDYKDSMDGAALNLSAKLSSLESAVSEKDKALCIYNEENHRLKEKLAELEKERLIHGDQEVPEAIKQDSTEIVLRDIEVEPCTSPRRSNVNNSRYDELVKLDSSLEQTSCVLKEMNNKNMDRSSSLSRNEQEKQLECILVSIMKLSKDFVEIEKKMSAERTENRSEELSDHCNHMVRQAMVLTKIGLWYKQMIEARRSELQKAEAKVMVLGDKITAQLSLLRKIYLALDHYSPTLHQHPGLLDAFMKTCKLVADLRTGTRQVLPLASGTRLLLAPAPGAAAPAPPPPARPLQVLPRGTRPLLQPAAPTPTGDCSSSGPPPAGAACELHSCSSPPGWQSCSFNSLEGKSLHALRAPTPLVGSTRIGFSSGLRFCSNRVLRGLTPIGAMKSYRLSELSDTEVSGLKARPRIDFSSIFGTVNPIVEDVRVRGDAAVKHYTEKFDKVMLDDVVVCVSDLPDAELDPAVKEAFDVAYDNIYAFHVSQKIPEKTVENMKGVRCKRITRCIGSVGLYVPGGTAVLPSTALMLAVPAQIAGCKTIVLATPPSRDGSICKEVLYCAKKAGVTHILKAGGAQAISAMAWGTASCPKAEKIFGPGNQYVTAAKMILQNSEAMVSIDMPAGPSEVLVIADKYANPVHVAADLLSQAEHGPDSQVVLVVAGDGVDLGAIEAEVSKQCNALPRGEFASKALSHSFTVFAKDMVEAISFSNLYAPEHLIINVKDAEQWEEFIENAGSVFLGQWTPESVGDYASGTNHVLPTYGYARMYSGVSLNSFLKYITVQSLTEEGLRKLGPYVAKMAEVEGLEAHKRAVTLRLQEVEANVTV

SEQ ID NO: 61069 - protein, 237 aa, Zea mays
  Coding DNA Sequence Number=SeqID_17694
MTLPVDVSGLCPRRGDVEAPPKPRAESEPWGQARRSFVVFRVLARVRALGSGGAEFAVFRVLARVRALGSGGAEFAVFRVLARVRALGSGGAEFAVFRVLARVRALGSGGAEFAVFWVLARVRALGSGGAEFAVFRVLARVRALGSGGAEFAVAPLARPDCLSDSLCRVALQSEWRRRRCPSVRLQLARRLLDAWAWASKLACQKSEKRVHLARLQAVYMVACPFRPLVWAKVGGRL

SEQ ID NO: 61070 - protein, 158 aa, Zea mays
  Coding DNA Sequence Number=SeqID_17695
MALHKLCDDGGPQLSYGSRRRQQGLDRSNSCPSARLRRTSDSHDITPARCQDLSGCHIGMAFLERVGRAGPRTGQALSWGRSLPSPAWTLVTPLLQAHPTWARDEHEGHGTSTSLTLDSGHLASPPFALVHALDPSGLGHAAHSLVGFGTPLSRNADT

SEQ ID NO: 61071 - protein, 336 aa, Zea mays
  Coding DNA Sequence Number=SeqID_17696
  Gene Ontology: Mol. function=sugar binding
  Homolog annotation: Hit_ID=Q10M12; Match level="QueryCoverage=74%, HitCoverage=93%, E-value=1e-122, Identity=78%"; Hit description =Expressed protein
VKLVPFNPEYQDESVLWTESGDVGKGFRCIRMVNNIRLNFDAFHGDKGHGGVHDGTTVVLWEWAKGDNQSWKILPWGDEAYAAGGSSAANAPRFGGGGEPTVRIYCKADEGFSATVRNGAVCLAPTNPRDEYQHWIKDMRHSNSVKDEEGYPAFALVNRVTGEAIKHSQGEGHPVKLVPYNPGYQDESVLWTESRDVGHGFRCVRMVNNIYLNFDAFHGDKDHGGVRDGTNIVLWKWCEGDNQRWKIVPWYLTLVDGQLVCSGLQNLSDDEGPFPGRSEVVAPSGVLSQTKQQVSYLEASGPDASGVVAPQRLLSSYALVLGEPYSKSVGRTASAP

SEQ ID NO: 61072 - protein, 97 aa, Zea mays
  Coding DNA Sequence Number=SeqID_17697
MARDQGEHRQRDVRPATAVKMARPSAGKRERRRTAQKKEQGRRPLNRGEKEGLERVFQGFYVHEDQDKREKFLESRLDVLGEISKGDDVRALKKKKR

SEQ ID NO: 61073 - protein, 35 aa, Zea mays
  Coding DNA Sequence Number=SeqID_17698
MRVHSRVSTLINRVMRKMSQVDPKRGLIRRMKLMN

SEQ ID NO: 61074 - protein, 215 aa, Zea mays
  Coding DNA Sequence Number=SeqID_17699
MQLACNHAKWVLPFDSNAPSMEAQAHTSCNRRAGCYVRATAPPLAPLPCLLDCGTITATRGNPVYDPAVPARRDGQYGQKWAGRSRVLLQRVGRAGKDGTALAQGRSLPPAWTLVTPYCKRTRPGRGANTKVAGSTLPCLSPSGCFSPLRVPPRADPSVLGHAATIYSSVQGPLGFRNADTHQLAVTSTFLRMGAPDSPVRQRCATGALTVNSNG

SEQ ID NO: 61075 - protein, 494 aa, Zea mays
  Coding DNA Sequence Number=SeqID_17700
MQPGRIPSPVVTQDGDLQFDGGEKRTGLRPPPRPQLQGSSSSLLWRRHVVRREGGAHVLGGPGKGEDLPVRLEAPGARWGGVEVVAAGEGFSTDEIANSACTPRPPSFGLNGWFSSFVGESPPTAAPARKLLLQLFCHPGRRSLLLLPEWVAESLGSVGLAVRGFSWLVKGTPRPLFDEPKPEVAVSARTEAELARKEDLVGQSLAGSSTGGTDAGVESPRPQAGLMSSGDSWSRPRGGRPSRLLEPDSWRRPWRRWPGCGADVVLQSGDPPTASPSKPRLDPAEGVVDAEDGGRPWFFRLVVVGERNFEEVGTFQPSFDFKDFCQAARLHPLVGGHPRRFKDLRHPCWGGGRAEPELYLPRGPAARMQHSVLLLAFVARTGVRTCRCALPTVGVGGEVDAAVCADVVAAGGSFPTVEAVSAAYGPTPGSLALISGSRPLSGNVNESLPVAASVLGSWLLPQRSLASRPELVVPRALLCGGLFAPAGAEPEFRL

SEQ ID NO: 61076 - protein, 54 aa, Zea mays
  Coding DNA Sequence Number=SeqID_17701
MGGGLLAAASTLRSVLPLFGPPEQKSSLPPLSEQAFPLGVGSFVPAEGEPEFRS

SEQ ID NO: 61077 - protein, 186 aa, Zea mays
  Coding DNA Sequence Number=SeqID_17702
  Homolog annotation: Hit_ID=Q6JAD6; Match level="QueryCoverage=38%, HitCoverage=9%, E-value=1e-12, Identity=54%"; Hit description =Putative uncharacterized protein
MKNVSAPGGGDDEDPRLPFRQVKGNTVYLEQQEGRKKRRIDRAARAAAVTATAAKQAKRGDQPQTPSDQIAYRVRRLTSRPRSSTRTTATTPPPTSPAPVTPTPSTTSAIPTTSTTPASTAPSTPLSAPPIPPARFRERDETEVRPLATDPRLFDLQRATAAQIALRVHRLLDLPAFVLAAGADSE

SEQ ID NO: 61078 - protein, 96 aa, Zea mays
  Coding DNA Sequence Number=SeqID_17703
MSTWKTHTRDGNPGRTGDGSRASEENGIWALGSETIAQNGDLSEIEAWFYRIGVKFGEYVTGGVVKVPEKFGFNQIIFGWFGHFTDHVVCEDLGFR

SEQ ID NO: 61079 - protein, 110 aa, Zea mays
  Coding DNA Sequence Number=SeqID_17704
MTQWLTRSTLAGGRRESGDRGLASPAKQTLIPRSGSFTEVCSVLSEGRTGLGKAWLAGLRWQGLGWPWTRCAQANAGEFELRGCPRWYATFLVWNLSGFGAVFKVNTVDL

SEQ ID NO: 61080 - protein, 91 aa, Zea mays
  Coding DNA Sequence Number=SeqID_17705
  Subcellular localization annotation: CTP_CleavageSite=72; ConfidenceScore=5.23e-01
MSGDHTKKEMVIGGNKPTSPAKATSHGKAPSGESGNKVKGSPSHDKSRRSGVTPGFRRGCALYPQAVIPFLPGDHDSPLITTKVTQQGITT

SEQ ID NO: 61081 - protein, 334 aa, Zea mays
  Coding DNA Sequence Number=SeqID_17706
  Gene Ontology: Mol. function=metal ion binding
  Homolog annotation: Hit_ID=Q6H6V3; Match level="QueryCoverage=85%, HitCoverage=72%, E-value=1e-87, Identity=52%"; Hit description=Zinc finger (C3HC4-type RING finger) protein-like
  Pfam annotation: Domain name=zf-C3HC4; Domain location=106-153; Score= 57.6; E_value=4.2e-14; Accession=PF00097.16; Description=Zinc finger, C3HC4 type (RING finger)
  Subcellular localization annotation: CTP_CleavageSite=63; ConfidenceScore=5.28e-01
MNPQHSFRARSSAQEGDRVVLLNPGTSSEGQQDNPSTARSFSFRKVINSLSAKRTHSLPVTPVGTTDKAASPPNQLDTLPTTTCIVEYLTVPEDGGEDIPEEEAVCRICFVELNEGGETLKMECSCKGELALAHQDCAVKWFSIKGNKICDVCKQEVQNLPVMLLRIPTQTANRRVANAAQQRAAQQYRFWQDIPILVMVSMLAYFCFLEQLLVTDLQSRALAISLPFSLSKSYLWAYASFQFAIVILFAHIFYNVLKVNPVLAVLLSSFTGFGIAISTNSLLVEYLRWRARRNQRLAQQAANAAQHQESGNDGGNDNDDAQQGHDPNSGNNAV

SEQ ID NO: 61082 - protein, 212 aa, Zea mays
  Coding DNA Sequence Number=SeqID_17707
MDESCTQLLSSDPMINLNTTPYAVGKIPESGVFGSRQPGAPDTVRCTTGQSGAPPDSPAAQATQTVSGPHAVEVMRKTLDDLRAEQRAGAQHIAASADEASTTLVPLGVSPITALVRLTSIFDALPVLDSATNCLQRLDQILGARLEAEGSRLYRSTIEYVLTCFRSHDPAVSLGPVVAGPVVDTEDAARVGVQGVVDMVVGRFQRDPTDDE

SEQ ID NO: 61083 - protein, 114 aa, Zea mays
  Coding DNA Sequence Number=SeqID_17708
MNTSPWPAQLRLVPVSLSLVLASLGPHHARRPAQLNWVALDHHERLWSSALPAVTMVRTFLCAVPGINLGEVFGGGSNVFLSPGSSSHGVGRPELARRGAARAVPRRGPWSAKE

SEQ ID NO: 61084 - protein, 114 aa, Zea mays; identical to SEQ ID NO: 61083
  Coding DNA Sequence Number=SeqID_17709

SEQ ID NO: 61085 - protein, 535 aa, Zea mays
  Coding DNA Sequence Number=SeqID_17710
  Gene Ontology: Mol. function=methyltransferase activity; Cellular component=nucleus; Biological process=activation of protein kinase C
  Homolog annotation: Hit_ID=Q69VD4; Match level="QueryCoverage=36%, HitCoverage=39%, E-value=5e-69, Identity=62%"; Hit description=PPR -repeat protein-like
MVFTWTVRNFFRVTGLYNQHDRGVVWLIVAPDCYFIQHNERVHMIFYGFDLLSLQHFQGHFIEADMFAPWDGQELTQFRFSGLPIYWQQSHGLNSLLFFRKLKYSSSVEIFCGAQFSFPNILLPKSWSQELATNIERHLLPEMLEVANGYIFHELHLMLASIGVTHMISCGKYLIWIIGLLTPWDPGRVVFDLKFVMLWLEALTLFQDMQLQRVEPDKFFVITLLTCYANIGAFDQFEWVHWYAEDRNMKIDAVCGTTLMEMCSKCGHVDKSLQILVQMQGKDAAAWTDIICDLTTNGQASKALELFEEQPRSKTKPNGITFPGVLSACCHGGLVDEGQRHFQAMKEVYQIEMRIKHYSCLVNLLGHAGHQDEEAATSNSTAQIPCTFERCLQFSWDPGGSNAIHRLEGKSIFKKGRMLENHAKDERKPNSCILLRNPNEGLCGQIPNIALRAIASLYIEHVPFIWKREEKEARGPTLHRVYCVSSVVLMGRETGLPQLLAPLLLTGGKGADLVIRGNVVLNTLSARSTSTLLRI

SEQ ID NO: 61086 - protein, 300 aa, Zea mays
  Coding DNA Sequence Number=SeqID_17711
  Gene Ontology: Mol. function=DNA binding; Cellular component=nucleus; Biological process=translation
  Homolog annotation: Hit_ID=Q1KSB1; Match level="QueryCoverage=28%, HitCoverage=14%, E-value=5e-26, Identity=66%"; Hit description =Putative uncharacterized protein
MSYNGSAPEPSDLNRKPANNNRLMDNPILFSQNFDKITHRVQSKNKDQVRHYYYRLVRRMKKLLGPRFSLDAKNSKDTIATMLHWVGIEMLTIKVRSVIVASPPSSIASSTVNTPETQRPWTRLYLLFSCVDLELLQEHVVTALSVESYYRSVLSCSHMRLLQRLTTLIKISRLWNYFVLEREMCPWAISKYFGDSVPTQVDLCKVMDKVQIKSKGEIKLKKMALFSQRQLRLGAPDYPVVHRTVSGGSPDSVRYARLATVNWLFSGCDQRRTAINHRTIRWCTGLSGEPFTGEVVALGK

SEQ ID NO: 61087 - protein, 328 aa, Zea mays
  Coding DNA Sequence Number=SeqID_17712
  Homolog annotation: Hit_ID=A2YAI5; Match level="QueryCoverage=16%, HitCoverage=9%, E-value=8e-10, Identity=52%"; Hit description =Putative uncharacterized protein
MDPAAVKFLLDEIGRLFDEQNAKWDARFSQWNAKREPEPYLGDEVEAEEVAASDLREARDLEREEVEHAKLHEDRSQGAADAGREVALAARLLAADACAARIVDVAAPFDSYVPAYAAQFDGFNLDHAAFLGNGANSGLMGSAFFKEREEARRCMPSQDKLVIDLDPPDNIETSLSESAFHDVPGANYMEALTTCSTPGLTERAMDELIRMAQAGERLWVNTGGREVLHVDTYDSIFAKPGGSFLGPDVHVDTWVVALGPPSVGMPHRRHGRWLLQGDLGRAGDRGQGFHPPALELDIMCRAHQVVEDGYKYFPDHQFVTFFTAPNYR

SEQ ID NO: 61088 - protein, 131 aa, Zea mays
  Coding DNA Sequence Number=SeqID_17713
  Gene Ontology: Mol. function=aspartic-type endopeptidase activity; Biological process=DNA integration
  Homolog annotation: Hit_ID=Q8S474; Match level="QueryCoverage=58%, HitCoverage=9%, E-value=4e-09, Identity=45%"; Hit description =Putative pol protein
MWGQSSENGYWRWSRGAKGSQIANKKTKKRVQQKEQGITEGSPGLAHQTVRCATGQCLVHHRTVSSAPGYSKLNSSPSGIFRGLRYNSPDCPVHHRTVFGAPRKSNSELASFGNPLRYNSPDMSGAHRTVR

SEQ ID NO: 61089 - protein, 149 aa, Zea mays
  Coding DNA Sequence Number=SeqID_17714
MGKNNKRKREPTPPSEEFGDSEYSEEEFSSESEGSPAPIPQRESSDDSDDSQGLAAEVWTYIRAVERSGLEGSDESEFPSEEEDSDGGEGEEDDDDDDDDDDDGGDGNGDGGGSGGGDGGGDGSKGGTRGGSSVGSTGGGGGGSSKASG

SEQ ID NO: 61090 - protein, 165 aa, Zea mays
  Coding DNA Sequence Number=SeqID_17715
  Gene Ontology: Mol. function=peptidase activity; Cellular component =membrane
  Homolog annotation: Hit_ID=A2WRZ1; Match level="QueryCoverage=81%, HitCoverage=43%, E-value=7e-48, Identity=72%"; Hit description =Putative uncharacterized protein
MAWATIRSSNHVDKSTCSNSVSGFLIVQTLIIDIEPDEVVKRAMNDINAAARRRVAAAERAEAEKIQQVKRAEGEAESRHLAGVGVARQRQAIVDGLRRFVPDEKSVMDMVLATQYFDTIRDIGATSRAATVFIPHGPAAVHDVAAQVRDGVLQAAAYNPYAGTK

SEQ ID NO: 61091 - protein, 47 aa, Zea mays
  Coding DNA Sequence Number=SeqID_17716
MASSFREVGGECDREVPRASSQIPVSRVKFRIESEMRNETLKLREID

SEQ ID NO: 61092 - protein, 181 aa, Zea mays
  Coding DNA Sequence Number=SeqID_17717
MEKGKVGERGEEGSMVSDAEGGEELGASGGSAGAQGRARRRGAGGWAAQARADGPPGAGVARGRQGKSFLTSTVQPTGKEARLGSIDIVDYVPKVKVVDARSDADLGEPLSSRSIWANAAKASFTGSNTQHQRRFSPVELPIDERWKGITIARVRDSRTRELRKEKRGPMVDRREREARAY

SEQ ID NO: 61093 - protein, 114 aa, Zea mays
  Coding DNA Sequence Number=SeqID_17718
MESTRFDGRLGLNSFIQTGQVYTYEIPMGNQVRIIASQTHTRLPNRWRFCPISIPMGTIFVPYPYPNREIPHGLSGIGSPLTSLVTECKTDMSAVLTVNSNMDPHMIIELKDRE

SEQ ID NO: 61094 - protein, 75 aa, Zea mays
  Coding DNA Sequence Number=SeqID_17719
MASSTTAPRVVPRLDGSDPDFDERRGHDRICDGVHEGGRVCGVAAGSAGLRRCSQICYVAEGQTRAGRLFCAYSR

SEQ ID NO: 61095 - protein, 85 aa, Zea mays
  Coding DNA Sequence Number=SeqID_17720
MGWEAGARPDELSGAEWSSESVNGVAGGVLSYVHHPIPKANNQSVRLFKLHGPSDTAAISGAPGIGPRQPATALACIPVGALAAE

SEQ ID NO: 61096 - protein, 188 aa, Zea mays
  Coding DNA Sequence Number=SeqID_17721
MPQRRITCGNGNGNGRNGNHNTDYTDEKYHSIAQHASDNINTLSRKNNGMSKDRQGYPSPRTLITPNKNFTSSLIYGTQSNEFNLEATQISMAVMRQMQPEKGEQLTALIELPRVHVSTRFAGGVEEDPHPCTHKNLQRFVRVHGFFRKPSEKRRSCSTGSSRRLRHVRCSFSEFILVSRRPAGCCGH

SEQ ID NO: 61097 - protein, 117 aa, Zea mays
  Coding DNA Sequence Number=SeqID_17722
  Subcellular localization annotation: CTP_CleavageSite=41; ConfidenceScore=5.19e-01
MSTGRWVPTVGALTCGPAWLSGGALDRPCRLSDVRCARSSRCSAVTPDSPVNYSGAPLRFPEGEGFSLESPGAPDTVRWHTGQSGAPYQGTLRLSLLSLFEPFSWSFYWLIVNLWHL

SEQ ID NO: 61098 - protein, 342 aa, Zea mays
  Coding DNA Sequence Number=SeqID_17723
  Gene Ontology: Mol. function=uroporphyrinogen decarboxylase activity; Cellular component=chloroplast; Biological process=porphyrin biosynthetic process
  Homolog annotation: Hit_ID=Q9AXB0; Match level="QueryCoverage=62%, HitCoverage=57%, E-value=9e-79, Identity=65%"; Hit description =Uroporphyrinogen decarboxylase
  Pfam annotation: Domain name=URO-D; Domain location=32-324; Score =12.6; E_value=3.3e-11; Accession=PF01208.8; Description =Uroporphyrinogen decarboxylase (URO-D)
  Subcellular localization annotation: CTP_CleavageSite=26; ConfidenceScore=5.37e-01
MYRRRRRAVCFTRARSPANKSTAGRRAARRRKGRPGFSRSAEGEVQKAPTPAPFYRQGAALRETCNPTVRRQSTVISKTPAEPLRARAASPPSSDVFGTRSTGNRHRSSSYVPLKKEDNSILNDKKNTKIDGKAALLGFVRAPWTIATYIVEGGMTNTYTNIKNMCHTAPDVLRLQLAQCIKLLYLVIMIVNRIKKECPHVPLMLYINGNGGLLERMKDTRVDVIGLDWTVDMADGRKRLGNGISVQGNVDPAFLFSPLPVLTDEIRRRLYLVACIELDVVTSLLLWVVKAAGTKGHILNLGHGVLQKTPEEAVAHFFDVTRSLRYDTHFQGSVAEELQPVA

SEQ ID NO: 61099 - protein, 61 aa, Zea mays
  Coding DNA Sequence Number=SeqID_17724
MAHNAAEGTLRRGGTGEDAGQGEEDGAVPNFPVRQDGRGKEGGDGRRSRLKKSMKHSVLVS

SEQ ID NO: 61100 - protein, 566 aa, Zea mays
  Coding DNA Sequence Number=SeqID_17725
  Subcellular localization annotation: CTP_CleavageSite=28; ConfidenceScore=5.25e-01
MSGVPASSKAPEATTGAGGPKSAKAVPPSSGVAEVAKAARALPLSGKRVADFATDISVEDYLGGSGEGQLAMVVPAAATTTAAAVPKAKGGALSAGGEVTTLAVVMDEASAASRRLKEVTEALSQVADFASRTASGALTAVVAAEVERLRTQHADAVREKSAADSKCRKLADKVATLEGEKAALRRQLAGERRETNEALAKAQAAQTEANLAWAEGNLARERAKQLQERLTTLESRVERAEAASRAEAERTHQLLVDTYRGLGAGTGDFEVPDREPGLRCLEWVQEELQALPTVVEGFMAYASLVTCEGAMNALSREGCRHFEVFDQVEEDFEQDIFKVEDPAVKESAGAIFDRLWGPHGREVVRERAKTARAQAARGERVDDFGALNSMLSDPEPTPAEAVPGFALEPTPETGGDASGAPASAAAGEGLPLEVAEGAPDASAAAAPSAEDPAAVAAEITAEATAEPTAEAPATSGPSQVQDFGPAHTTATTKFLAASTAEDGNECGGSASEFFDCANSGSSVEWTEESSEEDLDYFAALDVAAAEASPHVADAGDVPGPSTGRRR

SEQ ID NO: 61101 - protein, 71 aa, Zea mays
  Coding DNA Sequence Number=SeqID_17726
MSKPDKTFPLLILPVLPSLLNPGVGPHEFGLSDCPHSLEWLYDKGKIYFRKFGLRPFFRSYGIRICGSRFL

SEQ ID NO: 61102 - protein, 208 aa, Zea mays
  Coding DNA Sequence Number=SeqID_17727
MDVLMIRNLGEDQQGLGKGQGVEEEQQGLPQQEGDQDQSALKWTPKMHPDSDCDGLDMVGKIKRLSNQPNWFHLKIHPKDKPSWLGHSCVTGDNPRSHGVLAFNDLLLNNFYMLNTWILGHWLLYSPQYKQAWYKGEINITPNIPPSAAETVVRRRILADLAANSSADRMRLATPGSENLLGKTPRARSTEGSVESGHVTPGFKEQSQ

SEQ ID NO: 61103 - protein, 37 aa, Zea mays
  Coding DNA Sequence Number=SeqID_17728
MATFTSVVSKGLANPGDMGYTTCGYRVQPLHSVKLVY

SEQ ID NO: 61104 - protein, 105 aa, Zea mays
  Coding DNA Sequence Number=SeqID_17729
DALPDHLGSGQWGLALPGQKGNHDSWVKWFEIQGLCYGFGSTMMVLFLEEEMVYGLPNGTFAEYVDVYSSLLYHKTPGCPHCNHCSGEGEAVEGDFQEFQYYDEF

SEQ ID NO: 61105 - protein, 360 aa, Zea mays
  Coding DNA Sequence Number=SeqID_17730
  Homolog annotation: Hit_ID=A2YGC2; Match level="QueryCoverage=36%, HitCoverage=56%, E-value=4e-10, Identity=33%"; Hit description =Putative uncharacterized protein
MPSMGLGVCGSLCQAWVAMRLMVLGIGSGNDPGTYMMARLRHTARKSVIPFLPSRLAERPLRHSVIGRSSHLERLHHRLHEEQEHRRQEQQGSSFSLQQEIESVRSCSPVLPLEAPPAPPLDAPAPVVATGGDPDDGGGDSSSSHDADLSADQEPEGWVARPSLATLLAGVTSTMRSTPCYVGHLTDHSRGVYPDCWEATCLVRRPENSLWGAEVCSEHYSISERDSAEVAMQDAARRALSHYCSMLGGVADGLNLKYYPRRPSGSTGGVIVSPVGEDNPRLSSTVNLAAVLNTELDHALDELSRARAEIAQLRAERAERRHLDDGSPAPVGTQHPYRSPRRGHQPYGNPDCKTKIDLEP

SEQ ID NO: 61106 - protein, 63 aa, Zea mays
  Coding DNA Sequence Number=SeqID_17731
MAVRLPCSGLLPMAPSPISASSSPPPQLWCVLGHHDVPSAGEGIIFIRMPESFTDSWKISLES

SEQ ID NO: 61107 - protein, 137 aa, Zea mays
  Coding DNA Sequence Number=SeqID_17732
  Subcellular localization annotation: CTP_CleavageSite=55; ConfidenceScore=5.41e-01
MGGSSTVAANWAHTGHPLSPQLPPNRSRGLGEAHCPRARPQFGFEHDRRRGSNLTAETAMVCNVQSTRVLVNGRDSRRSRRAPICSCRDPGLLNRFHDLCQGPLVKLVRAARRRKGRDRADVRDPRGSKTALACCAR

SEQ ID NO: 61108 - protein, 158 aa, Zea mays
  Coding DNA Sequence Number=SeqID_17733
MGNVPGDSIEDKLDRLLAQVSTLNTHMALHDQWLAHMEKLVLSGTDATEELHDTKPGAGSGKEGAIGHGQDPLQESDGSPVPLDHRVHDRRHATGSPYDDNDDSLDNDWRGDRRISKGRRGGGPADFRQENRHGGDFRQEDRRGGRDPAGGAYQRRRN

SEQ ID NO: 61109 - protein, 89 aa, Zea mays
  Coding DNA Sequence Number=SeqID_17734
MEVAWVHMRSPAKETAVAELGENPASATGFPESVAIRWGGKILVVYLQQESVIMRFHWLRKPNLSASNPYRYPPLLKDEIETQITEMLQ

SEQ ID NO: 61110 - protein, 90 aa, Zea mays
  Coding DNA Sequence Number=SeqID_17735
MSRQEHSPPTSSPAYARGPTDSDHRQRRADHINVTVVTSPTSLDTSAELDRRRNLWPWDEVVHDVKGTDREKGEPVPKLPMEKLRLSRRK

SEQ ID NO: 61111 - protein, 58 aa, Zea mays
  Coding DNA Sequence Number=SeqID_17736
MPLMGLGVCGSLCQAWVAMRLMVLGIGSGNGCQHCNHCSGEDEAVEGDFQEFQDYDEF

SEQ ID NO: 61112 - protein, 167 aa, Zea mays
  Coding DNA Sequence Number=SeqID_17737
  Subcellular localization annotation: CTP_CleavageSite=35; ConfidenceScore=5.49e-01
MARARAYKALPGFDCTLPRTLKPHRSLARRRLPVRSVSAAAQSLCHRRPANRAIPNPVQPSEKTVHTSVKLPERGIRVCFAGEASPRSPELSTPPEYVDRVIHSTILRFLVHTVTTLPREAHRALGLNQFAVVWPEDMVAGVTWPSILPPGWTVEWDPTSAEEEHEE

SEQ ID NO: 61113 - protein, 69 aa, Zea mays
  Coding DNA Sequence Number=SeqID_17738
MTTTSNSKEKGTELIHGPQFTEVTVSAWITEGEESLTGRPLMSARMQDDWRALREFSILICKFQIEIKN

SEQ ID NO: 61114 - protein, 701 aa, Zea mays
  Coding DNA Sequence Number=SeqID_17739
  Gene Ontology: Mol. function=hydrolase activity, acting on acid anhydrides, in phosphorus-containing anhydrides; Cellular component =nucleus; Biological process=nucleobase, nucleoside, nucleotide and nucleic acid metabolic process
  Homolog annotation: Hit_ID=A7P7B3; Match level="QueryCoverage=94%, HitCoverage=89%, E-value=1e-121, Identity=39%"; Hit description =Chromosome chr9 scaffold_7, whole genome shotgun sequence
  Pfam annotation: Domain name=DEAD; Domain location=29-389; Score= -28.0; E_value=0.0052; Accession=PF00270.20; Description=DEADDEAH box helicase
  Pfam annotation: Domain name=DEAD_2; Domain location=195-381; Score =229.4; E_value=8e-66; Accession=PF06733.6; Description=DEAD_2
  Pfam annotation: Domain name=TCP; Domain location=42-220; Score= -61.4; E_value=0.029; Accession=PF03634.4; Description=TCP family transcription factor
  Pfam module annotation: Pfam domain module=DEAD::DEAD_2::TCP; Domain location=29-389::195-381::42-220
  Subcellular localization annotation: CTP_CleavageSite=40; ConfidenceScore=5.29e-01
TPPFPTARSGQPMPPPPRKDFPAFPFAPYPIQSEFMSFLYAALSSGPGALALLESPTGTGKTLSIICSALQWLLDHREAAVVAATALAHPSGASGSGGDDDEPDWLRDFKPAAAVKESTKKKAKPPAMRKTLVSRKPDGFGEEDGGDDEGEFLLEEYESDSEDVARRGVGKRAHCGSSSSSSSEDDDEMTPKVFFTSRTHSQLSQFVGELKRTEFAGRIRTVCLGSRKNLCINKDVLKMGSGNRINERCLELQKNKKSTKIKLEDDKRKVRPAKRSCGCPMLRSRSLLKEFSSEVSNQGALDIEDLAQIGKKIGTCPYYGSRDMVRSADLVVLPYQSLLLKSARESLGLNLKNSVVIIDEAHNLADSLSNMYNSKITSSQALVDFLRSLLNSNDDGRIIVAKQKLGGQPDEAYLKFVMLCAEKIFSEDAYAVILAGGTLQPIEETRLRLCPSLPPTDIKFFTCNHIVPPESILPIAVTRGPSGKAFDFSYNSRSSPSMIEELGRFICNIITVVPEGVVMFFSSYDYERRVYDAWMTTGTISRISKKKHVFREPRNSADVEAVLNKYKEAIESCSNFSQDTGVNGALLLAVVGGKISEGINFSNGMGRCVIMVGLPYPSPSDVELIETIKHIESISSSFSVGDDKALSRKYDDECELQPGYDILRKCTRGGREYYENLCMKAVNQSIGKLLLLSICHAYSTV

SEQ ID NO: 61115 - protein, 103 aa, Zea mays
  Coding DNA Sequence Number=SeqID_17740
MVGKRDGKGRRQAKGEKRKRPPSPRAYLRNIEHADLNDLDESEEEDFEVKDEDEDNRYDDGDEGDATIKVDNGGNKDGAVTAAKAEATTTSAGQQQRRQQGQW

SEQ ID NO: 61116 - protein, 106 aa, Zea mays
  Coding DNA Sequence Number=SeqID_17741
MALPVDVAGPRPRLGDVGAPPKLGLEMATEARAESEPWGRAKRSSSSSGAEPESEPWVRQSGVRRLPGLSPSPSPGSGGAEFAVFRVLARVRALGRAERSSPSSGS

SEQ ID NO: 61117 - protein, 174 aa, Zea mays
  Coding DNA Sequence Number=SeqID_17742
  Subcellular localization annotation: CTP_CleavageSite=69; ConfidenceScore=5.10e-01
MALAAAPCLALGREWLRSRSRRRRPPRQLEEVLLSARLPRPATDRPSTLRPSARPCLTSFGMGGGLLAAASALRSVLPLFGPPEQKSSSSPLLEQHEQRQSWLENGNLVGRSLAGLSVSGTDAGVDQPRPRVGLAPLEDGRPRPLRQPAESPARAGFPEKSLDRVVVRGWVGPR

SEQ ID NO: 61118 - protein, 169 aa, Zea mays
  Coding DNA Sequence Number=SeqID_17743
MTVASEREQRSRRQPGSRPIQGQQESLPSRREDDAPVIRSSNGSRTRNGRPANHSPRRINSAAGQAAPLAGEAGQKRYATSFDFVSFAVITAPKKGPGKGDTPKRILPCEGTGLRAPLLIRGSKTGPPRGSTVASDRVGPTPTTGQRFEGRPPEGLHGRLRLLGLRAHY

SEQ ID NO: 61119 - protein, 284 aa, Zea mays
  Coding DNA Sequence Number=SeqID_17744
  Subcellular localization annotation: CTP_CleavageSite=28; ConfidenceScore=5.01e-01
MQAACNRTKGAHPFDFDAPSMGAQAHTSCNRRAGCYVQGTAPPLAPLPCLLDCGTSTATRGNPAYDPTVPARHIDHGTVDTFGRRSKRRFAFAIMTASKKVEGFNSRLRALGLRARYWSEVQRPAPRKGSTAASGHSGSTPTTDQGVRLTAAKSGLRRHKKLRLARPRARTQARPRKTTNSASPDPGLGLGLGPGRRQTPPRPTQGSDSASAPEDDELRLARPRARTRPRPQPTVSVSPDLRARTRPRPRKTDPTSTSEEPPPRPTQGSDRPRHRKGHHYPTLS

SEQ ID NO: 61120 - protein, 147 aa, Zea mays
  Coding DNA Sequence Number=SeqID_17745
MSRSVPLVSHYVGRVDDVQTKTPRANSQPDEQTEAGWQGAAVHRAGNWALRSSVADRTALVGRRQGQGRRRGRRIAERRKLISAAARRLMAHLDPPVGPPLRDLTKIIYPPQRAPFAHAALRDYLGHPARFHPLEADDTIEDVEVLR

SEQ ID NO: 61121 - protein, 271 aa, Zea mays
  Coding DNA Sequence Number=SeqID_17746
MDEGCTQPLSSDPMINLNTMTFFLTVFFPFARNLHKLEPLALTIFDHKEITEYGWEEQHTQDSNSQHNHAHKSRLELETQHTEFTTQMELKSLTQRIECVKLEPWSLRMLSECLDDSSMRLGVPFIATRQLGAIEDQQGRLSLPSVERRTAQSEPTPQQSPRRRQRGDAAQGRDDIEVLQRVSVVATTHQDPMAMQCERGMWGMVVESHDYDFEVSEEEMLFSYQPMVVAPPAHWGSADLGPVERKMCPGSFLSVLVINCPTHHFKLTILV

SEQ ID NO: 61122 - protein, 100 aa, Zea mays
  Coding DNA Sequence Number=SeqID_17747
MPPTTTPTTSDVDGPELPPPSPPGECDLGGEWDDGVDRSPPDDGVDGGDLPPPPDDGGEGVSRWRRRGCPDGGDGVSDGGEGLSDGGDGCHMARRVAAVA

SEQ ID NO: 61123 - protein, 253 aa, Zea mays
  Coding DNA Sequence Number=SeqID_17748
MARPSLGQLLWASDNNRPLHVDGSGVATRDGNGYPKPETRWARCCHLILNIVEPVIKLCWVRYIYYVGTYFCDSNDHVYRNVNGYGYPMGTRYPWWVPYPLPSLVATWPEKMINSKVSTVSPDPHGKVSDPCIYRPGLRVRSKTPTGANRTPRMGSRPLHVGSGPLMAGSRDSGTENAQALIKTRRGSGVARVRTLSFTLLLPDAATWHGARDVSQRAEPDVRPLGCAASAFIADKACCLSFHWQAVYHLCIY

SEQ ID NO: 61124 - protein, 74 aa, Zea mays
  Coding DNA Sequence Number=SeqID_17749
MTSLGHSEHFQSEGALNLVRHLLEWSAPLHVGRIRAGATPLGNLAAEEFVLFVSYVSCGLALPISPLRAPRGGG

SEQ ID NO: 61125 - protein, 133 aa, Zea mays
  Coding DNA Sequence Number=SeqID_17750
MQLERTEECDGAHGDVDCLRDEGYQLGETLRGLKYRAELAKPSSQEVEVRLVQAGLELARETDATEGPSPFYPSHPDQLPPLIASRFFSGRALQDARSGAGCEGRDERGEGGVTPQVSISYYLGIFILISDAQ

SEQ ID NO: 61126 - protein, 122 aa, Zea mays
  Coding DNA Sequence Number=SeqID_17751
MDERDRLVQGNWDRMFESMEAMTGRLKEVERVQQQLLMQSELAAVVAEQAATERNDLHHKLEETGREVSQLRLEQMGRELGESSTSNQDHGANDRGPRHDQQMPRGGHQRGLRNDPRQPVDS

SEQ ID NO: 61127 - protein, 286 aa, Zea mays
  Coding DNA Sequence Number=SeqID_17752
MNKRPALKVPLQTELRFHLRSNDNGPRSGWPNCSSDGLRADAAATLPSPTPTLEGRGQGPSALRQIPTQILPDEWGTDLRVEAPYRKLLPSLSPYPDHISTWNSQRKDRIWSREATVHSDFAKIRTLWRSNRPLNHGRSKLPRVRRELTSGGALRARPCANPRAPAAARDHARATAIKPAPVLGCLPRYLLRTSPDLPEPAITSGDPPVPPESNHRGQPLSRPPPFDPSPQLASWNRRRPPPPVLVARVTPTTSDTDPHTDVTVATSRTSLTTPPELYCRRQAPPP

SEQ ID NO: 61128 - protein, 150 aa, Zea mays
  Coding DNA Sequence Number=SeqID_17753
MRGYIPGCGITSGWLWRSNTIGNSEHRLPRPRLFSFEASLINVVVNPVEPLDECIELLLLLLEGGFVGEDACLTLALVFLLLDGESQVRPIVVASWQCGHDARSFLHLVGVQSGLRRGIARVILKKNEDGCWLASYNGTMVDSGAAFATV

SEQ ID NO: 61129 - protein, 70 aa, Zea mays
  Coding DNA Sequence Number=SeqID_17754
MASGVTLVDDDDVDLIKVRNHLAKGDTTTSVNAFGDRALHAVEKLLQAINQYNGSSSLISCEKQTIQIEF

SEQ ID NO: 61130 - protein, 478 aa, Zea mays
  Coding DNA Sequence Number=SeqID_17755
  Gene Ontology: Mol. function=calmodulin binding; Cellular component =integral to membrane; Biological process=cell death
  Homolog annotation: Hit_ID=Q94CG9; Match level="QueryCoverage=98%, HitCoverage=98%, E-value=0.0, Identity=77%"; Hit description=Seven transmembrane protein Mlo6
  Pfam annotation: Domain name=Mlo; Domain location=8-478; Score=722.7; E_value=2.6e-214; Accession=PF03094.6; Description=Mlo family
MGGGGGGGNSRELDQTPTWAVASVCGVIVLISILLEKGLHHVGEFFSHRKKKAMVEALEKVKAELMVLGFISLLLVFGQNYIIKVCISNHAANTMLPCKLEAAAVEGKDGHGKEAAAVVAGKKKVAVAVPGKKKKKAAAAADHLGGVVDWPPPYYAHNARMLAEASMATKCPEGKVPLISINALHQLHIFIFFLAVFHVSYSAITMALGRAKSNFFRQFFRSVRQADYCALRHSFVNVHLAPGSKFDFQKYIKRSLEDDFKVIVGISPPLWASALIFLFLNVNGWHTMLWISIMPVVIILSVGTKLQGIICRMAIDITERHAVIQGIPMVQVSDSYFWFARPTFVLFLIHFTLFQSVSCLCLCLCLSQNGFQIIYFLWILYEYGMDSCFNDSEEFVFARLCLGVVVQVLCSYVTLPLYALVSQMGSTMKQSIFDEQTSKALKNWRAGAKKKAPTGGSKHGGGGSPTAGGSPTKADGDA

SEQ ID NO: 61131 - protein, 225 aa, Zea mays
  Coding DNA Sequence Number=SeqID_17756
  Gene Ontology: Mol. function=translation initiation factor activity; Cellular component=cytoplasm; Biological process=translation
  Homolog annotation: Hit_ID=A0MLU6; Match level="QueryCoverage=76%, HitCoverage=41%, E-value=9e-79, Identity=79%"; Hit description =Eukaryotic initiation factor 3e
MAFGPKFLIPFTPAVLVQPWSHGGGTPSLDQPERLAHSTGNNTPCTHAPHEGKEPIQIGPDQIEALYQYAKFQFECGNYLGAADYLYQYGALCTNSERNVSALWGKLAAEILMQNWDLALEELNRLKEIIDSKNFSSPLNQLQNRIWLMHWALFIFFNHIRYLNAIPTNAHHLIRYLATAVVVNKRRRNMLKELIKVIQQEHHTYKDPITEFLECLYVNYVVVGF

SEQ ID NO: 61132 - protein, 187 aa, Zea mays
  Coding DNA Sequence Number=SeqID_17757
  Homolog annotation: Hit_ID=Q6J9V9; Match level="QueryCoverage=34%, HitCoverage=33%, E-value=2e-07, Identity=44%"; Hit description =Putative uncharacterized protein
  Subcellular localization annotation: CTP_CleavageSite=87; ConfidenceScore=5.63e-01
MQAACNRAKWTHLSDFQCAQHGSPHPRVMQPARRSLRASNCTATRATTTPPRLRNQYRDSRRPSARPSSASLARRGSERRFAFATMTASKKGPRKGDTPKRILLREGNRLRASLLIRGSKAGPTEGFNSRLRARGLHTHYWSEVRRPAPRKGSTAASGHSGSAPTTDQGFEGWPSKGSQPPQTQSEG

SEQ ID NO: 61133 - protein, 73 aa, Zea mays
  Coding DNA Sequence Number=SeqID_17758
VFSEHYSNIERDTAEAAMQEDARGEIVSPVGEAYPRLSSMVNLVAVLNTKLDHALDELSKARAKIAELRAERA

SEQ ID NO: 61134 - protein, 26 aa, Zea mays
  Coding DNA Sequence Number=SeqID_17759
MAAAEPCVIVVGTLCTITGGLRWPLI

SEQ ID NO: 61135 - protein, 35 aa, Zea mays
  Coding DNA Sequence Number=SeqID_17760
MDDREEEGEHWTVRSDTNVKLNSGMAIDLIVRVGT

SEQ ID NO: 61136 - protein, 333 aa, Zea mays
  Coding DNA Sequence Number=SeqID_17761
  Homolog annotation: Hit_ID=Q6QP51; Match level="QueryCoverage=25%, HitCoverage=38%, E-value=3e-31, Identity=80%"; Hit description =Putative growth-regulating factor 1
MPRLLDCRTSAATRGNPASGPTVPIEHIDHGLTSPPEAAGEPSPTGKRHLWQAKRATFHLRHDDRVKKGTRKGASPEHSGFRLITDQGFEGWPLGRVRQPPQSTGAPRPLLIRGLKAGPSEGFDNRLRACRARDDSRYVCYMAEARATLPRRIQCEDRLTPYPNTRASVGKVELKAQQEAPPRSTLGLGLRRRSLPRPTPGLGLTLGLGRWSPPRPTPGLGLNLDLGRNRVLARPQPRPQEESRPRPTLGSDRPRHRGYIITLPLASSGYGGTRPASIQARPGLKRSSDGHDTAYTGLYHLSDSHVGISRRLPFCSVRLEGGCVCTQSAYGSG

SEQ ID NO: 61137 - protein, 219 aa, Zea mays
  Coding DNA Sequence Number=SeqID_17762
GSSVRNNGVVDREERGRLESELEAAALGRARTGEHAREFQGAASWGQAPAMGSGQSDRGSWETAALELGDVGKAGEERSAQGSSRLGKEAPRRGDEGGEPWERAGRCDGAQERRTEEQRLGHAMEDGRRPAARGWIDELAHHSPQTGNDAGGIETAPALGGSGEPSDRGKRTGRRWVDGGSPQVARFPEVGEGSRGGEVAGEVGERDPGGMRCSVLVAR

SEQ ID NO: 61138 - protein, 96 aa, Zea mays
  Coding DNA Sequence Number=SeqID_17763
MARVACTLCGKRLDGGVSVLSHTLESLFFSRVTSHLIVIGVKRRNSAAKMLVCDLCLLNLAILVVSGLSEVLGALGQILLSYLVHMHSGLRSLRQV

SEQ ID NO: 61139 - protein, 317 aa, Zea mays
  Coding DNA Sequence Number=SeqID_17764
  Gene Ontology: Mol. function=S-adenosylmethionine-dependent methyltransferase activity
  Homolog annotation: Hit_ID=A2WN32; Match level="QueryCoverage=92%, HitCoverage=90%, E-value=2e-34, Identity=38%"; Hit description =Putative uncharacterized protein
  Subcellular localization annotation: CTP_CleavageSite=54; ConfidenceScore=5.15e-01
MRRRGLPSFCHGVASTSTVQQLHGKELAAGSAAGADAASSSFVAVPPSVVGSCVAETEVSGTGGDGGSAVTLEQMILQLDLEEEAARKARRAATGEGTSAEEQGWCPRRMSCVDGGPADHVLRSARDALTQYPRFSLDGRDAMYRASFSGFYQGMGRDGDGANRPARASVCCAAGAGCAALACSVGGYEMDLERTLRLPATVAGESVVWCKPGVVAKLMGLEAVPVPLRGGLRRRKAGGHPVAACGGVGGGVRKQKPRRTGQDELALHREKLFMALHGYDLVGTGGRHAGGLRSGVAPDVVGAMDADGDVWESRLRR

SEQ ID NO: 61140 - protein, 480 aa, Zea mays
  Coding DNA Sequence Number=SeqID_17765
  Homolog annotation: Hit_ID=Q6BTJ4; Match level="QueryCoverage=31%, HitCoverage=17%, E-value=8e-10, Identity=34%"; Hit description =Similar to CA1621|CaIFF6 Candida albicans CaIFF6 unknown function
  Subcellular localization annotation: CTP_CleavageSite=38; ConfidenceScore=5.29e-01
MQSACNRTKWAHPFDSNAPSMEAQAHTSRNRRASCYVRAAAPPLAPLPRLLDCGTSTATRGNPAYDPTVPTRRIDHGPGPRKGDTPKRILLREGNKPRASLLIRGSKAGPSEGFNSRLRALGLRAHYWSEVRRLVPRKGSTAASGHSGSAPTTDQGVRLTTAKSGPRRYGKLRFARPQGSDSGSAPEDDELRFARPQGSDSGSAPEDDELRFARPQGSDSGSAPEDDELRFARPQGSDTGSAPEDDELRFARPQGSDSGSAPEDDELRFARPQGSDSGSAPKDDELRFARPQGSDSALASADGLRLARPRGSDSTSTSEEPPPRPTQGTDRPRQQEAPSLPCPKLTQATGNKTGVPSGSLHYTRTPRVRNADNMQLSTIQKNELSVIDYFRRVKHLVDTMTAIGRRLEDGELLTYMLQGLSSDYDPLVTSITTRMNEYIFNDAGAIMGAIVALVVTIKAGALVVHWLGATPALAQLLDMQ

SEQ ID NO: 61141 - protein, 100 aa, Zea mays
  Coding DNA Sequence Number=SeqID_17766
MSTASYSNHAVGTNLMPILSFSHMVSVKLNQENYLLWTVQHLPSTGSLENSRKDVLIQLVGKSHVDPHVSGTIIKGTFKTPKSQLITSISTKLQRPDGCD

SEQ ID NO: 61142 - protein, 156 aa, Zea mays
  Coding DNA Sequence Number=SeqID_17767
MVRERRTQTSIMSKNTRDTRFIPRFGHTTKVPYFLVEAPTKSRVSFNPNPRFADHKGQAYTLIFAQTSGSNQEEQEGFRDEAPKSQLFNLTQRFLSKDLKWERQEVCEREWEVFLRLEMDFCACSSVGKSVGGVYKGAPKAGDRWGNLTEKRLNRF

SEQ ID NO: 61143 - protein, 137 aa, Zea mays
  Coding DNA Sequence Number=SeqID_17768
  Homolog annotation: Hit_ID=Q5NAR8; Match level="QueryCoverage=68%, HitCoverage=27%, E-value=5e-46, Identity=95%"; Hit description =Purine rich element binding protein B-like
  Pfam annotation: Domain name=PurA; Domain location=8-133; Score= -92.5; E_value=0.0031; Accession=PF04845.4; Description=PurA ssDNA and RNA-binding protein
MDGGGGGVGGGGVGAGVMVGGGVGPGGGVGGGGDVELVSKTLQFEHKLFYFDLKENPRGRYLKISEKTSATRSTIIVPVDGVAWFLDLFDYYIRTDERDAFSKELRLQTKVFYFDIGENKRGRFLKIFIGSKHLGLK

SEQ ID NO: 61144 - protein, 808 aa, Zea mays
  Coding DNA Sequence Number=SeqID_17769
  Gene Ontology: Mol. function=microtubule motor activity; Cellular component=microtubule associated complex; Biological process =microtubule-based movement
  Homolog annotation: Hit_ID=A7P0D0; Match level="QueryCoverage=85%, HitCoverage=74%, E-value=1e-135, Identity=42%"; Hit description =Chromosome chr6 scaffold_3, whole genome shotgun sequence
  Pfam annotation: Domain name=Kinesin; Domain location=83-400; Score =417.8; E_value=1.6e-122; Accession=PF00225.14; Description=Kinesin motor domain
MDGKSGNIVQSLPDTLSSLMGLNKYLAPRTSYIESVSHIIEELSPTKPKMKVMVHTAQNICSDDTDSDAEAAKVQGNIRVFCRVRPFHHEENYQSRTLYTLDESNIFLKVAETKIKQYKFDKVFNQCSTQGDVFAEVEPVIKSALDGYNVCIFAYGQTGSGKTYTMEGKPTDLGVIPRGIQALFDRTSESNRRFLFTFSMLEIYMGNLRDLLVPRGKAQGFKKVPSLSIKTDPDGGIEIENLVAVTVSSFHEVKRLYEVGTHFRSTASTMANSTSSRSHCLIRISLTSFDAPERKRARNKLWMIDLGGSERLVKTKATGKRLKEGKAINLSLSALADVIDALQTKKSHIPYRNSKLTQILKDSIGCESKTLMLVHIRPNEDDLCESICTLGFATRVRSIRLENEEPQEVKARKEHLLMELEKEISDLEQECEGIVRKIKKLKETMEHFKGHQPSAEANFDISHPSSEELKTVMPKNTKDSKNRRDVSSRLPRFMKPTASSQHRIDLNKQIPVSNKTKPPVPPKRRPSSVYAESVRLPVNAATWQSECSSECSISMTSDMNWIPSIQDGTECSQDTSEYETKQVIFSEHEKPPQSQVISFEESGEMQDKTKEMGIIDIDSWIHQQIIENTGICQCHTERTLDVIEVNEYETYNSNTASPVQKEFTNGSKPSLDEDSNLNLCPPTQNTEDSKETRAVNQFTKTELYTPPLKELCGSAKIKEHKNEKLGRHGSCRRSLQEELGNCKPEQPDKEPKADPNMQPEIEFHDNKHHIGKLTKFIQALRTAWIGALLGLGTMNLGLEQDFFKSLTL

SEQ ID NO: 61145 - protein, 142 aa, Zea mays
  Coding DNA Sequence Number=SeqID_17770
MEHEVGGKLRLVLSCARVGALAVGVTSVREGERESHATTLRMRALALPFIDARRGSREEPEPYVHANVAVGEVLEPCVRGVMAVGGAFEPCRSTAVGTLMMSPCFRKGLRATVVMDARGEPSLLVTGASLDGTPVLFPRSLS

SEQ ID NO: 61146 - protein, 111 aa, Zea mays
  Coding DNA Sequence Number=SeqID_17771
MVGSSSVGSLPVGVLGPTAHPGFPLKVWTYIRAVERSGLEGSDESGFSSDEEDSDGGEDEDDDDNDDGDDDDGDGGNGGGGSGGKGGTKGGSSVGSTGGGGGKSSGGRASG

SEQ ID NO: 61147 - protein, 227 aa, Zea mays
  Coding DNA Sequence Number=SeqID_17772
MAGMEQTATRWLGQARDVDPRAIDLAMRIADRMFLKMKEDEAKNKIEEEENDRWRPNDESTSSQGSSFKSTSHMYFISNGSDSESESEDEEEQESDSEDEDDLQQFFAQLSKKNQMSLLKLMKRAEEQKEMLHKQEDFLIRKIEDLEKLTKEHEKLKCSHDDLVQSYEDISIEQIRNERVCDTLIKPSIYGSTVRRHPHPTAMAQGGDADLHRGAPHRWSLSSAPTP

SEQ ID NO: 61148 - protein, 200 aa, Zea mays
  Coding DNA Sequence Number=SeqID_17773
MGKPVPSLLMLLLSRGRVPLDSPTRWQGGRPSYPSNHLLQRTCKNCATSKAEYTNTQLDLPGYNGSSSLISCEKQTIRIEFLSLQGLTALAYNAPLTPTGRRAVAALVPTITGMGDLVSGRVRGKVCGQVHSGTRLTDLPYFSVMHKTGACLPKQWQAGPPELALVLDLGLPPEQLLAPARGCTLRQQDYSLSKCNEHVF

SEQ ID NO: 61149 - protein, 132 aa, Zea mays
  Coding DNA Sequence Number=SeqID_17774
MAQSSAFSVGEAVVSGSRITFDSVDFLVIATDELCLAGFDVHVMTSVGGPMHSATSRNKVEKRCLERHATTLKRHLNRLIASIKEKADGASPLMFMAIIQVGRRPSHEVLFPIFSNSLDCGYYLYKSQGLKY

SEQ ID NO: 61150 - protein, 51 aa, Zea mays
  Coding DNA Sequence Number=SeqID_17775
MEIVWSTCVGRFPLIWAKDLAHRWSHCNGSYGMVFSNRLENLSRGLHLLQQ

SEQ ID NO: 61151 - protein, 434 aa, Zea mays
  Coding DNA Sequence Number=SeqID_17776
  Homolog annotation: Hit_ID=Q6J9V9; Match level="QueryCoverage=27%, HitCoverage=41%, E-value=7e-55, Identity=88%"; Hit description =Putative uncharacterized protein
MRGENHPLNPKSRRSGAQVALTVSSAEATASAGGSLTYGDHHLSTDDIGHLCANATPANGGRPSAHRQVLTPVLAIGARTRLSQNTNTALAAYDVLCDTPVRPAAREGPWTWPACARRDRRPCSGRTTTPRPGSRWKFASSVRLVDVLLPRMLEEETGRQPMRKAGPQLGSPSSPARMMNVLEAEGKREATARLALPHHKADSHHPGARDTSGRRSGRRFVSVMMTASKSEGSGPRALLLIRGSKVAPYEVRQPPQSTRAPSPLLIRGSKAGPSEGFDSRPRARRVRDDPGYVRYMAKARATLPRYPRTFPRPTGTICNGIPPEGGTEPSDPIKWVRVQQITCSGRTLGSPVAKLGQTLACSNLGQIALPTDRKQHYSPRSDYCANHQASASASASGGVTSSPDLGLGLRRSLRLARPQPRTDYATGDTSLPYP

SEQ ID NO: 61152 - protein, 30 aa, Zea mays
  Coding DNA Sequence Number=SeqID_17777
MAKIEGLSTGSFVRRAHSTKMNELQATPWP

SEQ ID NO: 61153 - protein, 161 aa, Zea mays
  Coding DNA Sequence Number=SeqID_17778
MNPNSRISSRRLGLDLIYLHLGRPISGERLRSNGKPGQGLLACQRRYRLSPWWSSAGEGGASTPGALGHREGLRWVWGNVANAEVGTTLAQRHQRVAVRDEMARRRRSSTPVSNRTDLNAGKGKLVAGEGWLPQGRTLGLLNGDRNTARRRVDGSGAPAAR

SEQ ID NO: 61154 - protein, 66 aa, Zea mays
  Coding DNA Sequence Number=SeqID_17779
MKDAKPIKTPMGTNGHLDLDIEAFASEFTTVTQTYGSARVLVAPSPAIVVDPVGVADLSCSMTKSR

SEQ ID NO: 61155 - protein, 144 aa, Zea mays
  Coding DNA Sequence Number=SeqID_17780
MDKKVGGEVNGHKNKGISTIKDGVKIGPANVKGEGLDAITTRNLAMARHSPTNTGATNPPEVIEVISSMSVEGVILLPGLARTTHSAFFLFLVWRHFLSATWVSASTSSSFFYSALIAASSKRGEREADTVPSPYTTSGYHTKS

SEQ ID NO: 61156 - protein, 42 aa, Zea mays
  Coding DNA Sequence Number=SeqID_17781
MDESEKGDRLPGTSNCITFESQRIGDASGGIRAVRLAAGRNP

SEQ ID NO: 61157 - protein, 317 aa, Zea mays
  Coding DNA Sequence Number=SeqID_17782
MEVRCQTSFCQNKDGFPKLLRACTVRLGIRSQPEYDGREFVEHGTEKCVVTVYIGSSPRHVEWSVTAAGHRFKDTCQVVVRKALRALCQIYEEVADTPLRFFPPFQRNCPVWMTRMHALEGQQLLEDDPIVLKPVQLPWESREVIDVEALKQAKDEHVQKLMEAYLVTHNQHRALRIQEPASSNPVQPLRAEDPQILEGHPVSIRGEKKAWELPEGSIVFEGIPVFPQAMNKQEHPESSQDPPPELFEPLTMKKILAPSLEVKEEAASTPPAPPPSEELQEPAPLEEEFDPVLPSQSPPEEVINISSLLTHPGDVSN

SEQ ID NO: 61158 - protein, 149 aa, Zea mays
  Coding DNA Sequence Number=SeqID_17783
MAVRLTPIPHLSLERGSFWWKDFVRFAYHYRGIASPMAGDVSEALDKAWKTLGEGFAECDTRQRRIDELYIGNGFFAEYFLSSTRQRLCRVTLGIRQRKFDVTTPGDDDRVCAERPPSDTRQRLPLCRVPPTSTRQRDHPRAPFVSSFA

SEQ ID NO: 61159 - protein, 277 aa, Zea mays
  Coding DNA Sequence Number=SeqID_17784
MSSHSMYRVLPPSEPPNGEHSRRFVLLSLEERNFAEVGTFQPSLGFKDFHQAAQLHPLTGASRIFITLAGAESEASRGLPSRGLASRLFQLLGVETILHLCGGGAPQPCRGRRTVAAQPGCNISSFVWATVASRHREVSLHSCFRGEDGSEDLPVRFGAPGIRRCDVGGQVDAVDSAEVVTAGEVGFSADETVSATRGPTSGSLALISGSRPLSGDANESLPVAASVLGPWLLLWRSLASRPESVVPQALRCGEHVGIFGCNTVFFLIFEHWNSPVD

SEQ ID NO: 61160 - protein, 237 aa, Zea mays
  Coding DNA Sequence Number=SeqID_17785
  Homolog annotation: Hit_ID=Q6QP51; Match level="QueryCoverage=79%, HitCoverage=80%, E-value=3e-09, Identity=31%"; Hit description =Putative growth-regulating factor 1
MQVACNRTKGAHPFDFDASSMEAQAHTSWTGKGDTPKGILLREGSGPRGPLLIRGSKAGPSEGFNSRLRALGLHAHYWLAPEGFDNRLRARRARDDPGYIQYITKARATLPSAACPAPTAGPLARVRSTAAKSSLGRHRKLRLARPQGSAPRLGLERWTSPRPTPGLGLNHDLEDDELRLARPQGSDSASAPEDDGLRLARPQGSDSTSTSEESPPRPNSGPDRPRRQGGHHYPAPS

SEQ ID NO: 61161 - protein, 81 aa, Zea mays
  Coding DNA Sequence Number=SeqID_17786
MSSGWSQSLVRGTIDDHKQQLLINASSKRMSKRSEQDSDVVGEKIVTVDVKQAQMARKNVEVATERNLSSDTDWWTGSRRY

SEQ ID NO: 61162 - protein, 146 aa, Zea mays
  Coding DNA Sequence Number=SeqID_17787
MNRRRQYAVNDGSDKQLMREIMSFDGGMPQWQMAAPEEDDPDGGRDLRVDLKQSWPPPPVALSASLIVEDVALEVDDGSVVCWVTTAASGSSFSVTSVATSQLIMEQILTRSVMAWTQRSQHVPSSTIQIHLFSFTLLKIALRFSL

SEQ ID NO: 61163 - protein, 216 aa, Zea mays
  Coding DNA Sequence Number=SeqID_17788
MASPPPFDLCGDLDDDDIDEPVTAVPKDRRLPIATPTPNVLNDHLLRFTRNLQRPTQNPNPSPNPPPPPPPAVAEEQVEKVKLAGRRLCKLATTTTATQRVDEEELRSKGFTRRPPNTPTFRNHGVSDDELGREKENLGAMENNAEDVGWEKIEDFKMDPTGVLQHPSHTSSQERYSRCFSPTSARASDGSGFSVTTYATLLCAHSSWCPYFNSGL

SEQ ID NO: 61164 - protein, 594 aa, Zea mays
  Coding DNA Sequence Number=SeqID_17789
  Gene Ontology: Mol. function=microtubule motor activity; Cellular component=microtubule associated complex; Biological process =microtubule-based movement
  Homolog annotation: Hit_ID=Q9FG03; Match level="QueryCoverage=97%, HitCoverage=54%, E-value=1e-170, Identity=58%"; Hit description =Kinesin heavy chain-like protein
  Pfam annotation: Domain name=Kinesin; Domain location=49-418; Score =421.0; E_value=1.7e-123; Accession=PF00225.14; Description=Kinesin motor domain
  Subcellular localization annotation: CTP_CleavageSite=20; ConfidenceScore=5.28e-01
MASRHRNASPVTAGKDSPQPASAATSLRLVAEFPLDAPEAKESVTVTVRFRPLSSQEVRLGEEIAWYADGDTIVRSEQNHSIAYAYDRVFGPTTTTRHVYDAAALHVISGAMEGINGTIFAYGVTSSGKTHTMHGDQRSPGIIPLAVKDAFSIIQETPKREFLLRVSYLEIYNECPFAQEVCNQILNWEGLTMPQQANPSNFDSISEWWESAASHISRDRSREFNGSVIYTMWNIWKERNRRIFEHNSLSVVNDLLNPSGQNLRIREDLQGTFVEGIKEEVVLSPAHALSLIAAGEEHRHVGSTNFNLLSSRSHTIFTLNLIDLAGSESSRAETTGVRRKEGSYINKSLLTLGTVISKLTDGKATHVPFRDSKLTRLLQSSLSGQGRVSLICTVTPASSNSEETRNTLKFAHRAKHIEIQVSQNKIMDEKSLIKKYQNEICQLKEELDQLKRGILSGTPSKDATEDNVILWKQKLEDGNVKLQSRLEQEEAAKAALLARIQRLTKLILVSTKATQTPRLSQCPRPRRRHSFGEEELACLPHRRRDIVLDGESNDLFVAMEGFDETFEVSSKGENKNRKGLLNWFKLRVYKSDTV

SEQ ID NO: 61165 - protein, 97 aa, Zea mays
  Coding DNA Sequence Number=SeqID_17790
MGDSDFCVRRGRIKCAAESRWRGDDRCFGGTPDSPVHTGQSGTRCKPNSLSAGHADMGAGLVGGAHAMGTTVAEEEDGFDGQGPRASEGKRPNGRMG

SEQ ID NO: 61166 - protein, 248 aa, Zea mays
  Coding DNA Sequence Number=SeqID_17791
  Gene Ontology: Mol. function=nucleic acid binding; Cellular component= intracellular; Biological process=regulation of transcription
  Homolog annotation: Hit_ID=Q6QP57; Match level="QueryCoverage=93%, HitCoverage=76%, E-value=1e-106, Identity=82%"; Hit description =Putative zinc finger protein
  Subcellular localization annotation: CTP_CleavageSite=20; ConfidenceScore=5.13e-01
MAAPHDMHGVDSFAQLPFVRGAAPRPPAGSRDVATSIRLFGRDFSSDQQQAVQLLLLKEDAAAAAASGERKFECHYCCRNFPTSQALGGHQNAHKRERQHARRAHLEASFAAHCGAAYLPGAHLYGLFGYGGGGGGGHTAHYPAVWAGAAPGIYGGVGPVARPPVYGAVAVPGTWRPSPPGSGGAFVAAGRPVGYGEMAGKDDKAKMSVVVSLPASLPSSCLSGQSAEMIGRSELGHTDGVISLDLCL

SEQ ID NO: 61167 - protein, 119 aa, Zea mays
  Coding DNA Sequence Number=SeqID_17792
MTRPRPPLGVRRNHDSLKAMPRRDRQSRVARDQAQARDAITTWPRPLSGGRGSDDSLEAKPTPDKQSRLVLGHSWAGDIGMSHPRPCPGGTSNHDSPMATLERDKQTRLPKDNPVRYWQ

SEQ ID NO: 61168 - protein, 29 aa, Zea mays
  Coding DNA Sequence Number=SeqID_17793
MMKIGKTKHLLSLPFDLLMDSFEILYLLV

SEQ ID NO: 61169 - protein, 268 aa, Zea mays
  Coding DNA Sequence Number=SeqID_17794
  Subcellular localization annotation: CTP_CleavageSite=54; ConfidenceScore=5.15e-01
MDRIGRGANAGGFLNPAKGGGAQRRRPPGKASRLAGKGGGLPPGKGPGGTGGPRAPPFKGGRSPPDGGGAKGGRILPPPGKAVVDSALRLMWRIILGVADFTSRTASGALTATLSAEVERLRTQHADAVREKSASDSKCRKLAEKVAALEKEKADLRRQLMEERREANEAIAKEQSAQAEARLARAEGNVAKELAGELQRRLAAFESRTEGAEAAARAEAERTRTQLMTSYRELGVRTSDFEVPEREAGLHCLEWVQEELQELPTVWR

SEQ ID NO: 61170 - protein, 58 aa, Zea mays
  Coding DNA Sequence Number=SeqID_17795
MDGVKLEAEGEEARERPGAVLGEMGCGSGETEDLGPHSLLSPVERWISSEALWVSEWS

SEQ ID NO: 61171 - protein, 266 aa, Zea mays
  Coding DNA Sequence Number=SeqID_17796
  Gene Ontology: Mol. function=diphosphate-fructose-6-phosphate 1 -phosphotransferase activity; Cellular component=6-phosphofructokinase complex; Biological process=glycolysis
  Homolog annotation: Hit_ID=Q9SYP2; Match level="QueryCoverage=21%, HitCoverage=9%, E-value=3e-20, Identity=82%"; Hit description =Pyrophosphate-dependent phosphofructokinase alpha subunit
MAIYKTTLKSKSSINEVNQVAQLRIIIKSKSCNGVGPLCTSQQTETEKLLAQLVETEMNRCLKEDTYKGKKFNAICHFLSYQARGALPSKFDCDYAYAILLLYSLDGMQGFSSGIGMCSSITSKHGEMDYRGVANINVTDIQFVEQLFLKFPSKLTPHPPSSSAHRALFAACDDHRSLQSLRRRILMKKIMSMDSRNCLIVIETANAQLSHNDGVLIIVHREDVGTTSLRDGRFEDPVSTAEEAAFCNAYTSFGFGLYLYHGDEMS

SEQ ID NO: 61172 - protein, 119 aa, Zea mays
  Coding DNA Sequence Number=SeqID_17797
  Homolog annotation: Hit_ID=Q6J9V9; Match level="QueryCoverage=47%, HitCoverage=19%, E-value=1e-08, Identity=57%"; Hit description =Putative uncharacterized protein
MSRDKDYYDYMLGIVDLTKKRSTDDEAMFVLYIQSFMLLCLSKGEKIKDIKHYMDMRFWICSYAMKIQRVLRPFRNLPWVNISYLVLQAVVMWGNGRQIEFVRDARILRRNFVIDLLSY

SEQ ID NO: 61173 - protein, 327 aa, Zea mays
  Coding DNA Sequence Number=SeqID_17798
  Homolog annotation: Hit_ID=Q6J9V9; Match level="QueryCoverage=37%, HitCoverage=43%, E-value=2e-53, Identity=85%"; Hit description =Putative uncharacterized protein
MRDRERGYFERILLSEKNGPRALLLIRGSKVAPCGVRQPPQSTRAPSPLLIRGLKVGPSEGFDSRPRACRVRDDPGYVRYMAKAWATLLRYPRTFPRPAGTICNGIPSEGGTEPSDPIKWVRVQQITSRYLLERASGPLADPYRTGLGRPLGSPDSNSLETPSSTPTEGKQHYSPCSDYYANYQGKTNDSKSRPPPSSASGAIGSSASLDLGPRPREESQPRTTSGLGLNLGLGRRSPPRPTPGLGLSLGLGRRSPSCPTSGLGLSLGLGRSHNLARPQPRPQEKSLPHPTSASDRLRHRGYIITLPLASCLRLRRNKTGVPSRLLR

SEQ ID NO: 61174 - protein, 76 aa, Zea mays
  Coding DNA Sequence Number=SeqID_17799
MARWVVACMRWARFERECGGVPWAHMWEADDRTTGAEAVMWARHAKCGRTGNGLHDGNGRWVRAMACGFDVLRVAE

SEQ ID NO: 61175 - protein, 314 aa, Zea mays
  Coding DNA Sequence Number=SeqID_17800
  Gene Ontology: Mol. function=protein binding; Biological process =polarity specification of adaxial/abaxial axis
  Homolog annotation: Hit_ID=Q2QXZ2; Match level="QueryCoverage=99%, HitCoverage=62%, E-value=1e-119, Identity=75%"; Hit description =Ankyrin repeat family protein, putative, expressed
  Pfam annotation: Domain name=Ank; Domain location=134-167; Score =12.0; E_value=0.6; Accession=PF00023.21; Description=Ankyrin repeat
  Pfam annotation: Domain name=Ank; Domain location=169-201; Score =35.7; E_value=1.6e-07; Accession=PF00023.21; Description=Ankyrin repeat
  Pfam module annotation: Pfam domain module=Ank::Ank; Domain location =134-167::169-201
MAKEASVDDVMKVLMASRKFEMQELWATCSHLVARSGLSADLLAKHLPIDVVAKIEEIRAAANKSPVCAVSGGGGPRSPFLLTHHYLPVNGASASASASEAERDHRVRRMRRALDAADIELVKLMVMGEGLDLDAALAVHYAVQHCGRDVVKALLELGAADVNSRAGPAGKTALHLAAEMVSPDMVSVLLDHHADPSARTLDGVTPLDVLRGLTSEFLFRGAVPGLTHIEPNKLRLCLELVQSAVMVTTRDDDAGAGGGGSDAADDSLVSLTMNSTLMYQGQEMAAAVAGEARKGSSGGGRGSPSNLYFPTAFP

SEQ ID NO: 61176 - protein, 357 aa, Zea mays
  Coding DNA Sequence Number=SeqID_17801
  Gene Ontology: Mol. function=aspartic-type endopeptidase activity; Biological process=proteolysis
MAVTFTSCGGGGSPRLHRGSGHLRRAWWRHASKACAAASVLNEGFDHHLEKTSASPEPDCDLDIYNKGHSNPSPTNHRPPLTTLPPATADSDLDTAARVPRPQITLYPPPHFFLPQPPKKSHDAVGELEEGRPAVGRDPVRDVLGAAHPPRPPPLSRSSIPRTPPPLASWAASTPPACRSTPPRTSPPSAATPLLPRHRQLALHQQRLPALRRHVRLHHRSAHHDTVLSHRFNDNAAMSGSLVLGGIGGGEGMQYVPLVKSAASDKLSYDMYYYLVLRGVTVGGKAVRLSAQAFAANAAGSEGAIVDSGTTFTYLDPTVFQPVADAVVTAVGGGYKRSKDTEVGLGLHPYFALPQGA

SEQ ID NO: 61177 - protein, 532 aa, Zea mays
  Coding DNA Sequence Number=SeqID_17802
  Gene Ontology: Mol. function=cysteine-type peptidase activity; Biological process=proteolysis
  Homolog annotation: Hit_ID=Q8S456; Match level="QueryCoverage=100%, HitCoverage=59%, E-value=0.0, Identity=67%"; Hit description =Putative uncharacterized protein 163K15.6
MTIRPGAGKELKITKDTVHLILGLPCAGGGREFTDWYGEVDAAAKLRRDLNVGKEEFDVVKLQDKIVLGNDDELSIRCFFLILFNRLLFPSASWGITNNEVLMTSNMARMAEIDWCQLVYTDLCDAAARWHKRNKTNITTTIYGCSLIVLIYYLDHLHHPASPDNKYDVKILLLLTVLSDFIQFRSRSEMCYVMAPERPVSAVFNIYVPRIKHLIGNKLQCLPSQHRPMFQSMFDAHDKEVDKYCDSLQLSHQMIVSKQIELSETFGEMINEVLRAATQRDSQQEDNPPTTSMPPTNALVSSPPVPTPDKQQHDQEIHVPTDHIKVSDDAPTTDKPAAPELTPDINSATTDLVAKDSSSKAAVAEPPHVSREDCARNLLKFILSGKLDPSMSIINFGGFGGSVLDVVQSFGPNKCLDNTFMQGFIDCIREDDVLYNPDSVITTLILNVNVGTVLNIEEFEQHSSNPQPFSTSLLKEQLEPTLPSDEVLNQIKLILVPMLRRSHWTLYAINFECRRIDILDSNPYGTLLGGTT

SEQ ID NO: 61178 - protein, 95 aa, Zea mays
  Coding DNA Sequence Number=SeqID_17803
  Gene Ontology: Mol. function=pyridoxal phosphate binding
  Homolog annotation: Hit_ID=A3AXD2; Match level="QueryCoverage=70%, HitCoverage=50%, E-value=7e-28, Identity=83%"; Hit description =Putative uncharacterized protein
MTSIRFKGHGMLAPFTADWQSNDLHHLIIERSEGSYVYDINGNKYLDSLAGLWCTSLGGREPRLVKAATEGAWLCCAIRSIYELFVLLHLGTMGN

SEQ ID NO: 61179 - protein, 217 aa, Zea mays
  Coding DNA Sequence Number=SeqID_17804
  Gene Ontology: Mol. function=nucleic acid binding
  Homolog annotation: Hit_ID=Q5NKQ1; Match level="QueryCoverage=88%, HitCoverage=21%, E-value=6e-33, Identity=41%"; Hit description =Putative uncharacterized protein 9C20.4a
MDVLDELDVVLSRLEPDIGCNESTDVSDDEEDKDEHNTMTGCEHALTIITTGNQEDNMRIPHEVGDTSSPCHVAHEQMEHIAASSEAKKRLNFNVDVINLSMPDRARPKGRTIKNSEDRIMRLGAKGEKKKNRRCQLCGIADGHNSRTCLSVEENRARLAKLANRKRGRPAGSRLNNKTTAPQWNETSTAKNIVLMKKWKMKKPMSIWIWANNLKCD

SEQ ID NO: 61180 - protein, 518 aa, Zea mays
  Coding DNA Sequence Number=SeqID_17805
MQPGCLMKILEAERWLKGTNFREVAFLQREQDENDASAPHLGARKVEGHDAWRECEDMVAIQGGHPPFKGDSPHLRPQPSRTNSSPTRSKVLPLRHGGWVPRVMQAGPGQKEPKPPCAVRATAQRLQAFLHYRLDQRVKGRTAMQAACNRTKGAHPFDFDASNMEAQAHSSCNRRAGYYVRETTPPLAPVPRLLDCGTSAATRGNPAHDPTVPTEHIGHGSVSRGRRRDGRYGQKWAGSNGGGRRAEAAVTSSASSRPLLGQRENPLPRREDDADRERGYSERDPSPRRKRAPSPLLIRGSKAGPSEGFSSRLRALGLRAHYWSEVRRLAPRKGSTAASSHSGSMPTTDQGFVGWPPKGSDSRLRARRARDDPGYVRYITKAWATLLRYPRTFPRPTRTILYWNPTRGRHRALGPRQKGIGSGKSPAASGAIGSSASPDPRARPPSRPRKMDFASPDPRARTQPRLRKTVSASPDPKARAQPRRWTTNSASPDPGLELDLDLGGASASPDLGLGPTMS

SEQ ID NO: 61181 - protein, 45 aa, Zea mays
  Coding DNA Sequence Number=SeqID_17806
  Homolog annotation: Hit_ID=A2XNI9; Match level="QueryCoverage=88%, HitCoverage=80%, E-value=8e-13, Identity=90%"; Hit description =Putative uncharacterized protein
MAVGDLAFKALTAGLGVATLYLAATFPVNVYRGLSWHSEQFLCKR

SEQ ID NO: 61182 - protein, 195 aa, Zea mays
  Coding DNA Sequence Number=SeqID_17807
  Subcellular localization annotation: CTP_CleavageSite=68; ConfidenceScore=5.51e-01
MSSSSLMRRVFPPSKPPDGGYPPSFRLIVGGTQLRGSWYLSAIVRLQGFSSCSPAVSPRRWSPKTVTSSLMVKESEPGCDLGPTLSFKDVHHPRWGGGRAEPALYLPRGSVGLPLPRRSGERVLTGPAGGPDFDNAGPVDGGRRHLQRVGLVGLAPGGPSRRRAAAAPSGLSVSGTDAGVDQPRPRTGLAPLEDG

SEQ ID NO: 61183 - protein, 526 aa, Zea mays
  Coding DNA Sequence Number=SeqID_17808
  Gene Ontology: Mol. function=protein serine/threonine kinase activity; Cellular component=cytoplasm; Biological process=protein amino acid phosphorylation
  Homolog annotation: Hit_ID=Q7XB94; Match level="QueryCoverage=25%, HitCoverage=54%, E-value=2e-35, Identity=77%"; Hit description =Disease relative signal 1
  Pfam annotation: Domain name=Pkinase; Domain location=236-520; Score=- 84.5; E_value=0.0015; Accession=PF00069.16; Description=Protein kinase domain
MVTSGLMVGESEPGCGLCPSLSLKDFHHQGWGGDCSVPGFRTRVALEPLAAPASATAARRGSSAGVIAKAGHGPTSNSTAFCPPLPYEFWHGRGPPGSSIRHEVSAAAVRPPGAEVVVVAAAGAGDGAPFVGLPLLRRASPTEWGYSPVDYLTRFTKHESPRVKVTSEHEQRRSWLENENLVGRSLAGLSVSGTDAGVDQPRPRNGLAPLEDGWPRPLGSVSIPLGPCPPLRLLSIPLLSPCRARRRLGQCPSLSVPARHFVCSPSLFRPHATPAAACFSTFLTVFPAVLAMGSAEGDGSALPEFAEVTSPTGRYGKPPQPDRPRRPTAMPPTPPETETETEPEFAEVNPTGRYGRVMPLFPSPDHPPRLRFGSAPWYRIKHKKVDIRALKKWSRQILSGLVYLHSHDPPVIHRDLKCDNIFTNGNQGEVKIGDLGLANILDNARSAHSIIDQDVTAIAEMIDAEICSHIPDWAAEESIDNQGDEAAYSETHSSDGDEGTSELSDEIGCRYTHIGDMHWIFARHQR

SEQ ID NO: 61184 - protein, 76 aa, Zea mays
  Coding DNA Sequence Number=SeqID_17809
MEPDGGTAVGAVESLLTSPCFLPGVLLYLTSRRGKRKEKGRMLHAKGQAAEGQESRMQLTNRQATERFTWLVSAKN

SEQ ID NO: 61185 - protein, 181 aa, Zea mays
  Coding DNA Sequence Number=SeqID_17810
MELAAHDHGDKAKGLLQKRSSIGDGSDHGRTWARLLAAEEAIALLQREWRAAHTQKGEVDLGRMAARWGCSRNSTARRGWPNLERRSSGRAGVGRIGSGLELDCVDESFLRLRLGKGTHVGELAACAPWERERIPAAGEVRQGGSHGSSLAPARIREEENARKEERRLGKKTGGGAAARLI

SEQ ID NO: 61186 - protein, 181 aa, Zea mays
  Coding DNA Sequence Number=SeqID_17811
MELAAHDHGDKAKGLLQKRSSVGDGSDHGRTWARPLAAEEAIALLQREWRAAHTKKGEADLGRMAARWGCSRNSTARRGWPDLERRSSGRAGVGRIGSGLELDCVDESFLRLRLGKGTHVGELAACAPWERERIPAAGEVRQGGSHGSSLAPARIREEENARKEERRLGKKTGGGAAARLI

SEQ ID NO: 61187 - protein, 215 aa, Zea mays
  Coding DNA Sequence Number=SeqID_17812
MDDDDAGEERAPGRGGVACRWPVASRWRREGMGLGGVGRTGRGRGTGEAGSGRRHLRGGALVGPAVGGAARAERCGLQRRGVRPAGGGAARPAGHGRGWRDNAARAGLRWRDRGRRGGGRRGLRLRRHRWAAQANRGRAVLANRERGRVLGSKLGHGSKSGGRRQDPWRRPPDTWTAAARGVGAIDLGADHLTRHGQPGIHVRQIGAKTVGASTP

SEQ ID NO: 61188 - protein, 73 aa, Zea mays
  Coding DNA Sequence Number=SeqID_17813
MRPQRRIVVWGEYSSVFLWVSDLFSIYLSEEDKDNVSGIRIHTYLETWLKRDTAIYDVFRLNNNNIKLRLEEA

SEQ ID NO: 61189 - protein, 289 aa, Zea mays
  Coding DNA Sequence Number=SeqID_17814
MTSHGSSDEGNAQSHTDGLAREGFPRILWEVLQGAGYTTPPQYAVQLFEKHRVPRCRMRMTLEPHPLQPGWRSLDSESFEYRAEDTIEAIALHGLTTLCGFHPLELSTHPIGLFPAEKEDDPMWKDRVEHAKDIWAIYLGQTAHLTVRCMNALYRLQVMRGEAMSHLMALLEATKITLDNREELVVDLSTEMVEKDLQVEQLSNEIQELEELVGTRENTIEVLEDQFINKKHQLAEANQHLDMHHQEIQDMEANEDVDIEGGEEPAFSLDTAGSGRPPSPESSVASFAH

SEQ ID NO: 61190 - protein, 31 aa, Zea mays
  Coding DNA Sequence Number=SeqID_17815
MWVQTALATASRGPRRSFNDGKIVFRLWNRN

SEQ ID NO: 61191 - protein, 141 aa, Zea mays
  Coding DNA Sequence Number=SeqID_17816
MGKSKKGGSSSHHSGDKRKREPTPPSKDFGDSEYSEEEFSSESEGSPVHASPLASSDDSDDSQRIAAENSSDSSEEGGGDGDGSDDDDDGGDGDGGGDGGEGDGKGGDGGGKGGSCDDKGGSGDGGDGSKGSSRGSNKASG

SEQ ID NO: 61192 - protein, 150 aa, Zea mays
  Coding DNA Sequence Number=SeqID_17817
  Subcellular localization annotation: CTP_CleavageSite=41; ConfidenceScore=5.04e-01
MASGQTLLLKGPRSRPLMGDENQPLKPKSQRSRAQVALTVSSAEATAPARGSLTYGDHHLSTNDSGHLPTNTAPANGGSPKAHRQVLTPVLATRTRTGLSQNTSAALAAYDMLCDPRCNRRRKEDLDVAGPRTARPTPERRTDDRALPQW

SEQ ID NO: 61193 - protein, 232 aa, Zea mays
  Coding DNA Sequence Number=SeqID_17818
MEHHPGLERLLETTHLELDGKLFVNMQQAPTWHANCQRFDPGGSLDRRRPFSEVEVESEPWGWARRRPSSEVEVESEPWGRARRRPSSEVEAEAEPRGRARRSFLWRPRLDSTAVSLTLVGGTAVGAGQAALFSCQVSQWRGEMTAVTSALSTEERVRIRCQAILALNAPAIRSVGEAIRPRLLHCEACPSWASGESKVRLLLEEALGRGGNSPGSTVPARGWARARGDRVP

SEQ ID NO: 61194 - protein, 117 aa, Zea mays
  Coding DNA Sequence Number=SeqID_17819
  Gene Ontology: Cellular component=chloroplast; Biological process =translation
  Homolog annotation: Hit_ID=A2YMU2; Match level="QueryCoverage=59%, HitCoverage=26%, E-value=7e-27, Identity=84%"; Hit description =Ribosome recycling factor, chloroplast precursor
  Pfam annotation: Domain name=RRF; Domain location=54-113; Score= -62.7; E_value=0.0063; Accession=PF01765.10; Description=Ribosome recycling factor
  Subcellular localization annotation: CTP_CleavageSite=45; ConfidenceScore=5.23e-01
MALHAVSPAAVSSPLRALSRSLPQRSAFYHLNVGVQMMHNDGGTKEKMEKAIETVQTNFNTVRTGRASPAMLDRIEVEYYGTPVNLKSIAQISTPDATSLLIQPYDKSRKSFLQPLE

SEQ ID NO: 61195 - protein, 163 aa, Zea mays
  Coding DNA Sequence Number=SeqID_17820
  Homolog annotation: Hit_ID=A2YQL0; Match level="QueryCoverage=81%, HitCoverage=89%, E-value=8e-33, Identity=56%"; Hit description =Putative uncharacterized protein
  Pfam annotation: Domain name=Rick_17kDa_Anti; Domain location=72-116; Score=24.9; E_value=0.00029; Accession=PF05433.6; Description =Rickettsia 17 kDa surface antigen
  Subcellular localization annotation: CTP_CleavageSite=79; ConfidenceScore=5.04e-01
MGIGEHFEGVKQHWASNFAFLDYFKKVYGRAEPPPQVGPTPTSTSSSPPTPVYGPQMRFPQLKALRESRKFALAGALVGAAHLGGVALKYSKAPHGVLLATGFGAITGAVLGSEVADHWYQLYEMDKQGANLRTGVRPKSAPDSQVSLVITAQSFRGILELAY

SEQ ID NO: 61196 - protein, 172 aa, Zea mays
  Coding DNA Sequence Number=SeqID_17821
  Homolog annotation: Hit_ID=Q9M4U5; Match level="QueryCoverage=16%, HitCoverage=9%, E-value=9e-07, Identity=82%"; Hit description =Histone deacetylase HDT2
MLDVADSTSVPLAHAFLSAAPTCSGLIPPASADPDPASVVPVHCLAIRRRGTRALPRGVVVDDSNHQYKIREPVPLYTDKGQKRAQALAAGSLLSFISHAPRSWLDACAVALRSMAWHGPRSLDNDMVEATSHRQVLGSVSGNGDKKGATHVATPHPARGKTPTNNDKSKEK

SEQ ID NO: 61197 - protein, 178 aa, Zea mays
  Coding DNA Sequence Number=SeqID_17822
MRRKDGGYPPSGGLEGGKTRCMREREDMVYFQGGHPPFKGDYPYLCPQPSRAEFSPTRSKALPCGVGGWVPHVMQAGSEQKKPNRRARRSGRRFAFAVITAPKKGPGKGDTPKRILPREGTRLRASLLIRGSKAGPPKGSTAASDRVGPTPTTGQRFEGRPPEGLHGRLRLLGLRAHY

SEQ ID NO: 61198 - protein, 57 aa, Zea mays; identical to SEQ ID NO: 44635
  Coding DNA Sequence Number=SeqID_17823

SEQ ID NO: 61199 - protein, 76 aa, Zea mays
  Coding DNA Sequence Number=SeqID_17824
MATVAEALAAMAGGIELVGAKERWLAGEASITRQRRERSSSNADWAQIFEIKATIPLKDLFLSGIKVNIPDLWLKV

SEQ ID NO: 61200 - protein, 172 aa, Zea mays
  Coding DNA Sequence Number=SeqID_17825
  Homolog annotation: Hit_ID=Q6J9V9; Match level="QueryCoverage=40%, HitCoverage=24%, E-value=3e-27, Identity=85%"; Hit description =Putative uncharacterized protein
MSCLLDCGTSTATRGSPTRDPTVPIESNDHGGLKVAPSRVRQPPQSTRAPCPLLIRGSKAGPSEGFDSRPRACRVRDDPGYVCYMAEARAMLPRYPRTFPRGNDFVTESHRREASSPRTLSNGSGSGKSPTEAQGLLSHQATAELLTTSTNLRENSKPDRAPGLRPGRMREQ

SEQ ID NO: 61201 - protein, 216 aa, Zea mays
  Coding DNA Sequence Number=SeqID_17826
  Gene Ontology: Mol. function=catalytic activity
  Homolog annotation: Hit_ID=Q6YTI2; Match level="QueryCoverage=73%, HitCoverage=26%, E-value=1e-39, Identity=58%"; Hit description =Putative calmodulin-binding protein phosphatase
  Subcellular localization annotation: CTP_CleavageSite=53; ConfidenceScore=5.24e-01
MSSRSGSTSGGSTGGGSSAGGGAAVPLALLLRREVASERTASERPELHSGLFSQAKKGEDFTFLKLECERVPGVPSSSFSAFGVSAAPRSLSLSPPIAIAAPDLASRGSLPCLEASRWGGDERSARLFDGHNGNGAAIYTKENLLNNILNAVPADLNREDWLAALPRALVAAFVKTDKDFQTKGPEPARGIGAWNHVKVEFPQNPFPNFSGQHTGE

SEQ ID NO: 61202 - protein, 110 aa, Zea mays
  Coding DNA Sequence Number=SeqID_17827
  Homolog annotation: Hit_ID=A0EVG2; Match level="QueryCoverage=29%, HitCoverage=3%, E-value=8e-07, Identity=78%"; Hit description=Milt1a putative polyprotein
MAGSKDSSEVSASNIIKPTWETLSAEEQLMFEERQEQLIQEAKAKFLADFKVDRNNKVVRQCATDLASLQHTTNTPNPVQKKRQVEVKFTFNVGKCDKIFDELLKMATLR

SEQ ID NO: 61203 - protein, 101 aa, Zea mays
  Coding DNA Sequence Number=SeqID_17828
MALGKDGSSGPHRQSLCRELSLALGKGGFFAECLVDGLSAKSPPVGPFASLFAKCAGRHSAKVINEVGIWTGSTKGWTKREGCSTPPIDPAQRRDCMCENI

SEQ ID NO: 61204 - protein, 279 aa, Zea mays
  Coding DNA Sequence Number=SeqID_17829
  Gene Ontology: Mol. function=nucleic acid binding; Cellular component= ribonucleoprotein complex; Biological process=translation
  Homolog annotation: Hit_ID=A2YQN2; Match level="QueryCoverage=50%, HitCoverage=47%, E-value=4e-45, Identity=67%"; Hit description =Putative uncharacterized protein
  Pfam annotation: Domain name=KOW; Domain location=238-272; Score =23.8; E_value=0.00064; Accession=PF00467.20; Description=KOW motif
  Subcellular localization annotation: CTP_CleavageSite=44; ConfidenceScore=5.24e-01
MEPSFPPPHLMPLPPSSSLQQPYHGCAPTSMCAVVRGRAGERMRGAAGVEVAVLHQIDFLHNMIVWSAELDRMSSRCVITCRLYVQGWMVTEENLVALFINCGQVVDCHMCGDPNLVLSLLTLCNGSTIYGVKNIDVPEGARAALNLSGTVLGYYPVNVLPSKTAIAPVNETFLPRSNDEHEMCARTIYCTNIDKKVTQADLKLFFESICGELKVCRNGTIKIDLETNKIMDFIKFDVDNVVMMSGGRNTGHVGVIKNREKHKGSFETIHVLLGAFCYV

SEQ ID NO: 61205 - protein, 109 aa, Zea mays
  Coding DNA Sequence Number=SeqID_17830
MTPLVGVTFMMRSTPCYARHLTGVPAEVAMQDVARRTLSHYCSMFGGVADGLNLRARVEIAQLRAERVERRHLEDGSPAPIGTQHPFRSPQRGHQAYRNFDLGMMVYTI

SEQ ID NO: 61206 - protein, 50 aa, Zea mays
  Coding DNA Sequence Number=SeqID_17831
MPVLRLLLLRKFPCLSLLTLTLMGVLHLLLTPMGVFHLLLTPMGIGGRNG

SEQ ID NO: 61207 - protein, 145 aa, Zea mays
  Coding DNA Sequence Number=SeqID_17832
MGKNNKHKREPTPPSEDFGDSEYSEEKFSSESEGSPAPVSPPASSDDSDDSQGIAVEVWTYIRAVERSGLEGSDESEYSSDEEDSSEEGGEGDDDDDDNDDGGDGSDDGGGGSRGGNGGGRSGDGDSSRGSGGGGSSKGSNKASG

SEQ ID NO: 61208 - protein, 124 aa, Zea mays
  Coding DNA Sequence Number=SeqID_17833
MDSRWPSDAPKANPPRFYRVHDGNARATDLADLPATISLLPRPSWHGGALIGLWNKKTGDLYGPRGLAGVELGLANFMELTREVCRFLLGEDGETGKPGPPDSGIKGEKADAALPAKLTSGTRA

SEQ ID NO: 61209 - protein, 90 aa, Zea mays
  Coding DNA Sequence Number=SeqID_17834
  Subcellular localization annotation: CTP_CleavageSite=53; ConfidenceScore=5.19e-01
MALGDRVQERSRVFPPLAQGSKCTKGPFGTAPAPDSKRGSGGAVPNGRIRRISSSRESGSGAKEAGAGALPNGPLDRMALGAYRFAVRQS

SEQ ID NO: 61210 - protein, 79 aa, Zea mays
  Coding DNA Sequence Number=SeqID_17835
MTKGTSPPAPIHAIIRVVVRLSAWRASLHDDIRESENEEEIEVEEARTTPPPPEEPWAGNCFYFDICGAEPDSPITYVV

SEQ ID NO: 61211 - protein, 835 aa, Zea mays
  Coding DNA Sequence Number=SeqID_17836
  Homolog annotation: Hit_ID=A2XNZ4; Match level="QueryCoverage=24%, HitCoverage=65%, E-value=1e-30, Identity=39%"; Hit description =Putative uncharacterized protein
MANSKFGLLDLADGESGEAAVSVAITKVEAAAAAAARKAEAASDAAGTGKEKAPHKNHLYFTKLQLDNGMRNIEHELKRLRDVLIKLRGEETKLKENMEDGGRLMQLLSEEQRKLRQEQTKLWAQQAKLRLQRKEFYLEHGFPLGAGEEGPQVPNRAETVHGCDNAGAAANVNGSCNGGRQGYPEVRYKRKVQKYVVKTKQPSSGPATAGAEHKPEEKVTSDASSEADHHDEAATPANVEVAAASVAAACNNGQDGPRTNNVFVRKEKLNGSVKRKNKNSKNGGSNDKLKKQDLSETEEPPREQEKKVTPAVLDFQNFKPLLFLISKIFEQTLDEYEREQKKSSEDASRTEARKVCDDEFRGLQMLKNKVDDGEAIMIKAEKLQQKSKKPQPEAKVPKKVVIPLKDLSFAPPRRTFFLEDGSSNGGGFRGRSRDNGRVVQNEASNGAPRGGGGDGYHDQGSNGGTGYYHHQQSGYARRPRGRGYSGNGRHPAPATKPILVEEFPPLPAFSAAARVSHTSIDMPRSDGVHQPSCVTVPLGKSVRRALRAAIGMPKKKKKNPPPPPLGVSMELSSSSSVAARKEAVVRVVMRGGVVEVYPSVVLACTVIRNHPPGLCLAHPDVFRNPHGAVVRPLEPLFPGQKFLLLPESTVVRLKQKIPESSIGAFADDDVEEDDDDEEEEEGDGAAVVSSSEGEAAAEGDGTTSTTTSMPSCSAREYFVSRDRWSECRSRELVPVEQGLAMEPRPSKDDDEPAERKQEKTRTKKGNKKKRRKGRRRRDRSSPVPQLPMELIRGVGRTWEPSLPSVEEEQEEAAAVVIVSPLHPPPSDATAHNTRS

SEQ ID NO: 61212 - protein, 458 aa, Zea mays
  Coding DNA Sequence Number=SeqID_17837
MESHDLRAEWESRLVGGYEIDGSGYDYGIASPLQPNRILAEYVDVYSPLLYTPNPPQVVSIATTAQAKMKLWKETSRSSKITTSSRCGLAATPSRLPVKAALSTFLFRTLIYCKNYMDVSDMARLRHTARKSVIPFLPSRLAERPLRRPVAGQSSHLERLHHRLREEQERRRQEQRSSSLSLHQEIESVRSCSPVLSLEPPPAPPLGAPASGVAAGGDPDDGGGDDSSSHDTDFSANPEPEGWVARPITRDAARGCHFHDALDTLLRRAFDRHTWSVEYRCVVYQHSRGVYPDRWEATCLVRCPEDSLQGAEACSEHYSTSERDSAEAAMQDAARRALSHYCSVFGGAADGLDLKYYPRRSSGSTGGVIVSPVGEGNPRLSSTVNLAAVLNTELDHALDELSRARAEIALLRAERAERRFLDGGSPAPVGTQHPYRSPQHGHQSYGNPACKTKINLEP

SEQ ID NO: 61213 - protein, 57 aa, Zea mays; identical to SEQ ID NO: 44951
  Coding DNA Sequence Number=SeqID_17838

SEQ ID NO: 61214 - protein, 138 aa, Zea mays
  Coding DNA Sequence Number=SeqID_17839
MILDYLPSACGNTEEEKAKEKEIKLKQESTWKRLEEIASAQATSGEIGGSRWVETLLVESMQMNHVLEPEIVVYNSSDPRTPGSSRRRRHRPVHVPGDDVLTSCPSPTTSMDHSPDDLSLMALGEDGDHGAALPLIAD

SEQ ID NO: 61215 - protein, 364 aa, Zea mays
  Coding DNA Sequence Number=SeqID_17840
  Gene Ontology: Mol. function=nucleotide binding; Cellular component =integral to membrane; Biological process=protein insertion into membrane
  Homolog annotation: Hit_ID=Q10AQ5; Match level="QueryCoverage=62%, HitCoverage=44%, E-value=1e-103, Identity=81%"; Hit description =ARTEMIS protein, chloroplast, putative, expressed
  Pfam annotation: Domain name=60KD_IMP; Domain location=1-179; Score =171.3; E_value=2.6e-48; Accession=PF02096.11; Description=60Kd inner membrane protein
MPLCMGGAEERIQLETARLYKLSGVDPLAGCLPTLVTIPVWIGLYRALSNVANEGLLTEGFFWIPSLAGPTTIAARQNGQGISWLFPFTDGHPPLGWSDTLAYIVLPVLLVISQYISTQVMQPPQSNDPNQQGAQAVTKFLPLLIGYFALSVPSGLRLYWLTNNILSTAQQVWLQKLGGAKNPVKEYIDKLSREETTTVQKNDSTVQSEPLSKHSKPQPSQEPKPSGPQRGERACLALAPEQNSKARPCQTPYGMYWWETGGLGVVARRLEDGPGAVTTREEMQSKIRVLHLTGREKIFRKLKEEESMRKEVMGQGKQSEQSSSESRVTDGTQNSDVSSGDQKDQQVKSTLTRLITDINLTGVS

SEQ ID NO: 61216 - protein, 135 aa, Zea mays
  Coding DNA Sequence Number=SeqID_17841
  Subcellular localization annotation: CTP_CleavageSite=48; ConfidenceScore=5.26e-01
MELRSIPTNKLRRRLKFWQQNSANSSKCCGKKAKRQKFYTRRTPARTRCTVDRRDRTVTLQGGAATRREIESFLDNELREGVFETFGAPKLKKLFSQIKLVTKNDLAPRKGLLLGLCFVAEGLIERSGPRMKLFV

SEQ ID NO: 61217 - protein, 146 aa, Zea mays
  Coding DNA Sequence Number=SeqID_17842
MGKNNKRKREPTPPSEDFGDSEYSEEEFSSESEGSPAPVSPPASSDDSDDSQGIAAEVWTYIRAVERSGLEGSDESEYSSDEEDSDGGDEGEDDDDDGDGDGSGSGGGGDGSRGSTKGDSSKGSTKGGSSRGSTKGGGGGRGRASG

SEQ ID NO: 61218 - protein, 89 aa, Zea mays
  Coding DNA Sequence Number=SeqID_17843
MTRGCTGDDAGIGRGVQGSHAAREQGTAALGQERGRKLARRRGHQPLDQGEGRVESALAMRSLQPQVKAIQQRYAGDQWLLQQLLLISV

SEQ ID NO: 61219 - protein, 926 aa, Zea mays
  Coding DNA Sequence Number=SeqID_17844
  Gene Ontology: Mol. function=ion channel activity; Cellular component= integral to membrane; Biological process=metabolic process
  Homolog annotation: Hit_ID=A3APM8; Match level="QueryCoverage=84%, HitCoverage=84%, E-value=0.0, Identity=84%"; Hit description =Putative uncharacterized protein
  Pfam annotation: Domain name=DUF1012; Domain location=438-652; Score =30.6; E_value=3.5e-06; Accession=PF06241.3; Description=Protein of unknown function (DUF1012)
  Pfam annotation: Domain name=TrkA_N; Domain location=362-499; Score= -9.3; E_value=0.044; Accession=PF02254.9; Description=TrkA-N domain
  Pfam module annotation: Pfam domain module=DUF1012::TrkA_N; Domain location=438-652::362-499
  Subcellular localization annotation: CTP_CleavageSite=63; ConfidenceScore=5.74e-01
MPLDPDSSSPPPPHRDWFFPPAPPFLASSRSRTPSAPFPSTYRSSKPYSAYPLADRRPPPTPRSRSRSPHPPPEQQQKTPTPPTPTSAPRRRDPRYAGVRREDARTAASEQAAAPMAAPVHGRKPAASAIAPRWSGVLSVAVILLCLASLLRRNFSLHDQVYLLQEQLAVATAKLQSCTVDSSLNTSIINLFYQDAANSTTQSRSLKNLSLLISLSVLYAPLLILKYVDLVSKIRRSRDSEQVPINKRFAYRVDIFLSLHPYAKPLVLLVATLLLIALGGLALYGVTDDSLSDCLWLSWTFVADSGNHANAVGLGPKLVSVSISIGGMLVFAMMLGLVTDSISEKFDSLRKGRSEVIEQSHTLILGWSDKLGSLLNQIAIANESLRGGTIVVMAERDKEEMEADIAKMEFDMKGTAVICRSGSPLILADLKKVSVSKARAIVVLAEEGNADQSDARALRTVLSLTGVKEGLSGHIVVELSDLDNEVLVKLVGGDLVETVVAHDVIGRLMIQCARQPGLAQIWEDILGFENCEFYIKRWPKLDGMRFEDVLISFPEAVPCGIKVASYGGKIILNPDDCYVLQEGDEVIVIAEDDDTYAPAPLPKVKEAVYIDIVHPERKPQKILLCGWRRDIDDMIAVRRGYLPKDFVVPKSPERILFCGWRRDIEDMIMVLDAFLAPGSELWMFNDVPEVDRERKLIDGGLDFSRLDNITLVHREGNAVIRRHLESLPLESFDSILILADESVEDSAIQADSRSLATLLLIRDIQAKRLPCKESLISHVPRGTFSEGSWIGEMQQASDKSVIISEILDPRTKNLLSVSKISDYVLSNELVSMALAMVAEDRQINNVLEELFAEQGNEMQIRPSDMYLREEEELNFFEVILRARQRKEIVIGYRLEAAERAIINPIDKVSRRRWSPKDVFVVISEKE

SEQ ID NO: 61220 - protein, 97 aa, Zea mays
  Coding DNA Sequence Number=SeqID_17845
  Subcellular localization annotation: CTP_CleavageSite=62; ConfidenceScore=5.01e-01
MGAPDSSIILDRRSFLEKQAKRGPSGPLRWTVRDRRMTLRQNQCKNTSFHYRLSGGKAKTVRALARTVRPQARTVRSGRTVRTRRADRPRSAEWPNG

SEQ ID NO: 61221 - protein, 256 aa, Zea mays
  Coding DNA Sequence Number=SeqID_17846
  Subcellular localization annotation: CTP_CleavageSite=18; ConfidenceScore=5.31e-01
MKLWKETSRSSKITTSSRCGLAATPSRLPVKAALSTFLFRTLIYCKNYMDVSDMARLRHTARKSVIPFLPSRLAERPLRRPVAGQSSHLERLHHRLREEQERRRQEQRSSSLSLHQEIESVRSCSPVLSLEPPPAPPLGAPASGVAAGGDPDDGGGDDSSSHDTDFSANPEPEGWVARPITRDAARGCHFHDALDTLLRRAFDRHTWSVEYRCVVYQHSRGVYPVRWEATCLVRCPECSPGCRGLSEHYSISETNF

SEQ ID NO: 61222 - protein, 45 aa, Zea mays
  Coding DNA Sequence Number=SeqID_17847
DALLDHLGSDQWRVMISGQNGNHGLWRYCGTGGYEIDGSGYDYGI

SEQ ID NO: 61223 - protein, 518 aa, Zea mays
  Coding DNA Sequence Number=SeqID_17848
MHRPPAYVTVNKPCSSIRPLAEWGVEVLQMEPGYASIPDPCLGRDTSPPESLLRVGSRAFWVRRHCLWERHLNCSRDTPGVVLCAVKGNCAGIMPLYRVTIGPPMVTPTATPAPAADWPEPARRMYDMWARAPMPEVGLPVAAKLRGRATAGRLHAPYATGGCTLPVRRFAFFALRASAGSFARGIRVRATPSGLTTGELALFVSCAAVLSILSSSCCCDLAGVDTLLPSFGFKDFHHAARLQSPTSASRMFIILAGVEGEPSWGPAFRMGWRPASSSSIWGRRAFTSLAEEANFGYVGSTGCRRHQLPRVWLLGLDGLGAASDVVSCRLVGAWLSVHRTGGGRTEDGSEDLFARAEVAAVASKPPVQRWPLSLVLRWSPPLVRLSTAEEDGGEDLFAMAHALRVGMELGLRLKADVILLLFVRCDVSRLDTSVSERVVNNSREAASSGSRSGGGACRPTVRDQAERLHGLRTTLGDKYQHVGFMGTDLTGLAYTILSEVWARGESRRVSGGRQASAP

SEQ ID NO: 61224 - protein, 878 aa, Zea mays
  Coding DNA Sequence Number=SeqID_17849
  Homolog annotation: Hit_ID=Q10SC2; Match level="QueryCoverage=99%, HitCoverage=99%, E-value=0.0, Identity=62%"; Hit description=FHA domain containing protein, expressed
  Pfam annotation: Domain name=FHA; Domain location=84-160; Score=46.7; E_value=8.4e-11; Accession=PF00498.17; Description=FHA domain
MAPDPCADLAVTPKTSAKDEASCSVAPPTPPKVTPDEVRAVARKFADQPIQETEPDVWAVLTAISKKARLRPQGMNILLSADEHYLGRAVEERFRVFAQQISGKHCKIYKDTVSGERNRHEPVPVFFKDTSSNGTFINWKKFKKNASPVKLNHGDIISLPSPPHDGKSFVFVYREVNAISCVENGVPILKRKSEEGSSGSKRLKGLGIGSPDGPVSLDDVRRLEKSNADLREQLEAHVVTIETLRAEIKTTQVQHGKELEELRETTSSSYLDQTKSLQSTLEEKQKQIDSLSTSNTELQNSIKDLDERLGASKQSRADADEIISSQKAIIRELEEQLSEERNLRREERDKAAHDLKFAVHKVQAEAQEEIKKQAESYLRQQREQKEVINKLQESEKETRLFVETLRSKLEDARDNLVTSEKKVRELEAQFQDEQLVSANNRKKSENLETELRKLKKELENEKAAREEAWAKVSALELEIAATIRDLSIEKQRYQGARERIILRETQLRAFYSTTEEISSLFAKQQEQLKAMQRTLEDEENYESTLMSVDLNKEHLAIDNAGMKPVNCSKNTLGASIASPENTQVSEHSSSDEDANMTEQQDDDVTANGGNTQDLECTSPERSVERRPGFHGNPVPTAPEREVTDTEQVPETESEAGNVGCDDQRCDNIGGETMPLEDEVLLPENEEPTALLKDAGQPQSNMVPIPILDDGGGHCSEEKHEGACSESKRDDTHVGAIRTGDLLASEVAGSWAVETAPSVNGENESPRSLGDATERDEDGGSVAADALLTLVNSEGQAAGSQNNVEQASSKITDDRRVLSAMIGIVDPEFRKQMSRSGAGNEEPMSDAETDEGVEEGDSDSGSDGSDSDSEEAMVEDSVG

SEQ ID NO: 61225 - protein, 554 aa, Zea mays
  Coding DNA Sequence Number=SeqID_17850
  Gene Ontology: Mol. function=protein dimerization activity; Cellular component=nucleus; Biological process=regulation of transcription, DNA-dependent
  Homolog annotation: Hit_ID=A2XC02; Match level="QueryCoverage=63%, HitCoverage=84%, E-value=1e-113, Identity=64%"; Hit description =Putative uncharacterized protein
  Pfam annotation: Domain name=bZIP_1; Domain location=401-464; Score =27.9; E_value=3.8e-05; Accession=PF00170.12; Description=bZIP transcription factor
  Pfam annotation: Domain name=bZIP_2; Domain location=401-455; Score =32.0; E_value=2.1e-06; Accession=PF07716.6; Description=Basic region leucine zipper
  Pfam module annotation: Pfam domain module=bZIP_1::bZIP_2; Domain location=401-464::401-455
  Subcellular localization annotation: CTP_CleavageSite=12; ConfidenceScore=5.30e-01
MRRCARLPNAARAAQVRRVAPSERTKGGHGTPSRARRRNSLGRHGNPTASARPPARHQTPIKFNTLKSARATQSSRPRIPFRATAAALRLRLRASPAVSAARTSARAAPPTPKPRPRARGAKQALELPRAAGAVQPGRARRSMNGVGDAHAAAAAAAMVQQTLGMSLPMAAFVPEQGSANRLTRPPGLPPLPQAFAAQQRGDVCMEAVDPAAGPRKAHRRSRSDVPFGYFPPAGHHQLPPPKVEAGWGGHLPAGGGGGGDDDLFNAYLNLEGLDGLNSSDDRLDDGDSRGSSMRTNGADSSENESEECAADSRAGIRLCAAAADRREGLKRAAAAPVARHARSLSMDSLIGKLNFSAGATGAASGVIPGPNRFSLEFGTGEFSPVEMKKIMADEKLAEMALADPKRVKRVLANRQSAARSKERKMRYIGELEHKVQILQTEATTLSAQLTLLQRDSAGIATQNNELKFRLQAMEQQAQLRDALNEALTAEVQRLKVATAELGDSCSSSNLAQQIQISVQDQMFQLHQQQATPIPFYQLQQAQQNGAGKKHEPTE

SEQ ID NO: 61226 - protein, 188 aa, Zea mays
  Coding DNA Sequence Number=SeqID_17851
  Subcellular localization annotation: CTP_CleavageSite=70; ConfidenceScore=5.59e-01
GAARLHFPTEPAPPFPAAPIRPHTVGMLGPSHRRSRPSSHPPPTQSVCSGSVAAPPPTPTAPSSSSGLPRAAAMQPTAATTASGVGPVLPIDAVVAPTTSDIGVLSPSAVVATVAASARAAGPVPSGLSLPSYPTCTGALTGLLSPTRLLRQPPPRFSTTRPLAADTTWASPAPSTDSALASAVATIQ

SEQ ID NO: 61227 - protein, 109 aa, Zea mays
  Coding DNA Sequence Number=SeqID_17852
MEQGDTPGSRVLRGHGRRPDLAGAQTVDGGAVTSWVGDRRRMMRTRPGSRGRGRAHRCAEYGVQVPTTREQRCRRETRLELENSQRRDEERAETRRGLSKKLTRDEIRT

SEQ ID NO: 61228 - protein, 671 aa, Zea mays
  Coding DNA Sequence Number=SeqID_17853
  Homolog annotation: Hit_ID=Q6QP51; Match level="QueryCoverage=7%, HitCoverage=22%, E-value=6e-12, Identity=71%"; Hit description =Putative growth-regulating factor 1
  Subcellular localization annotation: CTP_CleavageSite=57; ConfidenceScore=5.54e-01
MTEPRDSYTSGIRIPHSSPSAITAPSVSTTPSTKSNLASDGNAVGGYPLRRTTSAPRPDHRRQGLLQESGSCRQLGRPPRSLSQLSPEDISPARGLGNSTPTSVPLVDGLARLRPTKSSFRANSASVRADTAAPGFGSSKSGRGFPLTKQEKPRAARPTEPRDSYASRIRIPHSSPSHEATHTWLSGSVSRQASPSARNEEKHGSMPKIHTCSGPNSHNEQNTGTQGAITNGTPVPPPRVRTTPHIGGPAGRQAPGDSPATSVAAAMVPGRTRPQEGSRGADDLDGGEAFSSCHHISTDDGVRLSTNAAPASAGRSKAHRQVLAPVLATKARRRTECCILAGQQQSPSPAWLEDASSAELEDGLHHQKLEEEVASRPVREVEPRLTSLSAPARMMKILEAEGGTKIAARLASPHHQTGGHRLGHRGLSLLQHAPRSSPYDTGAGSHASCKLARGRRSQTAARAVRATAQRLRAILHFRPGQRVKGRTAMQAACNCTKGAHPFDFDASSMEAQAHTSCNRRVGCYVQETAPPLAPLSCLLECGTSTATRGNPANDPTVPTRHIGHESVSRGRRRDGRYGQKWAGSNGCGRQAEAAVKSDWERGYHERDPSPQRKRALSPPTDQRFEGWPLGGVQQPPQSAWAPRPLLVRGSKAGPSEGFNGRLRPLGLRAHY

SEQ ID NO: 61229 - protein, 323 aa, Zea mays
  Coding DNA Sequence Number=SeqID_17854
MEKFETEPNAFVMIWHLFCREEEVCAGFLPRFARLRSRQAFEHGQKNTSTCSTSPERARARPAPDPTRPAPCQATPVSPARARSYKASQGFSRTPPCTLDLNGARDRQSLPGTRRASGLLSTRHRRQANRAIPRPVQPSRETLRASVKLPARGIELCLAGETKSRSPDFNRPSTNIDRAPRPEQPPPTSSPAFARGPADSGHHRRRAIPRRDRKDLPKPTPPFTGPPSPPGAGYTTPPQYTVQLFEKHRVPRCRVRMTLEPHPLQPDWRSLDSESFGYRAEDTIEAIALHGLTTLCGFHPLELSTHPIGLFPAEKEDDPMWKD

SEQ ID NO: 61230 - protein, 148 aa, Zea mays
  Coding DNA Sequence Number=SeqID_17855
MTKIDACRRWSKRVHRRWASMLATCSQVKIIIYYKCTFGLEEDKEYKRDAKANAKSREHGEGWDTGATWRVGSTRQRLEGESESDGAGEAGPRVLGVRTFVLLSHVHGAKRHVRNRRTMRVEGGSVGGIAQGGEPLWHGTAPGAYRRW

SEQ ID NO: 61231 - protein, 106 aa, Zea mays
  Coding DNA Sequence Number=SeqID_17856
  Subcellular localization annotation: CTP_CleavageSite=57; ConfidenceScore=5.45e-01
MAAVSLTLSSGTTVGAAQAALSFCQAAGRSPGARSGPKFSGWYVDAVNGLAGAGFARAAPEPPHRARGQSRTDSTFLHTPLRRLSARRRGEKRHVALGGRRTWCLQ

SEQ ID NO: 61232 - protein, 38 aa, Zea mays
  Coding DNA Sequence Number=SeqID_17857
MGDHRAEDAPEYGSRILSLENKVRIAEEQTRGISPVAE

SEQ ID NO: 61233 - protein, 90 aa, Zea mays
  Coding DNA Sequence Number=SeqID_17858
MGEDKTWGLTLLHPAELGGRPESRRSPTIPSCIRRWRYQFKNPGAKVERDEEHPCADLQRVRDGWPCRMDCARGWQWGGNLGAPVEYESS

SEQ ID NO: 61234 - protein, 211 aa, Zea mays
  Coding DNA Sequence Number=SeqID_17859
MARRHKNGDSGQDKLQRRSHSGPVLGGHRHLQALGRLHHPRIAASPGMGATGLPATGGLSAISSVDGTATDEGSASHAQGSESDVNIQDFLVHGSGGSGHLPGGGVGSGQNSHSPQEWVPSLNHKPYEHLASICDLGLPQCPPVIHLHIAVKLNIRNKVTEPEKPSLYIKNCVLSIDRESSGQMLSFGSAEPGPVVYKKSSRSSIKRAPGR

SEQ ID NO: 61235 - protein, 370 aa, Zea mays
  Coding DNA Sequence Number=SeqID_17860
  Gene Ontology: Mol. function=catalytic activity; Cellular component =alpha,alpha-trehalose-phosphate synthase complex (UDP-forming); Biological process=trehalose biosynthetic process
  Homolog annotation: Hit_ID=Q1W5S7; Match level="QueryCoverage=100%, HitCoverage=100%, E-value=1e-170, Identity=84%"; Hit description =Sister of ramosa 3
  Pfam annotation: Domain name=Trehalose_PPase; Domain location=103 -337; Score=329.3; E_value=6.8e-96; Accession=PF02358.7; Description =Trehalose-phosphatase
  Subcellular localization annotation: CTP_CleavageSite=47; ConfidenceScore=5.28e-01
MTKRTAFAADDAIIAAAAAVTSQPGRRFTSYPPARARGGCRLAPAVAAAARQATDDPGAAGSWPELVVPRHADFDDWMEKHPSALAAFESVLAAAKGKKIVMFLDYDGTLSPIVRDPDSAVMSEEMRDAVRGVAEHFPTAIVSGRCRDKVFNFVKLAELYYAGSHGMDIKGPTAQSKHTKAKAGAVLCQPARAFLPVIEEVYRALTASTAPIPGATVENNKFCLSVHFRCVQEEKWRALEEQVRSVLKEYPDLRLTKGRKVLEIRPSIKWDKGNALQFLLESLGFAGSNSVFPIYIGDDSTDEDAFKVLRNLGQGIGILVSKIPKETRASYSLREPSEVATLPTATSYYCTVEEFLRKLVSWSKESRQRD

SEQ ID NO: 61236 - protein, 186 aa, Zea mays
  Coding DNA Sequence Number=SeqID_17861
KRRVPRPVSESRSSTGVDRDVGAKGRTVKKGAHCSLAKAPPSSWTVLNDDSPGEVEGSVSQDEGCRARAKATPPNGGTQATFRRHLRPFVSPSSRYRKRMVPRPVPESRSSAGAARDVGAKDRTIKKEAHCSLAKALPSAWTVLNHDSHGKVEGSASQGEGCRARATSLDDAKAAIAEKKRQDNPR

SEQ ID NO: 61237 - protein, 38 aa, Zea mays
  Coding DNA Sequence Number=SeqID_17862
TFWFTGGNEIDGFGYDYGAGEDEAVEGDFQEFQEYDEF

SEQ ID NO: 61238 - protein, 59 aa, Zea mays
  Coding DNA Sequence Number=SeqID_17863
MAALGPLTEARGRQQGLDSPDRCPLARLQHSSDGHDITRTGCQNLSGCHDGILLDIKAI

SEQ ID NO: 61239 - protein, 367 aa, Zea mays
  Coding DNA Sequence Number=SeqID_17864
  Homolog annotation: Hit_ID=Q7XC07; Match level="QueryCoverage=36%, HitCoverage=84%, E-value=1e-33, Identity=51%"; Hit description =Pentatricopeptide, putative, expressed
MDFFSRGLTAQNAATAYILCTGPLAAPGAQHPSSPQPTRGLHEPSVIGPLGSGARGTYHPLPSVESSFRAAAISSSSDSGGLTPSSRSATPYLDVGFYFDSPRDREETQCHKVPVVCNRGAENLGHRLLEAVGRQRRPDERANNQMEAVVRKVQQRVRKAREEMDQWDDLNTRLLSQFSNAAAVISRLQALGEDKNYGPLRAVPNIRVDLIGNQMEVLELIFVKIRETLEKFNDVVKALNKALRDTKQMVYAKIISYLLADLEDMSNHGDPFICSSSDIAVLRQLLVDQPNIPKDEEIGAPLPLPGGAQKVSTKLNFFNADQDNTLKKWYMYALHLSNTLCNSTHQSHRGLGLGGLWAPETPEAEKR

SEQ ID NO: 61240 - protein, 332 aa, Zea mays
  Coding DNA Sequence Number=SeqID_17865
  Gene Ontology: Mol. function=catalytic activity; Biological process =trehalose biosynthetic process
  Homolog annotation: Hit_ID=Q1W5S8; Match level="QueryCoverage=100%, HitCoverage=100%, E-value=1e-148, Identity=76%"; Hit description =Ramosa 3
  Pfam annotation: Domain name=Trehalose_PPase; Domain location=106 -314; Score=246.8; E_value=4.9e-71; Accession=PF02358.7; Description =Trehalose-phosphatase
MTKHAAYSSEDVVAAVAAPAPAGRHFTSFQALKGAPLDCKKHAAVDLSASGAAVVGGGPWFESMKASSPRRAADAEHGDWMEKHPSALAQFEPLLAAAKGKQIVMFLDYDGTLSPIVEDPDRAVMSEEMREAVRRVAEHFPTAIVSGRCRDKVVHTQAEAAAVHYQAASEFLPVIEEVFRTLTAKMESIAGARVEHNKYCLSVHFRCVREEEWNAVNEEVRSVLREYPNLKLTHGRKVLEIRPSIKWDKGKALEFLLKSLGYAGRNDVFPIYIGDDRTDEDAFKVLRNMGQGIGILVSKLPKETAASYSLSDPAEVKEFLRKLANKKGARQP

SEQ ID NO: 61241 - protein, 140 aa, Zea mays
  Coding DNA Sequence Number=SeqID_17866
MALESKNAGRRHREEELKQGKEGAGAAEEEKTIWSRIRRNMAAYETEEEGTRARTIAQRARATTTTRDAKAVERREEEKRRLEAEVRKEREKMRKEEAAKMLQAEKRKLKEKERKKREADDEKERRRKEELKKKKTVKRK

SEQ ID NO: 61242 - protein, 169 aa, Zea mays
  Coding DNA Sequence Number=SeqID_17867
  Gene Ontology: Mol. function=lipid binding; Cellular component =anchored to membrane; Biological process=lipid transport
  Homolog annotation: Hit_ID=Q7XIG9; Match level="QueryCoverage=78%, HitCoverage=78%, E-value=1e-22, Identity=41%"; Hit description=Non -specific lipid-transfer protein
  Pfam annotation: Domain name=Tryp_alpha_amyl; Domain location=35-113; Score=18.6; E_value=0.0052; Accession=PF00234.13; Description =Protease inhibitorseed storageLTP f
  Subcellular localization annotation: CTP_CleavageSite=67; ConfidenceScore=5.12e-01
MARLISLAVAVAVAVLALASGAASQAPGPASSVDCTSALAGLVGCLPYVQQGSTQGKPARECCAGVKAALKRHATVACLCAAFGRNYGMPLNLTRAAGLPAACGEDPAAFSRCNIKVPGAPASAPIASGTAPAAPTPGSSKSAAVIRSPVSAFAVLVGVAATLLSHCPL

SEQ ID NO: 61243 - protein, 172 aa, Zea mays
  Coding DNA Sequence Number=SeqID_17868
MQEYRCPNGPPGTDPARTRFGPVRIGSGQARPIDASGRVGLAHVPKDMPKPGTHREKSCRAGPLARDTTSAARACVTRPRYRSAGRIEGLSGPSSDCGSCVLINAQPGTSGSPATAVGGGHGLALRTGNIGCRLLSDWAWQMHDHCVLLGAVDQGLSAAEFSEKTIRFFHSE

SEQ ID NO: 61244 - protein, 256 aa, Zea mays
  Coding DNA Sequence Number=SeqID_17869
  Subcellular localization annotation: CTP_CleavageSite=38; ConfidenceScore=5.16e-01
MGGNPPSFRLIVGGTQLRGSWYLSAIVRLQGFSSHNPVAPLRWWSPETVTTSSWVGRSKSGCDLGPTLSFKDVHHPRWGGCRAEPALYLPRGFVGHPLPRHSRERALTGPAGGPDFDNAGLVDGRRRHLQRVGFVGLAPGGPFCRRAAAAPCTREDHPRCRALLGRRSCSGWSCLCTGTAPLRGGRRPTRPGGFEWGFVGGLMAPAVGVEAEVAREVPVADGITATIRASGLWLFVLVLAPRASAWARARLQQCLP

SEQ ID NO: 61245 - protein, 160 aa, Zea mays
  Coding DNA Sequence Number=SeqID_17870
MGEDKTWGLTLLHPAELGGRPESRRSPTIPSCIRRWRYQFKNPGAKVERDEEHPCADLQRVRDGWPCRMDCARGWQWGGNLGAPVEFLAAVLADTVEAVVLRVTNPSENLLPPDSRSVLGRVFCAVVTHGAAARGALLRRRVSAQEGLQVTVGWSMNEPD

SEQ ID NO: 61246 - protein, 112 aa, Zea mays
  Coding DNA Sequence Number=SeqID_17871
MQAACNRAKWARPLDSNEPSMEVQAHASCDRRAGCYVRAEAAVTSSAKLTSYPGQQESPPSQREDGAPVIRSSNGSRTRNGRPANHSPRRINSAAGQAAPQAGEASDASTSP

SEQ ID NO: 61247 - protein, 83 aa, Zea mays
  Coding DNA Sequence Number=SeqID_17872
  Subcellular localization annotation: CTP_CleavageSite=20; ConfidenceScore=5.13e-01
MAPRTLCDDDGSQPPYGSKRTSARTRQLRQLSFRQAPALLRWPRHHTNREKLAIPTEILPKSSGGLERWMPSKSKEAKKSTKS

SEQ ID NO: 61248 - protein, 547 aa, Zea mays
  Coding DNA Sequence Number=SeqID_17873
  Gene Ontology: Mol. function=nucleic acid binding
  Homolog annotation: Hit_ID=Q10KI0; Match level="QueryCoverage=99%, HitCoverage=78%, E-value=4e-80, Identity=38%"; Hit description=SAP domain containing protein, expressed
  Pfam annotation: Domain name=SAP; Domain location=12-46; Score=39.9; E_value=9.4e-09; Accession=PF02037.18; Description=SAP domain
MLTYPILNDRSIDQWTVTELKDELERRYLPVSGSKDELLKRLFEAMQDEILDGEGKTTVVTSPPEELKGGETPGSIDVSVNQASIEQHVHKGASEAAKQGVGLVISVTEAYDESTFATSEVTQEAVVGTAEVSQRSLDAVAEVESCLVDAAATDEPDGNGQGSASSGDTIVKEGSPRSEGHGNTIEKTPEDGTNKKIAVDDEPSDLTGGDIKLGLDVHSKILKLEDEPAPPHDMLHNHEDSDVVAVAEPEDDTSKKMISDDVPTGLMHTNVELGAKVDCKIEQEEVSTLSDAAALHSYPKEHIVAVAKGLALPRRMLMSGYTSNIDLDRKEESPDINSCEKLNLNRSSGDESMDEDVMERKHADSYIKPEDLRGKTKVTSEHVFKDVSLLDTRAEGSPAHSKEVVTEEKLSTPTEKRKLEDQEVIENNEPIKRQYLWNEDAVNISDQQASKITSTGTQKEVICPAPERSFGRPNTVARRNSPKERIGEVLLHVQNIPPAKTSATTSLRIDRFVRPFTLKAVKELLGKTGSICSFWMDEIKTHCYVTV

SEQ ID NO: 61249 - protein, 145 aa, Zea mays
  Coding DNA Sequence Number=SeqID_17874
LLPCQQSVEQGAGDGGNGKATAAGAEKATVMPKETGHGGDVDRPDRDHIWSLIRGTEAAARRQARTASPISTARPPPTARARAAATTSAGEEEVEARWPETGVREVEIPRPSCSSRAQVGRKERIQVYNGGVAECYVSSGGELAP

SEQ ID NO: 61250 - protein, 210 aa, Zea mays
  Coding DNA Sequence Number=SeqID_17875
MTFAAGDTSRFVDRAECTYLIHKINDAPTPSSVLYLLEHISNLACITCGWYAGALSNSFPGAIVVQFLSPSFCSLRPTLFVVFFEISLLVFALVLVFLNIAPVIVFRPIIYPGMDLMFNATPAPGEQTTFKWVIDHGCKMVWYLKLNPKYKKITGEEYVSPRLQLSRTLVKLDTIVQTSFKFMIYDQSNGKHKEQLGIDPSNYLVGATIR

SEQ ID NO: 61251 - protein, 336 aa, Zea mays
  Coding DNA Sequence Number=SeqID_17876
  Gene Ontology: Mol. function=SNAP receptor activity; Cellular component=membrane; Biological process=intracellular protein transport
  Homolog annotation: Hit_ID=A2XLS5; Match level="QueryCoverage=86%, HitCoverage=55%, E-value=1e-125, Identity=82%"; Hit description =Putative uncharacterized protein
  Pfam annotation: Domain name=SNARE; Domain location=221-283; Score =88.8; E_value=1.8e-23; Accession=PF05739.10; Description=SNARE domain
  Pfam annotation: Domain name=Syntaxin; Domain location=44-152; Score =68.8; E_value=1.8e-17; Accession=PF00804.16; Description=Syntaxin
  Pfam module annotation: Pfam domain module=SNARE::Syntaxin; Domain location=221-283::44-152
MNDLMTKSFMSYVDLKKAAMKDLEAAGDGIELPEAGAGGVTDERLRGFFQEAEAVKAEMAAIRDALDRLHAANEEGKSLRQVDALRAHRGRVNADIVAVLRRARDIRARLESLDRANAAQRRLSAGCREGTPLDRTRTAVTSGLRKKLKDLMLDFQALRQRMMSEYKETVERRYYTLTGEVPEEEVIERIISDGRGEELLGAAVAEHGKGAVLAAVHEIQDRRDAAREVERSLLELHQVFLDMAVMVETQGEKLDDIESHVANASHYVQGGNKELGKAKEYQRSSRKCLCIGIIILLLLVLLVIVPIATSLRSTYLGAIAYGAELCYLGATGYGAE

SEQ ID NO: 61252 - protein, 56 aa, Zea mays
  Coding DNA Sequence Number=SeqID_17877
MTEPPDAPATKSWSHLAAPRAMETPAPPLRYRGSAAQLVLSCSWGISVGVSKPGGP

SEQ ID NO: 61253 - protein, 331 aa, Zea mays
  Coding DNA Sequence Number=SeqID_17878
  Homolog annotation: Hit_ID=UPI0000F34A86; Match level="QueryCoverage =77%, HitCoverage=4%, E-value=6e-10, Identity=30%"; Hit description =UPI0000F34A86 related cluster
MTVADAREQRARRQPSSRPIRGQRESPLSRCEDNAPVIRSSNGSRTPNGCPANYSPRRINSAAGQVTLLAGATGDASPSPKQPHQKRLRASLLIRGSKAGPPKGSTAASDRVGPTPTTGQRLAPEGFTVASDAERGMTRGARTRPLRTTSASPDPGARTRPLLTTSASPDPGARTRPLLTTSASPDPGGSDSASADDLRLARPRGSDSASADDLRLARPRGLDSASADDLRLARPRGSDSASAMEDRLDPGFGGSLHVAQPRAQASHVDRKRHHHPTPSRLGPQRTRPGDVSKDTTVPTAVPPPGSVAPPTATTSRQQGAKISPAATLACT

SEQ ID NO: 61254 - protein, 628 aa, Zea mays
  Coding DNA Sequence Number=SeqID_17879
  Gene Ontology: Mol. function=oxidoreductase activity; Cellular component=membrane; Biological process=response to oxidative stress
  Homolog annotation: Hit_ID=A3BMM8; Match level="QueryCoverage=24%, HitCoverage=52%, E-value=1e-37, Identity=48%"; Hit description =Putative uncharacterized protein
  Pfam annotation: Domain name=peroxidase; Domain location=440-624; Score=61.5; E_value=2.9e-15; Accession=PF00141.14; Description =Peroxidase
MNFSSLLAELAACEKRLIACIEGVPAKCSVNCQNAFGGFTAPATDDKMSSTKPSLTTSTTIYGAPVFDQYCDADLGDNAMELVQRGPVDIERIDLRSGALAGCYGEQSARGHTPSSFNDDLGASLDSVANSSVHGGHGSVLPHLMPICAGTSRIHVPDDRSLDYAEDFDTNHLDKGCVLFGGVRASREEVAQARCDNTKLVIKQALAEANTAKDSLELAGGDNTHFNGVHRGQPFETLSNPSAHHRLLHASVDNVCLNDVVPDRESALQNLRLEYECVRVSEVTAQGRLKELNSILAATTTATACSTPTSTKCSMRVLNHGAYSVPNLPVVCIVGGSNFPSLRGFEAICTSTARPRSSRRSTSSSSIAQPHPQAGAVGSSESELAAPSSVHDNSVALISFSGRCDYARANEMTSAQIDAMAQDETDEIANTVEQLTGLGVEKVVAEYKFRDPKTSDQEMLESICSVLMPLKLQAKIAKAKFEAACSGKISCADIVAFTASDASYFLSNDDINFTIPAGRYDGTVSITSETLPNLPPPFAGFDQLVKMFADKGDRLPSSNTSDMDPSFAAMLQTKCKSTNDSNNTVMQDFKTPDILDNRYYKNVLAHKVLFTPDVTLTTNFMSNNLVAV

SEQ ID NO: 61255 - protein, 363 aa, Zea mays
  Coding DNA Sequence Number=SeqID_17880
MGETAVFSPHRWRNATPWELVPFSHRSASRIFISQPGRTPPPAVTQDGDLRLDGGGKRTGLRPLPLPQPQGFSSPGLGRGVCRVEVGPRVGGSPLLHSVTGGRSGCRPRRWHLQRAWLSDASGFGAARGASVCHGSWKRFFRRRDSQGWPRTDPQLYGLLPVLASRVLGHGRGPPGSSIRPEVITAAVRPPGAEVFIVAAAGAGDDEPLVGLLSLRRPTPMEWGCSYPRRREPEFRFVMALRMPGSPSARSALLSEAPLAQLKGPHGRSSMSRGQGSGWRPREMVGRGPRGDRPSRLLGSDSQRSPWQRLPERGDDVVLRSGEPRTASPSEARSGFAGGVVDAEGVAASFQRQDPSLQGQSVL

SEQ ID NO: 61256 - protein, 283 aa, Zea mays
  Coding DNA Sequence Number=SeqID_17881
  Gene Ontology: Mol. function=hydrogen ion transporting ATP synthase activity, rotational mechanism; Cellular component=proton -transporting two-sector ATPase complex; Biological process=ATP synthesis coupled proton transport
  Homolog annotation: Hit_ID=A2XLS5; Match level="QueryCoverage=75%, HitCoverage=40%, E-value=9e-63, Identity=61%"; Hit description =Putative uncharacterized protein
  Pfam annotation: Domain name=OSCP; Domain location=106-267; Score= -22.4; E_value=0.00013; Accession=PF00213.9; Description=ATP synthase delta (OSCP) subunit
MTLGFRGTRMPDFPGWGVCGCRGRIPSGLPPLAASSTYPRRRLNFPAAVPSDHQLLLVLLSQEQLAMNILNLQPINPGGHPAFPAAKESGHLTPASVRFDGVPVPAQSHAHCPRWQAQTLRRDSSYVGVEHEGTRTTASVPVPVPVPAVAPVPAPFKPLTLDFLRSLMDRSCSMSPAVAEYGEDSAPPPPQMVALRVVVASAVELDARQTELIARKMRRLTGFVNLKVDNVVDASLLAGFVVRYGTDDSHVIDLSVKGQLAALQNRVDSIDHQTAHVHGHPHH

SEQ ID NO: 61257 - protein, 97 aa, Zea mays
  Coding DNA Sequence Number=SeqID_17882
  Homolog annotation: Hit_ID=A2X6T6; Match level="QueryCoverage=74%, HitCoverage=6%, E-value=4e-10, Identity=48%"; Hit description =Putative uncharacterized protein
MASAECLNRVRKHGADRSALSNTVRQRRHGCDVIMLKDPKNRLRPVIHHCPLFVGFTDGWKHLVIANDLRAEDVCELVKGPDDGEPVYYVRMCGHKI

SEQ ID NO: 61258 - protein, 219 aa, Zea mays
  Coding DNA Sequence Number=SeqID_17883
  Subcellular localization annotation: CTP_CleavageSite=62; ConfidenceScore=5.28e-01
MGRPRAPWIQPPLRGSTAPACTKPPWLAWVAPPSRGSTAPVLHQSALTVVGGAAVCPLRAPRGMLASDRAEADDGHARTGARRCSIRAGPQPYPCLEGAAPSSLGGVTPTPTPRSGVAEFAFFRFLAQVRALIGQAEFAVFRGLPESEPWVWRCQLSMVPAPGLTACHLTLSSGTCSRTAHTAKSFCHARFGGICEMTVVTWALSTEGARRIRWSGIFA

SEQ ID NO: 61259 - protein, 129 aa, Zea mays
  Coding DNA Sequence Number=SeqID_17884
MTSHGSSDEGNAQSHTDGLAREGFPRILWEVLQGAGYTTPPQLTTFCGFHPLELSTHPIGLFPAEKEDDPMWKDRVEHAKDIWAIYPGQTAHLTVRCMNALYRLQVMRGEAMSHLMALLEATKITLDNR

SEQ ID NO: 61260 - protein, 61 aa, Zea mays
  Coding DNA Sequence Number=SeqID_17885
MYNGSSSLISCEKQTIRIEFLSLQVTALVPTITGMGDHVSGRVRRAICCQVQSGFNNHYAK

SEQ ID NO: 61261 - protein, 468 aa, Zea mays
  Coding DNA Sequence Number=SeqID_17886
  Homolog annotation: Hit_ID=Q33AJ2; Match level="QueryCoverage=17%, HitCoverage=40%, E-value=5e-10, Identity=44%"; Hit description =Putative uncharacterized protein
MVPTTTGAGGDEERRVTASAVGGGGGGASKSTSIGADADDPTSTTGTGGDGDAVGSPHSTTGRGTTTVHPWITQKCTFALAHGVQGSRAPIDLAVLVKNSVFFLFPFSDFSLETVLITEAFGEDVDEPRSGRDIKNPHIPDSDTLANKVEVELDMFHALMLEGVDATTGMASGPTPNAPRHEPNNPCMPLRRGRGKRFQQTHTRRSSMHRNAGKVVSTAVRWSRFTHPNPPTNLATKSRTEAPQAIAMVDLLATGGLTLSRYSDSPTSSKVRPYVHLIFWLTDSMGIFIGLSTESVSRSWDLMEIDAAGVEGIDGEAWATRRTSRPRDKTVSKEHDKVGSGLKYVRTTSPIGVGVDDEVGGRRPSKKKAKVSGASDVPHDLLHSGDMWLPRGVHMEAHLIYDIGDVRAIVDMILKSLDETLIASRISHRRAVNGGDLAPSVQWSRAGLTISHAIILKDVDGVLALVEE

SEQ ID NO: 61262 - protein, 120 aa, Zea mays
  Coding DNA Sequence Number=SeqID_17887
MGGAESLQGETTTDWGSSAGFQPTRKGEVGGGEGRCEGRDMAPCTRDRGAGRCDGRWEELRRAGEERCRAAAVGRKGSQPWSREGCRLPAGRGAGDAGQRRAAGSVEAPWEKELSSLLQP

SEQ ID NO: 61263 - protein, 199 aa, Zea mays
  Coding DNA Sequence Number=SeqID_17888
  Homolog annotation: Hit_ID=A2XFR6; Match level="QueryCoverage=34%, HitCoverage=19%, E-value=4e-09, Identity=49%"; Hit description =Putative uncharacterized protein
MKFYYVESLAFVAGSSASALPAPAVQALAPRGDDPDDSGDDDEYDEEEEKEDEENINEEANEEHQDHYVGLWPVTEHYTSMFETGHFPNLLQDVLHALGTYVRPLYETRRVYEPPRACYYITRIHVRVMDAGLNTDLDSATLDLSRVHLELEDAHARIAALEAQLDGRNSSEVQVPAMALSPPRKRIRYGEPGSITRLL

SEQ ID NO: 61264 - protein, 147 aa, Zea mays
  Coding DNA Sequence Number=SeqID_17889
  Subcellular localization annotation: CTP_CleavageSite=34; ConfidenceScore=5.23e-01
MAEQQPYAALSLPWQAAFFPMAMVCNKKSRAAVLCFAQQPRHLRALSGRCFVLHSEQHTGMPTWCSLFLCSPEHRRRSPPERNPVFCVEKKASRSTLVDVRSDAQIGIAIVLTNTDWVCLWEYIDRCLCEKCIGFMHVIGDGDSRCK

SEQ ID NO: 61265 - protein, 178 aa, Zea mays
  Coding DNA Sequence Number=SeqID_17890
  Subcellular localization annotation: CTP_CleavageSite=49; ConfidenceScore=5.16e-01
MVKKFGSKTVQIAVNAVVTSHLLVCLYSAAGKKAKRQGFYTRRAVTCTRCAVDRKDQTVTLQGGTDTISGNESFLGNELREGVFWTFGFPKLERIFSRFKLVTKNDLAPRKGLLLGPCFVAPKALREEAASAEIVPRKWPKDRRSIMYTLKEKGIDMVIASRSPTSDIAKVFQDKLEL

SEQ ID NO: 61266 - protein, 440 aa, Zea mays
  Coding DNA Sequence Number=SeqID_17891
MVCLGLGGRRKHTLQDNPILQARILTIEGSSSTLGVNYTFGEESGSSRRLGRSPQSLSQLSPKDISSVCGLGTNNPTRLGGLRSNRRPTDGSPTPRSSSGDDDDFCSGGPNSSSDDLRADVAAIRPSPMPSLERQGRAEGRRVGGQSVGGAGYLIGGETSSGCRGGRRRRKRLRSHSGQRAGHAAAASATNGERPSPRSLREGVGHRPRRDRPQLGALPSPALMMKILEAEGGAEAAARAEEAKLPCAVHATAQRLQAFLHFRPDQRVKGRTTMQSACNRTKWAHPFDSNAPSMEAQAHTSCNRRTGCYVRATAPPLAPLPRLLDCGTSTATRGNPVYDPTVPDRRIDHGPVSRGRRRDGRCGQKWAGSNGGGRRAEAAVTSSAKLTRSERRFAFAIMTASKKPPQSAWAPRPLLVRGSKAGPSEGFNGRLSPLGLLAHY

SEQ ID NO: 61267 - protein, 153 aa, Zea mays
  Coding DNA Sequence Number=SeqID_17892
MGKSKKGGSSSHHSGDKWKRKPTPPSEDFGDSEYLEEEFSSESEGSSVHASPPASSDDSDDSQGIAVEVWTYIRAVERAGLEGSDESEVSSDEGDSSDSSEEGSDGDDGGEGDGGNGGDNDGGGDGDGGGDGSKGDGGSGSGKGGNGSSKASG

SEQ ID NO: 61268 - protein, 113 aa, Zea mays
  Coding DNA Sequence Number=SeqID_17893
MGVMEIVASATVGGSVVVGGGGCTDGARCVARDNMAGGHTKPAVMIKGNNNIHEDYDRLRKDSYLGDKHWLELQLVLEHLGYVRGGRARSNHHVDPLLLEGVHDAPGMTQKAW

SEQ ID NO: 61269 - protein, 170 aa, Zea mays
  Coding DNA Sequence Number=SeqID_17894
MPSSDPIELCAAAPTMDMALPAVDVVTILYRLNILSMLAAAACRELHGGLHTRNHKSMVDVNVKDVVTIIDEIFTTYTGSYLTKSDKWVQIKTNQDRQICSKAAFFQPKSSKSPSKKIEMARSLNLIGAPWKNKALRSDEHKIVVHSEVILCVEIYQKTYAFVKKSHICV

SEQ ID NO: 61270 - protein, 274 aa, Zea mays
  Coding DNA Sequence Number=SeqID_17895
  Gene Ontology: Mol. function=kinase activity; Cellular component =ornithine carbamoyltransferase complex; Biological process=amino acid metabolic process
  Homolog annotation: Hit_ID=Q6QP54; Match level="QueryCoverage=35%, HitCoverage=26%, E-value=4e-23, Identity=61%"; Hit description =Putative kinase
MAPPVDMVGPCPGLGEVEAPPRSRSSLSSKAEVESEPLGRARRRPSADTKAEAEPESEPWGRAEQSSSSSGAEPESEPWGRAERSSSSYGAEPESEPWGRAERSSSSSGAEPESEPWGRAERSSSSSGAEPESEPWGRAERSSSSSEAEPESEPWGRAQQSSSSSGAEPESEPWGRAKRSSSSFGAEPESEPWGRAKRSSSSSGAEPESEPWGRAKRSFLWRLRSDLAAVSLTLSSGTAVRAAQAALSSCQAGQWSGEVTTVTSALSTGGRASV

SEQ ID NO: 61271 - protein, 254 aa, Zea mays
  Coding DNA Sequence Number=SeqID_17896
  Gene Ontology: Mol. function=kinase activity; Cellular component =ornithine carbamoyltransferase complex; Biological process=amino acid metabolic process
  Homolog annotation: Hit_ID=Q6QP54; Match level="QueryCoverage=30%, HitCoverage=26%, E-value=2e-20, Identity=67%"; Hit description =Putative kinase
MAPPVDVVGPCPGLGEVEAPPRSRSSLSSKAEVESEPLGRGRAKRSSSSFGAEPESEPWGRAKRSSSSSGVEPESEPWGRAEQSSSSSGAEPESEPWGRAERSSLSSGAEPESEPWGRAERSSSSSGAEPESEPWGRAKRSSSSSGAEPESEPWGRAKRSSLSSGAEPESEPWGRAKQSSSSSGAEPESEPWGRAKRSFLWRLRPDLAAVSLTMSSGTAVRAAQAALSSCQADQWSGEVTTVTSALSTGGRASG

SEQ ID NO: 61272 - protein, 37 aa, Zea mays
  Coding DNA Sequence Number=SeqID_17897
MAKPTMSYSTRSSPDEGRAIAKLLNSAFVYKVGDKQC

SEQ ID NO: 61273 - protein, 102 aa, Zea mays
  Coding DNA Sequence Number=SeqID_17898
MKGVGGGAASPGDYVYFKSVVPLHKISIFLAGESEVPDSQETFTDIDRSDAADVLVTDMELHDKELHAANTLLQMAYTTLKGTPSRYLFQNSTTKCRRISFC

SEQ ID NO: 61274 - protein, 211 aa, Zea mays
  Coding DNA Sequence Number=SeqID_17899
  Gene Ontology: Mol. function=transporter activity; Cellular component= membrane; Biological process=sodium ion transport
  Homolog annotation: Hit_ID=Q768R2; Match level="QueryCoverage=20%, HitCoverage=7%, E-value=3e-10, Identity=72%"; Hit description =Plastidic general dicarboxylate transporter
MWVPRGSETMRAERWGPPVSEGQGARRDGVTDRLSPPVGASRVEAWAGAVVKGPMEFLEQRTSARSPPKQVPGCFNKELYKVKTFFAITLHGTANSHFSSVVWKASANFNDLFLTAGVQNLLCLKLGEEIGVNIENPWITWFEVASKRMEEVVHALATGQASIDAIMKQPVKVYKWDMDETLILLMSLLVGSYARDFEGLKDHEKSTQTRK

SEQ ID NO: 61275 - protein, 364 aa, Zea mays
  Coding DNA Sequence Number=SeqID_17900
MTEPRDSYASGIRIPHSSPSAIRSSSTLGVGYTFGEVRPSLGRRHGLRVSTPKDDVITKPGPSPPDQRARGRAVMQAACNRAKWAHLSDFQRAQHGGPGPRVKQSARRMLRASNCTATRATTTPPRLRNQCRDSRQPYARPSSASLARRKGGASGRGSERRFAFAIMTASKKGPGKGDTPKRILLCEGTRLRASLLIRGSKAGPSKGSTAASECVGSTPTTGQRFEGRPLGRVQRPPQATRAPRPLLIRGSKAGPRKVHSRLRHRARDGHGYVRYITKARAALPRARTRAKPRKTVNSAPPDPGLGLGLSPGRRRTLLRPTQGSDLGSAPEDDELRFARPHGSDSTLASADGLRLARPRGSDST

SEQ ID NO: 61276 - protein, 110 aa, Zea mays
  Coding DNA Sequence Number=SeqID_17901
MTGDKQRQKLKQKPSSKISNTYIKKVDKKTATPYLIKKKKNGKVIAIKANKQANKGKGAKRIWVPKEIISTMRSTKKVWIPKGKYAYLFTLYLVYLSCLVLKLLFTYVLK

SEQ ID NO: 61277 - protein, 132 aa, Zea mays
  Coding DNA Sequence Number=SeqID_17902
MGKNNKRKREPTPPSEDFGDSEYSEEEFSSESEGSPAPVSPPASSDDSDDSQGIASEIWTYIRAIERSGLEGSDESEYSSDEEDSLEEDDEGDDNDDDDGGRGGNGGSRGGNGGSRGGGGGSSSKGSNKASG

SEQ ID NO: 61278 - protein, 347 aa, Zea mays
  Coding DNA Sequence Number=SeqID_17903
  Homolog annotation: Hit_ID=Q6AU54; Match level="QueryCoverage=32%, HitCoverage=23%, E-value=1e-19, Identity=43%"; Hit description =Expressed protein
MATTVRHWHGGGCIGASSTGAWCEPVPFCSLLLGSYDNIHVSPSESEAHVGVRDQGANRSMRSAGCILAELLSGKPIMPGRTEADHPRLNFKDRYPEPYRDSHPQLKMGFVTKPETLTDGIVKLMIWHRTIPSMQGLMPLNFEGSDIVFTLLNRVYDDVGKRWSRFCSLGLCGLPGIKVNDSIMLFVLCLWLSMAFNTNYETVFLIISGMMRTIWSPDGPNKIHPDVDLTAPDAGRPNDDPAWFCLRVGYGGEKPQREATKAIDRKNQSSMLKCLHSAPPKRPRAQFARLSAETEAAGKAPAEPKPRVERICAMRASPIHTKTARVECPSESRQESSRKPPILGHSG

SEQ ID NO: 61279 - protein, 133 aa, Zea mays
  Coding DNA Sequence Number=SeqID_17904
  Subcellular localization annotation: CTP_CleavageSite=60; ConfidenceScore=5.16e-01
MKPVLLVSTPSKSVEVAMSICSFSYACGNQKARVLLGGRQDFFYSALPSVSLPTAAPLAPAGSRSGGRSSGASTQTAWDRDAPPMGDREDDRSPLAQPKPKHWRSVRSSPDRGMGIMSFVPEEAGRALRSVAS

SEQ ID NO: 61280 - protein, 338 aa, Zea mays
  Coding DNA Sequence Number=SeqID_17905
  Gene Ontology: Mol. function=oxidoreductase activity; Cellular component=endosome membrane; Biological process=protein transport
  Homolog annotation: Hit_ID=Q7Y1L1; Match level="QueryCoverage=67%, HitCoverage=31%, E-value=1e-101, Identity=85%"; Hit description =Putative Vps52 / Sac2 family protein
  Pfam annotation: Domain name=Vps52; Domain location=87-338; Score= -141.3; E_value=2e-07; Accession=PF04129.3; Description=Vps52  Sac2 family
MAVVPAAETLDGLKDRFDLGVFVGDLALDEEVTSVRCFIVASDDESLEGLQQELDNCKNDQEVANILASGIKLREYTKGVENNIRQIELDSIQDYIKESENLVSLHDQICDCDNILLQMETVLTGFQTEIGSISSEIKVLQEKSMDMGLKLKNRKAAESKLSKFVEDIIVPPRMIDIIVDGEVNDEYMKTLETLSKKIKFIDADPMVKSSKALKDVQPEVERLRQKAVSKYLSRSTCIYAKFCELNNGFDIIIYITAASEPAHPRNYEEGLGNGQQHKSCQGIGREGEVSEMSGGKEERWWLRLLGRDMNSDEEFAQVQHRQKKNQPRPVNGPQNQLV

SEQ ID NO: 61281 - protein, 195 aa, Zea mays
  Coding DNA Sequence Number=SeqID_17906
MNNTVGVSTPGGPWTDESGALAVGGYKRPRGRERESYAAARSPARPTFPYESPGPSFYRRKERAQSEPEVGRGGGSSEVEVESGPEGGYKHPQGREREREPYAVARSPTRPTFPYESPGSSFYRRKERAQAESEPWGRARRSPSSEVEAESEPWVGRGGVRLPRSRLSPSPRVGQWSGEVTAVTSALSTEERASG

SEQ ID NO: 61282 - protein, 101 aa, Zea mays
  Coding DNA Sequence Number=SeqID_17907
  Homolog annotation: Hit_ID=A2YXQ2; Match level="QueryCoverage=31%, HitCoverage=7%, E-value=3e-08, Identity=87%"; Hit description =Putative uncharacterized protein
MGLGVCGSLYQGGDENVGFGIDFGNAFVDKRRKVVIVALKALTPATHAMNTQSLSAISIDYCDIQVYAEGPTRPTGGVAAIAMLIGPNAPISFERNIELLT

SEQ ID NO: 61283 - protein, 127 aa, Zea mays
  Coding DNA Sequence Number=SeqID_17908
  Gene Ontology: Mol. function=oxidoreductase activity; Cellular component=integral to membrane; Biological process=electron transport
  Homolog annotation: Hit_ID=Q2R351; Match level="QueryCoverage=73%, HitCoverage=9%, E-value=2e-12, Identity=52%"; Hit description =Respiratory burst oxidase protein D, putative, expressed
MAGLAGLRWQGLGWPRARRVWANGGELSSVFKCRQRSQTCESLQKSGADLFLAPRAITQLFPEVRIDGPYVAPAQDYNQYDIVLLVGQGIGATPMICNSPSSRTSANMKQLDDNLEAGSSLGSGATG

SEQ ID NO: 61284 - protein, 81 aa, Zea mays
  Coding DNA Sequence Number=SeqID_17909
MTNASKECLLASLEAVEAGMHMYSVMKNVAKSGCVMAAHRFGEGIMSHWIAFLIYPQDGRLIVLDSLDTPKEGYQEFENVL

SEQ ID NO: 61285 - protein, 799 aa, Zea mays
  Coding DNA Sequence Number=SeqID_17910
  Gene Ontology: Mol. function=oxidoreductase activity; Cellular component=integral to membrane; Biological process=electron transport
  Homolog annotation: Hit_ID=Q2R351; Match level="QueryCoverage=100%, HitCoverage=76%, E-value=0.0, Identity=65%"; Hit description =Respiratory burst oxidase protein D, putative, expressed
  Pfam annotation: Domain name=FAD_binding_8; Domain location=479-597; Score=174.8; E_value=2.2e-49; Accession=PF08022.3; Description=FAD -binding domain
  Pfam annotation: Domain name=Ferric_reduct; Domain location=232-438; Score=143.7; E_value=5e-40; Accession=PF01794.10; Description=Ferric reductase like transmembrane component
  Pfam annotation: Domain name=NADPH_Ox; Domain location=1-44; Score= -19.1; E_value=0.00099; Accession=PF08414.1; Description=Respiratory burst NADPH oxidase
  Pfam annotation: Domain name=NAD_binding_6; Domain location=603-782; Score=202.3; E_value=1.2e-57; Accession=PF08030.3; Description =Ferric reductase NAD binding domain
  Pfam module annotation: Pfam domain module=FAD_binding_8::Ferric _reduct::NADPH_Ox::NAD_binding_6; Domain location=479-597::232-438::1- 44::603-782
MKEVVFAGELFDALLRRSNISGDNIDKAELLKFWDQITDTSFNGRLQTFFHMVDADADGRMSEEKVRQPEQQYNAAQTDTALPFFYSCPDGCICGMAERMQTITQRASENKLSKITEQAEEYARLIMEELDPDKLGYIEVRNLERLLEDPSQLVSIGTAKDMRQMLRSQSLRPTPEPNPLRRTQYFLEDNWRRVWVVLLWLSICVGLFAWKFAQYRRRYVFQVMGYCVCVAKGGAETLKFNMALILLPVCRNTITWIRNHTGVGRVVPFDDNISFHMVVAAGIAVGAGLHVVSHLTCDFPRLLRATDAAYAPLAQYFGVPRPRNYWWFVKGTEGWTGLAMLVLMAVAFTLAMPWFRRGELALTDLLKRLVGPLKRLTDTLKLTDPLKRLTGQLKRLTAGPRKRPTDPLKPTDPLKRLTGFNAFWYTHHCFVAVYALLLVHGHYLYLTHKWYKKSTWMYLAVPMVLYACERLTRALRSRVRAVRIRKVGVYPGDVLSLHFSKPPGFSYKSGQYMFVNCADVSPFEWHPFCITSAPQDEYLSVHIKKQGDWTGELRNVFSRVCRPPTEGNSRLLRDGSANSLSLRFPKVRIDGPYGAPAQDYKQYDVVLLVGQGIGATPMISIIKDIINNMKQLDGDLEADAGSGLGSGGVDASSSSSLPSFRTQRAYFYWVTREQGSFEWFHGIMDEVAETDKKGIIELHNHCTSVYKDGDLRSRVIAQLQMLNQAKHNIDVISGTRVKTHFARPDWPNVYKHIAENHQNQRVGVFYCGGGPEPLKTLRELAKDFSRKTNTKFEFHKENF

SEQ ID NO: 61286 - protein, 501 aa, Zea mays
  Coding DNA Sequence Number=SeqID_17911
  Homolog annotation: Hit_ID=A3B5P1; Match level="QueryCoverage=16%, HitCoverage=6%, E-value=3e-14, Identity=51%"; Hit description =Putative uncharacterized protein
MAHPMSSQSSPPSWFSRYPSYPFHPVICGGMSHDGSIDCFELPVLGWGAAHDSKKYQQSNYMTAKFTSVANIPFLFLQLPRISSRPTTSSSATRPHSSSCCGSYGPQFASQVSPPLCLSVALVLMDLIAHFRVCSLGFCNLLPLSYFTKKRETEAVISTYAVLVQLAMAESMLVMWLTFVPFIHNSVLHGIISGSLAVAMSTNDAYGFTGGDARPDMVLRVQDRGDITIFDDGVWQINLTCAVGISSIKVQYDQNGQAMWGNKHGFSGGVILDKVTYGMVKEPVPMRPGPWGGEGGWAWDDWVYTGVNGVHMPALARGLEDCPQVHVVQVSPFQKISKTPDEFSEEEFSSGDYGSPTPASPAASSDVSDDSMGLSVAKRAYIRSVERMGLKGSDDSGEDSEEGGDSGGEDDDGGEGESGDGNSGEGDDDDGEGDDEELEVVRRDAKAACRDIKFLEDDRTIMNAWCDEAMDKALCAGRILMKRPGVVVLDDIVAFLSRHST

SEQ ID NO: 61287 - protein, 221 aa, Zea mays
  Coding DNA Sequence Number=SeqID_17912
MGVRSQSPGILGVALEQVSGSRIPGILRREVWLVDERSTRDEDGAGAYCAVYTIALICSRDNLNDNDFTNKTNLILVSIASAQPSPAAGASRCSLHPHLDGASTLDDSVSQRWRISPLGGCPVSWGTCPGSSLCRPSGIECLVVSAPNPSAQAGGSSSSPAPRVALHYHCSRDTASPFTLPHSPTAHRTCSRHPHTAPHSCSPRSRSAQRPCKLTFGRSST

SEQ ID NO: 61288 - protein, 170 aa, Zea mays
  Coding DNA Sequence Number=SeqID_17913
MHHVVRFRILFHFLFLSLASGIGKEDTPKGILLREGNGPRAPLLIRGSKAGPSEGFNNRLRALGLRAHYWSEVRRPTPRKGSTAASGHSGSAPTTDQGFVGWPPKGSTAASDIERGMTLGSGAALANPAPAKPLTASTYQPENLGLDCAPGLWPVRMREQPDRSKHHETR

SEQ ID NO: 61289 - protein, 103 aa, Zea mays
  Coding DNA Sequence Number=SeqID_17914
  Subcellular localization annotation: CTP_CleavageSite=34; ConfidenceScore=5.56e-01
MPATSTTDCLLPAASATTAITPVPASPATKLSAPASATGTGAHCSRHVPITTLFSPIPASFLLLNIPACRDRHIGTPGRYQGLTYTPRRVATKGSPTPQGAYT

SEQ ID NO: 61290 - protein, 404 aa, Zea mays
  Coding DNA Sequence Number=SeqID_17915
  Homolog annotation: Hit_ID=Q2R2Z3; Match level="QueryCoverage=85%, HitCoverage=73%, E-value=1e-92, Identity=56%"; Hit description =Expressed protein
MAGLIDIFIPSLNKFSLTLEGVRRALEKDLDLKIYSLDAHKKFIKQCVDKVFAESADENANDDALEDSDAKDDHLSKEGTDVAKPMPVSNKMSSNADVVTSSKTGKDPEEEKNQTSSSDISEDMIKEAIEKRASYFRKNSDTLTLQGVRRTLEEDLKLQKKALDAYKNFITTGLDKQILQEPANGTKKKSKNGSSKDTDKTSKGSKRVHEESDSSELNDRKSDMDNSDVDSRPRKKRAEKAKVTKKQKIVTNERKLSTPKAKKVAKQDLGSSTEEQGGNSAEEDNSHSSAEEDNKRKRQQTPAYGKQAEHLKSIIKSCGMTIPPTVYRRVKQAAENKREACLIKELQDILEKEGLSKNPSEKGHPKRAGSSCNSLKKKELAHFIRKIGKNLKGYIGCNHIYWCN

SEQ ID NO: 61291 - protein, 44 aa, Zea mays
  Coding DNA Sequence Number=SeqID_17916
MEFWVVLLCVGREVRQTVCQSDCQTDWQTDLQTGQVVQDRLNRP

SEQ ID NO: 61292 - protein, 94 aa, Zea mays
  Coding DNA Sequence Number=SeqID_17917
  Gene Ontology: Mol. function=oxidoreductase activity; Cellular component=integral to membrane; Biological process=electron transport
  Homolog annotation: Hit_ID=Q2R351; Match level="QueryCoverage=98%, HitCoverage=9%, E-value=6e-32, Identity=65%"; Hit description =Respiratory burst oxidase protein D, putative, expressed
MAPILLPMCQNTMTFVRNHIGVGRVVPFDNNISFHMVVATGIGVSAGLHVVSHLTCDFSRLLCATDAAYASLAQYFGVPHPPNYWWFMKGTEGC

SEQ ID NO: 61293 - protein, 457 aa, Zea mays
  Coding DNA Sequence Number=SeqID_17918
  Homolog annotation: Hit_ID=Q2R303; Match level="QueryCoverage=99%, HitCoverage=99%, E-value=1e-154, Identity=61%"; Hit description =Putative uncharacterized protein
  Pfam annotation: Domain name=DUF247; Domain location=33-432; Score =390.8; E_value=2.1e-114; Accession=PF03140.6; Description=Plant protein of unknown function
MAAGESGSSMRRRAWVVEVEKTLDEADASVEVSRWQLHSIYRVPACIKDLNRKAYKPQVVSLGPFHHRRDGELLPMEEHKKRALRHLLRRSKRPLEEFAAAVADVAGQLESAYLDLGAEWRGADGRERFLEMMIVDGCFLLEVIKATEMDGRNVVSDYAPNDPIFSHHGVLYMVPYIRRDMLMLENQLPLLLLEKLVAVQTGKPPSADAINRMVLKFMSGSPSARLPPGSTLGLHPLDLRRRSMLFGPQQAPQPVSRDMAPETTDIIRSAVELYEAGIRFRKTSSDSLHNVRFRGGVLSMPAVSVDDSTEYMFLNMMAFERLHVGAGNDVTAYVFFMDSIIDSAKDVALLSTSGIIQNAVGSDKAVAQLFNSISKDVVLEPQSSLDAVQREVNAYCGKPWNLWRANLIHTYFRSPWAFMSLAAAVFLLVMTVMQTVYTVLPFYQQDQGSSPAAPAPL

SEQ ID NO: 61294 - protein, 341 aa, Zea mays
  Coding DNA Sequence Number=SeqID_17919
MRTGEAAAGGADFNTNICMEDYRVGGVMMFDMHMGRGLVGEFFWGLGLEQGYGAGSDAGQLAIVLAPVVATLPMAAVGAKDTSQDPWSKFCASGEISSAAAAKDVAGSVSQQLRHASQQLKHVAAFTDHVASGALTSKFATERQRLEGRIERLRVQHTDAIRDKSAVENKSRRLTERLAAAEAEKEDLRRQLVEERRDANRACAEALAAQAEAKLARAEASLACQRAEEMETRLCGLRNRQDKTEASTRAEVEQTHMQLVDAYRELGARTAPFEGPGQEVGLCFLGWLQKELEVFPTIVTGLMSFASLVTCEGAVNALSREGCGHFEVFDQSDEGFERKIF

SEQ ID NO: 61295 - protein, 189 aa, Zea mays
  Coding DNA Sequence Number=SeqID_17920
MDQMECDEEVEDLSDLDSTLPEASGVELALPSDAGEGPLATPAPTGAGEDPVPATAPTGEDALKVVGEPAAENPVVSAGHSQEFFSWTDESSDEDLDYFAALDVAAAESSTRVEVSEVANLPSASAKYRRRRVVSKHSVGAFAGILHGSASLKTSTPGRKRVWAGIILFGVRAGIILFGGLQGRVGPEG

SEQ ID NO: 61296 - protein, 84 aa, Zea mays
  Coding DNA Sequence Number=SeqID_17921
MALIHPLQSGCAGHGRRGRGCGERVAWPEKLTGEGALRLSVLWGRVTPVIGDGTHIRVKEMFSYHMIYNLGVTRGFITQNPEDS

SEQ ID NO: 61297 - protein, 58 aa, Zea mays
  Coding DNA Sequence Number=SeqID_17922
MDFRNSYCFWQTKPLRQTAAWSRGTIQDMVDGVTWPTTLPPGWTVEWDVAPAGEEHEE

SEQ ID NO: 61298 - protein, 285 aa, Zea mays
  Coding DNA Sequence Number=SeqID_17923
EQEQQDSSPSCQQEVESRRQPSSAPQPEMPPAPPQGIPATGGDPDRDDAGAGGSSSHNTELSEEQELEGWIARPITHDADRGCHFHNALDTLLRRAFDRHTWFIEYRCVVYQHHCGLYPDQWEATCLVYRPDNDLWGAYAFLEHYYITKRDTAEAAMQDAARRALSKYCSLFSGVTDSLDLKYCPHHSIGSAGGVIVSSVGEGNPKLNNIVNLVVMLNTELDHALDELGKVRAEVAELHAERASRHYLDGGSPAPVGIQHPYRSPPRGRFDYGTPDCRTQIDLDP

SEQ ID NO: 61299 - protein, 165 aa, Zea mays
  Coding DNA Sequence Number=SeqID_17924
  Homolog annotation: Hit_ID=A2YIW4; Match level="QueryCoverage=75%, HitCoverage=20%, E-value=7e-13, Identity=37%"; Hit description =Putative uncharacterized protein
MVGKKFNEAVCKNEGIAGDVWQHRSQATSPEYVSSYGLIGQITELHDELQYLQHETENVLPREQGRCTDELEEVLEARIRVLEGITSHNLSVYRLLATHKPLAQEYVGKNLSDDKDMSVGNNITLPTNSLSVDLCLPVKVIADRTFADTHYLSAKLFTDGLCDAI

SEQ ID NO: 61300 - protein, 66 aa, Zea mays
  Coding DNA Sequence Number=SeqID_17925
MGLGVCGSLCQGWFAPWGGVRYLIRDGWFTGGDEDDGYDVYGYSNGKEEGVEADLQEFQDFDEFEE

SEQ ID NO: 61301 - protein, 238 aa, Zea mays
  Coding DNA Sequence Number=SeqID_17926
MKLLFAAQARERRGGGSAGGGLVGGLPKSRMDTTRRGELRPRPAATWSGNVARTMVRLCNNKGQGRRVDGVHLGGQAAQSSAGSRTHDARGGAVRLFLAGRHGHNLVERARSKGHRPALPRLGRPPGGARVSRVELARTRAATEAAGRRGSTTMARRIEGKNTTNGGALCAATAQRQQRGRDESGGTEARARHCARRAELLGHGLAGWFLNGTRRGKCGPGLLGNINITPGNPAGRGG

SEQ ID NO: 61302 - protein, 139 aa, Zea mays
  Coding DNA Sequence Number=SeqID_17927
MEAEEWQIIEMIVVRADSSLGIRAKTERLEAEATHLRSGRDEAHKDAKRLRGERTRLQQDLREVTPRAEEAESIVRVANTRLEEANSDLRREREMAGDLQKKFSEALDAMKAIQEVPKAAEDEVRKLSIACDGAIATQV

SEQ ID NO: 61303 - protein, 163 aa, Zea mays
  Coding DNA Sequence Number=SeqID_17928
  Subcellular localization annotation: CTP_CleavageSite=36; ConfidenceScore=5.16e-01
MAPLCYIIDRRALSLNTIPAFFFLFRSQRKPHLLALSTMVGPTKKRKSELTPPSNSFGDFQFLEEFSDFDYDETRSPTLASSSLTVSKGWDLKELAYFRGFEHAYLKVFEEEEEDDGGKGDNEAGGGSNGGSDNNSGGGGESDNDGGDSDSDNSGAGDKEPPA

SEQ ID NO: 61304 - protein, 204 aa, Zea mays
  Coding DNA Sequence Number=SeqID_17929
MVVSVLTRQARRSVEAEKKKKLTKKPKLASKPSAPKKRKVTSSERRDEEGPSSPKHLEKTPSATSVGVTEILEVMTAPLPFPMSSPLESDLTSLLQPQKKIVEGNVESSRVRSNKRRMMKVMRAILDTPIPMIQKEITPAIADEGPHQAENSGDPLGTTMSEIDRLIANVALGKNTEGTVVVEISTSKGKTTEEASSEDRSFDL

SEQ ID NO: 61305 - protein, 119 aa, Zea mays
  Coding DNA Sequence Number=SeqID_17930
MVSRRAPPRTPPSCRTHGALVVATLWMVSGGHERWQRCLPYLPPSEGSRSAGALLLSGGVLPTTSPLRLARGGAPERLIRDGSHVGTGKVELSSGVGKEIEGAKLDAAPIGENPISGKC

SEQ ID NO: 61306 - protein, 51 aa, Zea mays
  Coding DNA Sequence Number=SeqID_17931
  Homolog annotation: Hit_ID=Q8W0X8; Match level="QueryCoverage=100%, HitCoverage=61%, E-value=5e-08, Identity=57%"; Hit description =Putative gag protein
MNKIEGPSTGSFVRKTYSTKMDAEMQAILWPQSYKPPQLPMYDGHSDQNNF

SEQ ID NO: 61307 - protein, 412 aa, Zea mays
  Coding DNA Sequence Number=SeqID_17932
  Gene Ontology: Mol. function=catalytic activity; Cellular component =protein serine/threonine phosphatase complex; Biological process =protein amino acid dephosphorylation
  Homolog annotation: Hit_ID=A7NTU5; Match level="QueryCoverage=95%, HitCoverage=89%, E-value=1e-141, Identity=65%"; Hit description =Chromosome chr18 scaffold_1, whole genome shotgun sequence
  Pfam annotation: Domain name=PP2C; Domain location=46-303; Score =88.1; E_value=2.8e-23; Accession=PF00481.12; Description=Protein phosphatase 2C
MEMHADVDGCSVPLAVLLKRELCNQKVERPDILFGEANKSKKGEDFTLLVPRCHRTPGGSGGGENAGDDDTISVFAIFDGHNGSAAAIYTRENLISSVLAAIPPNLTSEEWKAALPRALVAGFVKTDKDFQGKGIINGMPAARSGTTVTFVIIDGWVVTVASVGDSRCILESAEGSIYFLSADHRLDANEEEVERVTASGGEVGRINIAGGAGIGPLRCWPGGLCLSRSIGDIDVGEFIVPVPHVKQVKLSNAGGRLVIASDGVWDALHFQEALNYTRGLPAEAAANRIVKEAVTSKGLRDDTTCIVVDILPPEKLSPPLKRPGKGVIKALFRRRPSDEMSEDQMDRGCLETDVVEEIYEEGSAMLARRLNINYPEGNMFKLHDCAVCQLEMKPGEGTSVHDSQSAVQPVPK

SEQ ID NO: 61308 - protein, 89 aa, Zea mays
  Coding DNA Sequence Number=SeqID_17933
MGRVFDAIGFVYPDYGYPLWGQGKKRKAAALATPAEPMPKAAGKKMKEKLPKLPKLYPRLKRSKHKSKLQKFKLKPKLSLQSPLRQSSP

SEQ ID NO: 61309 - protein, 139 aa, Zea mays
  Coding DNA Sequence Number=SeqID_17934
MSLIPPPAGGLSAAIVVVARRRKEYHVVAAVEGHELKAPETEHRPVPERLLETAHLELDGKLFVSTQQAPTWRANYRRFETGGSPSRRVSVLRAPAPDGSSAWASAKGGRGEVAGDGRERGGDPAAFVFVPRPGRVRLQ

SEQ ID NO: 61310 - protein, 373 aa, Zea mays
  Coding DNA Sequence Number=SeqID_17935
  Subcellular localization annotation: CTP_CleavageSite=51; ConfidenceScore=5.42e-01
MSSRSLMHRVFPPSEPPDGGCPQSFRLVVGGTQLRGSRYLSAIVRLQGFSSVSPAASPRRWSPETVTTRPWVGRSKPGCDLGPTLSFKDVHHPRWGGGRAEPELYLPRGFVGQPLLQRSRERALTGPARGADFDNAGLVDGGRRQPQRVGLAGLAPGRSCLCTGTAPPRGGRCPTRLGGSEWGSAGGLTAPVVGAEVEAAREVPVADGITATIRALGLRLFVLVLAPRASAWARARLQQRTPRPLFDEPKPGVAVSARTEAELARKEDLVGRSLVGSSVSGTDAGVDLPRPRAGLMSSRDSWPRPRGDQPRRLLEPDSRRSPWRRWPGRGDDVVLQSGDPRTASPSEARSDLAEGVVDAEGAAALFNCQDPGL

SEQ ID NO: 61311 - protein, 88 aa, Zea mays
  Coding DNA Sequence Number=SeqID_17936
  Gene Ontology: Mol. function=structural constituent of ribosome; Cellular component=ribonucleoprotein complex; Biological process =translation
  Homolog annotation: Hit_ID=A3ACM4; Match level="QueryCoverage=52%, HitCoverage=22%, E-value=6e-21, Identity=97%"; Hit description =Ribosomal protein L37
  Pfam annotation: Domain name=Ribosomal_L37e; Domain location=2-50; Score=85.2; E_value=2.1e-22; Accession=PF01907.10; Description =Ribosomal protein L37e
  Subcellular localization annotation: CTP_CleavageSite=21; ConfidenceScore=5.29e-01
MGKGTGSFGKRRNKTHTLCIRCGRRSFHLQKSTCSSCGYPAARIRKCKIRLPAFFLSLSLRPSAPLLDLVNFSVYPLQFVISCSVACI

SEQ ID NO: 61312 - protein, 237 aa, Zea mays
  Coding DNA Sequence Number=SeqID_17937
MQAACNRARWTRLSDSQHASMEAQAHASHNRRARCCMQATAPPLAPPPRLFDCGTNTATRGGPAHDPAAPAWRDGQCGRKRSGRRFAFAAITAPKKGPGKGDTPKRILPREGTGLRAPPTDQRFEGWPPEGFISRLRSRGPYTHYWLEVRRPAPRRASRPPQATRAPRPLLIRGSKAGPRRVHSRLRRRVRDDQGARTRAKPRKTANSAPPDPGLGLGLSPGRRRTPLRPTQGSDSG

SEQ ID NO: 61313 - protein, 334 aa, Zea mays
  Coding DNA Sequence Number=SeqID_17938
MDESGDFVIILKNFLLLLERMRFAKKKEIGSQMEVRCQTSLCQNEDGFPKLLRACTVRLGIRSQPEYDGREFVEHGTEKETVPLGMARMRALEGQQLLEDDPTVVYLTAYLLTLDAQYDFLARHHRQMITRAEDAEKRNRQLHVDLTTAQARVAALESREVIAVEALKQAKDEHVQKLMEAYLVTHNQRRALRIQEPAPSNPVEPIKAEDPQILEGHPVSIRGEKKAWELLEGAIVLEGIPVFPQAMNKQEHPESSQDPPPEFFEPLTMKKIPAPSLEVKEEAASTPPAPPPSEELQEPVPLEEEFDPVLPSQSLPEEVINISSLLTHPGDVSD

SEQ ID NO: 61314 - protein, 72 aa, Zea mays
  Coding DNA Sequence Number=SeqID_17939
  Gene Ontology: Mol. function=structural constituent of ribosome; Cellular component=ribonucleoprotein complex; Biological process =translation
  Homolog annotation: Hit_ID=A2YUE8; Match level="QueryCoverage=79%, HitCoverage=53%, E-value=2e-22, Identity=89%"; Hit description =Putative uncharacterized protein
  Pfam annotation: Domain name=Ribosomal_S17; Domain location=6-64; Score=53.4; E_value=8e-13; Accession=PF00366.11; Description =Ribosomal protein S17
MEPVVGIVVSNKMQKSVVVAVDRLFHYKMYNRYVKRTSKFMAHDEADSCNIGDRVGLISVLISARYTSADAA

SEQ ID NO: 61315 - protein, 100 aa, Zea mays
  Coding DNA Sequence Number=SeqID_17940
MEVSHRGRRQSPEPRGNPSIAKDYGIQSTNRTRCDEALDETNTVVPSDSEGDARIETANPLNKSIDTHLMKMLSTLILTDLEELEVAKRTGARGKNNEKR

SEQ ID NO: 61316 - protein, 68 aa, Zea mays
  Coding DNA Sequence Number=SeqID_17941
MGLGVCGSLCQAWVCPLGEECGGDENDGFDYDYGNGKWYSFRLERVKKKENGVEADLQEFQDIDEFED

SEQ ID NO: 61317 - protein, 162 aa, Zea mays
  Coding DNA Sequence Number=SeqID_17942
  Subcellular localization annotation: CTP_CleavageSite=80; ConfidenceScore=5.25e-01
MASEPVSGRTGQQQAQAAPAGRGREQQQQKSRGGGVVASDQRSAFPWPRRSQTRIAYSPRGLPCLRRAFRCHFYRAAVPDAAAQRQAGRLTSYQGSRVVCLLTRSFTPRDVTERTTYRLACGATWQWPATPSLAACSGVGRPCSPLTPPDTLNNMLIPNCSS

SEQ ID NO: 61318 - protein, 107 aa, Zea mays
  Coding DNA Sequence Number=SeqID_17943
MSRRRSESARVFRDRLVDVLAAPTPLHNPDQGPSECLPTVPTHERVYTTARGRGGCALSIRRGNSPSPSLGPSPTPCPQPTLGGVVLHSKESSQDAGPTDDIKVINI

SEQ ID NO: 61319 - protein, 159 aa, Zea mays
  Coding DNA Sequence Number=SeqID_17944
MRCECDGCGADAGPGVWWSTGLQYCMPTQPLPWHLRVTLDREMIMDGMEPDGWGLPRPLMSPRDPAARPACKRKRAYSIRLSVLYCQAGLREPCSAENILPPLEVSGVQIGSPSTTIHDSSTGLEGFEPWLGAATPGDRRRPYVKRKGYRVISAYLFRS

SEQ ID NO: 61320 - protein, 76 aa, Zea mays
  Coding DNA Sequence Number=SeqID_17945
MASAERPPPRPTQGLGLGLGHGRQTQPRLRRSLHVAQPRAQASHVAFGAIYAQVKKKENGVEADLQEFQDIDEFED

SEQ ID NO: 61321 - protein, 98 aa, Zea mays
  Coding DNA Sequence Number=SeqID_17946
MKKIDEEVQRQADQVLKVADKWFLSHFRVDCHQKAVQEREINAEYMSVVLQQLPMIGDARRQNNCAKYIGNKWVSPAIFWYADGLISRTSVTTIFAKW

SEQ ID NO: 61322 - protein, 160 aa, Zea mays
  Coding DNA Sequence Number=SeqID_17947
MVVGLRTLGDPMAAARDCCCTPGWASEMAPSVTSRAGEIRDEGAASDGLYDEVEIDGGARQPNKQEGTLARGQQGRANAMSLDDGARCSLVKRTPAPGNQQFGRPRGERAWEVEQEESTTVAGLLPMPERSSDSRRRAEIMSRRTTASAQARGGSCVAVA

SEQ ID NO: 61323 - protein, 170 aa, Zea mays
  Coding DNA Sequence Number=SeqID_17948
MAPSATSRAGEIRDEGAASDGLYDEVEIDGGARQPNKQEGTLARGQQGRANAMSLDDGARCSLAKRTPAPGNQQFGRPRGCYRSNPLNRNLALEIQEEAGKTTRCSRPTDAILEDLLDMWVRTRTRFRCVTSIYWLMLIALSSVGLAANPLNRSIDMRLVKMLTTLILTD

SEQ ID NO: 61324 - protein, 41 aa, Zea mays
  Coding DNA Sequence Number=SeqID_17949
MDPNSKGIVINDKKDTLNNNEPKGDKPNDSGSNNKGKDGKK

SEQ ID NO: 61325 - protein, 101 aa, Zea mays
  Coding DNA Sequence Number=SeqID_17950
MEMKKVRTAVRGGGCILQPRVWPTVGRAINVDHVSRANNHKVAPDCLVYTELSGVPSDQRSASLGKESNRLLCSVRCAPDNPVHPRTEGNQDLPNGVPCGS

SEQ ID NO: 61326 - protein, 97 aa, Zea mays
  Coding DNA Sequence Number=SeqID_17951
MKLEIPVRVDPEVPLVDRCEDCRLSDGVRVEVMKFHPIVVRERSHKAACHHPEPTLVEWHEAKDVDRGRDHLDPARITTQLVSLASLTKHLRVRSEK

SEQ ID NO: 61327 - protein, 204 aa, Zea mays
  Coding DNA Sequence Number=SeqID_17952
  Homolog annotation: Hit_ID=O48967; Match level="QueryCoverage=43%, HitCoverage=18%, E-value=2e-27, Identity=73%"; Hit description =Putative uncharacterized protein
MVQIVEHRAETSEDFLVEEEAASSTPRVSNHPAPRATAVHAARQHTPAQTSRTPSRASSGALFAARELLRHPPSSTASPWMRSGAVDVWLRGLLICVRDNSRVVGWLRPCHPVSGGLRLWAISCRVHAVFAVEQAVKSARLLRTSPAPTTSSVSAALGDTPGGEVPRQWGAGWRCCVPAADCSRPDRSLPAKAWSTYGWTPEGL

SEQ ID NO: 61328 - protein, 150 aa, Zea mays
  Coding DNA Sequence Number=SeqID_17953
  Gene Ontology: Mol. function=sequence-specific DNA binding; Cellular component=nucleus; Biological process=regulation of transcription, DNA-dependent
  Homolog annotation: Hit_ID=P24345; Match level="QueryCoverage=38%, HitCoverage=16%, E-value=2e-23, Identity=89%"; Hit description =Homeotic protein knotted-1
  Pfam annotation: Domain name=KNOX1; Domain location=105-149; Score =80.6; E_value=5.2e-21; Accession=PF03790.4; Description=KNOX1 domain
  Subcellular localization annotation: CTP_CleavageSite=50; ConfidenceScore=5.23e-01
MGPMGVLLTLPSRSCVQVQVPVEATSCGRVTNSFLGILVSNLDTLSLHSRGAKYQGGVVSTTRPAITNSKEIFKCLLRRFHRLGPRCHLRRLEPSSSSPYGGDIEAIKSKIISYPHYYSLLTAYLECNKVGTPPEVSARLTEISQEVEAR

SEQ ID NO: 61329 - protein, 218 aa, Zea mays
  Coding DNA Sequence Number=SeqID_17954
MERRTTAGGGSLLAWRFAFSALRDQHTSCMTCGPEPPCHRLGCFGARRARFFTASRGASRRACPKKGIHPVCSSYALAFSPNGCALLPPSSLRSFAFEVSALRRRRRHDFAWPTRSLPDRGDTQCGAPPARMERAGATPLGDLAAGEFVLFVYLSEMFVWMVLFCQCSDERMLRSDLPEMESELSYDSTLHMNSIASCSGLVSSSLNFTSISWYTSMN

SEQ ID NO: 61330 - protein, 46 aa, Zea mays
  Coding DNA Sequence Number=SeqID_17955
MAMMGSILEKMYLCQVKKQETFVASVLRWYQKKRIKTKATGGKVLR

SEQ ID NO: 61331 - protein, 154 aa, Zea mays
  Coding DNA Sequence Number=SeqID_17956
  Homolog annotation: Hit_ID=O48967; Match level="QueryCoverage=99%, HitCoverage=35%, E-value=2e-38, Identity=55%"; Hit description =Putative uncharacterized protein
MVQIIEHHDFILEDFPMDEEVASSMSWGSNRPAPAQTSRALSRAAPGALSLARELLRHPPSSTASPGAMKQWRDDVDRLLGMVHSVSARPRPWSFRRQHEASASVCSPSVKVAPTEDLRAELNRRRAGEDAPISLERPDDLRAELNRRRVGEDA

SEQ ID NO: 61332 - protein, 91 aa, Zea mays
  Coding DNA Sequence Number=SeqID_17957
MAERLNVLAPRDSWPYNSVIEEDLHNLIDRGAKGSTQTNKKIKVRVQKNGAKETEENPGLAHRTVRCPGSYGFKLATFGFLESRSAIIEST

SEQ ID NO: 61333 - protein, 149 aa, Zea mays
  Coding DNA Sequence Number=SeqID_17958
MARLIYRARGWWLLNLEWRAGSRRWGRVTGTWLSWHFTVARPSTMIGQAKASHYDEVLRLGTWHPSGRRLTLVRLSGPTVRQVDTAAGAERCLKLILSTRFFTEDRYPHSTGRESRRRCESGRKVTGGEGGRTCDLIQSLYHGDHHQSV

SEQ ID NO: 61334 - protein, 155 aa, Zea mays
  Coding DNA Sequence Number=SeqID_17959
  Homolog annotation: Hit_ID=Q2QLU7; Match level="QueryCoverage=25%, HitCoverage=9%, E-value=8e-08, Identity=72%"; Hit description =Retrotransposon protein, putative, Ty1-copia subclass
  Pfam annotation: Domain name=zf-CCHC; Domain location=1-18; Score =31.0; E_value=4.4e-06; Accession=PF00098.14; Description=Zinc knuckle
MDCYNCGELGHLAHQCTNPKKNKFKGKKDDESENEKKGNKFFKKKDGKKKRIHKRKNGKAYSVGDWLTNIESSSGSYSSEEDDEKIVIVVVDFSSPPSSSSSTTHLCLMAKDEDVDEQDKITFGDNSKEKVQGLGKVAISNDLSISNVLLVAPWS

SEQ ID NO: 61335 - protein, 200 aa, Zea mays
  Coding DNA Sequence Number=SeqID_17960
MPKTTYSTSKYYPKSLVESRKVQGLRGKNPQTQLTVTEDGGLFSNKQRVSYEKVPGRRGIERFWPPDRQSGVQIRSPHLRTGHKFPWPLICHRRTRSTDRICKLWFKSRSSVLDPTVHAPSPNTPSRCGVGPSPRRRVTGANPIREPIAPNSNPKAHAQSGDEGEHARHGLTGCDAAWRSDRGKKRSAAAQEQRRAIPVG

SEQ ID NO: 61336 - protein, 129 aa, Zea mays
  Coding DNA Sequence Number=SeqID_17961
MPKTTYSISKYYPKSLVESRKVQGLQGKNPQTQLSVTEDGGLFSNKQRVSYEKVPGRRGIERFWPPDLQSGVQIRSPHLRTDCNLADGEYVLIPEQGAVHGEDQEQAPETAIEDLPAAPAIEGKPQFYV

SEQ ID NO: 61337 - protein, 159 aa, Zea mays
  Coding DNA Sequence Number=SeqID_17962
MAIISKIWSQPALEHDISLRCLVLDAVPDARACTGARPRTPRALVRASPQSCSPTPLKPPLGAPHLTPRSTSLARHPSFSSDELSSASHHCPSLGHRGQLAPAASKLRLSLDCNLADEEYVLIPEQGAVHEEDQEQAPETAIKDLPAAPAIEGKPRFNA

SEQ ID NO: 61338 - protein, 116 aa, Zea mays
  Coding DNA Sequence Number=SeqID_17963
MGKPIPSLLMLLLSRVTALVPTITGMRDHVSGRVRRAICGQVHSGYAQKPGLAFQSWGRQILWGRLWCWIRGYLLSNSLLRHEDVPLDLDQNHNVKMRKEYEGWRRAEAMRRGAST

SEQ ID NO: 61339 - protein, 64 aa, Zea mays
  Coding DNA Sequence Number=SeqID_17964
MAGRGKLTGAKGGVSGQRGLAGFTDWIKRYGGVKLGLSHCRTQRENPGFDVSRAHVPMPSSGIR

SEQ ID NO: 61340 - protein, 597 aa, Zea mays
  Coding DNA Sequence Number=SeqID_17965
  Gene Ontology: Mol. function=cysteine-type peptidase activity; Cellular component=transcription factor TFIID complex; Biological process=ubiquitin-dependent protein catabolic process
  Homolog annotation: Hit_ID=Q33AW7; Match level="QueryCoverage=62%, HitCoverage=39%, E-value=1e-162, Identity=78%"; Hit description =Ubiquitin carboxyl-terminal hydrolase
  Pfam annotation: Domain name=UCH; Domain location=201-533; Score =138.7; E_value=1.7e-38; Accession=PF00443.20; Description=Ubiquitin carboxyl-terminal hydrolase
  Subcellular localization annotation: CTP_CleavageSite=21; ConfidenceScore=5.24e-01
MAARLPLGGGGRARLPAGQSVAGARSPVGWRRCQQGAAVVRGRGGGGVASKEGRGRWWGRGPPPVARGGQRRLEGGRKKKMSNLALYHVGNPNPRIGCGDVLIDLELGQTHYRGGERILLEMKLGGGSSGFSARSTNDELALIPLEPSTSSFSIAGGPTFSNGFSSGIGSSFSQDNSFSPLLRDGEDGYNSLSNGTKDDTHGLSGLHNLGNTCFMNSAIQSLVHTPPLVQYFLEDYTCEINKENPLGLQGELAIAFGELLRKLWSSGRTSIAPRAFKSKLSRFAPQFSGYNQHDSQELLAFLLDGLHEDLNRVKEKPYIEAKDADGRPDDEFAEECWNYHKARNDSIIVDKFQGQYKSTLVCPVCNKISVTFDPFMYLSLPLPSTVTRMITVTVFSGTGDVLPMPYTVTVQKNGNCRDLTKALADVCCLKNSETLLLAEVYERRIYRYLTNPIEGLHIIKDEDILVAYRLPVGHEKLLRLEILHSRADSGVTHGDGDAVNEDDATKFGVIPGDGHTVVQDVVTKLAGDVAHRDGDAGCQDGVMKVACGAAHGDGDTGCQDDVTKVTCGAIHGDGDTGCQDDAKKLATEAMGSDRNPS

SEQ ID NO: 61341 - protein, 43 aa, Zea mays
  Coding DNA Sequence Number=SeqID_17966
MAPGGIGQSHDKIHANVLPFPRWYGKGLQRVCYLQVTGLDSLA

SEQ ID NO: 61342 - protein, 212 aa, Zea mays
  Coding DNA Sequence Number=SeqID_17967
MGTHIQETALGARRRHAPNFCQDSHACDLGELLSKGRRTLPRVRHALNAPEHAQRPTPRAPRRAKLCPCLLLALAPIKPTEASTILPRVLSTSLEPEITGVCPANDCNLADGEYVLVPEQGVAQEVAPDLAPKPAPEDLPAPALEFKPRLPSSRDLRRGLPFRLWWVQVRSLHDGSRGSLEDIVAGVTWSSILPPGWTVEWDTTSAEEEHEE

SEQ ID NO: 61343 - protein, 218 aa, Zea mays
  Coding DNA Sequence Number=SeqID_17968
  Subcellular localization annotation: CTP_CleavageSite=46; ConfidenceScore=5.61e-01
MAVAGGQEQGPAISQAHVPSGGSKRTLSHGVKTTRLCSVPRTAHARATTAPPTTRPIALTPRRDRRRPWQEKRATLRLRHNDRVKKGVRRLAPEGFTAASDAERGMNHGYVRYITKARAALPSSPETPCSAPIEGNMALPPSLRKGDAGGVCKKAKSVPDRPLALCRGSGAPLANPAPAEPLTASTYQPENLGPDRTPGLRPARMRERPDQPKHYARH

SEQ ID NO: 61344 - protein, 272 aa, Zea mays
  Coding DNA Sequence Number=SeqID_17969
  Homolog annotation: Hit_ID=A2X8E8; Match level="QueryCoverage=20%, HitCoverage=10%, E-value=6e-07, Identity=56%"; Hit description =Putative uncharacterized protein
MLPLPPFPLFPVFIFFLNPLFQGLRERFSHCNSNMDAGQVRAPRDRDRLSKKQQKKDARKAEKAETVAQPQQQHLFNTEDLFAANYGDVTVELNHNPTGQQDSLLTVWLRRVQGVLHDNQTELCLMRRIKAAIIRGSSFDADCTIIGIHPSSNNLPAPHDSERISNQGSAAAPEVSILKTRIQPNDEAQQEVQTRSIPDPREVAGCLLHMLLQQSRPMLCLILLSTVYQLVTQYGRIPVYHTFCGGFWNYFSLDLQKIKLRKCLASESMEGE

SEQ ID NO: 61345 - protein, 563 aa, Zea mays
  Coding DNA Sequence Number=SeqID_17970
  Gene Ontology: Mol. function=methyltransferase activity; Cellular component=intracellular; Biological process=metabolic process
  Homolog annotation: Hit_ID=A2YIG3; Match level="QueryCoverage=73%, HitCoverage=52%, E-value=1e-131, Identity=69%"; Hit description =Putative uncharacterized protein
MPNTAAFRRAVAELGARAAGGGGARLDVPPGRWLTGSFNLTSRFTLFLHRGAVSSAPRAEFDPLLVLSLLYNAAKQSPGVSVSNSNFWIQSEKPYSPEAVDSALECWSGTTDPVEVEAVLVPYILEDELKTVRINLGDNEHYMSYVAAELSAIDSSHVLVSRTIGKASSEIRLYFAAANIHVVSDISKHALDSLGDGDINWQVNKRASYICGQTIYGDALLANIGYTRRDSELHTEDVNLCSYYRILLGKLPDGNCKMSRDSILAAELPSAYSCFSWKGLSPRDLLCSFCRLQRLPEPHFVVSRVSCDTLMLAVSSEERGAPAGSAENQYTNDVRINKEKPDLFKCEVNIRSRKQEILLEYSAADTWSKESDAIQNSSLKVLIWFNNYFKRLTSKTSKLYLSESTADVKDKAKTYLLESHNEFEFEIGTSAVSNQLESCVTQLSVNQTARFVAELPPRDLIMAASCEFSPGHSFIMPTGWLYQVLDYDWFEAISTEPNKGRGHKRRLKFLVDAGEINCGRGKVRESETSGHFGQSKCDAGMWIISLVINDNLGCVATFECGNN

SEQ ID NO: 61346 - protein, 275 aa, Zea mays
  Coding DNA Sequence Number=SeqID_17971
MKILEAERCLKSANPRDVALLQQQQEEGNTGGSPHSHSKRHGQSLHRRALGFPPSDAGAGSHMSCERTENRRSQTAAREAGNRPVVISVPPSSPKPAGERADRCAPFRLHRIRWVSVKARARMSCNRRNGYCVQGNRTATRANAASSRLRNQCRDSRQPCALAPRKGSTAAIEHSGSEPLTDQGLAPRKGSTAAPEHLGSAPSTDQGFEGWPLGRERFCNRIPPEGGIEPLDPIEWVRENSTAHTAPTAVPTTRVRLTTAEFSLGRNRKLRLARP

SEQ ID NO: 61347 - protein, 119 aa, Zea mays
  Coding DNA Sequence Number=SeqID_17972
MMTVGLMVGRSKSGCGLCPALSFKDVHHPRYGGGRAEPGFYLPHGPTSRLFLQHSEERALTGLAEGTNFDNVGSVGRKRRQLQRVWLAVSAGSGAASDAASCRLVRAWPSVVGSQKFKF

SEQ ID NO: 61348 - protein, 311 aa, Zea mays
  Coding DNA Sequence Number=SeqID_17973
  Gene Ontology: Mol. function=protein-tyrosine kinase activity; Biological process=protein amino acid phosphorylation
  Homolog annotation: Hit_ID=A2ZUM2; Match level="QueryCoverage=77%, HitCoverage=74%, E-value=8e-65, Identity=54%"; Hit description =Putative uncharacterized protein
  Pfam annotation: Domain name=Hin1; Domain location=97-231; Score =136.2; E_value=9.6e-38; Accession=PF07320.4; Description=Harpin -induced protein 1 (Hin1)
  Subcellular localization annotation: CTP_CleavageSite=61; ConfidenceScore=5.62e-01
MGDRAYAPAVKPVPVRATNGTANGGGVGPPRPAPPSMVPGGRVPPPPMYRRRPAQSRPPARRAGRSARGWCCACCLWLTLVLVGLAFLGAIAAGVFYVVYRPRPPSFAVTSVRLAALNVSDSDALTSRVEFTVTARNPNDKIAFDYGDMAVSFASGGADVGDAVVPGFLHPAGNTTVIRAAASTAASTIDPVQAAALRSRKSHVMSAQMDAKVGFQIGRSKSKSINVRVSCAGVSVGLAKPAPAPAAAAPAPAPAPDAEPAPARGRGRGRSPRSVVRTSSSSSSSGGGGGGKLTPTDAKCKVRIKIWIWSF

SEQ ID NO: 61349 - protein, 121 aa, Zea mays
  Coding DNA Sequence Number=SeqID_17974
MENAEVHILHLHTAFRDRVHRWKRCGLPNGERFQHRIINNVKNFAHTAYAHGNGAVGRSSHTVKGRSENDTESMASMQAATCARPSPVSVGGRGPTRLRRSVHTFDLSRVHDSRDQHKKNG

SEQ ID NO: 61350 - protein, 80 aa, Zea mays
  Coding DNA Sequence Number=SeqID_17975
MSELQARDFHFAIIGSASIAFINDPIRELKALMPRTLFWIHLQSRGHNDIARITRNFIMMNLFREASPRIDQIPISQMWI

SEQ ID NO: 61351 - protein, 154 aa, Zea mays
  Coding DNA Sequence Number=SeqID_17976
  Subcellular localization annotation: CTP_CleavageSite=37; ConfidenceScore=5.18e-01
MACGSAHDLGWPSGGVRGCLAGGLGPGSAGSTAARPRHGSVRGCPTAHFPRRGLNGAGGRSATGEGQCHIHERDKNSGVKETIFAYYRYSFLVSCIYTGDTKSPKGRSATSPFAVQPQSAMPHAEEEREATSHALMHHVRTAHALMHHVRDGKR

SEQ ID NO: 61352 - protein, 222 aa, Zea mays
  Coding DNA Sequence Number=SeqID_17977
  Gene Ontology: Mol. function=chlorophyll binding; Cellular component =chloroplast; Biological process=photosynthesis, light harvesting
  Homolog annotation: Hit_ID=Q41748; Match level="QueryCoverage=30%, HitCoverage=27%, E-value=1e-23, Identity=79%"; Hit description =Chlorophyll a/b-binding apoprotein CP24 precursor
  Pfam annotation: Domain name=Chloroa_b-bind; Domain location=104-183; Score=7.9; E_value=5.6e-06; Accession=PF00504.12; Description =Chlorophyll A-B binding protein
MPPRPSPRRALLAVAAAAAKKLWIRRVHQPALARRIVSLCRDEEGGGGELETDSDAPAPAAVLKTPFLGARRALANAAAPQARAARSSPSPRPPPRSCGSAEFINPPWLDGSLPGDFGFDPLGLGKDPAFLKWYREAELIHGRSAMAAVLGIFMGQPRFGDCGRAGADLPSARPRRRRRWQAGQRVEKKARRGERQKARGRGFGKTPFAPGPANDDDLDDTM

SEQ ID NO: 61353 - protein, 223 aa, Zea mays
  Coding DNA Sequence Number=SeqID_17978
GLGTLQVVSELLGWPQDMEVQCQTSLCQNEDGFPKLLRACTVRLGIRSQPEYDGREFVEHGTVKMRALEGQQRLEDDPTVVHLTAYLLTLDAQYDFLARHHRQMIAQAEDAEKRTRQLHVDLTTAQARATALESREVIVVEALKQAKDEHVQKLMEAYLVTHNQRRALRIQEPASSNPVQPKIVEDPQIREGHPVSIRGEKKAWELPKGAIVLEGIPVFPQAM

SEQ ID NO: 61354 - protein, 132 aa, Zea mays
  Coding DNA Sequence Number=SeqID_17979
  Gene Ontology: Mol. function=endoribonuclease activity, producing 5' -phosphomonoesters; Cellular component=endoplasmic reticulum membrane; Biological process=protein amino acid phosphorylation
  Homolog annotation: Hit_ID=Q7XIT1; Match level="QueryCoverage=73%, HitCoverage=10%, E-value=7e-40, Identity=78%"; Hit description =OsIre1p
MGGWESGLLTPFDFLQFNARKTYSRQYILHMYQYSLGCHVFYCITKGKHPFCEYYEWDVNIANNRFDLFMVDYIPEAVHLISHLLQPNPEARPMTVYVMHHPLYWSPELRLLFLRDTSDRIEKTSETDLIIF

SEQ ID NO: 61355 - protein, 54 aa, Zea mays
  Coding DNA Sequence Number=SeqID_17980
  Homolog annotation: Hit_ID=Q0J4I1; Match level="QueryCoverage=64%, HitCoverage=10%, E-value=2e-07, Identity=71%"; Hit description =Cyclin-dependent kinase B2-1
MGFAADTGKARGWCTPGPDVDLLEKMLQYEPTKRIPAKKALEHPYFNVVRNKMH

SEQ ID NO: 61356 - protein, 262 aa, Zea mays
  Coding DNA Sequence Number=SeqID_17981
  Homolog annotation: Hit_ID=A2XS04; Match level="QueryCoverage=32%, HitCoverage=12%, E-value=8e-14, Identity=46%"; Hit description =Putative uncharacterized protein
  Pfam annotation: Domain name=Transposase_23; Domain location=177-248; Score=-7.4; E_value=0.0076; Accession=PF03017.5; Description =TNP1ENSPM transposase
DSFYHALTEEQSKHLQDYNFDHPGSVHMGVVFCMKFYAVSIVRRADELQTTLMEMVKQDIRHQLSAKRKWTTQIRCVSYGVLESSKHADLQIEMEVAEKGSVHTLGNARVLFSLKKTGHFDILAFIDGVSYEVQVDRKRRAGADQSLNRSVLSTKRNNTMEDENEDDEYEELHSHYLLVSTDIFLKSTRYPNRKVALGRVLSQDPKTKVGDVALGKEFWMVRVSLVSMRDEQLIRPYNNFKVLRQVGNNPIAWPSSCIEKVN

SEQ ID NO: 61357 - protein, 75 aa, Zea mays
  Coding DNA Sequence Number=SeqID_17982
MADPILRSAQITEDWCSRLRTARRLERNPDWGGEEGAIRQAGTTRQLPKEFLFRIMHRRCRSKSCSPLEDSRSGR

SEQ ID NO: 61358 - protein, 181 aa, Zea mays
  Coding DNA Sequence Number=SeqID_17983
  Subcellular localization annotation: CTP_CleavageSite=44; ConfidenceScore=5.13e-01
MKSWKETVRSSKIMMSSRRGWLVLDTPHGSLSSPSYPLVSQSVRFAVPWPQEIESVRSYSPVLPLEVPLAPPLGAPASVVAAGGDPDDGGGDSNSSHDTDFSADQEPEGWVARPITRDAARGCHFHDALNTLLRRELDRRTWSIEYRCVVYQHSRGIYPDRWEATCLVRRLENSLQGAEVC

SEQ ID NO: 61359 - protein, 153 aa, Zea mays
  Coding DNA Sequence Number=SeqID_17984
MELRHGSRERARDSRRIAALSAEVDRWQWEIVERDRAIDWAMPSRTRAHDGAGTSCGGEETLIPPPVPPMLVEAISALINATVDNTHFLQEMAGKQIHQQGGRGQHQAPRDTMYMEFSESHPPVFVKAEEPLEMDEWTCVMEQKFGLVQCTDT

SEQ ID NO: 61360 - protein, 291 aa, Zea mays
  Coding DNA Sequence Number=SeqID_17985
MTSPTPINGGDTCFSSDYLFHEGFPSILWEVLCSIGYRTPPLYTVQLYEEHQVPRCRVWLTLEAHPLQPGWHSLDSETIGFKADDTTEAAAMKTLTTFCGYHPLEMVMHPLGLFLAEKGDDPMWCNRVSHAKDVWALHPDQVGRIAVQCMCALYCLQALQSDAITHLTNPAQTTKLTLDSREDFVVDLSSELVEKDLQVEQLSQRTATLEQQMEIQDNTIDILEIQLHDVHKELEEANDHLEMHHQDMEANEAGSEGEEAPEELEPAPGQNATLSGMPPSPASSVASTTQG

SEQ ID NO: 61361 - protein, 129 aa, Zea mays
  Coding DNA Sequence Number=SeqID_17986
  Gene Ontology: Mol. function=phosphoprotein phosphatase activity; Cellular component=protein serine/threonine phosphatase complex; Biological process=protein amino acid dephosphorylation
  Homolog annotation: Hit_ID=Q3EAF9; Match level="QueryCoverage=47%, HitCoverage=16%, E-value=2e-13, Identity=63%"; Hit description =Uncharacterized protein At3g62260.2
MLLSLHGQRVNLKNPSTSTEKLLKVDIHIYRNNTQESTGLQAIDEIVPKSMTSSSSSTSFWMDSVLVTSALGDWDLKLPQGSPSPLIAKPEIRWMILMEDDEFLIIGYDGIFVMTSQNVMSNPQGTPEA

SEQ ID NO: 61362 - protein, 121 aa, Zea mays
  Coding DNA Sequence Number=SeqID_17987
MAPEARLGYCQPHSVEWHSSRSDAGGAVFLSGRPLRLCADGGYQMRLGVLGVPLIMVPDKEIARKAPDDKAKVWRHRGQAQLMSQAGQPSLSITDGVAHTCGRSGDQTDGPANSIGQSAYG

SEQ ID NO: 61363 - protein, 84 aa, Zea mays
  Coding DNA Sequence Number=SeqID_17988
  Homolog annotation: Hit_ID=Q10R68; Match level="QueryCoverage=40%, HitCoverage=27%, E-value=8e-07, Identity=73%"; Hit description =Expressed protein
MGGIRAVSLALLWFLLLWVESCTLHGAQRYYLKFSLFLGRLLSQDRQMVDNAWMTVPTFRDWNMKNRALLDYSMHFSKIHEMCK

SEQ ID NO: 61364 - protein, 130 aa, Zea mays
  Coding DNA Sequence Number=SeqID_17989
MRLILWYLFLTCGGCETARVSSHTFIAQQVVGNNVHELAKGGSSRGVGGTLYPQVMLPICQGIATSHTPLLRRRGRVTLRDLYKVPLALENPLQFIGSSNAGFLPDRHRSKINQGPPYTDHSPTALAPFG

SEQ ID NO: 61365 - protein, 409 aa, Zea mays
  Coding DNA Sequence Number=SeqID_17990
  Gene Ontology: Mol. function=transposase activity; Biological process= transposition, DNA-mediated
  Homolog annotation: Hit_ID=A3AX95; Match level="QueryCoverage=48%, HitCoverage=46%, E-value=2e-16, Identity=29%"; Hit description =Putative uncharacterized protein
  Subcellular localization annotation: CTP_CleavageSite=38; ConfidenceScore=5.71e-01
MATRYLDIGWAWSPPPTKMTRTTTTTVTRTATAVAMMTAMMMAGQANAMRCLPASVVGCSMIAYSDIREKSSFIFGPKIHCKKVCTQEIADKIFSVARETIRPGRGLTSFEATKLRVALEDIACMMEQDSLVLQEHLDKVNNVTNHVHTDYEPSNLSSPIPTEDDLDEDWDFAEHFENFWGVEYEIDQMPFFSDNEMGKSGKVIAKWDTRATKIYTKICVEEVNAGNKPHNFLDAKGYADLIRKFKERIGRTYTWDQMKNRWDSLKRMYTQWKTLNQRATEDIFGAGENSTPNPSSTIKGKHKVLHDSPKPKKKKDMRDEYMKRIVDAFESRGSYKSITSSENDPVHKKVAAQLEQVIKDGAEEGSDLHFFATHLLMEKRYRDVFATLKTKEGRNAWLRRAYEKNEKSN

SEQ ID NO: 61366 - protein, 154 aa, Zea mays
  Coding DNA Sequence Number=SeqID_17991
AAAKKRAEGLTGGETVPVKWPRGGPRNTREAMSERNRAETHWIARSTRGGGRPKSGEVDLGPPVKSGRVRGLGELHRLLAELAEALVGLEGGWSGLATAAVALAAMAGGNELAGAKEKWLAGEGECGAKREIWSQEIWSVSLPKPEANPKFCRV

SEQ ID NO: 61367 - protein, 341 aa, Zea mays
  Coding DNA Sequence Number=SeqID_17992
  Homolog annotation: Hit_ID=A2WZL7; Match level="QueryCoverage=62%, HitCoverage=54%, E-value=4e-54, Identity=53%"; Hit description =Putative uncharacterized protein
  Pfam annotation: Domain name=Spindle_Spc25; Domain location=218-295; Score=96.0; E_value=1.2e-25; Accession=PF08234.3; Description =Kinetochore protein Spc25
MAEDAAADLRRRMKDKRAAIERRITDSRDRAAAASSAFSAALLEARSIANQTVSNRGISNSWPPTSTTRLFFPPSALASPSSPIFGLVSIMDQPAKLSEQKQHLRKLESDLAQALSGTIRYIPLKDPNFRYIPWTPHVIDSCGPTFQASRRSKHKFMTESISNTTATNEHLRHLAMDRRSTRDECMNAISNQLKDIESLEAESDAHGDKSLETALMWYDKFLGFQVVGGEGVKFVFNKIDVQNPDKKYSFCIKLAGERYILVWCVPSVDDAEELVKDLNCSNDLYKFVRAMREMFQAATISGSKLRTIGHGLRKSVAKLLLPRRFIHNIFIVLSVITGFQK

SEQ ID NO: 61368 - protein, 437 aa, Zea mays
  Coding DNA Sequence Number=SeqID_17993
  Gene Ontology: Mol. function=enzyme activator activity; Cellular component=centrosome; Biological process=positive regulation of exit from mitosis
  Homolog annotation: Hit_ID=Q5JM92; Match level="QueryCoverage=94%, HitCoverage=76%, E-value=1e-114, Identity=55%"; Hit description =Putative cell cycle switch protein
  Pfam annotation: Domain name=WD40; Domain location=247-285; Score =11.2; E_value=1.3; Accession=PF00400.23; Description=WD domain, G -beta repeat
  Pfam annotation: Domain name=WD40; Domain location=289-325; Score =14.1; E_value=0.52; Accession=PF00400.23; Description=WD domain, G -beta repeat
  Pfam annotation: Domain name=WD40; Domain location=330-370; Score =9.3; E_value=2.3; Accession=PF00400.23; Description=WD domain, G -beta repeat
  Pfam annotation: Domain name=WD40; Domain location=374-412; Score =34.9; E_value=2.9e-07; Accession=PF00400.23; Description=WD domain, G-beta repeat
  Pfam module annotation: Pfam domain module=WD40::WD40::WD40::WD40; Domain location=247-285::289-325::330-370::374-412
  Subcellular localization annotation: CTP_CleavageSite=95; ConfidenceScore=5.59e-01
MAVAAPASDAKPRLNVPPSMASALRLDPVGLGAGPSMPSPSRRLAEPPKTPSPSKTTYSDRFIPCRSSSRLQNFALIDSPLSPAKDDTPYSRLLRAELFGPDSPKPTTATSAASASPNTNLFRFKKDHSAPTSPFAKAAAAHHDCTAGSGDAPSPQKPPRKVPKTPHKVLDAPSLQDDFYLNLVDWSSQNVLAVGLGTCVYLWSASNSKVLSQLYEQDYCCIPASTSGRTVTMMDSMTPPNPPTKIQVTKLCDLGPRDSVCAVHWSREGSYLSIGTGLGDVQIWDSSRCKRIRNMGGHQTRTGVLAWSSCILSSGSRDKNILQHDIRVPNDYISKFSGHRSEVCNLAWCKNVNELVSTHGYSQNQIMVWKYPSMSKVATLTGHTMRVLYLASSPDGQTIVTGAGDETLRFWNIFPSVRTQTPVRDIGLSSFSRSHIR

SEQ ID NO: 61369 - protein, 354 aa, Zea mays
  Coding DNA Sequence Number=SeqID_17994
  Gene Ontology: Mol. function=protein binding
  Homolog annotation: Hit_ID=A2WZM2; Match level="QueryCoverage=94%, HitCoverage=98%, E-value=1e-107, Identity=64%"; Hit description =Putative uncharacterized protein
  Pfam annotation: Domain name=DUF506; Domain location=68-274; Score =246.0; E_value=8.2e-71; Accession=PF04720.3; Description=Protein of unknown function (DUF506)
  Subcellular localization annotation: CTP_CleavageSite=49; ConfidenceScore=5.34e-01
MMMLTKEFALSPPPGVVPRRRPSARVAPTAARGGSPVPDLWLRTAAPVPASAAAGFASSHSHDGDCDLAMLVTDFLENGATAGSGDSRNSSDSESGLPDLAHLADTISGGDEKENELLAMVHSLLLSIHEPQLQPFKTGQCGGSCIRHLLVKLLRYSGNDAAVCTSKWQGFDKIPGGDYEYIDVIMHGDTTAPERLIVDIDFRSHFEIARAVDSYGTLLNSLPVVFVGTLPRLKQFLHVMVDAAKWSLKQNSMPLPPWRSLPYLQAKWQSKYERKDSITEGGFQSTSSDHALCIGHLKRLKTSLQLELETAGLLMMPIKANKKRMPKKWRNERLFSSVQYIMVETLLTGLEFTD

SEQ ID NO: 61370 - protein, 250 aa, Zea mays
  Coding DNA Sequence Number=SeqID_17995
MGIVRILVGVTDVDSIPESTDIAVGEGLYEIYFKVDKVCKDGVWKDYKQEVKKGKGDDDQQDEDFDSLNDYLHKNEAAFQDTEMEDKSMDNDVRVKALESSLPDHTLDTQKCGTSDFLPPFIENGPKIILTQRSKTGPTIAVENLVTSRRIDFDEDIMSKAQRLGAKRNLENIEFFFITFKPKVIASNLNNVGIRLGRNDYEVLNSIVSIKNIEVDILSLYAKSLSPIISRTLEEDEEVEIDAKLSHACY

SEQ ID NO: 61371 - protein, 185 aa, Zea mays
  Coding DNA Sequence Number=SeqID_17996
MVLVVRGRGEGDQSAIDATSIDASAGSLSSEDEKHGGVQGFTRFVYECTSDLKPPTDPPYSTITCRHSRVLYPPTEVTPKFLWLVEGQWGMVRQQLGRRLIAASNPGARRRQIGSTSGVIDILGVVAQERIGVLGLNAVGEVVLEEGRSVDRTVHSLKTSLNPVKWDHFGLESNKRRSMRLLMVH

SEQ ID NO: 61372 - protein, 66 aa, Zea mays
  Coding DNA Sequence Number=SeqID_17997
  Subcellular localization annotation: CTP_CleavageSite=42; ConfidenceScore=5.12e-01
MALHKLYDDGGPPAPLRKQDDVSRDSTAPTAVPPPGSAAPPTATTSRQQGAQISPAATLALQQIHH

SEQ ID NO: 61373 - protein, 154 aa, Zea mays
  Coding DNA Sequence Number=SeqID_17998
  Homolog annotation: Hit_ID=Q6JAD6; Match level="QueryCoverage=57%, HitCoverage=11%, E-value=1e-07, Identity=39%"; Hit description =Putative uncharacterized protein
MAGGIKLAGAKERWLARRGDMEPGNLVCLPAQTRGKSKTFQDRQDTLQQQFLADRAEHRAFMTHILQHIGVQIPPIQSAPPPALQATVVPAVQAGPPLPSVGPSSSPIWSVTLDFSSPVISSVSAQLPVPPALAVTTAVVAVSVTSSAWTAPAV

SEQ ID NO: 61374 - protein, 155 aa, Zea mays
  Coding DNA Sequence Number=SeqID_17999
MRVGSQVAHRTVFGAPGQAPNELATLGFLQGALRYNSLDYPAEDTTFHQFETQGTTVPDDDDDDDDDFGIPPPPPVPPRSHDHEAGSSRVVPATPPAVDPALAAILQSLAQQQALMASEQARLAAEQARQAAVQQQMSERMCWGAFVSEGPQKHD

SEQ ID NO: 61375 - protein, 82 aa, Zea mays
  Coding DNA Sequence Number=SeqID_18000
MCATCVELQSPCRALPLKAAFEHNPCHVFDGKSEPMLIVDLRLSNHSGHGTIIDCVMRKTSQVDPKRGLIRRMMLMDEPEDG

SEQ ID NO: 61376 - protein, 44 aa, Zea mays
  Coding DNA Sequence Number=SeqID_18001
MATSSLMVGESEPGCGLFPSLSLKDFHHQGWGGECAELRIRFPK

SEQ ID NO: 61377 - protein, 168 aa, Zea mays
  Coding DNA Sequence Number=SeqID_18002
  Homolog annotation: Hit_ID=Q6J9V9; Match level="QueryCoverage=76%, HitCoverage=36%, E-value=4e-15, Identity=43%"; Hit description =Putative uncharacterized protein
MLKSILVVERNINTRGVTLPHLWQAKQAMLHLRHNDRVKKGTRKGDTPKGILLHEGSGPRAPLLIRGSKAGPSKGFNSRLRALGLRAHYRSEVRRLAPRKGSTAASGHPGSVPTTDQGFVGWPPKGSDSRLRARRARDDPGYVRYITKARATLPRYPRTFPRPTGTIL

SEQ ID NO: 61378 - protein, 108 aa, Zea mays
  Coding DNA Sequence Number=SeqID_18003
MAGGNELAGAKEKWLAGEGFELGIKVNIPDLWLKVKAQSTQGTRSHLARAQHRAKAADPRGFTSRPRAPLSNGHTFGSPEAQSSQRSNLGQIATPTDRIAGAFNARIA

SEQ ID NO: 61379 - protein, 62 aa, Zea mays
  Coding DNA Sequence Number=SeqID_18004
MEDVALLDSYDEEMESHVCITGMACSTCTNVIEAAVSAHHKGGQEYEGLCCRILKKNGDDNS

SEQ ID NO: 61380 - protein, 969 aa, Zea mays
  Coding DNA Sequence Number=SeqID_18005
  Homolog annotation: Hit_ID=A2WVH1; Match level="QueryCoverage=100%, HitCoverage=67%, E-value=0.0, Identity=46%"; Hit description =Putative uncharacterized protein
  Subcellular localization annotation: CTP_CleavageSite=58; ConfidenceScore=5.02e-01
MAAEPREPTSSLDAQLAASSSSAAGVGGPNPCCATQWKNCQKLVRSRTALREAVKLLQAENEKLRKENSELSKVCKEEHLRGDSAEAARATESDARDLLEKEIIELKTQNMSLKQTQNTCKNNDELLRISELEEENRKLIQILGEERKKITSEKKKIEEEKCKTLEMQRIWKSEAQKSEEYRRVADTERKVANDWRASCERLRSEANELRAQLTAQIQKTEEILKRAEAEKQKVAREKKRADSEKSLSEKNRTLVEVEKKKVTEEKCRADNLFAKLEEQKKLNEHLRTSIQVETKNAIEEKKRGDHLFQKLEEMREQTECLQRKANEFSAGRDVISSGKCGRRHIDRISENANVKLLKEKLKLKKEQLKHVKNVSKLDKAKTALIRRELQSLKQDWTQLLGRFNMLDDHLARGVEDIHVLTQPSQAPSPYTPPYRPVHLVCTQPREPLNQHPEIHGFEQKLLPNDSVPAPYFRLQAGTVPFGSSIPSEYTSYQLPRESCSRSISGTSSELCPPLGSSHRLLKSKCQHRSSCPTSISDEKFMGSQGKDNLFVSSTDIRKKQDSVVPELAPKIRNDRALPCGTLTDRRETLGGDRKRKHTKMSQDPSAFLPSKNDLLHLKSKVPATTSNVALSFDDDPLCLQQGNNTICVTEGDMDKAPSFSFPSKVSCGGNGCTSSKFASLIPFEEMVRENCLKLLNLDDDADEEKFRKAKERPHSPNLSIIRPRRTKLPTYAEPHSLGRSLNGCPALGSDAIDSKTRSKASEVKEPVIQKSTQNYIQLDPSSNTIECSGIAKPLFVNDKSNAAVNVSCSTSLVVVPASTSFDSLLHEHVAQNSVASSAEALDSISRPMLSGGGHSDSILHLSKEVSNKNNSHLICDKSSPGLQANVRTSETTVTKPNNSVSNSLLRHHHGSENPPLHLVGFTRMKRSKMINIFRYWEILSSQSQKHSDEASVDGPLLDKVSTDTMLPIE

SEQ ID NO: 61381 - protein, 417 aa, Zea mays
  Coding DNA Sequence Number=SeqID_18006
  Homolog annotation: Hit_ID=Q5ZAQ8; Match level="QueryCoverage=65%, HitCoverage=86%, E-value=1e-81, Identity=60%"; Hit description =Putative uncharacterized protein B1143G03.16
MALSPTPTAVAAPPPEPGPEPAPSAELPLPDAIAAALPPDPYEQLEVARKITAVAVASRASRLELEAARLRQRLADRDRLAAELADRAAKLEQALRDADARLRSALDDNAKLAKERDSLAQTSKKLARDLAKLETFKRHLMQSLGDDNSQETVDIRTYEQSVAKANSWKDGLEKNSHPVSSLSDESVEADSVNQEVTTRPFEQKLTITHITPRLTSDPAPKLRTAATSPRRYSTAVSPKLASGATSPRLEGHMAMSPWLPSSKMSSAANSPPRGQSISGASGTESLIFAYTVAMQETLRKADEIFGAENMDLFRADSRARTRAKPRKTANFAPPDPGLGLGLSPGRRRTPLRPTQGSDLGSAPEVDEFRSARPRARTWAQPQKTTYSTSPDLGARTRPRPRKTDSTSTSEEPPHRPT

SEQ ID NO: 61382 - protein, 340 aa, Zea mays
  Coding DNA Sequence Number=SeqID_18007
  Homolog annotation: Hit_ID=A2WVH1; Match level="QueryCoverage=83%, HitCoverage=19%, E-value=4e-88, Identity=58%"; Hit description =Putative uncharacterized protein
  Subcellular localization annotation: CTP_CleavageSite=54; ConfidenceScore=5.02e-01
MGKSNILWTLLALHVFASMCGDKFLAPKSCNFLMTTIRLVVLLLESNDTSLCLVSSYIQSNKPTTLPSCAHCLFNVDTVSIDGFISSLLDELDLCSLQWNNRTCSNENITRCSSHMVSSGLDTRCSETCNIFKQGKLSEDTHNYPAEINLCYFTELISLLELFGIYMSCEWTYNNVVIRLLEILELCMCRDYSAALLVLVSQLGRSFVDDVGYEERSVSKLRNKLSLLLTGAHFTKSWSLSVQFTAIGALVSVLPLPFDKIVATGSRQLSGSFDVEMKQISEWNFFEQSISSCFVCEVFGVLEARNGSSRTPMVDRVISADHVSRQRSGRVTGHVRCATR

SEQ ID NO: 61383 - protein, 99 aa, Zea mays
  Coding DNA Sequence Number=SeqID_18008
MTPRQCKSTMLSLNENLSLKGNCNLADGEYILVPEQGAAQEVAPDPAPEPAPEDLPATALEGKPGSLEEMVAGITWPSTLPPGWTVEWDPASAEEEHEE

SEQ ID NO: 61384 - protein, 119 aa, Zea mays
  Coding DNA Sequence Number=SeqID_18009
MERGDEKPEGVGMEAMEPGRVGMEAMERGREPEIRGEEKTWALPLMRIGLGSLQGLGHTKEPLECLVLWWRRLGASFIAPRAKESLLLHLEGSGCLLSVGAPDSPVAHRTLNPQHHRIV

SEQ ID NO: 61385 - protein, 403 aa, Zea mays
  Coding DNA Sequence Number=SeqID_18010
  Homolog annotation: Hit_ID=Q6J9V9; Match level="QueryCoverage=31%, HitCoverage=36%, E-value=1e-10, Identity=42%"; Hit description =Putative uncharacterized protein
MGAHAHASCNRRAGRYVQATAPPLAPLPRLLDCGTRTATRGNPAYDPAVPARRDGQYGQKWAGSNGGGRRAEAAVTSSAKLTSHPGARRFAFAIMIASKKGPGKGDTPKRILLREGNRLRASLLIRGSKAGPSEGFNSRLRACGLHTHYWSEVRRPAPRKGSTATSGHSGSAPTTDQGSKAGPRRVHSRLRHRARDDPGYVRYITEARATLPSDEHTSDSPEAQSSPRSNPGQVATPTDKIAGAFNAKAVRPGLRHHRKLRFARPRARTRAQPRKTANSAPPDPGLGLGLSPGRRRTPLRPTQGSDSGSAPEDDELRFARPQGSDSALASADGLRLARPRGSDSSSASEDRLDLDLGGASTSPNLGRGPATSSGGAIITLPQADSGYGKQDRRPVWLAPPDKQ

SEQ ID NO: 61386 - protein, 183 aa, Zea mays
  Coding DNA Sequence Number=SeqID_18011
  Subcellular localization annotation: CTP_CleavageSite=32; ConfidenceScore=5.41e-01
MPGKANCCCPSRMQHSALFLAFVARVGARTCRCASGRPTFAVKGTPRPLFDEPKPGVAVSARTETELARKEDLVGRSLAGLSVSGTDARVDLPRPRAGLMSSGDSWPRPRGDQPSRLLEPDSWRRPRRRWPGRDDEVVLQSGDPRTTSLSEARSDLAEGVVDAEGAAAPFNRQDPSLQDQIIL

SEQ ID NO: 61387 - protein, 248 aa, Zea mays
  Coding DNA Sequence Number=SeqID_18012
MRPPVAEVNDEAHSHKEKGGQRLIRAGTREGNAGAWALVAGPRGHWQCGSDDEVRRREGDRATQTQTERERNQPHRHRLCCTSHQAAEAMGRRGTNWWLGRCTSTTICYGRGWVWGVSRLAVSVTNRRLPVQEKRGASCLARRPWSKQKLLLRTAAPPSFRNGGLRPSAVLAPTPSKQTQRLFTSRAGVELGRSDRHEQINPKASFVRSREPSYPRQPRANRRHTLTPHDPAKTAAVLYKNDCEADDS

SEQ ID NO: 61388 - protein, 487 aa, Zea mays
  Coding DNA Sequence Number=SeqID_18013
  Pfam annotation: Domain name=DUF1150; Domain location=76-150; Score= -21.1; E_value=0.041; Accession=PF06620.2; Description=Protein of unknown function (DUF1150)
  Subcellular localization annotation: CTP_CleavageSite=45; ConfidenceScore=5.58e-01
MANPAREAKRARGSAKAAASGSSKPVPPAKAAAPGPSKASVSMKVAASGGGRPPLGGPTKGQELPSPGRRVDDFGTNISVEDYLVGLGEGQLVVVPPSVATTLPSAVVRAKGAVQDPWAAFGASGEILTAAATKDVAGTMSQRLREVSQQLTQQLKKAADFADRVALGVLTADIAAEVKSLRAQHADAAREKSTAESKNRRLAEKVATLEAEKTDLRLRLAEERREANQAVTEVQVARAEAKVARAENSLASQRAEEWEARFNALRGRVDKVEASVRSEVERTHTQFVDAYRDLGARTADFKVPVQEAGLRFLEWLQEELLVLPTIVKGFMSFASLVTCEGTLNALSREACRHYEVFDQSDENFEREIFKAEDPMVKQSARALFDRMWGPHGREAVKEWSDRAIEQMARAKDVEDLRDLVGAPPEAEVNPVPPSSAGEGSSAAPMPTIVGEGPLRAPAPTAEDPPKVVAEPAAEDPMAAAGPSQVAE

SEQ ID NO: 61389 - protein, 596 aa, Zea mays
  Coding DNA Sequence Number=SeqID_18014
  Homolog annotation: Hit_ID=Q8S474; Match level="QueryCoverage=6%, HitCoverage=4%, E-value=5e-08, Identity=74%"; Hit description =Putative pol protein
MVTTSSVVGRSKPGCGLCPALSFKDLHHPCCGGGRAEPELYLQYGPTSHLFLQHSGERALTGLAEGRTLTARGRSAAGVVSSSMHGSLAQLALAQLPVPPPTAGAECGYLPAVRAVVASCAPGDRPRRRTPLGRRSCSWIVSCSLRHDASVRRSVLARPGGLEWGSAGGQVAAVVGGEVVAVGEGFSADETVDATRGLTSGSLALIACPRPSSGDAGEGLVAAASALRSSMLLFSRPERRSLSLLMERSTASHLEFVVPQALRRGGCSYPREWNRSSVCNGTLSAGRRRSPSTRSALPPKASLAQLKNPRLLCDEPEPEAAVSAWTEVESAREEASLTWEHVASLAEEVQQRRLELGQVVRRRDQPRSRAAETMSWADVLGGQLAEATERSVEVFARAETLTETLAMMARAWCWPPPSRWRSFRPRHRPRPGQIPPKVETMPRVLLLPLLMSEPTGRYQDLFVGNRIVYPSESYFSRKVTSEESLGSVGLAAYVYSVVFRIPLSKQSKSAKDVLAEDFFRGKFFTQRGFPPSSPRGRVGLCRGKADPSLTLVCSGLQNLGDDEWPLPGRSKLVAPSGVLPQLKYQVPHLEVSGPNP

SEQ ID NO: 61390 - protein, 408 aa, Zea mays
  Coding DNA Sequence Number=SeqID_18015
  Gene Ontology: Mol. function=nucleic acid binding; Cellular component= mitochondrial matrix; Biological process=RNA catabolic process
  Homolog annotation: Hit_ID=A2XU86; Match level="QueryCoverage=55%, HitCoverage=56%, E-value=1e-77, Identity=52%"; Hit description =Putative uncharacterized protein
  Pfam annotation: Domain name=Helicase_C; Domain location=198-350; Score=30.5; E_value=6.3e-06; Accession=PF00271.22; Description =Helicase conserved C-terminal domain
SCCLSSTIDDLILLLSPYNVSEEKVASALPGASPLAPIPADDAHDLLLLAFVEFCCASNLADELRQPRSLMVADDLTPHDLMATTDLTAPHTWYPSTRAMRRRVVYHCGPTNSGKTHNALASFSAAKSGVYCSPLRLLAIEIFDKMMADPVRGFAWTRALLGLRADEIHLCGDPSNIHSSDWVVVFSRKKIFELKWKIEMSTNHKCCVIYGALPPETRQHQAELFNEEHNEYDVLIATDAVGMGLNLNIRRVVFYTLMKYDGEKMASVPTSQVKQIATASSASPDLGPQPHEKSPPRPTPGLGPRLGLGRWTPPRPTPGLGLDLDLGRWSPSRPTPEPGLNLDLGRNRVLARPRPRPQEESLPRPTSGSDRPRHRGLRGNKTGVPSRLTPVTRLKRSSDGHDTMYIGL

SEQ ID NO: 61391 - protein, 71 aa, Zea mays
  Coding DNA Sequence Number=SeqID_18016
MSGAHRTVRCPLSTVGSATCLAQIARPTVGPADRWLTGQSDDDDDGYDYGNGKQGVEADLQEFQDVDEFED

SEQ ID NO: 61392 - protein, 304 aa, Zea mays
  Coding DNA Sequence Number=SeqID_18017
MEYLFDEPRNHQLVDLLAYGSVLFFVETAQRLLHGSGSTSDIQHVRGTPRKNLGVRTKKVDEHCFLFGVELRADPDLLGGVVAGVERDGLNRLCWLEVASVAPRIWHLPGEALQVGDEGLELGEGLSVFHTLHVAFVRVSVCGSDGDDPIGARHLELEVGVVGDDHELGVARSLQHRVVGSSEPDHLEREGFLSEVGGSPEADGQIELSKGLYALPGDDPVKGRRTGPDRGQIDLQEPEGLDIDDVEAAASVYEDLGEPDVADDRVDNERVLSWARHAVGVVALVEGAQQHCRSFSAARVIFGG

SEQ ID NO: 61393 - protein, 428 aa, Zea mays
  Coding DNA Sequence Number=SeqID_18018
MVTTSSMVGRSKPGCGLCPALSFKDLHHPCCGGGRAEPELYLQYGPTSHLFLQHSGERALTGLAEGADFDSAGPVGRRCRQLQHAWLAGSAGSGAASGATSYRWGGVWLSARRTGGCCAVRTGGPSKTSHAARAAFVFLDCLVLAPARRLRVEVVGEGFSTDETVGATRGLTSGSLALIACPRPSSGDAGEGLVAAASALRSSMLLFSCPERRSSSLLMERSTASHLEFVVPQALRRGGCSYPREWNRSSVCNGTLSAGVCSLWLSKPEHLGVCPGRDPYGDLGYDGPSLVLASSFEVEILPPASPSEAGPDSAEGGDDAEGPIAPSIDDLFVGNRIVYPSESYFSRKVTSEDSVIDIVEKARKIVLAEKFSSVKTCPESLGSVGLATYVYSVVFRIPLSKQSKSAKDVLAERLFPRKIFYAEGVPPF

SEQ ID NO: 61394 - protein, 284 aa, Zea mays
  Coding DNA Sequence Number=SeqID_18019
  Homolog annotation: Hit_ID=Q6QP51; Match level="QueryCoverage=12%, HitCoverage=15%, E-value=3e-08, Identity=80%"; Hit description =Putative growth-regulating factor 1
MTLGTSDTWPRLGLCSRGTLGHFRDQQERFCNGIPPEGGIEPSDPIERDRVRQITCQGFVCSRDTVSPRPSPASGGDCSPRRIHASPEGLLGNGRTLDSPEAQLGQGFVVKQPWPNHLTNRPYRRRIQCKDRLAPYPDTRASVGKVEENSAARPSSTAVPPARVRLTAAESSLRRHRKLRLARTWASASGEVFASPDPRARPPPRPRKVVSASPDPRARPRPRPRPRKVVSASPDPRAQPQPRPREESCPRPTPALASGGVSASPDLGLGPTTPQGVHDYPTPS

SEQ ID NO: 61395 - protein, 71 aa, Zea mays
  Coding DNA Sequence Number=SeqID_18020
MGSRHSACSAEAECRGSFVLLLLVTLLRGERYLIRDGWFTDDDDDGYDYGNGKQGVEADLQEFQDVDEFED

SEQ ID NO: 61396 - protein, 134 aa, Zea mays
  Coding DNA Sequence Number=SeqID_18021
  Gene Ontology: Mol. function=nucleic acid binding; Cellular component= mitochondrial matrix; Biological process=embryonic development ending in birth or egg hatching
  Homolog annotation: Hit_ID=A2XU86; Match level="QueryCoverage=69%, HitCoverage=15%, E-value=2e-19, Identity=55%"; Hit description =Putative uncharacterized protein
MHHLRRIVEITVIPMTNIGPLREPPRTLDLMRSFSLGASYPSASAFGPRLPKKFCASNLADELRKPRSLMAADDLTARDLMTAAADLTAPQTWYPSARAMRRRVVYHCGPTNSGKTHNALASFSAAVGDLFSNA

SEQ ID NO: 61397 - protein, 140 aa, Zea mays
  Coding DNA Sequence Number=SeqID_18022
  Gene Ontology: Mol. function=glyceraldehyde-3-phosphate dehydrogenase (phosphorylating) activity; Cellular component=chloroplast; Biological process=metabolic process
  Homolog annotation: Hit_ID=O22534; Match level="QueryCoverage=29%, HitCoverage=11%, E-value=3e-11, Identity=85%"; Hit description =Glyceralehyde-3-phosphate dehydrogenase subunit
  Pfam annotation: Domain name=Gp_dh_C; Domain location=41-140; Score= -63.9; E_value=0.012; Accession=PF02800.11; Description =Glyceraldehyde 3-phosphate dehydrogenase, C-
MAAIRHNIIKPRLGHVCSIKGDLGIRASTLTAHVTTRHTWCKTMHAGSMGREAPQTVLRPRCHSQHHAHVYWRRQGHRIGAPNLKGKLNAIALRVPTLNVSVVDLIVQVSKKTLVEEVNHLFFAFWPFLQKFITNTQFFV

SEQ ID NO: 61398 - protein, 157 aa, Zea mays
  Coding DNA Sequence Number=SeqID_18023
  Subcellular localization annotation: CTP_CleavageSite=93; ConfidenceScore=5.14e-01
MAQCYIWFSRTRFRSSIKGAPGPAGQAFLGIPLVSPFWPNAQARTRHAVAVVWARLPGSSSSLFLRRKQTPARRACNNPHVVRIGAESIARTTAAEFHADGAWFPDHKIVVPPPYPHLRDWAPPSEMGKVKGKQRQDKFYHLAKALVYWSRAAFRLL

SEQ ID NO: 61399 - protein, 80 aa, Zea mays
  Coding DNA Sequence Number=SeqID_18024
MAVKLEQGLSTDGHKAMVSWLATLMDAHCSPFKEMEMNAQGKGCRLLDGLVVVPRELFNEDCEEAAVVIVRGVVLASPER

SEQ ID NO: 61400 - protein, 154 aa, Zea mays
  Coding DNA Sequence Number=SeqID_18025
MTAIEAKSSQGPPYTDHSPTALAPFGYQDDLQVTRNLTAKRSNTYKHAANHEIYGLDPNPPKRDRGADSAIHGARRMTTSSDGDRAIPAVQAAILECQGRHAPSRYQRITWRVFEGATAMDYRIPPRLRQSSPDQFLSPVCGLDEGTEGVRQRA

SEQ ID NO: 61401 - protein, 131 aa, Zea mays
  Coding DNA Sequence Number=SeqID_18026
  Gene Ontology: Mol. function=catalytic activity; Cellular component =endoplasmic reticulum membrane; Biological process=metabolic process
  Homolog annotation: Hit_ID=Q5W6W7; Match level="QueryCoverage=64%, HitCoverage=11%, E-value=5e-34, Identity=87%"; Hit description =Putative long chain acyl-CoA synthetase
MWSMFMPTPSPKLETHDLNKTVMLASGTAIGYGSTLTMTDTSNKIKKRTKGDVSVLNPTLIISVPAILDRIRDAVFKKVGEKGGLTKKLFDFAYKRNLASIRGSDYPMSRGESSQTHAGHISSTATGPRRT

SEQ ID NO: 61402 - protein, 163 aa, Zea mays
  Coding DNA Sequence Number=SeqID_18027
  Gene Ontology: Mol. function=carboxyl- or carbamoyltransferase activity; Cellular component=ornithine carbamoyltransferase complex; Biological process=amino acid metabolic process
  Homolog annotation: Hit_ID=Q8SA97; Match level="QueryCoverage=93%, HitCoverage=31%, E-value=1e-29, Identity=48%"; Hit description =Ornithine carbamoyltransferase
MAPPVDVAGLRPRLGDVEAPPKPRSSLSSVVEVESEPLGRARRSSSSSRAEPKSEPWVGRSGVRRLPGLSPSPSPGSGGAEFAVFRDLARLYADGGYQLRIRSLEGIPNYGPRHLYTGVGDLRLLKVPSNLDLSDLSQNHSVKKHKGYEGWNEAEAVRKGASA

SEQ ID NO: 61403 - protein, 212 aa, Zea mays
  Coding DNA Sequence Number=SeqID_18028
MERGGHGRRNNNLLPGVTSMRTEHGGTTGLRASSAITKARYGSTAVVAGIGWSTCEGRGYVRKESKNGAEAYPVYVHRRSGEVRRPWTGFSGEAKSDSLLGELHRDMHSLFRGSGVAGKGSAGRSTVAGDRVAAGTLSAGQTLVISGSGEVERARRSTIDVYGGFIGAGAGNGAGSALARRGARGGPRGRALASSERVEHVALCFCLCSSLC

SEQ ID NO: 61404 - protein, 135 aa, Zea mays
  Coding DNA Sequence Number=SeqID_18029
  Homolog annotation: Hit_ID=Q53WP4; Match level="QueryCoverage=55%, HitCoverage=10%, E-value=9e-28, Identity=76%"; Hit description =Putative auxin-independent growth promoter
MPDLRTLIAGPRRRSLAARVKVTARLHLRRGGPPPRLAPILARLRPVPLPRGCRGGSASDFRDIFDVNHFKESLKEDIVIVDSLPLDYRRAKPYVRAPTSWSKASFYKDCAKVLRKFKVVRFTHTDSWIVNNGFP

SEQ ID NO: 61405 - protein, 201 aa, Zea mays
  Coding DNA Sequence Number=SeqID_18030
MYMYEHEENYEESICRDFKNDFEEDSIKEYYHHTEDETKDYEPCTTVFNPRITEHCDLRGEGVEKGVACGLVEGILSGATQQQVRRRGGGGIASDDGGGGCAVKRAWGSGSAHGDGAHVHWEQGQCFDSHGEEPPQRDARRRRNKRWNVRRHHEAGEQESAQPYLGTKPQKWEKLLMNRYTEKDATLVAVIAKKLKNKSRN

SEQ ID NO: 61406 - protein, 182 aa, Zea mays
  Coding DNA Sequence Number=SeqID_18031
MKDCPSRLRTGLSSLLTYTLIKYNHSRLYGQSLNLNLYDPNPRVMMAWEHREDKEGECFVRFGHGGGLTPSGIIVLKRRSLIGFHLSKVLKNTTNMFSKYNTFTGTFGLGMKLYTIRKVWSGRRMNQFRSYARRSFGLAVESEIDLKRKRLSSPRWIVLKSIVNIKGMNLLLHRLRPVPINR

SEQ ID NO: 61407 - protein, 174 aa, Zea mays
  Coding DNA Sequence Number=SeqID_18032
MGETLLGKMPSRTRAHDGAGTSCGQEDTPNPPPVPPILAEAIAALVNATADNTRFLREMAGNQFQQKGGRAYPQGPRETSYLDFSETRPPLFVKAEDPLEADEWYAIDQVNTDLKKKNCFMRGLNNRLQRKMATCLDLSYSRAISTALAVEAKNTCPGKLNGFGGDRSNQGPEK

SEQ ID NO: 61408 - protein, 199 aa, Zea mays
  Coding DNA Sequence Number=SeqID_18033
  Subcellular localization annotation: CTP_CleavageSite=52; ConfidenceScore=5.03e-01
MELWLGSPNRPGPKTTLLAYTLGQLPELFKVFMGGEVMPTSRMTSSLRAPVPLMTGPGYSLYFEPHGVGPGMQLRGAQPPPGASGFRRSPHDLATEPGVLKRRGVLPFALKSPYALPLQLSPLPRRETVRSRVPCAAASNPRKDVDPVLGGVSVGFVWPVGRCPWQYLSESIAGIAGIPHRTSASTVRRAQGCLLPSCW

SEQ ID NO: 61409 - protein, 188 aa, Zea mays
  Coding DNA Sequence Number=SeqID_18034
  Subcellular localization annotation: CTP_CleavageSite=52; ConfidenceScore=5.03e-01
MELWLGSPNRPGPKTTLLAYTLGQLPELFKVFMGGEVMPTSRMTSSLRAPVPLMTGPGYSLYFEPHGVGPGMQLRGAQPPPGASGFRRSPHDLATEPGVLKRRGVLPFALKSPYALPLQLSPLPRRETVRSRVPCAAASNPRKDVDPVLGGVSVGFVWPVGRCPWQYLSESVAGIAGIPHRTSASAVR

SEQ ID NO: 61410 - protein, 30 aa, Zea mays
  Coding DNA Sequence Number=SeqID_18035
MANSGDGVRMWTCHKSTPLKKNLVLEIREG

SEQ ID NO: 61411 - protein, 262 aa, Zea mays
  Coding DNA Sequence Number=SeqID_18036
MTSHGSSDEGNAQSHTDGLAREGFPRILWEVLQGAGYTTPPQYTVELFEKHRVPRCRDTIEAIALHGLTTFCGFHPLELSTHPIGLFPAEKEDDPMWKDRVEHAKDIWAIYPGQTAHLTVRCMNALYRLQVMRGEAMSHLMALLEATKITLDNREELVVDLSTKMVEKDLQVEQLSNEIQELEELVGTRENTIEVLEDQLINTQQQLAEANQHLDMHHQEIQDMEANEDVDIEGGEEPASSLDTAGSGRPPSPESSVASFAH

SEQ ID NO: 61412 - protein, 109 aa, Zea mays
  Coding DNA Sequence Number=SeqID_18037
MVVVVGARSRKLVNDLPKQQKRQVDYPRILCGPCPHHRISIRVSWADVTPQVLLRIFTQDYTNFSLADGEYVLVPEQGVAQEVAPDPAPEPAPEDLPAPALEGKPRFYA

SEQ ID NO: 61413 - protein, 56 aa, Zea mays
  Coding DNA Sequence Number=SeqID_18038
MAPPVDVAGPRPRLGDVEAPPRSRSSPSSVAEVESEPLARVRALDRAERSSPSSGA

SEQ ID NO: 61414 - protein, 746 aa, Zea mays
  Coding DNA Sequence Number=SeqID_18039
MNKTPALKVPLQMELRFHLCRYEQPHTIGGPVEQQKADGWLIAARSNNDDFCSEGPNSSSDDLRADAAAIGPSPTSSLERQGRAEGRRVGGQSVGGTGYLVDGETSSGCRGGRRRRKRLQSRSGQRAGHAAAASATNGEHPSPRSLREGAGRCPRRDRPQLGALPSPALMMNILEAEGGAEAAARLASPHPGAGGHRLGAKEAKPPRAVRATAQRLQAFLHFRPDQWVKGRTAMQAACDRAKWAHPFDSNTPSTGAQAHTSCNRRAGCYMRATAPPLTPLPRLLDCGTSTATRGNPVYDPTVPARRIGHGSVRCRRRSDGQYGQKWVDNNGGGRRAEAAVTSSAKLTSHPGTQGNPLKWTGGTFGRRSGRRFAFAIMTASKKAGPSEGFNSRLRALGLRAHYWLALEGVHSRLRRRARDDPGYVRYITKARATLPRARSTQGTQSRLARAQPRARAVDPGGFTSRPRAPSGNGHTFGLPEAQSSPRSNLGPIATPTDRFAGAFNAKGSDSGSHPEDDELRFARPQGSDSGSAPEDDELRLARPRAQTRAQPRKTTNSASPDPGLGLGLSPGRRRTPPRPTPGLGLGLSPGRRRTPPRPTQGSDSGSAPEDDELRLARPRARTRAQPWLQPTVSTSPDPGARTRPRPRMTDSTSTSEEPPPRPTQGSDRPRHRRGHHYPTWLWLRGTRPASHLVRPGKQVMMAPHMLMTTATLSPLTEARRRQQGLDSPDSCPSARLQRSSDGHDTT

SEQ ID NO: 61415 - protein, 336 aa, Zea mays
  Coding DNA Sequence Number=SeqID_18040
  Gene Ontology: Mol. function=transcription regulator activity; Cellular component=nucleus; Biological process=regulation of transcription
  Homolog annotation: Hit_ID=A2X8H8; Match level="QueryCoverage=77%, HitCoverage=75%, E-value=3e-39, Identity=40%"; Hit description =Putative uncharacterized protein
  Pfam annotation: Domain name=HLH; Domain location=80-131; Score=55.8; E_value=1.5e-13; Accession=PF00010.17; Description=Helix-loop-helix DNA-binding domain
MTLEALCPTSSDVLVYDTFNAAAACAAASAGTFLFGNAPPVEVPAAAAAQANGENSVQQGRRKRRRRQRSTKNAEDAESQRMTHIAVERNRRRQMNEYLAALRSLMPDSYVHRSDQASVVSGAIDFVKELEQQLQSLEAQKLALKRQLQQQQQRSVTAAIRDDAAQPARGRDDIGAGAGGDAAARSEVSAPEPDPPPFARFFRYPQYARRHAAAREDAGAEETSRASAVADVEVGVVVDAHASLRVMAPRRPGQLLRMVAGMQALGLAVLHLNVATAAVDATALYTLSLKVEEGCALATAEEIAAAVHHVLCIIDAEATPQRLLAAGAPGTGQPDV

SEQ ID NO: 61416 - protein, 176 aa, Zea mays
  Coding DNA Sequence Number=SeqID_18041
MSRKSLLIDLEFLCAGTMVVADVGYYLADELGVHFIWQHNQESSVLGIPRAFDDYYIEYCGVILAPEVSLIANILSAPRKLVKLSGRQDNSIELVDWQSCIAVETCHWQWQCRKCGYERRNRSRTILKIGISSLSDNEHVVENLNEHGFVQGYMPIIQKRECSNRVAGSSGQNCCS

SEQ ID NO: 61417 - protein, 194 aa, Zea mays
  Coding DNA Sequence Number=SeqID_18042
  Gene Ontology: Mol. function=nucleic acid binding; Cellular component= intracellular; Biological process=regulation of transcription
  Homolog annotation: Hit_ID=Q2HSC7; Match level="QueryCoverage=18%, HitCoverage=16%, E-value=1e-13, Identity=88%"; Hit description=Zinc finger, C2H2-type
  Pfam annotation: Domain name=zf-C2H2; Domain location=74-96; Score =20.3; E_value=0.0074; Accession=PF00096.17; Description=Zinc finger, C2H2 type
MAPTTSSTEHAHVKHITLHQFLKQQQLQQHRMKPAVMWGWPATAAAIGRHVPDDVADDDDDGDGLGGAWPPRSYTCAFCRREFKSAQALGGHMNVHRRDRAKMRGGHQHGSAAAQLGGAASSPATDETPHAAKYAVLYPILNSSAAGAVLIPSGDVLLSAGPLALAPAHDRCHVIDDEVEGDKDVDLELRLWWP

SEQ ID NO: 61418 - protein, 70 aa, Zea mays
  Coding DNA Sequence Number=SeqID_18043
MSSRPASMYFQERDPKQVFSLFQRSGVAFSYILYNGVQLLTKLIIFTHTPGGKLGQNCERASSVMVKASE

SEQ ID NO: 61419 - protein, 93 aa, Zea mays
  Coding DNA Sequence Number=SeqID_18044
MDGHSGGPNYAIVVIGHPEPREFVENVQDPYLTRQLSVFRTSTPTIGVQAGESENKSSQVPYAWVDLKTMGLDPKLSLGHHGGSRLGSSLRVF

SEQ ID NO: 61420 - protein, 59 aa, Zea mays
  Coding DNA Sequence Number=SeqID_18045
MALASANEISLLALGPWCGFMWCGGFEGLGGVHGLGYRDKATRDLWAGRSTWVMGPAWK

SEQ ID NO: 61421 - protein, 310 aa, Zea mays
  Coding DNA Sequence Number=SeqID_18046
  Gene Ontology: Mol. function=DNA binding; Cellular component =chromatin; Biological process=regulation of transcription, DNA -dependent
  Homolog annotation: Hit_ID=A7PCC4; Match level="QueryCoverage=74%, HitCoverage=76%, E-value=1e-62, Identity=59%"; Hit description =Chromosome chr2 scaffold_11, whole genome shotgun sequence
  Pfam annotation: Domain name=DUF296; Domain location=111-229; Score =201.9; E_value=1.5e-57; Accession=PF03479.6; Description=Domain of unknown function (DUF296)
MAGLDLGTAATRYVHQLHHLHPDLQLQHNYAKQPEPSEDDPNGSGGGNSNNGGPYGDHDGGSSSSGPAGDGHGGSGGNGEMVARRPRGRPAGSKNKPKPPVIITRESANTLRAHILEVASGCDVFESVSTYARRRQRGVCVLSGSGEVTNVTLRQPSAPTGAVVTLHGRFEILSLSGSFLPPPAPPGATSLTIFLAGGQGQVVGGNVVGALYAAGPVIVIAASFANVAYERLPLEEEEAAQQAAPPGLQMQPPSGGVDGAGGMGGGPFPPDPSAAGLPFFNLPLNNMTGGGSQIPPGADGHGWAGARPPF

SEQ ID NO: 61422 - protein, 133 aa, Zea mays
  Coding DNA Sequence Number=SeqID_18047
  Homolog annotation: Hit_ID=A2XPB0; Match level="QueryCoverage=54%, HitCoverage=19%, E-value=2e-08, Identity=41%"; Hit description =Putative uncharacterized protein
  Subcellular localization annotation: CTP_CleavageSite=22; ConfidenceScore=5.06e-01
MTQSDTIKMGPVLAQPESFYTRANTFSKSFGKFLLGMHVVAANVEGGLARTCDPKRKEAAQLYNTRIHKMVAGLNVDMGFTTMLVLLDISHLLDDLMEHREKYCFSETTNGCCRTSSPSSSTKGAREEYGFSV

SEQ ID NO: 61423 - protein, 630 aa, Zea mays
  Coding DNA Sequence Number=SeqID_18048
  Gene Ontology: Mol. function=binding; Cellular component=nucleus; Biological process=metabolic process
  Homolog annotation: Hit_ID=Q69XF8; Match level="QueryCoverage=89%, HitCoverage=83%, E-value=0.0, Identity=74%"; Hit description =Pentatricopeptide (PPR) repeat-containing protein-like
  Pfam annotation: Domain name=PPR; Domain location=104-138; Score =10.8; E_value=0.4; Accession=PF01535.11; Description=PPR repeat
  Pfam annotation: Domain name=PPR; Domain location=211-245; Score =23.4; E_value=0.00084; Accession=PF01535.11; Description=PPR repeat
  Pfam annotation: Domain name=PPR; Domain location=247-281; Score=8.5; E_value=0.76; Accession=PF01535.11; Description=PPR repeat
  Pfam annotation: Domain name=PPR; Domain location=313-347; Score =22.5; E_value=0.0016; Accession=PF01535.11; Description=PPR repeat
  Pfam annotation: Domain name=PPR; Domain location=414-448; Score =50.9; E_value=4.5e-12; Accession=PF01535.11; Description=PPR repeat
  Pfam annotation: Domain name=PPR; Domain location=449-483; Score=9.2; E_value=0.64; Accession=PF01535.11; Description=PPR repeat
  Pfam annotation: Domain name=PPR; Domain location=485-519; Score=1.6; E_value=5; Accession=PF01535.11; Description=PPR repeat
  Pfam annotation: Domain name=PPR; Domain location=551-585; Score=3.5; E_value=3; Accession=PF01535.11; Description=PPR repeat
  Pfam module annotation: Pfam domain module=PPR::PPR::PPR::PPR::PPR::PP R::PPR::PPR; Domain location=104-138::211-245::247-281::313-347::414 -448::449-483::485-519::551-585
MPPPPAVPHDVGAVLRLLESRDLPAAARLAAGSASSSPLPLAAVLLHRPLPPRLGYSLHARAARAGLLADRYLANALLAFYVRLPDHLPHALRAFDDLPRRDVVAHSSVLAAFLRAGLPRRALLQLRTMASGGYGADDDVAPSAHALSASAKACAVLHDLRAGACVHGTTVVRGYGDDGVVLSALVDMYGHSGAPGDARKAFEEMRAPDGICYTSLISAFVRNDWFDEALRWFQAMLRTDGVWPDGCTFGSMMSALGNMKRARQGREAHAQVVTRGLCGNVIVESSTLDMYAKCGMMVDARKVFDRMKAPNAVSWCALLGGYCQTGKHEKVLSLFRQMHMQEQDDDWYSLGTLLRSCAGLSAVKLGKEIHCRSMRMRGCGDVIVESALVDLYAKCGAVDYAYRVFKMSSVRNMITWNAMICGCAQNGHGERAISLFNEMVRGGVKPDYISFIGVLFACSHTGMVEEGRNYFNSMSKDYGIPPGIEHYNCIVDLLSRVELLEEAEDLVNKSQFRDDSSLWAAILGACATHTNPDVAVRVAKKMMELEPQYHLSYVLLENVYRTIGHWEDAVKVRKLMKSRKVKKEPGTSWINANRSKLYMCNAKGAASEPVASEDFRKCSSLTDLACDFGI

SEQ ID NO: 61424 - protein, 84 aa, Zea mays
  Coding DNA Sequence Number=SeqID_18049
MDSLLSNYTEEGQSPELIPSLVQELDPAIGAEGDEAASCLEGISSAPCWAHCSFILETDCAAGARKLRCDVIDTTTDPRSSSRK

SEQ ID NO: 61425 - protein, 405 aa, Zea mays
  Coding DNA Sequence Number=SeqID_18050
  Homolog annotation: Hit_ID=Q6JAD6; Match level="QueryCoverage=70%, HitCoverage=65%, E-value=3e-18, Identity=47%"; Hit description =Putative uncharacterized protein
LAPPLLSPLRQTQSLLLLPPRQLLQLLSLPPHPLLPPPPPLQLPLLLLPLPLHLFLHLAIGSVTRLRCDHSLLILDCSTFNGPRLQVGAESKGCITYLLGLYSLLTFGGRYVEEWVKVFYAIVWIDPDHQWMRFRFEHEDPAQSQATLEASRLQFGFYRLAPEDTTLAPDLVDPLASDLRVEDEAIRQFEDQGAAGDTSSDDDEDLGIPPPPPVPPRSHDHEAGGSSVAPLAPPALPLWLPSFSHSLSSRLSWSQSMPIRQQSVPIPTVKSAPPPALQAVIVPSIQSGPQLHFFGPTISPLRPVTLDFSTQVVGLINAQPPVPLASDVTTAIVVVSVTTSAPADPAPQPASESSPVIASTADPRSETDSDTLLVMFVNDCVYYVFTYDVVTSRSVLVHGLHFILM

SEQ ID NO: 61426 - protein, 52 aa, Zea mays
  Coding DNA Sequence Number=SeqID_18051
MAVGDAPYSGETPVRVLDCGLGENAGSATEGRCLKGFVPGIRINLIPKAGLS

SEQ ID NO: 61427 - protein, 168 aa, Zea mays
  Coding DNA Sequence Number=SeqID_18052
  Subcellular localization annotation: CTP_CleavageSite=41; ConfidenceScore=5.24e-01
MPLGPKPWVGPPNNPSEGQTRDRRRQAAPTYQWASRTHATQCALPNPSGSTTLAWANAGGKSTRTWSRGAEIAAKIGLDDVSTDLAWWGIVACHGATVVSFVAVGEAKDVVVLEEGWEDAGDYDKHAGTFGSAEDGRSQPVYVSQRLELDDAPVKQSSSLSLRKLHVT

SEQ ID NO: 61428 - protein, 60 aa, Zea mays
  Coding DNA Sequence Number=SeqID_18053
MKHDSAFEDAFLEPKQLFVPVCSALPKERLLNFFAFYFSGIRVDFSRFALYFGGIWLCIP

SEQ ID NO: 61429 - protein, 313 aa, Zea mays
  Coding DNA Sequence Number=SeqID_18054
MPRSTCIHRALPPYRPLDGRSATPWGLAFFRYRSASRIFITQPGRNLRSVVIHKDDYQPCGGEKRAGLQPPPYPQLQGSFGGEWRSPALRRRQTSATWGRPSEAPSAAACLAPRPGWPWCRLRRCLLPLGWGVAVRPLHGRRLRHAQVGHIHGFSRAAGRTGGSYKTSYAAGAAAAAFLDGLVLTPAVRKGARTSSRVLGQPPPIGAEVVAAAGGAEVVAAAGEAAHCRGGCLCWRYRQCHLLPDPWLFGFNGLVVAPQVATAVGVDVVTSADEPLGASYPMVLTGVEGGGACRPTVQDQAERLHGLRTNPGD

SEQ ID NO: 61430 - protein, 174 aa, Zea mays
  Coding DNA Sequence Number=SeqID_18055
  Gene Ontology: Mol. function=cysteine-type peptidase activity; Biological process=proteolysis
  Homolog annotation: Hit_ID=Q5NKP7; Match level="QueryCoverage=91%, HitCoverage=18%, E-value=2e-59, Identity=71%"; Hit description =Putative uncharacterized protein 9C20.3c
MKKRNINGSPSKLMKKMVTKRMKAVESPTRKELKITKDIVHLIFGLPNAGGGKPLGIDEVVAANNLRVGLGLSKEDFDVAALQDRLRKGGDDDLIMISFFLILFNRLLFPTASWGITNHKVLLTKEMHRFHETDWCQLIFNDICQVVKKWHTRNITNVSTRIYDCSIVILVSIS

SEQ ID NO: 61431 - protein, 180 aa, Zea mays
  Coding DNA Sequence Number=SeqID_18056
  Gene Ontology: Mol. function=metal ion binding
  Homolog annotation: Hit_ID=A2XZ64; Match level="QueryCoverage=39%, HitCoverage=6%, E-value=1e-10, Identity=50%"; Hit description =Putative uncharacterized protein
MEMNEERKVSLLGLADILSASIGGFSWAPLISKICKNKVEAEALFTGLSALICRGQHGSQVQHIDGIRIAGLPFDGARESSLSGSSTFTSDSYENKLSSRRSPRSDCCASHPGKADNSKFSLGCNRKLHLARPQDSASASASGGIASSPDPGLGLRRSLRLARPWARTDRATKDTSLPYP

SEQ ID NO: 61432 - protein, 84 aa, Zea mays
  Coding DNA Sequence Number=SeqID_18057
MAVPGQRYCESESGRAATPLIPNMYQVPALNNAREASLGGGVADIPERKHRDMQRTELSAAVADSWQVKAWSCSSWSKSWASSG

SEQ ID NO: 61433 - protein, 52 aa, Zea mays
  Coding DNA Sequence Number=SeqID_18058
  Subcellular localization annotation: CTP_CleavageSite=24; ConfidenceScore=5.19e-01
MVSGGAATGAGPRISSALAAAGPCCSSAPTSAPGIRLRVVIVGRQNRQNGRT

SEQ ID NO: 61434 - protein, 97 aa, Zea mays
  Coding DNA Sequence Number=SeqID_18059
MSGRSIIPTQVMTEETTLKASAELPDFRDATKLLQGHLDRDPLPPLLIGHRLQEVEEAEASEEGSAPSPEDCYVYSAGRTKDIEQGHAKSRSRSRKR

SEQ ID NO: 61435 - protein, 168 aa, Zea mays
  Coding DNA Sequence Number=SeqID_18060
  Homolog annotation: Hit_ID=Q10QW3; Match level="QueryCoverage=52%, HitCoverage=56%, E-value=1e-14, Identity=49%"; Hit description=ZIM motif family protein, expressed
  Pfam annotation: Domain name=CCT_2; Domain location=26-52; Score =54.4; E_value=4e-13; Accession=PF09425.1; Description=Divergent CCT motif
  Pfam annotation: Domain name=tify; Domain location=2-22; Score=10.3; E_value=0.014; Accession=PF06200.5; Description=tify domain
  Pfam module annotation: Pfam domain module=CCT_2::tify; Domain location=26-52::2-22
MVVVFEDFPTEKAAEVMRLATGDDLPIARKASLQRFLAKRKDRLVQRAPYARPSYPTEEPEKKTVKPASALASWLGLGSTEADRLTIALFCGSAHPRQVTSASRSLAPPRPVIADGAARCHKEGGGMRMGTIYAVAALALDVASDVAVDCEDNLIPAKGSPLALRHQW

SEQ ID NO: 61436 - protein, 183 aa, Zea mays
  Coding DNA Sequence Number=SeqID_18061
  Homolog annotation: Hit_ID=A2XAV0; Match level="QueryCoverage=41%, HitCoverage=7%, E-value=4e-20, Identity=67%"; Hit description =Putative uncharacterized protein
MGLGLGALLKSGGSQIWFSFSLCFLNEKKQTTNYSEGSSHPLSHGGSPPWNQPSQRQEGYQFNNVFDWTILKYPQICSNLRTRVGERTSGVAGPSMDKMEKAPGEVFGRRNPSSPVNQTDSYAQQPHETVSMSLNEINFTVIFDIDNSNLWVPSSKWYFSVCMVFDYVVETILLTLHFCVALK

SEQ ID NO: 61437 - protein, 159 aa, Zea mays
  Coding DNA Sequence Number=SeqID_18062
MKEPCGGHIRGCDKAPGRGPRERNRRRAGRHDRGRRVRVRRWFLGTACASDYAAPSAGLCGGGWPGSGMGRRRSGTGMGMARRISGLRDGVGARGGDVLQGWRGHGRARGSSGLGDGALALGDGDGGGREGWGIGGDGAWVDGDGAWVGGDGGGVVVKR

SEQ ID NO: 61438 - protein, 142 aa, Zea mays
  Coding DNA Sequence Number=SeqID_18063
MGKNNKRKRELTPPSEDFGDSEYSEEEFSSESEGSPAPVSPPASSDDSDDSQGIAAEVWTYIRVVERSGLEGSDESEYSSDEEDSPEEDDEGDDDDDNGGDGSDDGDGGGRSGNGSSRGGNGDSSRGSGGGGSSKGSNKASG

SEQ ID NO: 61439 - protein, 267 aa, Zea mays
  Coding DNA Sequence Number=SeqID_18064
MACSKAVLLAALLAVAGALSSAAVWEDYDHHMYHKCYRSCMRKCDDDDADDALKNSISPDSHLWSDDHDHDDDHDHHDDHNHDHDDHHDDHDHDHHHDDHDHDHDDHDHDHNDNHGEHHDDDDEDDDYNYCRVECIEDCIDYVPGICYRHCVSYSCLYLPPYAITMTIIVITTITTTTMKMTMTMTITMTTTMAQRQAHLNLNPSRNHQSQGRRPSRRCLVQRQSHRPHTTEAKYTPKLPQKPSSSSTPRTDAAQYSAVTTKTGIVH

SEQ ID NO: 61440 - protein, 152 aa, Zea mays
  Coding DNA Sequence Number=SeqID_18065
MAPSNLSNNGLFFVNQKTKGGIGILDLNTMNNRTLLSKWLYRGKGVSSSRMGRKLDFGKIYDVVSFNILPPRSIHHMFGRWMEGVEGNLRNKIWLELVPFAGQFGYAKMMSFLQCTSAYSFAGYPFGDTLAFTLGYSTEGGGSTYGCAKDST

SEQ ID NO: 61441 - protein, 90 aa, Zea mays
  Coding DNA Sequence Number=SeqID_18066
MAERYQRPRSCVPPQRQGGRTAGIPHPGAQKPSRDESSPTRSKVLPVRHGGWVPHVMQAGPEQKKPNRRARCMQPPSGYKRPSTFAQTSG

SEQ ID NO: 61442 - protein, 64 aa, Zea mays
  Coding DNA Sequence Number=SeqID_18067
  Subcellular localization annotation: CTP_CleavageSite=58; ConfidenceScore=5.20e-01
MGGGLLAAASALRSSLPLFGPPEQKSSSSPLLEQVTLAEASGWPAEPPARAGFSEKTRAAMARA

SEQ ID NO: 61443 - protein, 232 aa, Zea mays
  Coding DNA Sequence Number=SeqID_18068
  Gene Ontology: Mol. function=polynucleotide adenylyltransferase activity; Cellular component=nucleus; Biological process=RNA 3'-end processing
  Homolog annotation: Hit_ID=Q5G7K0; Match level="QueryCoverage=71%, HitCoverage=27%, E-value=2e-43, Identity=51%"; Hit description =Putative polynucleotide adenylyltransferase
MSKVKNNNGYHGVTEPISLSGPTEKYLMQTAEVEKTVKAWIKKATRISRYGEQFVHEANAKIFTFGSYRLRWLKGTALNMEYFFRWLHDILAEMPEVSELHPVPDAHVPVLGFKINGVSIDLLYANLAHAVIPEKAGAYEHQDCHRMRARAVNGAREEDEAGRRIRGGGTHAVNGRIEPAVVRTRAEARAVQCVQGAVFLFFFRSRVPSPLLAAGEEAHTSPLHEIEFRCMR

SEQ ID NO: 61444 - protein, 217 aa, Zea mays
  Coding DNA Sequence Number=SeqID_18069
  Gene Ontology: Mol. function=transferase activity, transferring hexosyl groups; Biological process=carbohydrate biosynthetic process
  Homolog annotation: Hit_ID=Q6Z5N7; Match level="QueryCoverage=28%, HitCoverage=16%, E-value=8e-29, Identity=88%"; Hit description =Putative Avr9/Cf-9 rapidly elicited protein 231
MKFSLIQVANFLVRFKSIRSIAELDSLKVSGDVWFGPGITLKACLTTSWWNQHGLGGDNVFGSCRPLHNGLVSLMHWSGKGKPWDRLDAGKPCALDHTWKAYDLYIGENDSSSASASSGDLDQIALPTDRKQRYSPRSDYCANQQGKTDDSRSRPPPSSTSAQQGAPPRPTPGLGLGLGRRSPLRPTPGLGLRRSLCLARPRSRTDYATGDTSLPYS

SEQ ID NO: 61445 - protein, 164 aa, Zea mays
  Coding DNA Sequence Number=SeqID_18070
  Gene Ontology: Mol. function=catalytic activity
  Homolog annotation: Hit_ID=A2Y3P0; Match level="QueryCoverage=65%, HitCoverage=33%, E-value=2e-20, Identity=48%"; Hit description =Putative uncharacterized protein
MNPCFLLVNPEQTPLARGARVGVAHRRREEAWRLPVRPLEAVLRGPCAAVYGKLRRSHRLDAVQSGCTALSIVKQGDLMVVANADDSRVVLGTAIHDDAITPSSSSSTRSSTCDWCNDQLYYLADEPGVYFIWQPSQESLVLTMSRAFDDYYISRIVASSRHRR

SEQ ID NO: 61446 - protein, 351 aa, Zea mays
  Coding DNA Sequence Number=SeqID_18071
  Gene Ontology: Mol. function=N-acetyltransferase activity; Biological process=metabolic process
  Homolog annotation: Hit_ID=A2XKC8; Match level="QueryCoverage=52%, HitCoverage=94%, E-value=3e-59, Identity=65%"; Hit description =Putative uncharacterized protein
  Pfam annotation: Domain name=Acetyltransf_1; Domain location=233-316; Score=26.1; E_value=0.00013; Accession=PF00583.15; Description =Acetyltransferase (GNAT) family
MAFPKGSLEQTKARETVESKARSRAGSGDNDQGARAAGGDRSLRWRSQEPVGQGVLKKHQGKSASPTRQSAAYRGGQAALGMRRGGFRREAGGTRMVIHNGLFGCGGAWSRNAQVNSMDFVHCTCVLYSFVCGQDPYQDRLHIHDTARAGDDESMEVQVQQRGSPAPAAELEVSLREFTLSDADAEAFMSWASDPRVVRFQRRDAYEHVDQARRYIADHVLPHPWYRAICAGAGAPLPVVGSISVKAGPAEDGRLFRASVGYRLAHAHWGRGIATRAVRAAAAAVFTAWPWLLRLEAVADVDNPASQRVLEKAGFAREGVLRKYVLLKGRPRDMVMFSIVVETEQDNPDGL

SEQ ID NO: 61447 - protein, 138 aa, Zea mays
  Coding DNA Sequence Number=SeqID_18072
MVYEQDRGNHHQLPRFCTAGAAPGVARASKKSKPKKAPQRGLGVAQLERILIEEQKNMEEGPTTAMPVTTRTAHLGPLLPMHPPPPPPPPLSLSALPRDAGVHCGYDPPVLWDPAAADPLKHPYKKRSLCPQPPPLPT

SEQ ID NO: 61448 - protein, 188 aa, Zea mays
  Coding DNA Sequence Number=SeqID_18073
MGGFGCRGEGGRCGEALDHGGIWAPRGTRGRALSALSRPRRDGKADEAGRDLEDAVIWNVIVEEHVGKERVVDKANEVGLDLGATGAAEGGAISGRLSRARKSWGGDAAVAGRRRGLCQAGAGVEGASGGMRWMDDEPVMPTLLDFCLKLTRGWTTSRPCNLGGDSQASQRALCQRDARESGAEWSEN

SEQ ID NO: 61449 - protein, 91 aa, Zea mays
  Coding DNA Sequence Number=SeqID_18074
MPALLLLLLRKCQWNFLLELIPMGVTLLTLTPMGVTLTMLIPMGAIQPELTPMENPVPKDGASDYPAPEGAAGGDPAPMSNAGCNPAPEGV

SEQ ID NO: 61450 - protein, 137 aa, Zea mays
  Coding DNA Sequence Number=SeqID_18075
MGKSKKGGSSSHHSGDKRKREPTPPSEDFGDSEYSEEEFSESEGRFLGIAAEVWTYIRAIERAGLEGSDESEVSSDEGDSSDSSEEGSDGGDGGEGYGGDRGDDDGGGDSSKGDDKGDRGSSSGNGKGGSGSGKASG

SEQ ID NO: 61451 - protein, 151 aa, Zea mays
  Coding DNA Sequence Number=SeqID_18076
  Subcellular localization annotation: CTP_CleavageSite=43; ConfidenceScore=5.05e-01
MVAPPPPPAARKVVGQTRMLLFRHGGKTSPSPPPLSELTAVVVVVALWGKEYHVVAAVKGHELETPETEQRPGLKRLLETTHLELDGKLFVNTQQAPTWRANCRRFDPGGSLDRRVKLSLRVPAQMGWREMEHKGGRTRLVLSCARGMRLQ

SEQ ID NO: 61452 - protein, 127 aa, Zea mays
  Coding DNA Sequence Number=SeqID_18077
  Subcellular localization annotation: CTP_CleavageSite=42; ConfidenceScore=5.06e-01
MNTNFLDDLRYMEAVPSTHTTQPFFPLVFCPDSVAPPGESWMAAAVSPSPSTSPSAAVPEHPSNAVPFTGARAPPSPSPSPSTAVPFTEPERRRPLHRARASAVPEPERRVPEPEAPPSMSSFFFLS

SEQ ID NO: 61453 - protein, 278 aa, Zea mays
  Coding DNA Sequence Number=SeqID_18078
  Subcellular localization annotation: CTP_CleavageSite=81; ConfidenceScore=5.53e-01
MSISCSGSLTWGLSARLQTPRQVNTHDSPVSCKTQLPSESPVVTSASTANHPRPQGRLGTHTLGEAPRIPMSNVVLGSPCSSASYSEWSSELARHIKSSKGNEHEPACCYLTLNAQPPPAPRVKQPAALPPNHRPELRDFGGVTQPQHGSASASSSRPFYNFMPLPVGPVRCERPLSEIKADVSDGVDLELKLICVRCKIFSLPINVWPERVAKRSSVRSEWLCSVEQALGRLVHDRHYRLAGTIEHNTECDQTQHSKTTGPCMAHPRAVTLAHSRQE

SEQ ID NO: 61454 - protein, 28 aa, Zea mays
  Coding DNA Sequence Number=SeqID_18079
MDMGRRERERDGFFLNSERDGLKYANTI

SEQ ID NO: 61455 - protein, 126 aa, Zea mays
  Coding DNA Sequence Number=SeqID_18080
  Gene Ontology: Mol. function=protein binding; Cellular component =nucleus
  Homolog annotation: Hit_ID=A2WLZ1; Match level="QueryCoverage=78%, HitCoverage=84%, E-value=3e-33, Identity=58%"; Hit description =Putative uncharacterized protein
  Pfam annotation: Domain name=DUF538; Domain location=1-106; Score= -2.5; E_value=3.4e-05; Accession=PF04398.3; Description=Protein of unknown function, DUF538
MGSQAIEAQRAGTEVRLPLGLLPLADMEEVGRQVSYAAEVTAYIEDRRMQRITRVKTKELLIWVTLSDMFIDGDDPSRITFKTPTGLGRTYPVSAFAKEGATDTEAKPKDAPATTVAANGEAAASK

SEQ ID NO: 61456 - protein, 173 aa, Zea mays
  Coding DNA Sequence Number=SeqID_18081
MESLIIEKPYLDSLITSIPLRVFSLVGLCNCFRISISPMFCNVCKTGETFLERNGLWVADGERINELRAAIRYLQDQLAKRDLALNWAVNSRPLAWAKEAKARARVEELSSAMDNLQVYYNTLHEEVHVLYSQLHPNVPADPIRMEAGPSRVAGEALGGELDLFRTPSLYEVG

SEQ ID NO: 61457 - protein, 438 aa, Zea mays
  Coding DNA Sequence Number=SeqID_18082
  Gene Ontology: Mol. function=sugar binding; Biological process =regulation of ARF GTPase activity
  Homolog annotation: Hit_ID=Q7XBE1; Match level="QueryCoverage=31%, HitCoverage=16%, E-value=5e-25, Identity=49%"; Hit description =Putative uncharacterized protein Z013I05_4
  Pfam annotation: Domain name=ArfGap; Domain location=282-390; Score= -0.2; E_value=2.7e-05; Accession=PF01412.9; Description=Putative GTPase activating protein for Arf
MSLDTKLILDAIGKLFDDFDARWERCLPKLLTAQEASPVVSVLTPTVAVGATIIADNWGGGFNGGEYSFEQYCTAPSIVADNWGRFFDGEDAAVNAEFAIDPPDDPERFVLPNASTNEPNIDPALARTNSRAADDSVNALVTSTDPDALLDVVPADALASFIRSAPFFHNEISGAVPVLARLTCFAPRDLAALHEFELPPTDNVIRGLRHQQTILRRDSEDVQAAQLARSFHALAGFVIPCALAKATYKAYSYHDVAAAYGPTIREAASRAHAVDDWLMKPLAQHRLLGRAYCEEDEVLNALPNRSVGTLVSKVMSVTLDQWTDDGINSMIEVGGNSYANAIYEALLPEDYEKPHPNSSQEERAEFIRSNSSTASASLQYAAVDPSEIEEDLQSLREGGGWGAWPVALAACGHSGVVVMPRYLNGTSDKKIIMQMHFT

SEQ ID NO: 61458 - protein, 327 aa, Zea mays
  Coding DNA Sequence Number=SeqID_18083
  Homolog annotation: Hit_ID=Q6QP51; Match level="QueryCoverage=43%, HitCoverage=99%, E-value=7e-19, Identity=37%"; Hit description =Putative growth-regulating factor 1
MDDSGYVRYMAEAQATLPRRIQCEERLTPYPDTCASVGKVEPQAQQEAPPRPTLGLGLRRRSPPRPTLGLGFALGLGRWSPPHPTLGLGLTLGLGRWSLPRPTPGLDLDLGRNCVLARPRPKEESPPRPTLGSDRPRHRGYIITLPLSSSGYSGTRPASHPGSPRPDSCASTGLQRSSDGHDTALAPRKGSTADPEHSGFKLITDQGFEEGFDSRLRARRARDDPRYVRYMAEARATLPRRIQCEERSPYPDTHASVGKVKEEVSASPDPRALPHPRPRKVVSASPDPGLGLDLERNRVPARGVSASPDLGLGPTAPQGIHHYPTPS

SEQ ID NO: 61459 - protein, 198 aa, Zea mays
  Coding DNA Sequence Number=SeqID_18084
MQDAARRALSQYCSLFSGVADGLDLKYYPRRSTGSARGVIVSHVGEGNPRLNSMVNLVAVLNTELDLALDELGKVRAEVAELRAECAAHHYLDGGSLAPVGIQHPYHSLPRGRFDYGTPDCRTRIDLDPYIDGVGMSENKCRGARRAQPEQQAPQEEAAPQQHLPPPPPMTIEQMFLMQTQAVQAIGQALAAMQQAQR

SEQ ID NO: 61460 - protein, 103 aa, Zea mays
  Coding DNA Sequence Number=SeqID_18085
  Homolog annotation: Hit_ID=A2XS04; Match level="QueryCoverage=96%, HitCoverage=15%, E-value=2e-11, Identity=37%"; Hit description =Putative uncharacterized protein
  Pfam annotation: Domain name=Transposase_23; Domain location=19-89; Score=3.9; E_value=0.00044; Accession=PF03017.5; Description =TNP1ENSPM transposase
MMSTRNCTHTTNVLKFRIRISTDIFLKSIRYPNRKVALGRVLSQDPKTKVGDVALGKEFWMVCVSLVSVRDEPLIRPYNKFKVLGQVGNNPIARPSSCIEKVN

SEQ ID NO: 61461 - protein, 46 aa, Zea mays
  Coding DNA Sequence Number=SeqID_18086
MATARGCSRSQIYEVASDGFGGNGGKDGGVCEGGKNEGDYDEADPG

SEQ ID NO: 61462 - protein, 494 aa, Zea mays
  Coding DNA Sequence Number=SeqID_18087
MAVAFNWHCWVMRRAASSHGTGSIVDEAPHSVEVAVRLFARRNRCAGYMTYGPASFALVHRMWSKSKGRTVPVRLDACRVAVHPFDHLFLRRWGSACNREAVSCLACGGSPPSRFGSARMTCGTQPPCRRGRTLEYVSGDFARDAKGCNPAAFPHQWSVWWGEASRAAASAPPSASRIFVIWSEAEERTKWGVASAWVGDHFLPPAFGGERHPPALWRRPPAMRGKANCCSLARVQLSVLHPGGGRAARGPATSRPSSHRQPRRGSPSTSYATRAVLVFWDGLGEDGSEVLPVRFGAAVVRRRGVGGFDPTDGALRLFGFNGLSSPLVWGQVAGELLGVRYPAGPLNPRLLYDEPEPKAAVLAWTEAESARKETSSAWELAASQAEEDVAATAGAWPRHSLARCWRPPLGGGPFARVAVRGRARFRRGWKQRRGCCCSSCRYLNLQEQFVCSMRIIVYPSESYFSQKVMSEDSVIDTVEKARKSFSTRVFGLVR

SEQ ID NO: 61463 - protein, 274 aa, Zea mays
  Coding DNA Sequence Number=SeqID_18088
  Homolog annotation: Hit_ID=Q6J9V9; Match level="QueryCoverage=55%, HitCoverage=44%, E-value=2e-09, Identity=35%"; Hit description =Putative uncharacterized protein
MQAACNCTKGAHPFDFDASSMEAQAHTSCNRHTGYYVRETAPPLAPVPRLLDCGTGAATRGDPAHGPTVPTEHIGHGSVSRGRRRNDRYGQKWADRTGKGDTPKGILLREGSGPRAPLLIRGSKAGPSEGFNSHLRALGLRSHYWLEVRRLAPRKGSTTALGHSCSAPTIDQGFVGWPLKGSIAASEHAERRMTLGTFDTQPRLGLRSRGTLGHFRDQRERFRNGFPSEEGIEPSDPIKRDRVWQITCRYFGARLWATSRLLSNGARASTRIAR

SEQ ID NO: 61464 - protein, 151 aa, Zea mays
  Coding DNA Sequence Number=SeqID_18089
  Gene Ontology: Mol. function=oxidoreductase activity; Cellular component=cytoplasm; Biological process=metabolic process
  Homolog annotation: Hit_ID=Q6H7C9; Match level="QueryCoverage=54%, HitCoverage=26%, E-value=3e-24, Identity=69%"; Hit description=Short- chain dehydrogenase/reductase protein-like
  Pfam annotation: Domain name=adh_short; Domain location=60-151; Score= -37.5; E_value=0.0037; Accession=PF00106.16; Description=short chain dehydrogenase
MSPEAGLSRCRPHSGEWHDSRSGAGSAVFLSGRPLQLCADGGYQLRLGVLGVPLIMVPDRVAVVTGGNRGIGLEICRQLASSGVTVVLTARDAERGAGAASTLGQQPNVVFHQLDVGDPSSAARLAGFIEEKFGRLDILIDQQCRNYWNGK

SEQ ID NO: 61465 - protein, 106 aa, Zea mays
  Coding DNA Sequence Number=SeqID_18090
MKLEVVGMLLGIGHLCGEVLQISDEGLRVNECLSVFNTLDVALVGMAVGGADGDNARGPKHLQFSEITGGPKTDRQINLPEGMHTLAWGDSLERCGPRSDLRLLDP

SEQ ID NO: 61466 - protein, 355 aa, Zea mays
  Coding DNA Sequence Number=SeqID_18091
  Gene Ontology: Mol. function=unfolded protein binding; Cellular component=chloroplast; Biological process=cellular protein metabolic process
  Homolog annotation: Hit_ID=P08823; Match level="QueryCoverage=43%, HitCoverage=28%, E-value=1e-50, Identity=71%"; Hit description =RuBisCO large subunit-binding protein subunit alpha, chloroplast precursor
MVLVCTYINKDVSGAGFLAKDLGLLVENDTEEQLGTARKVTIHQTTTTLIVDAASKDEIQARIAQLKKELAETDSVYDTEKLAKRIAKLAGGVAIIKVGAATETELEDRQLRIEDAKNATFAAIEEGIIPGGGAAYVHLSTVVPKIKEAIEDPDERLGVDIIQKMKEKLEADTITICSDHPLSLGTTIKFGILEFMSLGIEYDMVLLLPTTPEDQGSRCRPFRRKRQRQSNRNHAPRGTLCAEDAVGNDDSIESLSRDLADINISPGVSAPTFPAPLAPTWGPLLPNGIEQGTSAAPALPLVGQEEPDAPWRDMGGDGGELSMFNPIPFQPHFDTGYNAQCGEGYDPTHECFHVD

SEQ ID NO: 61467 - protein, 36 aa, Zea mays
  Coding DNA Sequence Number=SeqID_18092
MAGGIQLAGAKGKWLAGEVTLEISKRLKEPPPLEQR

SEQ ID NO: 61468 - protein, 235 aa, Zea mays
  Coding DNA Sequence Number=SeqID_18093
  Gene Ontology: Mol. function=carboxyl- or carbamoyltransferase activity; Cellular component=ornithine carbamoyltransferase complex; Biological process=amino acid metabolic process
  Homolog annotation: Hit_ID=Q8SA97; Match level="QueryCoverage=48%, HitCoverage=21%, E-value=6e-12, Identity=44%"; Hit description =Ornithine carbamoyltransferase
MALPVDVAGLCPRQGDVGAPPKPRLSLSFVAEAEPEPWGRARRKSFGRGQGGVRALGSGEAEFRRLPGLSPSPSPGVGRSGVRVFRVLARVRALGSGGAEFAVFRVLARVRALGSGGAEFAVFRVLARVRALGSGGAEFAVFRVLARVRALGSGGAEFAVFRVLARVRALGSGRAVFAVAPLARPDCLSDSLCRVAPQSEWHRRRCPSVSPLYADGGYQLRIRRLEGTPNYGPRQ

SEQ ID NO: 61469 - protein, 136 aa, Zea mays
  Coding DNA Sequence Number=SeqID_18094
MKLAKPSDPTGLHRRPEINLTGLRSSAAARGPSYPVSLRPIPFAHVFSGIPWTSLTHLIELSRRDQAVVVESTPWARNLKKTIGKELKDCNLADGEYVLIPKQGPVQEEDQEQASEAAIEDLPAAPAVEGKPRFYA

SEQ ID NO: 61470 - protein, 94 aa, Zea mays
  Coding DNA Sequence Number=SeqID_18095
MPGIPRDVAKHSLDIRAGARSVRQPLCLGHQGRVGLALAEPDPPSGAKKGEPLCVKIFLIKKGASCVLPATFSRLCQKQGLEERTRVHVNGKAD

SEQ ID NO: 61471 - protein, 52 aa, Zea mays
  Coding DNA Sequence Number=SeqID_18096
MARVACTLRGKRLDGGVSVLSVKKQQPFVASVPRWYRKKKIRTEAAGGRVLS

SEQ ID NO: 61472 - protein, 275 aa, Zea mays
  Coding DNA Sequence Number=SeqID_18097
  Gene Ontology: Mol. function=kinase activity
  Homolog annotation: Hit_ID=Q6QP54; Match level="QueryCoverage=25%, HitCoverage=25%, E-value=4e-22, Identity=77%"; Hit description =Putative kinase
  Subcellular localization annotation: CTP_CleavageSite=42; ConfidenceScore=5.07e-01
MGLTETPRFSRIQTRGPFFTGTVLEAKNGAAGLTSGGSALARGQVAVVGGGSKLLSTTTVGFDSTGWGASWEVGGATEGEWDIGKLTVELAWLKGACAGRTMVSDTRVIRRAVVYIGGVAECYVSSGGRASALSTCQCGSRRDLDALLLSAAVVTGHAGRHHCLSGGASQMGHRSCSLRPESTRGRVMMALPVDVAGPRPRPGDVGAPPKLGSSLSSVAEAEPEPLGRARRRLFGRGQSGVRALGSGEAEFVVFRVLARVRALGRAERSSPSSGS

SEQ ID NO: 61473 - protein, 313 aa, Zea mays
  Coding DNA Sequence Number=SeqID_18098
  Subcellular localization annotation: CTP_CleavageSite=34; ConfidenceScore=5.30e-01
MSSSSLMRRVFPPSKPPDGGPAAPLHRRSPKMVTSSLVVGESEPGCGLCPSLSLKDFHHQGWGGECAELREGRSSSVALTAAPRLALGREWLQSRSRHRRPPRQLEEVLLPARLPRPATDRPSTLRPSARPCLTSFGLGGGLLAAAPTLRSGLPLFSPPEQKSSSSPLLEQVTARRSSVFRCSAGPPPRSGVVRTCGGGTGVPFVMAPRMPVSPVDYLNRFTKHESPSVKVTSEHEQRRSWLENGNLVGRSLAGLSASGTDAGVDQPRPRVGLAPLEDGWPRPLRQPAEPPARARSPEKSLDRVAVRGWVGSR

SEQ ID NO: 61474 - protein, 181 aa, Zea mays
  Coding DNA Sequence Number=SeqID_18099
  Homolog annotation: Hit_ID=O48967; Match level="QueryCoverage=81%, HitCoverage=62%, E-value=1e-29, Identity=55%"; Hit description =Putative uncharacterized protein
MGIRSQVGVPFVGVGCAALMDHLRAISWPSKFRPHLPEKYDGSIYSWEELCARFVRTSPALTNNTTGGSGTVPRDGKKKKKKDRDHQKPWSTAVVVATATGDQGNRNKSPRPQRGNTGSCPVHPNGHHSAAECHEIIDLAKRVSKRHEQSSKDGSPPRRRPGKERVDDGPINDTMAKRTTP

SEQ ID NO: 61475 - protein, 154 aa, Zea mays
  Coding DNA Sequence Number=SeqID_18100
MARMLRWLPLLGRLLGAERWSSPLVRLPGAEVVAAAGELLGASYPRDFTGPRYGTRLSGYAYTAPDHPRRQRGPKLQAWLFNSDVIMPDVMGTAWVDQQAGLMRADLTGLAYTDAPVVRKRYSFSRSKIVTPVGVGPDPGFPSAFDDGVLVLVL

SEQ ID NO: 61476 - protein, 224 aa, Zea mays
  Coding DNA Sequence Number=SeqID_18101
  Homolog annotation: Hit_ID=A2YGC2; Match level="QueryCoverage=70%, HitCoverage=70%, E-value=9e-11, Identity=32%"; Hit description =Putative uncharacterized protein
MELSEEQEPEGWITRSITRDTARGCHFHNAHDTLLRRAFDRHTWSIDYCCVVYQHCRGLYPDQWEDTCLVRHPDDDLRGAEDFSEHYSITERDTAEAAMQDVARRALSQYCLLFSGVADGLDLKYYPRRSTNSVGGVIVSPFGEGNPILSSMINLVAVINTELDHTLNELGKARAEVVKLHAERAMRHHQEGGSPAPVGIPYPYRSLPHGRYAYGTPDYRIQID

SEQ ID NO: 61477 - protein, 121 aa, Zea mays
  Coding DNA Sequence Number=SeqID_18102
MDAWSGGGWGVFIAPTTNSTVGEAVCRWAHRTVWKRFDPISLSVPHNGNIHGLLLALALPSCSGWLLGLEGEVPGCSAAGTDFLHVGCSSATAATAEGTASDTAAGVDADANAGDLEGDST

SEQ ID NO: 61478 - protein, 76 aa, Zea mays
  Coding DNA Sequence Number=SeqID_18103
MDNHNLAELMREDQIELLMELVLGYSKVLSSTARASRCPFHLVEKKSQGKRRSLITSKVGYISETLQPIIEEVIHD

SEQ ID NO: 61479 - protein, 101 aa, Zea mays
  Coding DNA Sequence Number=SeqID_18104
MSSPMPRVLDVVRVPRRRQRDLGARVEASTVFNSTRGAMGPRESLAGAVQLHHAAGRITYCTISACGAEVTQLGAIGYGAEIFYPASTAAVYAVNSKIYHP

SEQ ID NO: 61480 - protein, 166 aa, Zea mays
  Coding DNA Sequence Number=SeqID_18105
  Subcellular localization annotation: CTP_CleavageSite=33; ConfidenceScore=5.29e-01
MVMQGASLAEAQGRAASQTLPPVEARGKSPTARAPSVGAPTSRAGGDAVSPVTIIINVSNVLLIKEDPKAALNGRVTNKTKSKEPLQPASAEQVLFLDPIYGPSAKPTTPQVPLINQLRASHSTLMVVLLSRVVTQRIGPYGEVLRKQLKSPKVSQDHHQDNIIVS

SEQ ID NO: 61481 - protein, 283 aa, Zea mays
  Coding DNA Sequence Number=SeqID_18106
  Gene Ontology: Mol. function=metal ion binding; Cellular component =cellular_component; Biological process=protein ubiquitination during ubiquitin-dependent protein catabolic process
  Homolog annotation: Hit_ID=Q10R22; Match level="QueryCoverage=97%, HitCoverage=96%, E-value=1e-110, Identity=70%"; Hit description=Zinc finger, C3HC4 type family protein, expressed
  Pfam annotation: Domain name=zf-C3HC4; Domain location=227-267; Score= 43.2; E_value=9.4e-10; Accession=PF00097.16; Description=Zinc finger, C3HC4 type (RING finger)
MELHYINTGFPYTITESFMDFFEGLTYAHADFALTDGFQDQGNPYWAMMHTNSYKYGYSGPGNYYSYAHVYDIDDYMRRADGGRRIWDNTTPVNNVDSANVVLQGGEAPHTTTNTINKECIQQVHQSPGSPQVVWQDNIEPDNMTYEVSDTLASVFFSMVLSWLSKIIFFVCALYGALSFITQELLDLGEAVGTQSRGLSQERISSLPVTKYKCGFFSRKKTRRERCVICQMEYRRGNLQMTLPCKHVYHASCVTRWLGINKVCPVCFAEVPGEDPEAMSQQL

SEQ ID NO: 61482 - protein, 376 aa, Zea mays
  Coding DNA Sequence Number=SeqID_18107
MSSPRTHLSRTDDGKRKIEKETWWVLRVPSSPNLRHVGVQAQALALPTLLVLLLFITQPRVLLKMLLRALVLPCDLLPLLPWSVTQSLLRCLALWGFVDLLSAFVGAARARVRRHPTCGCLLLREQRVGGVPQWGRRGLGDSIVHVEATLDTGFPLASLDDRFPSATLGELQRPRISPCIGSSNSHDGSRTDDGKRKIEKETWWVLRVPSSPNLRHVGVQAQALALPTLLVLLLFITQPRVLLKMLLRALVLPCDLLPLLPWSVTQSLLRCLALWGFVDLLSAFVGAARARVRRHPTCGCLLLREQRVGGVPQRGRRGLGDSIVHVEATLDTGFPLASLDDRFPSATLGELQSDESGQLGTWQLTAWNLTASLGWQ

SEQ ID NO: 61483 - protein, 328 aa, Zea mays
  Coding DNA Sequence Number=SeqID_18108
MNALSREGCRHFEVFDQADEDFERDVYKVEDPVVKESAGALYDRMWGLHGCEVVRERAETARAQAERERVDDFGALNSALPDPEPTLAEAVTGVALEPTPETVAIATAASTSAAASEDLPPKVAEGAPDAPAAAVPSAEDPAAVAAETTAEAAAEPTAEPTAEAPTASGPSQVQDFGPAHATATTEFLAASTAEGGNEYGGSVSEFFDFTDSGSSVEWTEESSEEDLDYFAALDVAAAEASPHAADAPDVPGPNTGRRRRRAVAKRRVSAEEGARLRVSGAGRQELLSLPAAAGTGEGELRSLFAGEELRIILFNYREMGIIPKVEPM

SEQ ID NO: 61484 - protein, 558 aa, Zea mays
  Coding DNA Sequence Number=SeqID_18109
MQVVELVPCARNKWGNWNEFWFYVAEATVEGHEGLPVSEMCSHYYSAYPPFEVAEEDADEGAFRCATGQSSGRDLVEEFVAYGVWPLAHGWALGEDGAVRLVGRYVARTEGQHSFDIRGSNDRLNRVFELNQLPYDGYPGQDEADRRGKKTAVETGDDPAPVAAPSSKKRKLGTAMGGLGVSDSFARELMRTCAAPGERMSSPELRESSARMLRVTGGCWPRNVPIPCAAGEDCFTSRMVRQWRVFPYGRNIGAVVWAVMDKDRQGAAQKRQATVRLLEARPKRQRGAAKAAASGGGKPPLAAKAGASAPSKAPEATAGAGGSKSTKVVPPASGVAEASKAARALSLSGKRVADFDTDITVDDYLGGSDEGQLAMVAPGAEIATAAIVPRARGEALGAGGEVSALAVVRDEAGAATRRLKGVTEALSQATEALSQVADFASRTASGALTTAVSAEVERLRTQHADAVREKSASDSKCRKLTDRVAALEREKADLRRQLAAERREANEAIAKEQAAQAEAKLARAEGNLAKELAKHLQERLTAPGEPREGGRGRDACGG

SEQ ID NO: 61485 - protein, 93 aa, Zea mays
  Coding DNA Sequence Number=SeqID_18110
MAAAGFKSDEDICGAYGPGARATDRGEILQRGRATCRHALTLDVTVDPDPDEEWCRGNRKGLPRLDGELCHVGNQLTTRVPVPALYRQWAYQL

SEQ ID NO: 61486 - protein, 99 aa, Zea mays
  Coding DNA Sequence Number=SeqID_18111
  Homolog annotation: Hit_ID=A2Z3G8; Match level="QueryCoverage=32%, HitCoverage=9%, E-value=2e-07, Identity=87%"; Hit description =Putative uncharacterized protein
MTVRPQLRPRRPFTALSQEEADLALARVLQERERAYMLLRMNGGGGEGSDYESSDEGSYEYDEDGEEDYEEELELSLVSVIGEQWRWSTRRIMRMIHRL

SEQ ID NO: 61487 - protein, 164 aa, Zea mays
  Coding DNA Sequence Number=SeqID_18112
  Homolog annotation: Hit_ID=Q6QP56; Match level="QueryCoverage=65%, HitCoverage=12%, E-value=5e-35, Identity=68%"; Hit description =Putative uncharacterized protein
MEDITVPYCLAIGIFTRSKSFIVAFGKDSNFFPCWLPALREEASDTAVHPIKEWKPKSTKKSPTIDADNSIADATSPSASNCESANTLNVNELSEFFSQTNLHEVEHVIIPKHLRVLEYEQTKLRFGSFTSGLDSEQVSSSTPQDTEQPEQLGGPVPILLIKNR

SEQ ID NO: 61488 - protein, 237 aa, Zea mays
  Coding DNA Sequence Number=SeqID_18113
  Gene Ontology: Mol. function=protein-tyrosine kinase activity; Cellular component=cellulose and pectin-containing cell wall; Biological process=protein amino acid phosphorylation
  Homolog annotation: Hit_ID=Q10M75; Match level="QueryCoverage=83%, HitCoverage=18%, E-value=2e-95, Identity=85%"; Hit description =Leucine Rich Repeat family protein, expressed
  Pfam annotation: Domain name=Pkinase_Tyr; Domain location=55-234; Score=-131.0; E_value=0.00022; Accession=PF07714.8; Description =Protein tyrosine kinase
MKPKMRQLMLLISMNQQHHHSILGVHSPDKLVGDLHLFDNLVVFTTEELSRAPAEIIGRSCHGTSYKATLDNGYMLTVKWLKEGFAKSKKEFSREIKKLGSVRHPNLVPLRGYYWGPKEHERIMISDYADATSLSTYLSEFDEQNLLSLSAGQRLNIAIDIARCLDYLHNERVIPHGNNKSSNVLIQNSTPSALVTDYSLHRLMTLIGMAEQISCEYFFKACHLHEKSWRKGGLQAK

SEQ ID NO: 61489 - protein, 141 aa, Zea mays
  Coding DNA Sequence Number=SeqID_18114
  Gene Ontology: Cellular component=chloroplast inner membrane
  Homolog annotation: Hit_ID=Q5QM65; Match level="QueryCoverage=96%, HitCoverage=42%, E-value=2e-50, Identity=75%"; Hit description =Putative non-green plastid inner envelope membrane protein
MAATAYDVYSKRAREVLLEASEKMKIQADKAQKDLSVIATEVSQEGQEYLVMAARNSPDSIKDITTTFRALGRLNWPSEYEDYHVGIPFGGFLNFMLTGSTYALRFGIVLGLALLTLGISSLRSHRESDRRPRLLVKGQAG

SEQ ID NO: 61490 - protein, 200 aa, Zea mays
  Coding DNA Sequence Number=SeqID_18115
  Gene Ontology: Mol. function=kinase activity; Cellular component =ornithine carbamoyltransferase complex; Biological process=amino acid metabolic process
  Homolog annotation: Hit_ID=Q6QP54; Match level="QueryCoverage=22%, HitCoverage=15%, E-value=1e-09, Identity=77%"; Hit description =Putative kinase
MALPVDVAGPRPRPGDVGAPPKLGSNLSSVVEAESEPLGRARRKSFGRGQGGVRALGSGEAEFVVFRGRARVRALGSGGAEVVRQRPGRSPSPGVGRGGVRRLPGPSPSPSLGVGRSGVRRLPGLSPSPSPGSGGAEFAVFRVLARVRALGSGGVEFVVFRVLARVQALGLGGAEFAVFRVLARVRALGRAERSSSSSGS

SEQ ID NO: 61491 - protein, 124 aa, Zea mays
  Coding DNA Sequence Number=SeqID_18116
MALPVDVAGPRPRPGDVGLLRSWGRICLPLRGRVRAPGTGEAEVVRQRPGRSPSPGVGRGGVRRLPGPSPSPSPGVGRSGSRSAEARAESEPWGSGEAEFVVFRGEPESEPWGRVERSSSSSGS

SEQ ID NO: 61492 - protein, 374 aa, Zea mays
  Coding DNA Sequence Number=SeqID_18117
  Homolog annotation: Hit_ID=Q10H93; Match level="QueryCoverage=94%, HitCoverage=46%, E-value=5e-81, Identity=50%"; Hit description =Expressed protein
  Pfam annotation: Domain name=DEK_C; Domain location=268-346; Score =34.7; E_value=3.3e-07; Accession=PF08766.2; Description=DEK C terminal domain
MASCGLDSQVKLSILKDIYSQFSGFVWHESDEKHRVKAKEKLDKCVKETLLDLCWTLGIPTPKANIRKEDIVSKLLDFIAEPHSAADSGLSDDQGSNSKKRKRGGESARKTPDSTPSRSRKKFINDSTSSKRQKKALEYDTDEDESMKSDSEENRDEDSDEAGDKQEGDYVSGKEKAGKFSEVKESSGKKKANTGSGHQSGPPKKIIRSPVKKVSSKIHEEKESPNNSAKVFSRKKKPTAEKEIKEKKSSGKKVTKGKGESVEAVLPSKDDLRKTITEILKKVDFNTATFSDILKKLGKIFRHVSTDFLWLMRDALTDFYLVDNHYKMDLAPKKEAIKVMIQDELTKLSEEDEGEGAGDTEKKQQQPQAKEIEA

SEQ ID NO: 61493 - protein, 98 aa, Zea mays
  Coding DNA Sequence Number=SeqID_18118
  Gene Ontology: Mol. function=kinase activity; Cellular component =ornithine carbamoyltransferase complex; Biological process=amino acid metabolic process
  Homolog annotation: Hit_ID=Q6QP54; Match level="QueryCoverage=87%, HitCoverage=29%, E-value=3e-11, Identity=48%"; Hit description =Putative kinase
MAPPVDVVGLRPRLGDVEAPPRSRSRSSLSSAAVVESEPLGWARRRPSAEVRAESEPWGRAKRSSSSSGAEPKSEPWVGRSGVRRLQGLSPSPSPGSG

SEQ ID NO: 61494 - protein, 163 aa, Zea mays
  Coding DNA Sequence Number=SeqID_18119
  Gene Ontology: Mol. function=protein dimerization activity; Biological process=proteolysis
  Homolog annotation: Hit_ID=A3BI96; Match level="QueryCoverage=55%, HitCoverage=18%, E-value=2e-10, Identity=44%"; Hit description =Putative uncharacterized protein
  Subcellular localization annotation: CTP_CleavageSite=27; ConfidenceScore=5.48e-01
MMRSPSRFSPSRFSPQSSLPLLRLNLRGNRLSGPTVPPPFSDEAEQGRAAQIETPSRPSRALHLHLGHPPARVEDELLPCLRQLCAPSFAACVGLHGMRQRIHQRPKLAFQELRTSEPVRAELDAIGIPYRWLVARIGVVATIAGAAARPIVALQADMDVLPV

SEQ ID NO: 61495 - protein, 59 aa, Zea mays
  Coding DNA Sequence Number=SeqID_18120
MVWSGPKIWFLAIIYFILECPQCLLPLVPATIPCNEIARTGLLSKPGSISINGNRDVGD

SEQ ID NO: 61496 - protein, 86 aa, Zea mays
  Coding DNA Sequence Number=SeqID_18121
  Gene Ontology: Mol. function=aspartic-type endopeptidase activity; Cellular component=chromatin; Biological process=chromatin assembly or disassembly
  Homolog annotation: Hit_ID=Q8W1D1; Match level="QueryCoverage=58%, HitCoverage=3%, E-value=1e-07, Identity=54%"; Hit description=Gag-pol
MNTETADLMEKAHKEPHPDFWTDEEGVLWFKNRLGVPKGEAREVLLDEAPNSAYSIHPGTLKQSPDLNGSSGADIGSGLPGPWLGS

SEQ ID NO: 61497 - protein, 180 aa, Zea mays
  Coding DNA Sequence Number=SeqID_18122
  Subcellular localization annotation: CTP_CleavageSite=57; ConfidenceScore=5.39e-01
MGGGLLAAASALRSSLPLFGPPEQKSSSSPLLERVTARLKGTPRPLFDEPRPGVAVSAWTEAELARKEDLVGRSLDGSSVSGTDAGVDLPRPRAGLMSSGDSWPRPRGDQPSRLLGSDSRRRPWQRWPGRGDDVVLQSGEPRTVSPSEARSDLAEGVVDAEGAAAPFNCPDPSLQDRITL

SEQ ID NO: 61498 - protein, 666 aa, Zea mays
  Coding DNA Sequence Number=SeqID_18123
  Gene Ontology: Mol. function=nutrient reservoir activity; Cellular component=extracellular region; Biological process=defense response to bacterium
  Homolog annotation: Hit_ID=P15590; Match level="QueryCoverage=76%, HitCoverage=89%, E-value=0.0, Identity=75%"; Hit description =Globulin-1 S allele precursor
  Pfam annotation: Domain name=Cupin_1; Domain location=108-235; Score =94.6; E_value=3.2e-25; Accession=PF00190.13; Description=Cupin
  Pfam annotation: Domain name=Cupin_1; Domain location=308-489; Score =161.7; E_value=2e-45; Accession=PF00190.13; Description=Cupin
  Pfam annotation: Domain name=Cupin_2; Domain location=139-218; Score =14.7; E_value=0.01; Accession=PF07883.2; Description=Cupin domain
  Pfam module annotation: Pfam domain module=Cupin_1::Cupin_1::Cupin_2; Domain location=108-235::308-489::139-218
MVSARIVVLLATLLCAAAAVASSWEDDNHHHHGGHKSGQCVRRCEDRPWHQRPRCLEQCREEEREKRQERSRHEADDRSGEGSSEDEREQEKEKQKDRRPYVFDRRSFRRVVRSEQGSLRVLRPFDEVSRLLRGIRDYRVAVLEANPRSFVVPSHTDAHCICYVAEGEGVVTTIENGERRSYTIKQGHVFVAPAGAVTYLANTDGRKKLVIAKILHTISVPGEFQFFFGPGGRNPESFLSSFSKSIQRAAYKTSSDRLERLFGRHGQDKGIIVRATEEQTRELRRHASEGGHGPHWPLPPFGESRGPYSLLDQRPSIANQHGQLYEADARSFHDLAEHDVSVSFANITAGSMSAPLFNTRSFKIAYVPNGKGYAEIVCPHRQSQGGESERERDKGRRSEEEEEESSEEQEEAGQGYHTIRARLSPGTAFVVPAGHPFVAVASRDSNLQIVCFEVHADRNEKVFLAGADNVLQKLDRVAKALSFASKAEEVDEVLGSRREKGFLPGPKESGGHEEREQEEEEEREERHGGRGERERHGREEREKEEEEREGRHGRGRREEVAETLMRMMLQVIRIVISIEKGTLSWCLRFTDASSGLEILGGKLYNALPPERSNASITRETSSKIVIVPDQMDPSEGCTRWRRKPQERGSGSGRARDDELQGLGKDA

SEQ ID NO: 61499 - protein, 178 aa, Zea mays
  Coding DNA Sequence Number=SeqID_18124
MATGKISADTVSGHPYPRLISDIRTRTRYPPWITNSIHIRYPRAARRVGSQRCREPGTEDKLRRESAMQGLRTSWRSALYAREPRREPGTRTGRGQRLRESGRGEMEWAVAVGVAEWERIEEERMRPENGLAERGLRWIAGSLEIGERLWPCGLWRCGPWACGTGVILTDIRIIGYGY

SEQ ID NO: 61500 - protein, 314 aa, Zea mays
  Coding DNA Sequence Number=SeqID_18125
  Gene Ontology: Mol. function=binding
  Homolog annotation: Hit_ID=Q6YZD9; Match level="QueryCoverage=45%, HitCoverage=24%, E-value=2e-51, Identity=70%"; Hit description =Nodulin-related protein-like
MNRIPQRLGVQFSASHGGSLTVTTVFLSFTWLHAGTKIGIQCARSVESIFNVIEAKKDSRIADKVIELADGAVRVKRRKGPWRGEDFTLMQALIKADFWILFFSLLLGSGSGLTVIDNLGQMSQSLGYEETHISVSMISIWNFLGRIGGGYFSEIIFKDYVYPRTIALGIAQVLMAIGHFNFAMAWPGTMYIGTLLVGGHVKSLNIKTDPPYLLSASDACLSTATIRGATIVDQIVNITPAEDYIYIPVTEQQLMVHEVTSRSSASTAELEYSSEANVSPNSRVYVSKAHDVMTNVIAKGSAMRQDAVNKAKTF

SEQ ID NO: 61501 - protein, 309 aa, Zea mays
  Coding DNA Sequence Number=SeqID_18126
  Gene Ontology: Cellular component=cis-Golgi network; Biological process=ER to Golgi vesicle-mediated transport
  Homolog annotation: Hit_ID=Q5QNC8; Match level="QueryCoverage=29%, HitCoverage=50%, E-value=3e-25, Identity=64%"; Hit description =Putative trafficking protein particle complex 1
  Pfam annotation: Domain name=Sybindin; Domain location=117-229; Score= 6.9; E_value=4.3e-09; Accession=PF04099.3; Description=Sybindin-like family
MAVREGPAGLSSRSRDDDRRGLSMDNFSPPLGGAWLRRLHIGAWRTRSEEEDPHSPGKRITRLQPPFPAGDPTRVSATDPGKRRLMQFFGGSSLTSIAPEATPAPAAPPGTGTGASAQVLYVFNRNGVCLLYREWHRPLRTLDPTQDHKLMFGLLFSLRSFTAKIDPTTHDNSTVEGLEEETELQACHGVSNDHFIEHYGVSIEHLQLQPTISAMPVGERNRKRAVARVMLCQGEKTGGEGGSVAMGSLWPLSLYPGVALSLRLQLSSSLWLPCLGGGDLLAPHLCHAGEEGKRGGGGDLVAGDEETED

SEQ ID NO: 61502 - protein, 112 aa, Zea mays
  Coding DNA Sequence Number=SeqID_18127
MGKNNKRKHDSQGLAAEVWTYIRAVERSGLEGSDESEYSSDEEDSDGGGEDEDGDDDDDDDEGGGGGDGDDSGRGGSKDGDGDGSRGGNGGGGSNRGSNRGGSGGGSNRASA

SEQ ID NO: 61503 - protein, 734 aa, Zea mays
  Coding DNA Sequence Number=SeqID_18128
  Gene Ontology: Mol. function=polynucleotide adenylyltransferase activity; Cellular component=nucleus; Biological process=RNA 3'-end processing
  Homolog annotation: Hit_ID=Q5G7K0; Match level="QueryCoverage=100%, HitCoverage=100%, E-value=0.0, Identity=62%"; Hit description =Putative polynucleotide adenylyltransferase
  Pfam annotation: Domain name=NTP_transf_2; Domain location=78-175; Score=28.6; E_value=2.3e-05; Accession=PF01909.14; Description =Nucleotidyltransferase domain
  Pfam annotation: Domain name=PAP_RNA-bind; Domain location=347-482; Score=182.2; E_value=1.3e-51; Accession=PF04926.6; Description =Poly(A) polymerase predicted RNA binding domain
  Pfam annotation: Domain name=PAP_central; Domain location=8-346; Score=440.8; E_value=1.9e-129; Accession=PF04928.8; Description =Poly(A) polymerase central domain
  Pfam module annotation: Pfam domain module=NTP_transf_2::PAP_RNA -bind::PAP_central; Domain location=78-175::347-482::8-346
MSKVKNNNGYHGVTEPISLSGPTEKDLMQTAEVEKRGFICVDQYLSDAGLYERQDEAILREEVLGKLDQTVKAWIKKATRISGYGEQFVHEANAKIFTFGSYRLGVHGPGADIDTLCVGPRHATRNEYFFRWLHDILAEMPEVSELHPVPDAHVPVLGFKINGVSIDLLYANLAHAVIPEWLDLDLSQDSILHNVDEQTVRSLNGCRVTDQILRLVPNILVMGFLGGINWAILVGRICQLYPNASPSMLISRFFRVYSKWKWPNPVMLCHIEEGYLGLPVWDPRRNYRDRGHQMPIITPAYPCMNSSYNVSVSTRYVMVQEFTQAFEICQAIDEGKADWDALFEPYPFFESYKNYLEVNITARNEDDLRNWKGWVESRLRTLVLKIERYSHEMILAHPYPKDFSDKSRPLHIFYFMGLWRKQTTQAQETEQFDIRGIVNEFKNTICAYQHRKEGMDIEVSHVKRKEIPLFVFPGGVRPSRTSRTTHKNSRAIPTRDVSADDQVGNLLGVASCSDAQHVPCKGSYMKQPEPDFAGGFQLPGSISLLPPSLPNKVVLNGSANFHAESIESEHPEHYQESKFVAVQNTVCLVVKQPNSLLPNSNNNSQLYGSDSSLNSSKRECAGSAANNLLKLSPAIPATPDELDELISYQTNQKDVNAENNLEIGSENNLEQICSLRPQESNNNLKRKANQELEPLELAVPSTGAAPQSTGTAPRKPLRLRLTTLGKPKPAEGTS

SEQ ID NO: 61504 - protein, 186 aa, Zea mays
  Coding DNA Sequence Number=SeqID_18129
MAACDGRAAVTTDVDGATVADGAELTAARQRTGARRWRGGGRTGERLRPRMAALWWTDGPAAADVDGPPAAATDGRPGLGMQIRVQQVIKPRPDVLSVNSCVLEMAQKIDVADKAISIMQESAKRVLKLDAANKVDVEDDFSSVSSFTWPQSPREPHPDDFMSIEEHFEKSEGVEYDSDQMPSYSD

SEQ ID NO: 61505 - protein, 557 aa, Zea mays
  Coding DNA Sequence Number=SeqID_18130
  Gene Ontology: Mol. function=inositol or phosphatidylinositol phosphatase activity; Cellular component=intracellular; Biological process=abscisic acid mediated signaling
  Homolog annotation: Hit_ID=A2XKC0; Match level="QueryCoverage=73%, HitCoverage=82%, E-value=0.0, Identity=75%"; Hit description =Putative uncharacterized protein
  Pfam annotation: Domain name=Exo_endo_phos; Domain location=246-512; Score=96.6; E_value=7.7e-26; Accession=PF03372.14; Description =EndonucleaseExonucleasephosphatase family
MRDDGSSKNKVSVFPDRLLHLLRTHVSVPVSDPVSVVIGAQKKLSWSKTLVRKWFNIKTKAKDFHSDYAAEEVGVQWRTSSFSDRDACKSKKSRTERLPKRNVERDGRVGNGFDGAYITNTQDYRFQEIVPLNAGNVLLTEDNGPARKWVSLVRKTLNNLDQQGSGVYNYHTPSPAPDPIVELNVDFERSSRRQRNSSFFHRRSFQSFNRSSRIDMMDPHSLVDRRFSVCDRISFGSRPSDVDTSMRCGGSSDDENIDEESPSGIFFPPMPCAYGAPLCTGSRYCLVASKQMVGIFLMVWVRSDIREHVKNLKVSCVGRGLMGYLGNKGSISISMSLHQTSFCFVCTHLTSGQKDGDQLRRNADVVEILRKTRFPHVHGAGDRKSPETILDHDRIIWLGDLNYRIALSYRSVKALVEMHSWKQLLEKDQLRIEQRFGRVFAGWKEGRIYFPPTYKYSYNSDRYAGDDMHPNEKRRTPAWCDRILWYGRGLSQLCYVRGESRFSDHRPVYSIFTAEVEIPSQSAAHFGGITRSASLLGLDELPPYQTYPRSYMDINFY

SEQ ID NO: 61506 - protein, 195 aa, Zea mays
  Coding DNA Sequence Number=SeqID_18131
MVVEESETGAESRESETGVFLVLVVEVKVSILWILTPAAEDEEAERQLEDHNEAMDARQALLGVGVTHLDPVDLEDFIASRIGTATDSTSPPASTTAFAGGGSRKRSKVWNNFDELTNLVNGRRVRQTTARDMVLSCIKDWELADAHLQHTVEEETRELEAEHENLYLDDPEEHKTVVGGGLVEWWLLADAHLLA

SEQ ID NO: 61507 - protein, 266 aa, Zea mays
  Coding DNA Sequence Number=SeqID_18132
MTSHGSSDDGNALTHTDGLAREGFPRILWEVLQGAGYTTPPQYAVQQFEKHRVPRCRVRMTLEPHPLQPGWRSLDSESFGYRAEDTIEAIALHGLTTFCGFHPLELATHPIGLFPAEREDEPMWKDRVEHAKDIWAIYPGQTAHLTVRCMNALYRLQVEQLSTDIQELEELVGTRENTIEVLEDQLINTQQQLAEANEHLDMHHQEIQDQGANEDVDIEGGDEPASSMAGRQRRGQNERVPPPPPPPPTLQELMAQQTSFLRQLAQ

SEQ ID NO: 61508 - protein, 243 aa, Zea mays
  Coding DNA Sequence Number=SeqID_18133
  Subcellular localization annotation: CTP_CleavageSite=40; ConfidenceScore=5.23e-01
MQGHSVPTHINRPHRFPGNRSGLTALAYNAPLTPTGRRAVTALVPTITGMGDHVSGRVRDKVCGQVHSVLPLTETVTAGKKKGGAVYRRRGRSGEGWGRLGETLAVTSRYGLSSGMAGIARSTRAGGCPRRRRVYRPNHGELVQSEGMVSFTGSRSDCVHKESKDGGVVYPVHVLRRGRELRRAWTGFSGEVNSDSLLGEPHGGVHSLLRGLDGVGNGSTGRSMVTEGLGGRGLAAHGQTATS

SEQ ID NO: 61509 - protein, 296 aa, Zea mays
  Coding DNA Sequence Number=SeqID_18134
MVSPVSCKRVIRVDVRAPFVGGRLGAQRHAQKYLRVPKLACQKSEKRVHLARLHAACMAARPFCPLVWARMGGRLGGPWSVLEKTQPAAPGGPGRTPSPAVTRDGDLQLDGGGKRAGLRPLPLPQPQGFSSPRLGRGECRVGVGPCVGGGPLLHSVMGGEAGIARGVRQLQRARSSAASGFGAARGAGVRHGSWKRFFRRRGGRDRPRADLQLLRPSARPCLTSFGVGGGLLAAAPALRSVLPLFDPPEQKSSSSPLLEQESLGPFGLVVWGSSSLVKETPRPPFGGPRPGVAISV

SEQ ID NO: 61510 - protein, 170 aa, Zea mays
  Coding DNA Sequence Number=SeqID_18135
  Subcellular localization annotation: CTP_CleavageSite=70; ConfidenceScore=5.26e-01
MDKGISIPHRRLLPRQSTLARAPACPAPRSSQTSAVARARAYKALPGFDYTLPRTLHTSPELAHRRLPVRSESAAAQPLCHHRPANRAIPNPVQPSEKPVHTFVRLPEQGIGVYFAGEASPRSPGALAPAGVRGPGSLEEMVAGITWSSTLPPGWTVEWDPASAEEEHEE

SEQ ID NO: 61511 - protein, 522 aa, Zea mays
  Coding DNA Sequence Number=SeqID_18136
  Gene Ontology: Mol. function=hydrolase activity, acting on glycosyl bonds; Cellular component=extracellular region; Biological process =cell wall organization and biogenesis
  Homolog annotation: Hit_ID=Q5ZDR5; Match level="QueryCoverage=81%, HitCoverage=54%, E-value=1e-160, Identity=64%"; Hit description =Putative polygalacturonase PG2
  Pfam annotation: Domain name=Glyco_hydro_28; Domain location=130-489; Score=292.1; E_value=1.1e-84; Accession=PF00295.8; Description =Glycosyl hydrolases family 28
MRPAPETSTRRPQLRRRRPVPLVTVAVSLALISLACLPVFADASRALHRDREEHRRQHHRTEDKKSRVSLPPDADGDSPPEPPDSGGAPPPADDSDCGNVFDVRAFGASGDGSCVDDDTAAFRAAWKAACSSDSAAATLLVPSDGVFTIASTIFSGPCKPDLTFQIDGVLMPPDGPASWPATDSRKQWIVFYKADRLTLAGEGTIEGNGEEWWDLPCKPHRLIRFFSSNDVTVCGLRIENSPQFHLRFDDCERVRVDGLFVSSPASSPNTDGVHVENTKSVQILNSRIYNGDDCVSIGAGCSDVHVENITCGHGHGIRYLSVCHSLTHQRASMARGTVCSEPDAASCCCHPRSIGSLGVHNTHACVSNVTVRNVRILDSDNGVRIKTWQGGAGAVSAVEFTGVQMQNVKNCIVIDQYYCLGHGCANQTSAVRVAGVAYRDIHGTYNPQAGAPIRLACSDAVACTDITMSGVELLPAGGDDGALLADPYCWNAYGVMETLTLPPVYCLLEGSPESLQDPLTSC

SEQ ID NO: 61512 - protein, 302 aa, Zea mays
  Coding DNA Sequence Number=SeqID_18137
  Gene Ontology: Mol. function=binding; Cellular component =mitochondrial inner membrane; Biological process=transport
  Homolog annotation: Hit_ID=A2WPC9; Match level="QueryCoverage=81%, HitCoverage=74%, E-value=1e-124, Identity=90%"; Hit description =Putative uncharacterized protein
  Pfam annotation: Domain name=Mito_carr; Domain location=129-221; Score=74.2; E_value=4.3e-19; Accession=PF00153.18; Description =Mitochondrial carrier protein
  Pfam annotation: Domain name=Mito_carr; Domain location=33-117; Score= 33.0; E_value=1.1e-06; Accession=PF00153.18; Description =Mitochondrial carrier protein
  Pfam module annotation: Pfam domain module=Mito_carr::Mito_carr; Domain location=129-221::33-117
MAAAADTSEASAAGIALAEANINWERLDKTRFHVIGAILFTAQQGALHPTAVVKTRMQVAEGGLAHMSGFAVFRRILRSDGIPGIFRGFGTAAVGALPGRVLALTSLEISKEMTFKYCEHFDLSEASQIAIANGIAGLMSSICSCSYFVPLDVICQRLMVQGLPGMATYRGPFDVINKVVRTEGIRGLYRGFGITMLTQSPASALWWSAYGGAQHAIWRSLGYGNDSQTKPSQSELVVVQATAGTIAGACSSIITTPVDTIKTRLQHMISDPFVSVLRQSSDILAVLHFHDNPVYEGYGQLW

SEQ ID NO: 61513 - protein, 147 aa, Zea mays
  Coding DNA Sequence Number=SeqID_18138
MGKNNKRKREPTPPSEEFGDSEYSEEEFSSEPEGSPAPVSPPASSDDSDDSQGIAAEVWTYIRAVERAGLEGSDESEYSSDEEDSDGGEEGEDDDDDDDNDGGSSGGGDGDGRGGTKGGSGGSGDSTRGSSRGSTRGGGGGRGRASG

SEQ ID NO: 61514 - protein, 390 aa, Zea mays
  Coding DNA Sequence Number=SeqID_18139
  Gene Ontology: Mol. function=catalytic activity; Cellular component =integral to membrane; Biological process=vesicle-mediated transport
  Homolog annotation: Hit_ID=A2XU13; Match level="QueryCoverage=41%, HitCoverage=18%, E-value=7e-60, Identity=73%"; Hit description =Putative uncharacterized protein
MDKNNTPLVDVQGMKERTSKDMVKDLEAWKASKDVRIKAGISPRGELTKPEGSFCNLNLRFKVRLPPEIVLNIIIDPENKRVFKNIKGVLFSGSSLRDTVVKLTMITCVIDGRPLAEGLDDGQDQKDTDFYKQQAKLLFKNLSKGHHEASRMSIETWPYYFQYPCTIYDPYMYMYMYVSIGPLRCWSGGLCLSRSIGDQDVGEFIIPDPYVKQIKLSNAGGRLIISSDGVWDALIAEMTFKCARGLPPEAAAEQIVKEAVEAKGLRDDTTCIVIDIISPYKPKRTIQSQRTPGKGLVLLKNFFLRKTTSDSLTLPDEDNYPEPDLEEVFEDGCPSLSRRYHWNSVFSLTNNDLVAPEKEGVMIPQSVKCAGSGTWNHQAVVLDSLKTKYL

SEQ ID NO: 61515 - protein, 53 aa, Zea mays
  Coding DNA Sequence Number=SeqID_18140
MGLDVCGLLCQGGDEDDGFGYDYGNGCPRCNHCSGEDEVMEEDFQEFQEYDEF

SEQ ID NO: 61516 - protein, 107 aa, Zea mays
  Coding DNA Sequence Number=SeqID_18141
MLAAAATITVTVRPLEANVAGGGAFPSPRISISDEMTTQASESFATLQCQLLTRCSLAVWLFACGRDGRVQRRVPTAEGEPEAATAAPRAEAGDGAAAVTLAQETRS

SEQ ID NO: 61517 - protein, 343 aa, Zea mays
  Coding DNA Sequence Number=SeqID_18142
  Gene Ontology: Mol. function=4 iron, 4 sulfur cluster binding; Cellular component=cytoplasm; Biological process=metabolic process
  Homolog annotation: Hit_ID=Q6YZX6; Match level="QueryCoverage=72%, HitCoverage=55%, E-value=5e-50, Identity=70%"; Hit description =Putative aconitate hydratase, cytoplasmic
  Pfam annotation: Domain name=Aconitase; Domain location=3-279; Score=- 191.9; E_value=7.6e-05; Accession=PF00330.11; Description=Aconitase family (aconitate hydratase)
  Pfam annotation: Domain name=Aconitase_C; Domain location=249-343; Score=-0.1; E_value=0.0014; Accession=PF00694.10; Description =Aconitase C-terminal domain
  Pfam module annotation: Pfam domain module=Aconitase::Aconitase_C; Domain location=3-279::249-343
  Subcellular localization annotation: CTP_CleavageSite=46; ConfidenceScore=5.62e-01
MATLPSRPGTSSSFGPVPSASSGVSAGHLDAVKPVGRVRVISAPLLQMAKPYLVVASLPLQTPLSSWSVLPTTRLIRKHGAIGKFVEFYGVGVGELSLPARATIANMSPEYGATMGFFLVSMIEAYLRANKMFVDKHEPETERVFSSYLELDLSEVEPCVSGPKRPHDRVPLKEMKSDWHACLDNEVGFKVKPWVKTSLTPGSVVATEYLKHRYRCCCGAVSYYLLNLGDSITTDHISYSGKIPEGTPAAKYLLEYGVEPKNFSSYGGRRGNNEVVMRGAFANMRIVNKLLNGEAGPWTIHVPTGEKLYVYDAAMKWKEMLSVLPNYRVKEYMKKLYKTSVQP

SEQ ID NO: 61518 - protein, 187 aa, Zea mays
  Coding DNA Sequence Number=SeqID_18143
MREPSPAEGACARIEFGSGRCSTGCWQETGAGRRLVPLEHPKRFYIGMTFSHGADNKFLGAEDFPPTAPQPLHVRFCKDIELQGGKLELPKRLLLTYKPEESEDIPEPASVEEENAPVEEPVLVPPVTEVVSPPKTEVADTGDLLMGLPQLVTLHFKIRGLILHDGNSPLLPHRATRLHLRLSVNCL

SEQ ID NO: 61519 - protein, 215 aa, Zea mays
  Coding DNA Sequence Number=SeqID_18144
  Subcellular localization annotation: CTP_CleavageSite=42; ConfidenceScore=5.28e-01
MPPPGRRASPAARLPLEISPAPCPQSRDAPTASPTVTAASILSRAVSALQGLIDHEPLRSMLVSGMRWRNTCQVSPRHDRAKTIDILVNDLKVVEFDDLEEDKFLNAVVKASCFSPQQARTFVLERRRRSPPKQPLYRNTHLHRPHSYQRPKLYPKSGLESEELLKSRGTRSTPKGTFIGHNLQNSMNTRYSGVYEGFSNITFLVHDFNVVHKNQ

SEQ ID NO: 61520 - protein, 103 aa, Zea mays
  Coding DNA Sequence Number=SeqID_18145
MSILANRWTGKRWEYLFFFYNKLREGVFRTFGISKPSYYSWIELVMKKRSSTAKGLLLGVLFSAKGLEDIDHRQSDAEDFPFSLPKLLKTKISSGSNDAFENK

SEQ ID NO: 61521 - protein, 268 aa, Zea mays
  Coding DNA Sequence Number=SeqID_18146
MPPCDVVGPSPGSEAPPRSRSSLSSEVEVESEPRVGRGGDRCLRPGLSPSPRVGRGGVRRLPELRPSPSPGVGRGGSSSSSGAEAESEPWGRARRSSSSEAETGAEPWGRARRSFPWRPRPDLAAVSLTLSSGTAVGAMQAALSSCQAILALNAPAIRSVGVVVWPRLLLGEDWASGEPKLCADGGYQLRLGVLGPPSLRTEREDGQGQTRLFAYAPASPFRKEEGESAMLPSEGAEHGVSSELLTGLDASLWWDSVTESFPLVSEMS

SEQ ID NO: 61522 - protein, 272 aa, Zea mays
  Coding DNA Sequence Number=SeqID_18147
  Subcellular localization annotation: CTP_CleavageSite=64; ConfidenceScore=5.21e-01
MPTHPRSVPMYGPLRGKVGSLLRSWLKSIGPSGPTSIQSCVDLPYWTSLPGPRRQSRPTLAQISESGLWVQSLPLGAISALLDTESGPRAISLPRPTLSSTSGEFSASPEVGLGYLLHRESRWWPLDQLWYTSKNCSANASGRLPPRPSRALTLINATRNHDVTPHRDVDGLRKQALAYTPALLQQLRHSGASNISFTPSAESRALRCSNEISCLCQLAHHLDSGHATLFTSWLGPSLQTPTVDTPGRGLSRETLLVPAKTLDGRLSSSTQA

SEQ ID NO: 61523 - protein, 379 aa, Zea mays
  Coding DNA Sequence Number=SeqID_18148
  Homolog annotation: Hit_ID=Q6QP51; Match level="QueryCoverage=16%, HitCoverage=30%, E-value=3e-14, Identity=58%"; Hit description =Putative growth-regulating factor 1
MNGGNHPHGGEPSFPQLLQGLQKGLEILMSVARGPVAPVIGGGGHHSLRKRREPPVVISEIKPPALPPFVRRREDGGDVLQLPRLPQLEDAAAGPHRHADLSFPRQRGEKLRGEEMGPQVLVRVNPQVSFTNRCEDVGLRDGVGTEVVQLHPIDVQNRPHKMACRHSEPPLVKGNEAHHIPRRRGRGGSARRGHPLRLRVTGERAKQTLSNKGLQVIHRDGRERPQVARRNNGHPVGHHQAEEVAAKRTGDRERGYSERDPSPRRKQAPSPPTDQRFEGWPLGRVQQPPQSTRAPRPLLVRGSKAGPSEGFNGRLRPLGLRTHYWSEVQRPAPRKGSTAASGHSGSAPTTDQGFVGWPPKGSTAASDAERGMTLGTFDT

SEQ ID NO: 61524 - protein, 105 aa, Zea mays
  Coding DNA Sequence Number=SeqID_18149
MEARAHASCNRRAGCYVQATAPPLAPLPRLLDYGTSTATRGNPAYDPAVPARRNGQYGQKWAGSNGGGRRAEAAVMSSAKLTDRERGIPQKGSFSVKETGPEPPY

SEQ ID NO: 61525 - protein, 59 aa, Zea mays
  Coding DNA Sequence Number=SeqID_18150
  Subcellular localization annotation: CTP_CleavageSite=19; ConfidenceScore=5.17e-01
MAPPATHPPPSGSSQDKTAGAMDGSRGSTTVGAQLDMSNIVYGTSRLRLHHRLSNTHDP

SEQ ID NO: 61526 - protein, 158 aa, Zea mays
  Coding DNA Sequence Number=SeqID_18151
MMFMHRCNNASHVIDKVWEKNNYRVVNSGGAALSRHASHRRQPRRHHLRAYGRPHLPLCLRVLQQNLLRPPLPQAAPPTSSATAARDLAIFSEIALENGHTLLLVMVETYDGDEEVLGTTTTETYKALIVQRALSATASDDDNRQCHNLFNMFLIVKD

SEQ ID NO: 61527 - protein, 42 aa, Zea mays
  Coding DNA Sequence Number=SeqID_18152
MAGGIELARAKERGLAGEEIWSQEIRSVSLPKPKANPSFCHA

SEQ ID NO: 61528 - protein, 132 aa, Zea mays
  Coding DNA Sequence Number=SeqID_18153
MGKNKKGGSSSHHSGDKRKREPTPPSEDFGDSEYSEEEFSSESEEIWTYIRAVERAGLEGSDESEYSSDEENSLDSSEEGGGGDGGDDDDDGGDGDGGGGDGKSGDGGGKGGSDKGGGGSKGSSRGNNKASG

SEQ ID NO: 61529 - protein, 70 aa, Zea mays
  Coding DNA Sequence Number=SeqID_18154
  Subcellular localization annotation: CTP_CleavageSite=14; ConfidenceScore=5.32e-01
MAATTPTAVSPPFRSSSRAFRRGWRLLCLSRGFGPETSRWATWCFGCDKMPEGGTSSRLPRKGRSSSPRF

SEQ ID NO: 61530 - protein, 264 aa, Zea mays
  Coding DNA Sequence Number=SeqID_18155
MTWSVRALGRARRRLLRGRGRVRAPGRARRGPSSEAKAESEPWGRARQTEAESEPWGRARQSSSSSGVEAESKPWGRARQSSSSSGAEAEPEPWGRARRSSSSEAETGAKAEPEPWGQARRSSSSEAETGAEPWGRARRSFLWRPRPDLAAFSLTLSSGTAVGATQAVLSSCQAILALNAPAIRSVGVAIWPRLLLGEDWDSGELKLCADGGYQLRLGVLGVQRKKEKMARLADLQKKINEAAEECTQDHEEYLQAYVRRFLRL

SEQ ID NO: 61531 - protein, 67 aa, Zea mays
  Coding DNA Sequence Number=SeqID_18156
  Subcellular localization annotation: CTP_CleavageSite=47; ConfidenceScore=5.71e-01
MNPKSMPQGTPKTHFSGLSFTPFALRHRNVASRSERRSEAFLVLTTMSSTVGKPFGMEYLFDEPCRQ

SEQ ID NO: 61532 - protein, 345 aa, Zea mays
  Coding DNA Sequence Number=SeqID_18157
  Homolog annotation: Hit_ID=Q5JLN0; Match level="QueryCoverage=32%, HitCoverage=29%, E-value=3e-38, Identity=62%"; Hit description =Lysine ketoglutarate reductase trans-splicing related 1-like
  Pfam annotation: Domain name=DUF707; Domain location=84-345; Score= -20.3; E_value=1.5e-07; Accession=PF05212.3; Description=Protein of unknown function (DUF707)
MASSARGSGTLAATWSSGRQFEAHIVRGTGRAVAPRGPLGPPALGETKAIDGRHGAGRPVLTLQAQNGPQDRRPPAPKIKGAKPLLDPAQAHTDPAPIAPRNPLVWKPSPPTSHLLPRNPLLALNVVPPAIPPLPAPASRAAPALPSATPSISPSTSPTLPPTMGSAISDRHIRDLAHLASHDGEPHPRPPARQAWISRNSQRAAANGAQQPLIPSPRSPPLPHPSRRRPAPIHHQLTARAARSGGVHRRYYKTSGHGRCYGNNMGPPCAGWVEMMVPVFSRAAWRCAWHMIQNDLIYAWGMDYKLSYCAQGDRSRNVPKLGDGGKATMTAATSALGTADRLAVR

SEQ ID NO: 61533 - protein, 105 aa, Zea mays
  Coding DNA Sequence Number=SeqID_18158
MVKAAMSGKLKEMDWEKKIKICELVEQDPGGLQAEPLTFGNSQRRSAIIHRSVRCTTGQCPRSNGYFARNGRMQRIKCAPARAEEQSTRGWHTGQPTGPVRCTTG

SEQ ID NO: 61534 - protein, 127 aa, Zea mays
  Coding DNA Sequence Number=SeqID_18159
  Subcellular localization annotation: CTP_CleavageSite=45; ConfidenceScore=5.66e-01
MRTRCRSRSAARRCPASSSTPQSSSTLSNLVCVATSILPARVFPLCSNVGARGEDQALSRQSRPSVSIKDRTVDWPVVVETLQLATYPGMGQGKLESGYSIREETIAHWEWRDGGSIMYPPGTAHAW

SEQ ID NO: 61535 - protein, 131 aa, Zea mays
  Coding DNA Sequence Number=SeqID_18160
MSANCSVVGTLRTGKNAGSDTLADEVQVDLHMLRALMLHGVGCDSSPKLSGPRAPILALMASGGCARVPGDKTLSTQLLSKTYPTKERTLKGMLTDWESRKACYQLILKPSFISLVRLLPESIFAWSSSST

SEQ ID NO: 61536 - protein, 85 aa, Zea mays
  Coding DNA Sequence Number=SeqID_18161
  Subcellular localization annotation: CTP_CleavageSite=24; ConfidenceScore=5.16e-01
MIPSLAPPQSPPSSWLRRVTFLLVLSLAQPNQQGLQDFFAELLTLARPSGTTTFPDWEGEEGCREAVEVPNSSRLSSCKIREETV

SEQ ID NO: 61537 - protein, 108 aa, Zea mays
  Coding DNA Sequence Number=SeqID_18162
  Gene Ontology: Mol. function=zinc ion binding
  Homolog annotation: Hit_ID=Q6ATM9; Match level="QueryCoverage=96%, HitCoverage=23%, E-value=4e-14, Identity=40%"; Hit description =Expressed protein
MDYLIEHKAREKKIVNADKGKIKSQTELEPREKGTLCTSDEDIGCKSEMGSLNQNKDVILTMVSTMQYSRRPAPTNCWRGCFHVFNAGEKLNLVEFKAYFPSSVIQSY

SEQ ID NO: 61538 - protein, 90 aa, Zea mays
  Coding DNA Sequence Number=SeqID_18163
MAAIRHNIIKPRLGHVSKKTLVEEPHQVPSVYKRSPRSLGFNFDTPPRCTRGDSSGEARGGGGSRDARRQLPEGRVVAVAPPGTRKAAAH

SEQ ID NO: 61539 - protein, 137 aa, Zea mays
  Coding DNA Sequence Number=SeqID_18164
  Homolog annotation: Hit_ID=Q6J9V9; Match level="QueryCoverage=53%, HitCoverage=25%, E-value=4e-16, Identity=63%"; Hit description =Putative uncharacterized protein
  Subcellular localization annotation: CTP_CleavageSite=46; ConfidenceScore=5.06e-01
MATARGIDPFLKAALPTRILKRHGQSLHRCALGSSPYDTGAGSHTSCKLTRNGRSQTTAREAGTGKGDISKGILLREGSGPRALLLIRGSKAGPSEGFDSRPRALGLQALLLIRGSKVGPSEGFDSRPRALGLRAHY

SEQ ID NO: 61540 - protein, 243 aa, Zea mays
  Coding DNA Sequence Number=SeqID_18165
MMTTSSVVGRSKPGCGLCPALSFKDLHHPRCGGGRAEPGFYLPHGLAGRLFLQHSRERALTGLVEGANFDNVGPVGRKRRQLQRAWLAGLAGSVAASDAASYRLIRAWPSVHRTGDCCSVRTGGSSKTSYVAWAAFVFLDCLVLTPARRLRAEVATVVGAEVVVARGGFSADETVGATRGQTSDSLALMNLRPLCDEPKPEVAVPAWTKAESARKEASSAREHVASLAEEVQQRRLELGQVVR

SEQ ID NO: 61541 - protein, 96 aa, Zea mays
  Coding DNA Sequence Number=SeqID_18166
MWPSGQFREKDIDANDVADLLPRPKYKKTEEVNQVFCDNAANELQGIPRSTTCRSCPSTSGAPTSPTPSTPPSLWSWETSQMAMGSQSPISRGEFL

SEQ ID NO: 61542 - protein, 86 aa, Zea mays
  Coding DNA Sequence Number=SeqID_18167
  Subcellular localization annotation: CTP_CleavageSite=80; ConfidenceScore=5.12e-01
MGPMGVLLTLPSRSCVQVQVLVKAASWEPFPTLLGMLASSLDTSSLHPTGARYGLLCTSRVALKASSKRLASGGDHLSVCAMARRP

SEQ ID NO: 61543 - protein, 291 aa, Zea mays
  Coding DNA Sequence Number=SeqID_18168
MEDDSWAWDLVPETGSLLSVEMKRRTTAGADWSAAFDRNEEAYLLRAVACSSRGGDEEAHLPRAVVCSSLGATMALLDPPERLQPEVALNLVRNPLGWGVLAFARRIRVGVSPHDDLATEEFVFFVSKLPSGLALPNPSFLVLLLEGLGLQPLHVTPCFILQAAIIAYLRGIEPCCGSISLALMALAPPSTALPAAKQSVAARPPYGGRSRRSAASAAPPALPPGESYKTSYAVVVAGPCLDGLVLTPVGGRGLGPPRHGAHAEVVATAGKPLGASFQRDPAGAEQSIPVE

SEQ ID NO: 61544 - protein, 85 aa, Zea mays
  Coding DNA Sequence Number=SeqID_18169
MSGVHRTVRFALFTPPLGDFQLVTPYCKRIHPPWAQDNTKAAVSPYCSPPFVSHLAPTHLGWDTQRQFTRRSRDPSGSKRRHSYT

SEQ ID NO: 61545 - protein, 218 aa, Zea mays
  Coding DNA Sequence Number=SeqID_18170
  Subcellular localization annotation: CTP_CleavageSite=51; ConfidenceScore=5.48e-01
MYSRSLMHRVFPPSKPPDGGYPPSFRLVVGGTKLRGSWYLSAIVRLQGFSSASPAVPLRRRSPETVTTSPWVGRSKPGCDLGPTLSFKDVHHPRWGGGRAEPELYLPRGSVGQPLLRRSSERALTGPVGGSDFDNARLVDGGRRQPQRVGLVGLAPGAPSCRKAAAAPCAREDRPRCRALLGRRSCSGAVLFAQVRRLRAEVGAPLVREDLSGDLPEG

SEQ ID NO: 61546 - protein, 722 aa, Zea mays
  Coding DNA Sequence Number=SeqID_18171
  Gene Ontology: Mol. function=nucleic acid binding; Cellular component= mitochondrial matrix; Biological process=DNA duplex unwinding
  Homolog annotation: Hit_ID=A3AUI1; Match level="QueryCoverage=69%, HitCoverage=73%, E-value=0.0, Identity=72%"; Hit description =Putative uncharacterized protein
  Pfam annotation: Domain name=DEAD; Domain location=236-368; Score= -35.5; E_value=0.019; Accession=PF00270.20; Description=DEADDEAH box helicase
  Pfam annotation: Domain name=Helicase_C; Domain location=426-512; Score=62.5; E_value=1.4e-15; Accession=PF00271.22; Description =Helicase conserved C-terminal domain
  Pfam module annotation: Pfam domain module=DEAD::Helicase_C; Domain location=236-368::426-512
MAPPVDVAGLRPRLGDVEAPLKPKSSLSSVAEVESEPLVRARRRPSAEARAESEPWGRAERSSSSSGAEPKSEPWVGRSGVRRLLSPTRVRALGRAERSSSSSGAEPESEPWVGRSGVRRLLGLSPSLSPRSGGAEFAVFRGLARVRALGRAERSRSVERRSDGGHFGSVGWGARVRIKLYADGGYQLRIRSLEEFCASNLADELRKPRSLMAADDLTARDLMMAAADLTAPQTWYPSARAMRRRVVYHCGPTNSGKTHNALASFSAAKSGVYCSPLRLLAMEIFDKVNATGVSCSLRTGQEVKEVAFASHLACTIEMVSTEEIYEVAVVDEVQMMADPVRGSAWTRALLGLRAEEIHLCGDDSVLSVIRKICADTGDDLLVHQYERFKPLVVEENTLRGYFQNIRSGDWVVAFSRKKIFEIKLAIETYTHHKCCVIYGALPPETRRQQAELFNQEHNEYDVLVATDAVGMGLNLNIRRVVFYTLIKYDGEKTASVPASLVKQIAGRAGRRGSAYPHGLATTFKYDLCYLTRCLEEPLEEAEKVGLFPTFEQLEMFASQFPELTFNNLLNKLCDTCRIDDTYFICQHDNMKKVADMLEGVHGLSLKSRYGFCLAPVNTRNSEAMDHLLRFANNYSESHYVTMGLEMPSGYATNDTQFLDLETKHQVLSMYLWLAQHFGEDNFPHVQEAQTMSTNIADLLGQSLAKGCWKPQLRYQFIGQPPE

SEQ ID NO: 61547 - protein, 50 aa, Zea mays
  Coding DNA Sequence Number=SeqID_18172
  Homolog annotation: Hit_ID=A2WY81; Match level="QueryCoverage=94%, HitCoverage=14%, E-value=2e-14, Identity=76%"; Hit description =Putative uncharacterized protein
MDFEELCSDFECISSPYVESIMRQVARDIFELREDNRAFSCYAVPVKLLV

SEQ ID NO: 61548 - protein, 366 aa, Zea mays
  Coding DNA Sequence Number=SeqID_18173
  Gene Ontology: Mol. function=protein binding; Biological process =apoptosis
  Homolog annotation: Hit_ID=Q8LJW5; Match level="QueryCoverage=92%, HitCoverage=86%, E-value=7e-27, Identity=47%"; Hit description =Putative uncharacterized protein SB234M12.19
  Pfam annotation: Domain name=BAG; Domain location=140-211; Score =11.8; E_value=0.03; Accession=PF02179.7; Description=BAG domain
  Pfam annotation: Domain name=IQ; Domain location=119-139; Score=21.7; E_value=0.0027; Accession=PF00612.18; Description=IQ calmodulin -binding motif
  Pfam module annotation: Pfam domain module=BAG::IQ; Domain location =140-211::119-139
AEENSEGRKLEAATAMASRRFFVYDPYEYEYTTAPHYLYEPYYQPQSVPTRSRRARGIFAGAGAESAAAEARRAPRERETHTSFSIPVHGSDSDSEPERERKAAGSRARPMAPPAMSAEKAAARMQAAARGLLARKSVRAVRQVEREAEQVRAKIACEEESPLAEPSARVAVWEALMRMLLRLDTVRGARDYRRRVTKRVLALQDAVDALETKPAPATVSVAEETPEAAAVEVAEESAVVAPKLPDAVQEKEAVDEPEGSEAEGELEMLAEEHEHTSPVATTSDDQEPPRKEPACPLETTTAAAAGAASDGVDARKLMQMVAALCEQSAQQCALIGTLVERVDALERNVRVRLMEDAGSAGGGPRS

SEQ ID NO: 61549 - protein, 192 aa, Zea mays
  Coding DNA Sequence Number=SeqID_18174
  Gene Ontology: Cellular component=integral to membrane
  Homolog annotation: Hit_ID=Q67X40; Match level="QueryCoverage=95%, HitCoverage=97%, E-value=3e-55, Identity=59%"; Hit description =Integral membrane family protein-like
  Pfam annotation: Domain name=DUF588; Domain location=27-176; Score =194.9; E_value=2.1e-55; Accession=PF04535.3; Description=Domain of unknown function (DUF588)
MTKDVVIEHGESSKAPLVAPVAAGGVSRAVSVADVFLRFLAIVATIGSAVSMGTTNQTLPFFTQFIQFEAKYSDLPSFTFFVAANAVACTYLVLSIPLSIVHVVRPSARYSRLVLVFFDAAMLALLTAGASAAAAIVYLAHKGNVRANWFAICQQFDSFCERISGSLIGSFAAMVLLIVLIFLSALALARRH

SEQ ID NO: 61550 - protein, 651 aa, Zea mays
  Coding DNA Sequence Number=SeqID_18175
MGTCAAPGGRMSSPELRESSARMLEVTGGRWPKNLPIPWAEGEDMSTSRIARGLRIFPYGQNIAAVVSAVMNKDHQDAAQKRRAVIRIAEPRREAKKARGSVKAAAPSSSKPTTAAKPAAPGSSKASASAKTAVAGGTKPPPCEAAKGWELPSPGKPAAAKDVAGSMSWLSQQLREVSQQLSQAAEFADRVASGALTADVAAEVERLQAQHADAVREKSAAESKNRRLAEKVAALEADKTDLRRQLAAQAEAKVARAEGSLASKRAEEWEARFNALRGRMDKAEASTRSEVERTLAQLVDSYRELGARTADFEVPVREADLHFLEWLQEELLVLPTIVEGFMSFASLVTCEGAMNALSREGYRHYEVFDQSDENFECEIFKAEDPVVKQSAGALFDRMWGAHGREAMERAEDVDDLGDLAGAPPEAAEVNPVLPSDAGEGPSAVPVPTVAGKDPVSAPAPTVEDALKVVAEPAVEDPTAAAGPSQGFGPAHATATDNANFVAASTLVAEDDSDDSVSKFFESDDSGSSVVWTEEFSDEDLDYFAALDVAAAEASPRVMGAEALPGASAGRRRRRAVAKRRVSEVSRSDRRHCGEVEGGRLRVDGAGKRELLSSPAGASLGEGELRNLFEGEELRMMLFNYKEMGIIPKVEP

SEQ ID NO: 61551 - protein, 170 aa, Zea mays
  Coding DNA Sequence Number=SeqID_18176
MAHDEEVEDLGGLDSTLPKASGVELSPPSDVGEGPLVTPTLTGAGEDPVPAAAPTGEDTSMVVPSFGPAQATAAGNTNFVAAATVVPADDNLFGSGSECFESDGESGSLFSWTEESSDEGLDYFAALDVAAAVSLPRVGVGEAADLPSVRTKYRRRRVVSKHSLGEVSRS

SEQ ID NO: 61552 - protein, 126 aa, Zea mays
  Coding DNA Sequence Number=SeqID_18177
MDICVDDYRVGGVMMFDAHTGQGLVGSDAGQLAVVPAPVVATPVALVIEAKGTSQDPWSRFCASGKISSAAAAEDVAGSVSQQLKHATQQLKHAAAFADHVASGALTSEFAVERQRLEGRIERLQA

SEQ ID NO: 61553 - protein, 111 aa, Zea mays
  Coding DNA Sequence Number=SeqID_18178
MQAAQQERADNMVAHASTRLATMENVTKVFESWHPRMEGSVETIQTSVEAVRSELARVSHILERDESNNRAATGQFKSKAQCPPAAMPYVDDPGQQGYVPHPREFGFGESL

SEQ ID NO: 61554 - protein, 78 aa, Zea mays
  Coding DNA Sequence Number=SeqID_18179
MVKEDEKVLKKRKSTPEPKVTALKKRKAKSPEPKAAAEANISAEAAAAAEAANLESTLSRIDKLLLDMPTEEIVAAAG

SEQ ID NO: 61555 - protein, 589 aa, Zea mays
  Coding DNA Sequence Number=SeqID_18180
MKGPFGAVRMSSGRDLVEEFVGYGVWPLAHGWALGEVCPRQMPSRGGMLVRSPAFALDLHGRDPAAFVREAEDGAARIVGRYVPKTEGPRSWDIRGSNDKLNRVFELNRLPYDCYPGEDTADRRRKKPMGGTEEGPSQEAVPATKKRKLGTILGRKGVSDNFAVELMGTCAAPGGRMSSPELRESSARMLEVTGGRWPKNLPIPWAEGEDMSTSRIAHGLRIFSYGRNIAAVVSSVMNKDCQDAAQKRRAVIRLPDPRREAKRAWGSVKAVAPGGSQPTLAAKPAAPGSSKVPESTKAVVTDRTKSAPGGAAKVRELPSPGRRVADFGMNISVDDYFVGSGEGQMVVVPPVVAATASTAVVGVRGDAFCASGEISSAAAVKDEVGTMSCRLREASQQLSQQLRQAADFADRVASGALTADVSAEVERLRAQHADAVREKSAAESKNRRLAEKVAALEAEKTDLRRQLVEERREANQAIAEAQAAQAEAKLARAEGSLASQRAEEWEVRFNGLCSRVDKAEASTRSEVERTRAQLVDSYRELGRGLLTSRCPTERRAFASSSGCKTSRWYSRPSWKVSCPLPPSSSVKGL

SEQ ID NO: 61556 - protein, 55 aa, Zea mays
  Coding DNA Sequence Number=SeqID_18181
  Subcellular localization annotation: CTP_CleavageSite=24; ConfidenceScore=5.02e-01
MRRNLGFCYAKSAGRKASARAAPRASESSTHVAVPWSADRMAPPVSDPVSFQIPF

SEQ ID NO: 61557 - protein, 137 aa, Zea mays
  Coding DNA Sequence Number=SeqID_18182
MPKPCVHANVAVGGELEPYTRDSVAIGEAPEPCRSTSGSAARILLTSPYCRKGLRATGVMVARGAPSLPVVGPKLARDRVMMYPLLARSVRAQGRARQRLLLRPRPGSGEDAIPPETEVEAEPGGRARRGFPSKAGA

SEQ ID NO: 61558 - protein, 426 aa, Zea mays
  Coding DNA Sequence Number=SeqID_18183
  Subcellular localization annotation: CTP_CleavageSite=50; ConfidenceScore=5.29e-01
MPTAAPVPAADWPVAVAFNWHCWVMRRAASSRDTGSAVEEARHSAQVAVRLFARRNRRAGYMTCGPASFALVHRMWSKPKGRTVEVRLDACRVVVHPFDHWFLRRWESACNRGAVACLACGGSPSSCFGSARERALTGLVEGVNFDNAGPVGRKRRQLQRAWLASSAGSVAASDAASCNLIRAWSSVHHAGDCCAMRTGDHPRRRRGLPIREDLSGDLPVQAGASAIRRRGAGAQVAAVVGAEVVAAREGFSADETVGAICSWTPGSLAFMACPRHSSGDVGEGLITAASTLRSALLLFSHPKQGSLSLLNPRLLCDEPESEAAVLAWTEAESAQKETSSARELVASQAEEDVAAAAGAWPRHPLARCWRPPLGGGPFARVAIRGRDRFHRGWKQRRGCCCSPCRCLNLQEQFVCSMRTFFTAAEA

SEQ ID NO: 61559 - protein, 159 aa, Zea mays
  Coding DNA Sequence Number=SeqID_18184
FLLPSLRCARQHVIHVEAAAAIPCVVIVRSSVASSICADPVRPSVLPVVDFLFAMVITSVVPIRASLARQPSRPLYPLSRVLPRSPRCVVVALSAYCCGTWIALASTRTSHTAIIVVKWCWGRASVRRRSHTKKQLRLKSSPRDGRRSLFMELRRFKPT

SEQ ID NO: 61560 - protein, 367 aa, Zea mays
  Coding DNA Sequence Number=SeqID_18185
  Subcellular localization annotation: CTP_CleavageSite=36; ConfidenceScore=5.00e-01
MNAVVTSHPPVCLYSAAGRKAKRWNCYTRRAVAHTRCAVDRKDQTVTLQGGTDTRSEVGSFLRNELREGVFWTFGFPKLKRLFSRVKLVTKNDLAPRKGLLLGSCFAFENKSPTNGNRRAGTSISSIAILVYAKSQAVKTLLCWPHVTSSTKRNSMSIWSRVEVVCIIRQTCVIEDINRKPSSCFRLSRRISQVPAAEERVEELTSGEIAPAGELVGSEESGLTRARLVNQVGQWASLGIKEGGRPKSGEDDLGSPVKFYRVRELGKLHELLEKLTKRLALLGNDQSGLATVAEARVAMVGRRELAGAKERRLAGEGAGGHGRGRGSDKCSGRVWANANARSGAWHGVEHEAAQREVEFKRGLAPNR

SEQ ID NO: 61561 - protein, 133 aa, Zea mays
  Coding DNA Sequence Number=SeqID_18186
MPVLVVFKYYVVSWLRVSHHHWCEVLSQVSDLVINHDGGTPKKAKVVVEDEEEAGLEDEEEATVTLSMEKDALECDICCLPFQCEVFMASQITMHVYIQYILIGRLQHDALLCVKSVQERAFSMCKVLHPHRR

SEQ ID NO: 61562 - protein, 108 aa, Zea mays
  Coding DNA Sequence Number=SeqID_18187
MEDEEESGLEDEEEATVTLSMEKDALECDICCLPFQSEDEEESGLEDEEEATVTLSMEKDALECDICCLPFQSEVFMASQITMHQRFKQEAALSVGPAECPHIKGCAQ

SEQ ID NO: 61563 - protein, 242 aa, Zea mays
  Coding DNA Sequence Number=SeqID_18188
MARVACTLHGKRLDDGVSVLSVGVNPVWWCPRKSPSSETAGGCWPPTLKTIYFRAGGCFASQGCPRSTRSGRREHQSTGAGRREHRSTGVGKREHRTTGAGRREHRSSPCAASRLREDLESTGVRREDPESTGAGSTGVRRTPHREEGAGSTGVRCCRARRGKCQGQRDPETERAGITGVRRAPRREEGAGSTGGTPRPRADTWRCRSERTLGLGLDDETDAHGADLYARCGSWAVRQDRRR

SEQ ID NO: 61564 - protein, 121 aa, Zea mays
  Coding DNA Sequence Number=SeqID_18189
  Subcellular localization annotation: CTP_CleavageSite=46; ConfidenceScore=5.04e-01
MTPQNGAELGHNADCAMPKPSKVSTYMMLRLLPPYISTLVKALTTSASVASKRDSKALVGVLEVPDKGFSEVDPIMYGVGRHTPGFMEPSYMEMLAGACTFEENCAFRILRPKARGPAKVG

SEQ ID NO: 61565 - protein, 255 aa, Zea mays
  Coding DNA Sequence Number=SeqID_18190
MALRVNVLPLIILDLLYHSSLHQVAEVLIHRFCLWLIWLGDRSKHNGHNSHVLPGVEEVLRAIAAFSDLVAGLPRSGLFGFEAYLLNVVVNPVVPLDECVELLQLLLEGGFTGEDACMTLALVFLLLDGGSQVPRFVVASWWCGHKEGSFLRPVGVQVMLHRGSARVILKEIEDGHSNGGCIEASLKGGSMSFEMLDSWPSEQKSHFGMFAVPYLTRQLSWFRKPRDNRFVFGGDASADSLRMVDRGDSNKDLRH

SEQ ID NO: 61566 - protein, 748 aa, Zea mays
  Coding DNA Sequence Number=SeqID_18191
  Gene Ontology: Mol. function=zinc ion binding; Cellular component =COPII vesicle coat; Biological process=ER to Golgi vesicle-mediated transport
  Homolog annotation: Hit_ID=A7QFA6; Match level="QueryCoverage=98%, HitCoverage=98%, E-value=0.0, Identity=66%"; Hit description =Chromosome undetermined scaffold_87, whole genome shotgun sequence
  Pfam annotation: Domain name=Sec23_BS; Domain location=384-492; Score= -13.0; E_value=0.028; Accession=PF08033.3; Description=Sec23Sec24 beta-sandwich domain
  Pfam annotation: Domain name=Sec23_helical; Domain location=504-613; Score=6.9; E_value=0.00068; Accession=PF04815.6; Description =Sec23Sec24 helical domain
  Pfam annotation: Domain name=Sec23_trunk; Domain location=121-379; Score=7.6; E_value=2.1e-12; Accession=PF04811.6; Description =Sec23Sec24 trunk domain
  Pfam annotation: Domain name=zf-Sec23_Sec24; Domain location=49-86; Score=25.7; E_value=0.00012; Accession=PF04810.6; Description =Sec23Sec24 zinc finger
  Pfam module annotation: Pfam domain module=Sec23_BS::Sec23 _helical::Sec23_trunk::zf-Sec23_Sec24; Domain location=384-492::504 -613::121-379::49-86
MAVRATVSRFPATPEALESCAVQWGVAVTPFAAADEHGQPPTTGAGGDRVPRCEHCWAYLSSHCDLERWGWTCALCGTLNGFDDEAERRFQRPDVCPELKSSFVDLEILVDEAEGGGDGVQALPVYVAAVDLACSEEFLELVKSALLAALEALVPGSLFGLMTFSHKIGLYDVQGPIPLVKNYVTKLSAELQRVLDIDLLPNGKIVNGQVDTCKDQIAAVLETLRPTSSWERGVASGQEEDTVLLGRRGFGTAMSALIEYLSSEYGSTFALGRAARVFAFLSGAPDYGAGVLDTRRYGEQYASKGVDADLALLPEQIPFYRDLAAVAVQSGVCIDIFAVTDEYTDLASLKFLSIESGGSLFLYASTDDSTVPQDIYRLLSRPYAFGCVLRLRTSSDFEPGNSYGHFFPDPQYENVQHIICCDSFATYAYDFEFAHNDGFSRHTDPAVVQIAFQYSVIEPVKETSGNGSQPSASYKFCLKRRLRIRTLQYRPTNNISEIYDSVDPEVVLHILVHKVILESLDKGVREGRHQVHAWLSLLAARYNQALSSDVRPLSSIDIDFSQCPQLQTIPQLVFALLRSPLLRLHEEGVHPDYRIYLQCLFSALEPSSVAKAIYPVLISYSSPDKQAFPRHTLSHAALIMSESPIFLLDTFTNLIVYYSSTADPSVPFPPPHDCLLRKTINGLKQDRCITPKLTFIHGGKDDSTLFESYLIEEQDVDGSGLTTGSGFVAFRESVRNVAGEIIQEEIGS

SEQ ID NO: 61567 - protein, 395 aa, Zea mays
  Coding DNA Sequence Number=SeqID_18192
  Gene Ontology: Mol. function=hydrolase activity, hydrolyzing O -glycosyl compounds; Cellular component=anchored to membrane; Biological process=carbohydrate metabolic process
  Homolog annotation: Hit_ID=A2Y561; Match level="QueryCoverage=83%, HitCoverage=70%, E-value=1e-166, Identity=85%"; Hit description =Putative uncharacterized protein
  Pfam annotation: Domain name=Glyco_hydro_17; Domain location=57-373; Score=378.9; E_value=7.8e-111; Accession=PF00332.9; Description =Glycosyl hydrolases family 17
MARAELRTVTVRSSPLPRCVLSRLLPLLLSVSVLIRSYMDANPIEAIGAASAAPLKFGINYGQIANNLPQPTQVSGLLQSLNVNRVKLYDADPIVLTAFAGTGVEFIIGNDDLYNLTDARKARAWVAQHVQPFLPSTRITCITVGNEVLSGKDTTAMQSLLPAMQTVYQAVVALGLGGQVNVSTAHSVNILASSYPPSSGAFREELGQYIQPILNFHAEVGSPFLINAYPFFAYKASPGSVSLPYVLFEPNPGVVDPNTNLTYDNMLYAQIDAVYAAMEAMGHSDLTVRISETGWPSRGDEDEVGATVANAAAYNGNLMKRIAMGQGTPLKPHVPVDVFVFALFNEDMKPGATSERNYGLFYPNGTPVYSLGFNGASFSPSPTYSSSSKLVVRKL

SEQ ID NO: 61568 - protein, 200 aa, Zea mays
  Coding DNA Sequence Number=SeqID_18193
  Subcellular localization annotation: CTP_CleavageSite=59; ConfidenceScore=5.60e-01
MPRPQRSIPRLPAVKPPPRLTPRNPLAPGSRCPHARRTPLAVPVPIVARGPFQQPASPSATTSDHRLSSDLRPVQQRASGARGPGRPPPPRSQRGAGARVERFGGYVGEADAEPPGSLQWQEETGETLSPRPRTTASSIAQSLPRTTPRGPKASHVGPAEEPRAALQARDAGCRKARRQPGSERVNTALVFSGIRKNRLI

SEQ ID NO: 61569 - protein, 95 aa, Zea mays
  Coding DNA Sequence Number=SeqID_18194
  Gene Ontology: Mol. function=protein kinase activity; Biological process=protein amino acid phosphorylation
  Homolog annotation: Hit_ID=A2XAK3; Match level="QueryCoverage=95%, HitCoverage=7%, E-value=2e-42, Identity=90%"; Hit description =Putative uncharacterized protein
MEDAMGNKIVRTTQASATEYYLHDLSSTYNLVLLDVVSRGRFLKSVRCKHDEGLLLVKVYFKRAGESIDLKEHERRLERIRNAFKGIEGSHVWPF

SEQ ID NO: 61570 - protein, 207 aa, Zea mays
  Coding DNA Sequence Number=SeqID_18195
MDGGGSDRGEHDRLVKEGLGVVGEGCVLAEGDEDDVGVGVDGRLKAHKDIVDGAHRQLANLDEIRTNLGSASSLPRSTTTKMDSADSIADKAIGRMQEIADKIFSVARETIRPGRGLTSFEATKLRVALEDIACMLEQDSLVLQENLDNVNNVNNPGDSNYEPSALSSPPPADEYLSPDWDFAEHFENFWGLEYDSDQMPSFSDNEV

SEQ ID NO: 61571 - protein, 533 aa, Zea mays
  Coding DNA Sequence Number=SeqID_18196
MPSLGEQLVRSPAFALDLRGRDPAAFVREVEDGAVRIVGSYVPRTEAMRSWDIHGSNVRLNRVFELNRLPYGGYPGDDAAVAVDRRRKKPMAVTEEGPSQEAALGTKKRKIGTAVGDLGVTGGRWPKNVLIPRAAGEDMFMSRMARDLKIFPYGQNIAAVVSAVMEKNRQDAAQKHRAVVRIGDPFREAKKARGGGRSLPPPAAASRCRLRSRLPLGPGSLWQVRRLLLLARASHPWASRLGRNQDHGAGSDVGQLAVVLTPVVATSPTAAVGVKGASQDSWSTFCASGAIPSATAAKDVAGSMSRQLRQASHQLSQQLKHAADFADHVTSGALTAEFAAEVKRLRAQHVDAVREKSAAESKNRRLTESSAGLRNRVDKAETSTCVEVERTHAQLVDAYWELGARTASFEAPSQEDPMLKRSAGALFDRMWGPHGRETVRERSDRAMDQMVRDEEVDDFGDLDSTLHEASLPEASGVDLAPPSDPGKGPSLTLAPTGDGEDPAPAPTPTGEDALEWLSRLRKTPRPRPGLRSG

SEQ ID NO: 61572 - protein, 221 aa, Zea mays
  Coding DNA Sequence Number=SeqID_18197
  Subcellular localization annotation: CTP_CleavageSite=56; ConfidenceScore=5.21e-01
MLLCLRSSADRFYSSRPCSPWPASSSAFLHPSLCRARQHVIHVEATTAIPCVAIVRSSLASSICADPVRPSVLLVVDFLFDMVITSAVPIRASLARQPSRPLYPLSRVLSRSPCCVVVALSVYCCGTWIALASTQTSHTAIIVVKWKSLRWHVDIVDRHPRLRQVPSREDALVLATRHQLDKKEFHEYLVKSRSGVHRSPDVCDRRHQPKTVVVLPTISSN

SEQ ID NO: 61573 - protein, 141 aa, Zea mays
  Coding DNA Sequence Number=SeqID_18198
MAAVLLDRAPARQGHRRPVARLGCAWGEDGRRAVAGQGTGPPGARGSAAAHLARALVASLGCSAAWGRSQVDTGQFWLIDACNQREKKMWERNMDCIGEDRKGAGRRAVGRGRETVADNVDWQVGPGAGAHPRGLQDVGVA

SEQ ID NO: 61574 - protein, 200 aa, Zea mays
  Coding DNA Sequence Number=SeqID_18199
MGSTRVALFLRLLEERDPAEPGCSPSPMVIRRDDHQPCGGEKQAGLRPLPRSQLQGCSSSGLGGGRTELGTASAWAGNPLLPPAFGGEGHPPAVRRRHPPAMRGKVNCCCLARVQLSILHPSNGRAMRRRLLSLVLKRRPPLERLPTAVVVTSTGETVSATCAPGLRLFGFNGWFSSPVRGCERRPFSSSVCPEAIAAVV

SEQ ID NO: 61575 - protein, 164 aa, Zea mays
  Coding DNA Sequence Number=SeqID_18200
RYFRSPDPTRPAGATRVDAPGRPDAAVVCPGTGPGGHPAGSTELQKQPEAGSKDVAGLPPVIIGRRVRAPAAPANPRVSAGHASSTEGREGTWPAGRARVPGRVSGILPPSPVGTSGFSVAWRVSALKSSGECVRLVGTTARGAVGQRPPSVLSAALAQGGISA

SEQ ID NO: 61576 - protein, 70 aa, Zea mays
  Coding DNA Sequence Number=SeqID_18201
  Subcellular localization annotation: CTP_CleavageSite=45; ConfidenceScore=5.60e-01
MTVHSVPDTTSPPSIDQKVPSVFHPVPFRFSFDPPSDPASGVTTKATTSVCRRMTIPLGLLRGTDIPRVH

SEQ ID NO: 61577 - protein, 272 aa, Zea mays
  Coding DNA Sequence Number=SeqID_18202
MFFDGVTPAAADNGGGGAVPPPADRALEPGFGGGCAVVGDLGWDLTGDLESAIAIAVGIWSIRTVRVDIRPLPLFDSRPTHCTRKREDGSASVPWMAAGATSWLPRMGRRFLMVFTVALIARSAEASICIYDQEPFCEVDNASSSLANTSLPVACSQGEGRWNTGPQMASAVQAAMIDEASSDLCSSPPGYNKPAKFRGGISRVPTGRRGPGCPTGQPVGVGPGGLRRRSGVIRNARVELLRRTWDVGGIPEIFLRSIQSAQLSKTCDSNSY

SEQ ID NO: 61578 - protein, 216 aa, Zea mays
  Coding DNA Sequence Number=SeqID_18203
GGDHLCTSGSPAAGDHLNALAKEKRPSLPPSYGMFKYYVVSWLRVSHHHWCEVLSQVSDLSNSPPCFYFASSSDGGTPKKAKVVVEDEEEAGLEDEEEATVTLSVEKDALECDICCLPFQSECKNGHSDGGTPKKAKVVVEDEEEAGLEDEEEATVTLSVEKDALECDICCLPFQSECKNGHSDGGTPKKAKVVVEDEEEAGLEDEEEATVTLSVE

SEQ ID NO: 61579 - protein, 125 aa, Zea mays
  Coding DNA Sequence Number=SeqID_18204
MEDEEEAGFSTYGGTPKKAKVVVEDEEEAGLKDEEEATVTLSMEKDALDARTGILDVQSAASARTAMSSFLLVDIYAGVVQTHYHQTKVSSQQSYVKADQQQQRSQPINERSQPIKALFGRLWLI

SEQ ID NO: 61580 - protein, 124 aa, Zea mays
  Coding DNA Sequence Number=SeqID_18205
MADPTMKARLDNKPLEAADVHRRIMCIGYVSIRFNNVPDRLQFIKAHAAGADTLPCRTREPLAPHDVSSSATVRASSPRASTLPLARTMLRIASGSAHARLLSRSRALPPSPMDLRVTGFATQD

SEQ ID NO: 61581 - protein, 402 aa, Zea mays
  Coding DNA Sequence Number=SeqID_18206
  Gene Ontology: Mol. function=UDP-arabinose 4-epimerase activity; Cellular component=integral to membrane; Biological process =carbohydrate metabolic process
  Homolog annotation: Hit_ID=A2YI12; Match level="QueryCoverage=38%, HitCoverage=42%, E-value=1e-56, Identity=75%"; Hit description =Putative uncharacterized protein
  Pfam annotation: Domain name=Epimerase; Domain location=174-396; Score=-23.1; E_value=1.9e-05; Accession=PF01370.12; Description=NAD dependent epimerasedehydratase family
MARRKRKDGGGGWWAKVRMAATRWTPCAPAVSVAEQTKGKEDDKTWQVVINFPHSVNLCSGGFTSHAALFASYNVHLLTALVLQRGSLSLSAVIGEMQSGSKNILVISDSSGSKMGKERAFCAEGDLAALVRSGFTNASTGRTVSYNEGTWCSTDHSSTYSPDCILWIPGYKNITAYFGCYTLAHAASERGAKQTSLFRARTLKEYQPEILLFIFVGYAGGFFLEHSFFVDDVINVRYYRNITANTLAVLEAMAAHNVRTLIYSSTCATYGEPDKMPIAEGTPMFPINPYGKAKKMAEDVILDFSKSKKLDMMAVMILRYFNVIGSDLKGRLGEAPRHELRKHGCISGACFDATLGIIPGLKALTGQFVERVLYCFSHVRFQYYVDFSHDRSLAISIPPTRV

SEQ ID NO: 61582 - protein, 430 aa, Zea mays
  Coding DNA Sequence Number=SeqID_18207
  Gene Ontology: Mol. function=molecular_function; Cellular component =membrane; Biological process=auxin mediated signaling pathway
  Homolog annotation: Hit_ID=Q6F326; Match level="QueryCoverage=90%, HitCoverage=85%, E-value=1e-154, Identity=73%"; Hit description =Putative nodulin MtN21 protein
  Pfam annotation: Domain name=DUF6; Domain location=205-372; Score =24.7; E_value=0.00034; Accession=PF00892.11; Description=Integral membrane protein DUF6
  Pfam annotation: Domain name=DUF6; Domain location=22-155; Score =58.2; E_value=2.7e-14; Accession=PF00892.11; Description=Integral membrane protein DUF6
  Pfam module annotation: Pfam domain module=DUF6::DUF6; Domain location=205-372::22-155
MARCTGFVEKAKPYVAMISLQFGYAGMNVLTKVSLNQGMSHYVLVVYRHAFATLSIAPFALVLERKVRPKMTWPIFWQIFVLAMLGPVIDQNFYYAGLKFTGPTFACAMSNILPAMTFVLAVIFRMEKLQMRKVTCQAKVLGTVLTVAGAMLMTLYKGPLMQLAWTTNRHASSSRAAAEAPAAAAAEISGRDWFLGSVFVIVATLAWASLFVLQTHTIKQYSAQLSLTTLVCFVGTLQAVVVTFAMERRASVWTIGFDMNLLAAAYAVRDPIRYTYDRCSMLTVAWSGLATLIALADDCDSVPFQGIVTSSIAYYVQGLVIQKTGPVFASAFSPLMMIIVAVMGSFILSEKIYLGAVLGAVIIVAGLYSVLWGKEKETREKEADAKTALPMAVVASSSSSDDDDDGAAGIAAAGVVGDGAAGCTTSGMTA

SEQ ID NO: 61583 - protein, 132 aa, Zea mays
  Coding DNA Sequence Number=SeqID_18208
MAGEHQEGECFVRFGHGCGLTPFGITVEPPGTSNCITFESQRIWDASEAIKKNEKESHDAREEANFGVYVWLRINNLFFSTAELSPPTEPYDPEANPAMKAALETIRIAEEAVDEAVNKLLNEADEKILKED

SEQ ID NO: 61584 - protein, 463 aa, Zea mays
  Coding DNA Sequence Number=SeqID_18209
  Gene Ontology: Mol. function=sugar:hydrogen symporter activity; Cellular component=membrane; Biological process=carbohydrate transport
  Homolog annotation: Hit_ID=Q8S2F4; Match level="QueryCoverage=73%, HitCoverage=94%, E-value=1e-151, Identity=80%"; Hit description =Phosphate/phosphoenolpyruvate translocator protein-like
  Pfam annotation: Domain name=TPT; Domain location=282-422; Score =182.3; E_value=1.2e-51; Accession=PF03151.7; Description=Triose -phosphate Transporter family
  Pfam annotation: Domain name=UAA; Domain location=134-428; Score= -154.1; E_value=0.011; Accession=PF08449.2; Description=UAA transporter family
  Pfam module annotation: Pfam domain module=TPT::UAA; Domain location =282-422::134-428
MNAWMVGVEVVEGIYSPQPPNNRWGWAAVDGRTGQSAVQPDLFPNRQILRSAPSSASASASCTLTPCFHSPPTSESRSAATNSCFSPPRLLRATTSARSSRSGGGGMGRDGGGGVAGGMSESVLRKVLLSYLYVAVWIFLSFSVIVYNKYILDPKMYNWPFPISLTMVHMGFCSSLAVALVRVLRVVDLPTSPSMTPQLYTSSVVPIGALYAMSLWFSNSAYIYLSVSFIQMLKALMPVAVYSIGVLFNKETFRSSSMLNMLSISFGVAIAAYGEARFDVRGVALQLAAVAFEATRLVLIQILLTSKGISLNPITSLYYVAPCCLCFLVVPWVFVELPRLRAVGTFQPDFFVFGTNSLCAFALNLAVFLLVGKTSALTMNVAGVVKDWLLIAFSWSVIRDTVTPINLFGYGIAFLGVAYYNHVKLQALKAKEAQKKAAQADEEVGSLLQERDGHGDHKSDNQA

SEQ ID NO: 61585 - protein, 76 aa, Zea mays
  Coding DNA Sequence Number=SeqID_18210
  Subcellular localization annotation: CTP_CleavageSite=40; ConfidenceScore=5.52e-01
MGAFVRSAFKFPRASSASGVQVKRSAFLKRWYKGNPFSLRRELVGNGNLKSKVEKQTLVDDAGIFTEVSGTVQGPD

SEQ ID NO: 61586 - protein, 180 aa, Zea mays
  Coding DNA Sequence Number=SeqID_18211
  Gene Ontology: Mol. function=calcium ion binding; Cellular component =cytoplasm; Biological process=multicellular organism growth
  Homolog annotation: Hit_ID=Q8H6A5; Match level="QueryCoverage=100%, HitCoverage=100%, E-value=4e-79, Identity=84%"; Hit description =Translationally-controlled tumor protein homolog
  Pfam annotation: Domain name=TCTP; Domain location=1-177; Score =314.8; E_value=1.6e-91; Accession=PF00838.8; Description =Translationally controlled tumour protein
MLVYQDLLSGDELLSDSFTYKELENGVLWEVEGKARTSMLVHECNLEWVTQGPVDVDIGANPSAEGGEDESVDDTAVKVVDIVDTFRLQEQPPFDKKSFVSYIKKYIKNLTAVLEPEKADEFKKGVEGATKFLLSKLKDLQFFVGESMKDEASVVFAYYKDGATNPTFLYFSHGLKEIKC

SEQ ID NO: 61587 - protein, 111 aa, Zea mays
  Coding DNA Sequence Number=SeqID_18212
MEARKASRYQVHGRRSRRLRNPKPRVKKKACKVKAKTQLGLAHRTVQWCTGQCPVRQAGSSELAALGNSPTTYDYNSPDCPVCTGLSGEPTVGRANGRPRDLRGTRGRANG

SEQ ID NO: 61588 - protein, 476 aa, Zea mays
  Coding DNA Sequence Number=SeqID_18213
  Gene Ontology: Mol. function=ferrochelatase activity; Cellular component=chloroplast; Biological process=porphyrin biosynthetic process
  Homolog annotation: Hit_ID=Q69TB1; Match level="QueryCoverage=29%, HitCoverage=29%, E-value=1e-46, Identity=71%"; Hit description =Ferrochelatase
  Pfam annotation: Domain name=Ferrochelatase; Domain location=225-407; Score=-105.8; E_value=1.2e-05; Accession=PF00762.10; Description =Ferrochelatase
MEAPDCPVCTGHVRCANGSKTANGRLRHRRKEIGHRTVSGVHRTVRSEQTEEGVEIDSKPRCAVLSHFRKNNNEKHLLMIHVSFLEPGDNKLKGRLIRSLLVYSTVLIQRADRSALRVITGRPFGLLRRAAQHVSRPGMMQLDIQVMSWGKTTSTSFTGSTTKHEQSLHGNVKPLQLAANESSRLAYRSPALKNQWNLPASSSSTNVVTTFDDNEHVSSSVIEEKVGVLLLNLGGPETLDDVQPFLFNLFADPDIIRLPRLFRFLQRPLAKLISTFRAPKSKEGYASIGGGSPLRKITDEQCRSDRRHSAAPLTGLTEGQRRLRHSDCTATRQSESDRQSGLAKGAIGSSAPPDPGLGLGLSPGRRRTPLCPTPGLGLGVRPGRRRTPLRPTPGLGLGLRPGRRRTPLRPTPGLGLGLKPGRRRTPLRPTPGLGLGLRPGRRRTPLRPTPGLGTRAKTRKDGELPLPPDPKGSDSG

SEQ ID NO: 61589 - protein, 199 aa, Zea mays
  Coding DNA Sequence Number=SeqID_18214
  Subcellular localization annotation: CTP_CleavageSite=44; ConfidenceScore=5.70e-01
MGGGLLAAAPALRSVLPLFNPPEQKSSSSPLLEQVTARRSSAFRCSAGLPPRSGVVRTCGGGTGVPFVMAHASVFVHCGCRGLNILVKGTPWPLFDEPRPGVAISVRTEAELARKWEPGWPEPSRVARQRGRRRSRSAEASGRAGALGKWLAEAPGVTGRAACSGRIPGEVPGPRRRPRLGRTSLKASSMPRVLQPPSA

SEQ ID NO: 61590 - protein, 316 aa, Zea mays
  Coding DNA Sequence Number=SeqID_18215
MELVIAESLVAPSGVAHGDGDGVNEDDVTKFGVVPGDGHADVQDVVTKLTGDAAHRDGDAGCQDGVTKMVYDAAHGDGDVGCQDDVTEVTCGAVYGDGDAGCQDDAAKLAAEVGRRGGSSEAEVESVFRGRGRGRAPGSGEAEVVRQRPGRSPSPGVGRSGVRRLPGLSPSPSSGVGRSGVRRLPGLSPSLSPGVGQSGVRRLPGLSPSPSPGVGRSGVRRLPGLSPSPSPGVGRSGVRRLPGLSPSPSPGVGQSGVRRLPGLSPSPSPGSGGAELPMAPLARPDCLSDSLCRVALQSEWHRRRCPSVRPVSGAAE

SEQ ID NO: 61591 - protein, 375 aa, Zea mays
  Coding DNA Sequence Number=SeqID_18216
  Gene Ontology: Mol. function=ferrochelatase activity; Cellular component=chloroplast; Biological process=porphyrin biosynthetic process
  Homolog annotation: Hit_ID=Q69TB1; Match level="QueryCoverage=80%, HitCoverage=62%, E-value=1e-155, Identity=92%"; Hit description =Ferrochelatase
  Pfam annotation: Domain name=CbiK; Domain location=100-320; Score= -162.2; E_value=0.091; Accession=PF06180.2; Description=Cobalt chelatase (CbiK)
  Pfam annotation: Domain name=Ferrochelatase; Domain location=43-323; Score=370.4; E_value=2.9e-108; Accession=PF00762.10; Description =Ferrochelatase
  Pfam module annotation: Pfam domain module=CbiK::Ferrochelatase; Domain location=100-320::43-323
MRRQMLEAALVTVDLGTRGRDLTLSDGHQQRHRAAISKCEHGTCPTGDELPTLRQRRLFKTFKSVNLPGHLYHYSANALKIALEKKKLNANIYVGMRYWYPFTEEAIDQIKKDKITKLVVLPLYPQYSISTSGSSIRVLQDIVKEDSYFSGLPISIIESWYQRDGYVKSMSDLIEKELSAFSNPEEVMIFFSAHGVPLTYVEDAGDPYRDQMEDCIALIMGELRSRGILNSHTLAYQSRVGPVQWLKPYTDEVLVELGQKGVKSLLAVPVSFVSEHIETLEEIDMEYKELALESGIKNWGRVPALGCTSTFISDLADAVVEALPSASALATRKPDDIDSSMDLTHYLTKMLFGSILAFVLLLSPRLVSAFRSTML

SEQ ID NO: 61592 - protein, 351 aa, Zea mays
  Coding DNA Sequence Number=SeqID_18217
MELKSLSQRIKCAKLESWSLRMFLVRLGDSSMRLGVPFIAPRQLGAVGGQQGRLSLPSIGWRTGFSGAHRTVTVDGLVLISFLFWRRRPCILGQMVHRTLSGAPCRPLARATRRPRIAQPTVALAIVGSPDIPVHHWTVRNCPRAHFPFTYSTVYSIESLYELLKGGTYKDTEPRHVGLGAKWREVTNACSAWAIFECHNVHSAYSIDMSCCFIGNAQVMMGVVHAVAWAYCLPTEWTGTPPQDGLVAARQQSGQGSLNAEAAHRLPVEWTWLIKCQGGTSPASGMDRRRALSAINAEVVRPRGLTSGSARWLTSRAVGHVAATGLRLSGEQKRTRYGPDTCRLRTPPGLD

SEQ ID NO: 61593 - protein, 122 aa, Zea mays
  Coding DNA Sequence Number=SeqID_18218
  Homolog annotation: Hit_ID=O48967; Match level="QueryCoverage=99%, HitCoverage=21%, E-value=2e-20, Identity=47%"; Hit description =Putative uncharacterized protein
  Subcellular localization annotation: CTP_CleavageSite=34; ConfidenceScore=5.05e-01
MKQWRDDVDRLLGMAHSGSARPRPWSSRLQHEVSASVRSPSVRAAPTEDLQAELNRKRAGEDAPVSLERSDDLRVELNRKSAAEDARISLERARERRQNVEGRNLDYDFAAVAPQTPTGAQI

SEQ ID NO: 61594 - protein, 350 aa, Zea mays
  Coding DNA Sequence Number=SeqID_18219
  Gene Ontology: Cellular component=integral to membrane
  Homolog annotation: Hit_ID=Q6ETC8; Match level="QueryCoverage=72%, HitCoverage=71%, E-value=1e-126, Identity=88%"; Hit description =Putative uncharacterized protein OJ1359_D06.29
  Pfam annotation: Domain name=TMPIT; Domain location=2-335; Score= -4.8; E_value=1.5e-09; Accession=PF07851.4; Description=TMPIT-like protein
MSGDGDARGLEAAAATAAEAARELREAAAALVATRAAEEDALRRRAVALEADVRRLQASLHALDPSTLDKVEEELERARVAITDSDVASFLPSKRNGKFLKTFLGPVNVRVARKEDKLKIKDEYNNYRDRTAYKFLLFPSILLLLRWWIWDGCLPALAVQIYQAWLLYLYTSFALRENVLIANGSDIRPWWIYHHYLAMLMALISLTWEIKGQPDCSSKQRGVQLFLRWAIMQGIAMHLQNRYQRQRLRTRIALGKAKRMDVVAGETAGVEGQLLLLYPVLFILQGFEAYVGVLLLQTALHGLASEWQARMIQQLSLLTVECLSLRDLAGGYGSRQLCPHYGDTGTETEV

SEQ ID NO: 61595 - protein, 140 aa, Zea mays
  Coding DNA Sequence Number=SeqID_18220
  Gene Ontology: Mol. function=kinase activity; Cellular component =ornithine carbamoyltransferase complex; Biological process=amino acid metabolic process
  Homolog annotation: Hit_ID=Q6QP54; Match level="QueryCoverage=60%, HitCoverage=29%, E-value=2e-32, Identity=83%"; Hit description =Putative kinase
  Subcellular localization annotation: CTP_CleavageSite=46; ConfidenceScore=5.04e-01
MAPPVDVAGPRPRLRDVEAPSRPRSSLSSVAVVKSEPLGRARQRPSAEARAESEPWGRAKRSSSSSGVEPKSEPWVGRSGVRRLSGFSPSPSPGSGGAELPMAPAAGPDCLSASLCQVAPQSERRRRRCLSVRPVSGAAK

SEQ ID NO: 61596 - protein, 261 aa, Zea mays
  Coding DNA Sequence Number=SeqID_18221
  Subcellular localization annotation: CTP_CleavageSite=57; ConfidenceScore=5.28e-01
MGGGLLAAASALRSSLPLFGPPEQKLSSSPLPERATARLKGTPRPLFDEPRPGVAVSAWTEAELARKEDLVGWSLAGSSASGTDAGVDLPRSQAGLMSSGDSWPRPRGDQPRRLPKPDSRRRPWWRWPGCGDDAVLRSGDPRTASPSEARSDLAEGIVDAEGVAAPSTVWIRACRIGLSCSVMSEVSVSRRRRSPSARSALPLTRTLTRPWGSVTDAVEKARRIAPAEEFPNVKTCSVRGITYPNVSYLSQKVMSEDPLSK

SEQ ID NO: 61597 - protein, 241 aa, Zea mays
  Coding DNA Sequence Number=SeqID_18222
MEARRASRYQVHGRRSKRLRNPKPRPKLNSVWHTGLSGGAPDSVRCARLNSGEQAAHGRSLATIGYNSPDCPVYTGLSGEPTVGLGNGRPRNPRVTRGRANGQVGAPDCPVCTGHVRCANGSKTANGRLRHRRKEIGHRTVSAAVLVVTQLNIVKGSICHTDRSEQTEEGVEIDSKPRRHPDPVPGSKGTFKLVALGNSSSTYGYNSPDCSVCTGLSGEPTVGRANGRPRDLRGTRGRAND

SEQ ID NO: 61598 - protein, 70 aa, Zea mays
  Coding DNA Sequence Number=SeqID_18223
MIPGQNGGLCLLVKCASSADRPKDGYIIRARGDERPRELQRLVLLDQRYFGTGGSDDGSVDDMKGVTTRY

SEQ ID NO: 61599 - protein, 122 aa, Zea mays
  Coding DNA Sequence Number=SeqID_18224
  Homolog annotation: Hit_ID=O48967; Match level="QueryCoverage=99%, HitCoverage=26%, E-value=5e-28, Identity=58%"; Hit description =Putative uncharacterized protein
MVHIVKHQDFLPEDFMLEEEAASSTPWATNLPAPGATAAAHSAWQHTPAQTSRASRAAPGALSAGRELLRHPPSSTASPGAMKQWRDDVDRLLGMTHSGSTRARPPSSRRQHEVSASCAPPQ

SEQ ID NO: 61600 - protein, 128 aa, Zea mays
  Coding DNA Sequence Number=SeqID_18225
MVRERRTQTNTMSKNTRDTRFIPRFGHTTKVPYFLVEAPTKRRVSFYPNPPFADHKGGFRFTGGLSQRLDRSQIRLSRTKIRLNQLQIRLSRAKIRLNHFSKNLHMAFSNRTDWQTGSDRGEQCRNRF

SEQ ID NO: 61601 - protein, 44 aa, Zea mays
  Coding DNA Sequence Number=SeqID_18226
MENHLGKQSYHKGDVDPRAIDLAMRIAERMFLKMKEDEAKNKIE

SEQ ID NO: 61602 - protein, 103 aa, Zea mays
  Coding DNA Sequence Number=SeqID_18227
MPAHVAMIIGGSLYLEVAGDLIRDGAKELLAVGLGISATDGMALRGVAMAEDGDDERLVRAPTLQARGATNTPSDGINNGDGGGCGWWCVWISGSIDRIKSIL

SEQ ID NO: 61603 - protein, 72 aa, Zea mays
  Coding DNA Sequence Number=SeqID_18228
MAPPRLVASGVDDEQVTENSGAQQIEVAEQELVEEKKVRFANGRVAVRARTSALGAIGVTQPLSLRLGSGSA

SEQ ID NO: 61604 - protein, 297 aa, Zea mays
  Coding DNA Sequence Number=SeqID_18229
  Subcellular localization annotation: CTP_CleavageSite=35; ConfidenceScore=5.18e-01
MSSSSLKRRVFPSSKPPDGGPVAPLHRRSPEMATSSLMVGESEPGCGLCPFLSLKDFHHQGRGGESAELGVPGLQPRVASGATCGVGVCHGSRKRFFRRRGGRDRPRADLQLLRPSARPCLTSFGTGGGRLAAASTLRSALPLFGPPEQKSPSSPLLEGNRLSRLLGPDSRRSPWTAAPPEAGSGFAEDVVDAEGATAPFGMKTRACRIRSSCSVCFLRPPRPEENTLAVLAKLRLFSSCFEHLDFVGNRDVCVSKSCFSRKGRVRYPYPRGVGIPRLGRPCRLRVLSPVHEALSPT

SEQ ID NO: 61605 - protein, 96 aa, Zea mays
  Coding DNA Sequence Number=SeqID_18230
MSSEEEEPEPPLYVCFSDDDNGDGDDDNVDHGSSGASSSSIGDVNEKESDDTSGNGDDPKADASPPPKRHKRIGFSPFVAGRYIDAIVLLEQPEWL

SEQ ID NO: 61606 - protein, 70 aa, Zea mays
  Coding DNA Sequence Number=SeqID_18231
MAPTSSSSSSFPYFEDDIDQELTPVWDPIADYEKEAPLHRDAEEWDFAVESEDALSLIDGEDLELLLGED

SEQ ID NO: 61607 - protein, 152 aa, Zea mays
  Coding DNA Sequence Number=SeqID_18232
MGESKKGGSSSHHSGDKRKREPTPPSEDFGDSEYSEEFSSESEGSSVHASPPASSDDSDDSQGIAAEMWTYIRVVERAGLEGSDELEVSSDEGDSSDSSEEGSDGDDGGEGDGGDGDGGGDGNKGDGSKGDGEGDGGSGNGMGGSGGGKASG

SEQ ID NO: 61608 - protein, 210 aa, Zea mays
  Coding DNA Sequence Number=SeqID_18233
MMTTSSWVGKSKPGCDLGPTLNFKDVHHPCWGGGQAEPALNLPCGSAGHLLPQRSGEEALTGLAGGADSDNVGLTDGGRRHLQRVGVVGWAPGGPSCRRAAAAPCAREDHPRCRALLGRRLCSRVALLFALGWRPRAEAGAPLVWEDLSGDLPGGLVAPAISAEAEAAREVLVADGITATIRAPGLRFFVLVLAPRASAWARARLQQRPP

SEQ ID NO: 61609 - protein, 360 aa, Zea mays
  Coding DNA Sequence Number=SeqID_18234
MSSRSLMHRVFPPSEPPDGEHPQSFRLVVGGMQLRGSWYLSAIVRLQGFSSVSPAASPRRWSPKTVTTSLRVGRSKPGCNLGPALSFKDVHHPRWGGGRAKPELYLPRGFVGQPLLQHSRERALTGPARGADFDNAGLVDGGRRQLQRVGLAGLAPGAPSRREGGCRAARTGGPPKTSRAARAAFVFWGCPAFAPVRHLRAEESLGSVGLAVRGFSCLVKGTPRPLFDEPKPGVAVSAQTEAELARKEDLVGQSLAGSSTGGTDARIELSRPRAGLMSSGDSWPRPRGDRPSCLLEPDSWRRPWRRWPGCGADVVPQSGDPPTASPSEARSDLAEGVVDAEGAAAPFNCQDPSLQDRIIL

SEQ ID NO: 61610 - protein, 265 aa, Zea mays
  Coding DNA Sequence Number=SeqID_18235
  Subcellular localization annotation: CTP_CleavageSite=77; ConfidenceScore=5.50e-01
MAPRTLYDDSGSQPPYGSKRTSARTRQPRQLSFRQAPALLRRPRHHTNRRVGHAGKGRDDARVRPLAPSRVDAWTPRSRNADNYCVGLTFVVGKGRIRVERDPALCGRLNEEVGHLGDVDPRAIDLAMRITERMFLKMKEDEAKNKIEEENDQWRPNDKSTSSQGLSFKSTSHMCFIANGSDSESESEDEEDQESDSEDEDDLQQFFAQLSKKHRMSLLKLMKRAEEQKEMLHKQEYFLIRKIEDLEKLTKEHEKLKCSHDDLVQ

SEQ ID NO: 61611 - protein, 51 aa, Zea mays
  Coding DNA Sequence Number=SeqID_18236
MAGGPDVAGLIEDDAVSVITELTEKLSVWQSAAAFGGQKLQKAETNSGKVH

SEQ ID NO: 61612 - protein, 504 aa, Zea mays
  Coding DNA Sequence Number=SeqID_18237
MATRQQMRVKLELDGCHEHRVAFRLQPPPPVAIRFAHVARGLGFKAPPAVRREGKEEEHAVLDKNSKIDLHINSKVWSIPFPCAYAVCAKFFILLMMQCWKRTPLGKPLHSHRCTRSLNAVCKCKMCTSAFSMDGQRWFRCRWWSVDSPLHSRRHRRRCLTRDRLHRPQWMSIWRHHHRLHPLQRQLLAVRHLHQCLWSSGPSLPVVGSLLALLMPREVASSSPAITQMGWPHLPPPIGGPNGPRSGRHVGRLGEGVGSGAANPGASALCGARLGALRIRAGARRSPRQGAGAGEGKAGARDSRSAWARCGPTRGRRLRDPGRRGSAQRLHQAALGVRRVAQLLAGLGQGRSARPPPPEARERGPGEGARRGSQGRSARPPRARERGPGEGARRSLLLQRRGNEAPARALGAAPKGARRGLLGRGNEAPARALGAAPMGARRSSRGALHEALGARQERAQEENQGGGWELLAPWRRPGTSLAAAMPFWPLPGSPGRPPGPLSEV

SEQ ID NO: 61613 - protein, 595 aa, Zea mays
  Coding DNA Sequence Number=SeqID_18238
  Gene Ontology: Mol. function=nucleic acid binding; Cellular component= intracellular; Biological process=transport
  Homolog annotation: Hit_ID=A2XI22; Match level="QueryCoverage=100%, HitCoverage=85%, E-value=1e-136, Identity=53%"; Hit description =Putative uncharacterized protein
  Pfam annotation: Domain name=NTF2; Domain location=18-135; Score =150.3; E_value=5.2e-42; Accession=PF02136.11; Description=Nuclear transport factor 2 (NTF2) domain
  Pfam annotation: Domain name=RRM_1; Domain location=313-383; Score =36.9; E_value=7.5e-08; Accession=PF00076.13; Description=RNA recognition motif. (a.k.a. RRM, RBD,
  Pfam module annotation: Pfam domain module=NTF2::RRM_1; Domain location=18-135::313-383
MAGQAGNPVNHPISPHVISGAFVQQYYHILHEQPDQVHKFYQDSSILGRPDSNGIMAYVTTMRDINEKIMSMDFRNCLTEIETADAQLSHKDGVLIVVTGSLTSDEGVFRRFTQSFFLAPQESGGYFVLTDVFRFISERKPAEINQVATQENEISQNVRPASETCSALPEPIPADGSVISDHVTADSNVTEKQISDLSANGTAIESNDNTQPPVQVPKEDPKKALLVAPPPPTQMDVTKKSYASIVKVMKEGPPTPVVKTTSSVSKQKPAPKPVSTAVEGLEKPSEKPTQAIGTGDGIVAQNNSSRNEQGYSIFIKNLPFHANIEMVEEEFKKFGTIKPGGVQVRHNKVDRFGFGFVEYESQQSMQAAIEASPIRMADKEVGIEAKRANSRVIGLLTLYNGVGGRFQSGRGVYHGDNFRGRGSGYVDNTNYRSSGSFNRQNEGEMYNRRNEGEMYNRRNEGDFYNHRNEGEFYNRRNDGGENYNRRNDGGENYNRRNDGGKNFSRRNDSGTENFNRRNDGGGENFSRRNDGVGENFNVRNDGVGENFNRRNNFRNQNDFPGRGRGSPTPGNSYYQNGNGRFSRVNNGAKQAPVAA

SEQ ID NO: 61614 - protein, 383 aa, Zea mays
  Coding DNA Sequence Number=SeqID_18239
  Subcellular localization annotation: CTP_CleavageSite=49; ConfidenceScore=5.52e-01
MPEVGRLVAAKPRGRATAGAKRHTTVGGGVLSTRRFTFTFSAHRNRRARCMTCGSGPPCQRLDRWLQRRRGGALPWGGSMLLVRRFAFLTVGRSEDKGAHYRVAVACSLCHDSPSSRLGPALEVALNLVRNPLGWGVLAFVGRTCVCVSPLSDLAVEEFVFFVSKLPSGLALPIPSFLVQLLEGLGLQPLPMVSCFILQAAIIAYLYGMSVEATLLPASSSSIRGEDDYQPREEVVASAGGPLRVEVVAAAREPLGYSYPRDPTGVETSIPKKELAMAPRRPTVRNQAERLHGLRTTPGDKLSDQQAGLMRADLPGLAYTDAPVVRKRYSFSRSKIVTPGSAHSRRLEGSFPAGGELRSPSWFEAWTRGESRRVSGGRQASAP

SEQ ID NO: 61615 - protein, 137 aa, Zea mays
  Coding DNA Sequence Number=SeqID_18240
MTAWWRWEHGDHLGGLVGDWLEIKSPIQPPLGHRDPFTVEVLCSLAAPNSPEMLRPFPFQGIMKHNASTGTLAGPKVHRKLKHEERPFTRKTDNKDVDSFSQSKSSFQAREAWQRGSSGELEERTRVAQVSAQGQSG

SEQ ID NO: 61616 - protein, 113 aa, Zea mays
  Coding DNA Sequence Number=SeqID_18241
  Homolog annotation: Hit_ID=Q6JAD6; Match level="QueryCoverage=99%, HitCoverage=15%, E-value=6e-08, Identity=36%"; Hit description =Putative uncharacterized protein
  Subcellular localization annotation: CTP_CleavageSite=28; ConfidenceScore=5.01e-01
MAEHRAFMTHILQHTGVQLPPIQSAPPSALQVAVVPAIQGGPTLPPFGPSPSPLWPVTLDFSSPDVGPVGAQPLVPAVTTVAVAVSVTPPAPVDPTSQPLLESVPALASTTDP

SEQ ID NO: 61617 - protein, 132 aa, Zea mays
  Coding DNA Sequence Number=SeqID_18242
  Homolog annotation: Hit_ID=Q6JAD6; Match level="QueryCoverage=78%, HitCoverage=14%, E-value=8e-37, Identity=75%"; Hit description =Putative uncharacterized protein
MGYREATTHIQLWLLGALISHSEFDVVDFLICEIEDTVLDGLRARRQLSYAHYLYHIFAQLIRSPQFQGTLETSRLQFGLYRPAPDDPVPVPDPVPYIQAEDEAFSFLHSSRLLWQPSRLDRQLSSSRCPNG

SEQ ID NO: 61618 - protein, 76 aa, Zea mays
  Coding DNA Sequence Number=SeqID_18243
RVAGRNEELHFAVYRANEDAVMISNRAPSPPTDQRFEGWPSEGFNSRLRSRGPDTHYWLAPEGFTVASDAERGMTR

SEQ ID NO: 61619 - protein, 495 aa, Zea mays
  Coding DNA Sequence Number=SeqID_18244
MNKRPAFKVPLQTELRFCPRGTDAAAGTLSFASPLKRREPDIKAKERAAPKRTGSNSSPSPVWLEDASSAELEDGFHHQKLEEEVASRPAREVEPRLALLSAPARMMNILEAEGGTKIAARLASPHPGAGGHRLGAEEAKPPRAVHATAQRLQAPLHFRPDQRMKGRAAMQAACNRAKWAHLSDFQHAQHGGPRPRVMQPARRSLRASNYTATRTTATPPRLRNQYRNSRQPCASSGHVVSQAHVPSGGSERTLSHGMKTVRPRFVPRMARAHATATSRTARSVALTPRHDRRRLWQEKRATLRLRHNDRVKKEVRRPAPRKGSTAASGSAPTTDQGGNNLVTESHQREASSPRTPSTGDRVRQITHRGSGAALANPAPAKPLPASTYQPENLGPDRAPGLWPARMREQPDQPKALREALRPRRSQTTPPRPRGLHPAGALARTHRDKTQPRKAGPLAKKCDKSLQASINTPFEARGLLSGTIIRVTLKAPDSQL

SEQ ID NO: 61620 - protein, 173 aa, Zea mays
  Coding DNA Sequence Number=SeqID_18245
MAQGHISLSQLDSPVATLGRDNHESLEAILGGRGNHDSPKAILGWERQSRLTRGHPQADVAPPTSSSASGRFLPPESPTVTWLKKRLSMSGSKGTTGTVEVDALTFSAFHLPCADLLVVLISRRSARRVNHRLAEKEIVVVLSSASAASIESSVAVVDHLTSLVSHLHDLKSK

SEQ ID NO: 61621 - protein, 337 aa, Zea mays
  Coding DNA Sequence Number=SeqID_18246
  Pfam annotation: Domain name=zf-CCHC; Domain location=196-213; Score =18.5; E_value=0.0024; Accession=PF00098.14; Description=Zinc knuckle
MWHVRCTTRQSGDESSSDDEGLLEKIEAFANLNCELSTKIEELESSATSTASDDGFIKKNEKLKAKLASSQEAIENLLGKMEILSIHNDELTTKLENIGSTLKASLVEIPEIIEKDASTSYFDLIDDSNPCNQVLVKNVIIETCSDEIAMENEQLKQEVARHGKALYDKKGKAKQIQPPQDNTTAGVNKPVEGETVICRLCHKEGHKSFQCKAKTSDKQKQKPTSKISNTYIKKVDKKAATPYLIKKKKWKCDSNQVQQASQQRERGQMHLGAKGNNFNHEKRQEGLDPKREVRSPKKDGEFGDLAKFGCISWDTSYWIKFIIKWVSEYFGPKFPHP

SEQ ID NO: 61622 - protein, 57 aa, Zea mays
  Coding DNA Sequence Number=SeqID_18247
MDQAISLVVRSRQFESSFNLVRCGCSGEILGGRFGSRLLDFSLLRNKNVFSFGEVAI

SEQ ID NO: 61623 - protein, 46 aa, Zea mays
  Coding DNA Sequence Number=SeqID_18248
  Homolog annotation: Hit_ID=UPI00005A9633; Match level="QueryCoverage =63%, HitCoverage=5%, E-value=6e-08, Identity=89%"; Hit description =PREDICTED: similar to Copia protein (Gag-int-pol protein)
MKDAKPIKTPMGTNGHLDLDIGGKSIGQKSHGVGKGNGELEPKGRF

SEQ ID NO: 61624 - protein, 58 aa, Zea mays
  Coding DNA Sequence Number=SeqID_18249
MKKVIHLSRKYVYQPSEVKITGSTHIYPRRLRSHIQIGVGQVSDSLQLLRAGVTEPPK

SEQ ID NO: 61625 - protein, 120 aa, Zea mays
  Coding DNA Sequence Number=SeqID_18250
  Gene Ontology: Mol. function=metal ion binding
  Homolog annotation: Hit_ID=Q69UA1; Match level="QueryCoverage=35%, HitCoverage=10%, E-value=5e-15, Identity=79%"; Hit description =Putative VIP2 protein
MQCPNCRKIEKGRWLYASGHRASVDIDMGGWVTSDNYDITSELASAGSAAGGRMQSRANAFGSHVALLSRGVRLLLCLKSLGECCIAPGGSLEACFMLNDCLCRSVVDDRWWRRFQTSHG

SEQ ID NO: 61626 - protein, 168 aa, Zea mays
  Coding DNA Sequence Number=SeqID_18251
MPGSNADDSAASTAQPSELATITTALAEVQRQLGLFATQMSSCIAAVESTPGTSGMAPPPDCPYGMPGYGGLPPSMTAADGSLPPPPTTISAPAHTTTSLPLHVLPLPHSPSPIPSLPPSHTPLRPPHPFPYYRTPYQCSLHRHMLVFFVSTAWSLQPLMARKTPCTG

SEQ ID NO: 61627 - protein, 186 aa, Zea mays
  Coding DNA Sequence Number=SeqID_18252
MGQRVFFFAADLDLASREGPRRGGEIIGCLLVEVDEPKAYELSLMHVTGFSIQYVLVLLLLIGRQTFNILHNLEDLSQMTLVLMIEKIVAFEMSRKMGQEEDPTSSRPYTFASDEDKKMKGKKKEDPTSSSEEEEEEEKEEEEEEDDDDDDDDQASTLSSENEEIVKRIGKVMRMIRKINLLGVSL

SEQ ID NO: 61628 - protein, 164 aa, Zea mays
  Coding DNA Sequence Number=SeqID_18253
  Gene Ontology: Mol. function=electron carrier activity; Cellular component=anchored to membrane; Biological process=electron transport
  Homolog annotation: Hit_ID=A2YII1; Match level="QueryCoverage=57%, HitCoverage=55%, E-value=5e-21, Identity=51%"; Hit description =Putative uncharacterized protein
  Pfam annotation: Domain name=Cu_bind_like; Domain location=40-120; Score=97.5; E_value=4.2e-26; Accession=PF02298.8; Description =Plastocyanin-like domain
MAYRQVLLLAVAVAVAVACLAPLASAKQWVVGDEGGWRAKFNETGWANGKTFLVGDSLLFVYPKESHTVVKVGKDAFAACDLGANLQLGNWTGGNDVVQLDKPGKAWFICNKPNHCLNGMKLAVDVAVAVAPAPPPSAAPLTGYTVGGAVVAVACAVFAAALAL

SEQ ID NO: 61629 - protein, 34 aa, Zea mays
  Coding DNA Sequence Number=SeqID_18254
MSLTGQMCRTRTQMSETFLMKNNRVGWEGASVKT

SEQ ID NO: 61630 - protein, 872 aa, Zea mays
  Coding DNA Sequence Number=SeqID_18255
  Gene Ontology: Mol. function=catalytic activity; Cellular component =mitochondrial alpha-ketoglutarate dehydrogenase complex; Biological process=metabolic process
  Homolog annotation: Hit_ID=Q69LD2; Match level="QueryCoverage=31%, HitCoverage=83%, E-value=1e-137, Identity=79%"; Hit description =Putative branched-chain alpha-keto acid decarboxylase E1 beta subunit
  Pfam annotation: Domain name=CAF1; Domain location=604-847; Score =180.8; E_value=3.5e-51; Accession=PF04857.11; Description=CAF1 family ribonuclease
  Pfam annotation: Domain name=Transket_pyr; Domain location=62-220; Score=191.8; E_value=1.7e-54; Accession=PF02779.15; Description =Transketolase, pyrimidine binding domain
  Pfam annotation: Domain name=Transketolase_C; Domain location=228 -339; Score=112.6; E_value=1.1e-30; Accession=PF02780.11; Description= Transketolase, C-terminal domain
  Pfam module annotation: Pfam domain module=CAF1::Transket _pyr::Transketolase_C; Domain location=604-847::62-220::228-339
  Subcellular localization annotation: CTP_CleavageSite=20; ConfidenceScore=5.25e-01
MAASLSLHVTAGCGSKKKKRSMAAKGLREVGRRRAAEVGRRCLSGGSAGPPAPAAKRKEGGKAVNLFTAVNQALHIALDTDPRAYVFGEDVGFGGVFRCTTGLADRFGKSRVFNTPLCEQGIAGFAIGLAAMIVNEAAKFRYRSGNEFNCGGLTIRTPYGAVGHGGHYHSQSPEAFFCHVPGLKVVIPRSPREAKGLLLASIRDPNPVVFFEPKWLYRLAVEEVPEEDYMLPLSEAELAVLKEACEDAAKDGVSCELIDLKTLVPWDKETVEASVKKTGKLLVSHEAPVTGGFGAEIAASIAERCFQRLEAPVARVCGLDTPFPLVYEPFYMPTKNKGVSLVLGYADALAAPLPHAVTVRADASDEGSRRRRRMSGSSSLWETGAPSLDTLAESAATYAVMMSSQQQQQQQTAGPSRQAVYGAPVLPEIPTRFVYRPQVATDVMSGSSSLWKTGAPPHDTLAESAAMYAATLSSHQQQQQMARPDRQAMYGAPVLPEIPTRFVYRPQTATDVMSSFSSLWETGAPPPAAYAAMLSSQQQQMPTTRPGWQAAPRGAPVPPPMNMRFVPNTMPAADAMDVGSSAPMAPSDSSSERTPSPLQRVEVRQVWAHNFDSEAKLIESLLPKFRYVAVDTEFPGTVYRPAGPAYKLEPAERYRLLRCNVDALHPVQLGLTLFDAGCVLPGGHGGATRYVWQFNFSDFDVRRHRHVVESVAALRSRGVDLDRTRQYGVAAAAVFGPRLRKWTRAGLGRAGVVTSHGGYDLAYLVKMMFGTGFRMSGSAAEFNAVVKSVLHRRRVFDIGEMARLCPHEHLHRGLDSIAGQLNAARFAADAARQAGYDSLRTCYTFMKLREIYFDDDGKLAGVDGILAEVTAF

SEQ ID NO: 61631 - protein, 640 aa, Zea mays
  Coding DNA Sequence Number=SeqID_18256
  Gene Ontology: Mol. function=protein binding; Cellular component =cytoplasm; Biological process=humoral immune response
  Homolog annotation: Hit_ID=Q69LD0; Match level="QueryCoverage=89%, HitCoverage=96%, E-value=0.0, Identity=64%"; Hit description=High -glucose-regulated protein 8-like
  Pfam annotation: Domain name=YTH; Domain location=447-537; Score =204.9; E_value=2e-58; Accession=PF04146.6; Description=YT521-B-like family
MAAVGSLQPGVETLHVQDYKDAPPAKAVAAAVESLQPAMESLHVQEFKDAAPAKGVSAAAVGSLQPGMENLQVQDYKDASMYYGAYPAYPYGAPYGGWGEYSTYLSHDGAQTPTAGAYADMYYGHAAYGHIYGSQNYQYPSTYSKQQNSTAKLSSNGKSEKLAPAPEGDVSTIVVDEVKVLKNPNPTLKADRNAPGSNGSYGRSSVRSGNYQNQTSWSHYPYYSSEMFSDKQQKFTSNHNSTAPNDKTKGQSRNQNTRQYPHLMIFFFKGLQTPTSPSVYSANGIYRYDGSYGPSLWYGSHMYSSGLYGGWNSLYDGKYRTRGRCNNGYYAYGNGSLDGFNELKRGPRSGMYTNQLGLGATTEVPAKEQDLLSANGSHPAMKDQYNRADFAETYSDAKFFIIKSYSEDDVHKSVKYNVWASTPNGNKKLDAAYQEAKEKSSETPVFLLFSVNASGQFVGLAEMVGRVDFNKTVDHWQQDKWTGCFPVKWHIVKDVPNSLLKHIILENNENKPVTNSRDTHEVKLEQGLQVLKVFKDHVCKTSILDDFGFYDNREKMMQYRKAKQQQSLKKVIDVKVPNATDADTSLVGTGSTELTNVEADVLNKELSLDKAVEKNEEKGNDVAPQDLKSSAEKSASPNGC

SEQ ID NO: 61632 - protein, 1113 aa, Zea mays
  Coding DNA Sequence Number=SeqID_18257
  Gene Ontology: Mol. function=receptor activity; Cellular component =cytoplasm; Biological process=keratinization
  Homolog annotation: Hit_ID=Q53RP7; Match level="QueryCoverage=84%, HitCoverage=86%, E-value=0.0, Identity=70%"; Hit description=Chorion family 2, putative
MMVVVTPQDAGRPTARSEPAEVTDGACRWAAPIMDATRLPAGKDKIYQFLVYETGSSKAALLGEATVNLADYADALKPSAVTLPLKGSPGTLLHVTIQRVVGGAGGYGDDASESGDASPVAKTPQRRTTLQNQLSRFEDEDGEKARAATDAMSPVQDGLLITKPPGMRFPSRRNVPMSVDPVGHLHNGSSFDAVSVSGSDASSGRYTPKISATMHNSYLQDSSNALSPFANNGTVRNPLTSSGDWSGSSAPDASTDGSTSNSGEAGLRGEDDDVEKLRSEIATLTRKLDVSDMELQTLRKQIVKESRRGQDLSKEMSSLREERDALRREYEGLRGAKKMIHDSNGSGKRLSDGYDPWSQVEELKQDLNHEKNLNADLRLQLQKMQESNSELLLAVKDLDEMLEQKNRDISILQEDTQEDPQEAEYEHALSNVHNSGRKIALSETSSYQEKEDELMLDALAKKRDDISTSELEKKILELSNEIELYKKDREDIEMQMEQLALDYEILKQENHDISSRLEQTQLREQLRMQYECSAHLAIISDLEANVESLDNELQTQAKKFEADIAEIMSAKVEQEQRAIKAEDSLRKIRWNNATTAERLQEEFKVLSSQVSSAFSANEQQLVQARKEVAELQLQKSQLEELLQKAQGDLGSVQDQHRVKVQQLITLVDFKSKEIDRLLMELKSKSDEFHNQKRCDEAKLNALSEEIDLLNSKIDKLSSERNELFEKNEQKEKELAGISEKDMQLQDKTAEITSLNKELVFLKDQVKMHLDELHSLKRLKNEREETIGKLQIDIGSLKLQCDNLKTSLSKKESEKDSLASQVLKLRRSLETRDRAKANGQISDVKDNQHANNKRTKHNTGSTGSIAALPGTNRQGEDGDCNGPDMRNTTDQSAKELASMKERNRAIEEELKELHERYSEISLRFAEVEGERQQLVMTVRSLKNSLRYKDFRRYRWALYRWASDWMGFFSPKREAPDQRLGETRPGETGTPEQKLVEELRYVQVQFYLIIDIVMLYSVGDSDAIFGRRTLVLRYLYLKLKQWQWPWHPRQERNWEYRKISPYMSSKKKEFRMKQAAHRHSPPEKRSSEVKQAVHRHTQPRGHIRNWSSEVNGIDQ

SEQ ID NO: 61633 - protein, 105 aa, Zea mays
  Coding DNA Sequence Number=SeqID_18258
MKRLAGTPNPRSWKEIKLTTYPGGGVESASLGAIHSGYGPPERGRSKPSATRASRSSMTTVEEGHGSRGRTTVTLSAIAERRDRERGYFEKGSFSAKEAGPESSY

SEQ ID NO: 61634 - protein, 112 aa, Zea mays
  Coding DNA Sequence Number=SeqID_18259
  Subcellular localization annotation: CTP_CleavageSite=38; ConfidenceScore=5.30e-01
MPSRHPRLYKSPGPSDILPRSPLTLACTGPPENRLKTESSAARQRRPNSTTMDGLLRSIPAQASYSSSLPESGETSQALKPSDTPLETPDRPHQTSFARRSKWPSKLRKGIT

SEQ ID NO: 61635 - protein, 97 aa, Zea mays
  Coding DNA Sequence Number=SeqID_18260
MTAHQGMYGRDAHELRRLGVWAWRALSAMVEELANGPGDAAVADLYPGARTSSVRPRDGCGRSSADSTALAEEGGANLVAPLALTAYIGERLAQGPH

SEQ ID NO: 61636 - protein, 66 aa, Zea mays
  Coding DNA Sequence Number=SeqID_18261
  Subcellular localization annotation: CTP_CleavageSite=52; ConfidenceScore=5.16e-01
MEMREMGSGDPITARSRRSVAQVARQRTLRGRFARQLRFVAKFTAWEMNLTSGAAIPDPPLGQMGD

SEQ ID NO: 61637 - protein, 108 aa, Zea mays
  Coding DNA Sequence Number=SeqID_18262
MRIKNSEGPEHKSDNVVVRPSSASTFVFRRKKGPKPGREHNHQESLAGPPSQQNPPEGLPRNPLQDRHHSKILPRAFPGIPCRTAITAKSSRGPPYTDHSPTALAPFG

SEQ ID NO: 61638 - protein, 131 aa, Zea mays
  Coding DNA Sequence Number=SeqID_18263
MGKNNKRKREPTPPSEDFADSEYSEEELSYESEGSPAPVSPPASSDDSDDSQGIAAEVWTYIWAVERSGLEGSDESEYSSDEEDSPEEDGEGDDDDNDDDGGDDSDDSDDGDGGSRSGNDGSSKGSNKASG

SEQ ID NO: 61639 - protein, 78 aa, Zea mays
  Coding DNA Sequence Number=SeqID_18264
MDEYNRADNDLKKGGGIQTYENVEATKKYSFRNAEPKIAVKVSLKTQKVVLKERSGMQSQIPPKYKAKREKSTRIPPK

SEQ ID NO: 61640 - protein, 182 aa, Zea mays
  Coding DNA Sequence Number=SeqID_18265
MEQGGPPWPTWRWRSPPKGGGCCGTSCATSPIRGTGQETHPQAFSTIDSKSVQDQRPKISITWIADSSRHMSVLKWTKWCRTHTPLQPKQPHTKGGGPTHQSGGGRHPTHCARRPTLAEPPRTRIIYMSIRNINRKQALKDTKPIVDSKAMSLENESALQTVHVRRGGRKCQSYGSYLTGKT

SEQ ID NO: 61641 - protein, 15 aa, Zea mays
  Coding DNA Sequence Number=SeqID_18266
MGKQAAALGFQILHP

SEQ ID NO: 61642 - protein, 179 aa, Zea mays
  Coding DNA Sequence Number=SeqID_18267
MKGEGERREPRREFRFFNDEARRGGPRCFPIPRGSRPRPRLHRAGDWSIAVGSKGTVTPRPSVGNRIYADEQVTEEPEVAQVGDSEQELAEGKGKRGGEAAGIGRFSGRSVCDSFLDEGFLYRLRPRNRSGFSHASGTLERPRSATLPRLLGRGVWGPYNPVADGYHDLWVKMCNLCRV

SEQ ID NO: 61643 - protein, 179 aa, Zea mays
  Coding DNA Sequence Number=SeqID_18268
MKFDAVPMGRVGRRSGCCVLGSRRGRREYPNHGGRFVHDSPLPMTRNLAHLQAQIIHDTFHPHTPFVERTGGFLERPDTIALVFGKIREHRLPARFLLRRALIPFGIMISESASDLVQDDLSIWIHENLLTAKTSEMGMNTRRIQRENARIGQGSLNLIPLLATRYGYKVAVEENSNKE

SEQ ID NO: 61644 - protein, 393 aa, Zea mays
  Coding DNA Sequence Number=SeqID_18269
  Homolog annotation: Hit_ID=A2YHQ0; Match level="QueryCoverage=83%, HitCoverage=66%, E-value=1e-74, Identity=43%"; Hit description =Putative uncharacterized protein
  Pfam annotation: Domain name=DUF1719; Domain location=91-302; Score =288.3; E_value=1.5e-83; Accession=PF08224.2; Description=Domain of unknown function (DUF1719)
MVCSAVVSETVSKIVSSLLAKDDGKSSAAENIERLEMAHIKMESALHMAEKWQVTDVPLLRWRSKLKRAAEECDGALRRCKQRALEEEEIRQSSFPKRIAHATKSFISSFPAAGASRDETSSGSSDVRRFERFADSSHEFLKFVEVGGTPWKYTFFNPLIGHLLAGKSMKYHAVHMNSSRGLYLGFMLRLSESTDILGVIIRCLQSVTPRLKPTAECVKRELIQLPTQDFSWLPYGLHTKNEYWNNVHCSLTQWYRPNPLCCNEHKNNNNLITSSVIGSTFPEEVIVDSDFPPVKVGVLIIPHDSPEDMEPGAETYALEVIAEKEKGMVHDFFKDAGLAGSAPAPASHQMLGATILVLLEVQQAVRADRSGSTSEPTTRPGAQAGASGKAASG

SEQ ID NO: 61645 - protein, 128 aa, Zea mays
  Coding DNA Sequence Number=SeqID_18270
MEIPRRTERRENPVLTMPISPAAAFSTSISLHAVSCSICHATSPTPLLLAIAPSLPTMSGHLPSCSDAHQGTRRRQLWFYVAGSVLQTAGTLINRAMRKTSQVDPKRGLLRMVKLMDKPEDGRQVDVI

SEQ ID NO: 61646 - protein, 201 aa, Zea mays
  Coding DNA Sequence Number=SeqID_18271
MANAARCREEREGEDNQEGEYKCYYLLQPAIKRRPTLQRIHSAPDHLLLGFLVRRPITSSVPALLSSPNSRSPTGILTFLMANAARCREEREGEDNQEGEVAYRNTDILVQAAAAKEQSRASRNPAPSIGGTTGLGETWRTAELGELQGEEGSLGARESSAPASARNSRAICRTSTHSAHIKRTGAAAKISRSEVRRLRRG

SEQ ID NO: 61647 - protein, 94 aa, Zea mays
  Coding DNA Sequence Number=SeqID_18272
MTKTSPVSDCGTRKVDGVSGPPLRVATVLRGGKPLPCKDQDGLTALWEFPCITYALWVPAQKVVSRLGEDEPEYDFANDGWKMASWEDFTIERT

SEQ ID NO: 61648 - protein, 43 aa, Zea mays
  Coding DNA Sequence Number=SeqID_18273
MVIKWAGDIPTAMIGGKLSTSVLIRVGVNLPLRISESTVNDPQ

SEQ ID NO: 61649 - protein, 171 aa, Zea mays
  Coding DNA Sequence Number=SeqID_18274
MVIKWAGDIPTAMIGGKLSTEVCGSAAVLDLRQREPLGSPIRAGSSASPDLPAAVSLGERDYGGGGGGGLLLLELTGGWREGVAELRLLCTTVKSERSEPNGDHGGVRAARITQRSVEDGTDDWVQPVSGGGTGRDSGSTRQRSIAAASAREAVRRAPCGSEGARREREGG

SEQ ID NO: 61650 - protein, 83 aa, Zea mays
  Coding DNA Sequence Number=SeqID_18275
MAHRTVRHTDIVGPATSSVPLESDRWSSDLWATLDVRWRTEAPVHCPVAVARDSRCAGVTPDSPVHTDMSGDYSGRAVGFSRS

SEQ ID NO: 61651 - protein, 195 aa, Zea mays
  Coding DNA Sequence Number=SeqID_18276
RAGSEAFPRLRSLLGSLLVHRTLSGGTPDSPADLGHTPMPSPNPRLSTKSGPQGSRYFTVYGVVGLDSKAASLATSTTVPPATPLQRSTSTRLSIAGHASTGLGHISVVHVSAIAIVHVHLGLLLTPIKGGAQGPNERQHRQVNTEDVTLKHFFHAYAVTVQPSHHYTSSHSRDLGSAPSLEQACNPCYEHPGAR

SEQ ID NO: 61652 - protein, 371 aa, Zea mays
  Coding DNA Sequence Number=SeqID_18277
MRQSQRTGSPGCPWQRSPPEAAPDDPLEADVEGAMEGAPVGGPREAAPGVALKVGTDSSTWDTATQALWVPTTPEDNAAWANTEPPALELPQLRHRFSEARRDLWDLEDHVASEWGSPRVGAGELAAATASTETAMVERDAAVKAAAAVEEQRDRIATRFLTIREDVDLALGHYQKATEECRTTRALLEEAQREQDLMWAAVTSERDAAREEARKATEEKDAMKEAKASLECLQGQLVEREATIGPREEAAIKVIEERDALLEVASKVNSVEAELAQARSLHEDHLKMCSTMSLLGWWSYWEVREAIKALGLDPPMHPNASGNMLSGLRQAIVGLAPTIAGAKALLTEVMETEGKEVDLQCALDALVLVKS

SEQ ID NO: 61653 - protein, 201 aa, Zea mays
  Coding DNA Sequence Number=SeqID_18278
MVGFGRGEVGAAIFSRSEVGSDETEIWAEAEARLGRGGESSRGRSRGCYEDFPEAEIDSGKAEILSRPEPSSGEAATTVVSLRHSHRSGVNSAVYLVRTHGLCKYFGRGLGMRAAPEPSWALFVGDTNNLAAAWCKGSPRAFARSKRSVRDFLDFFVIRPFVAFPQGGRGESAILPSEGNEYDVSGELLTGDPSGSPSPIR

SEQ ID NO: 61654 - protein, 63 aa, Zea mays
  Coding DNA Sequence Number=SeqID_18279
  Subcellular localization annotation: CTP_CleavageSite=43; ConfidenceScore=5.05e-01
VPKVHSKPIKRTKLGSKLRAKGIPRGYLVWRTGLSGVPPDSVRCTRRLPNKLLSLGKASEPAR

SEQ ID NO: 61655 - protein, 118 aa, Zea mays
  Coding DNA Sequence Number=SeqID_18280
MDKQEHHESSQDPPPELFEPLTMKKIPAPSLEVKEEATSTPLAPPPSEELQEPVEMAMGTRNPKPDGFLPHYGTGLGQFSYPWEPVPLEEEFDPVLPSQLLPEEVINISSLLTHPGDI

SEQ ID NO: 61656 - protein, 862 aa, Zea mays
  Coding DNA Sequence Number=SeqID_18281
  Pfam annotation: Domain name=Tropomyosin; Domain location=489-693; Score=-120.1; E_value=0.099; Accession=PF00261.11; Description =Tropomyosin
  Subcellular localization annotation: CTP_CleavageSite=44; ConfidenceScore=5.02e-01
MSSSSSSAANAPPANSSSEDTFSDVAAVELQPGHMVEFGVSRISSVHVQEMQQLGYFGNDVGRVPGAEEIPEPEGELVVFEAFFIAGLRLPVHCFVAEVLQRFEVQSAFRRGLRQELLSALAKEKGWNEVKDLPGLPAAVMCSHCYVAFPSFEVEEDDEDEGALRCAARMSSGRDLVEEFIGYGVWPLVHGWVLDKVCPRQMPTLSQQLVRSPTFALDLRGRDPTAFVHEVEDGAVRIVGRYAPRTVSLPSWDIRGSNVRLNRVFDLNRLPYGGYPGDDAATAVDRRGKKPVAVAEEGPSREAAPAIKKRKIGTAFGGLGVSDRFAVELMGTYAALRGRMSSPELQESSARMLKERRPPSPVHTDEAAAGGADFDTDIYVDDYLVAPMATTSPTTAVGAKGTLQDPWSKFCASGEISSAAAAKDVAGSMSQQLRHASQQLKHAAAFADHVALGALTSEFAAERQQLEGRIKRLRAQHMDAVRDKSAVENKSRRLTERLAAAEAEKEDLRRQLELKRKDANRAYAEAQAVQAEAKLARAEASLACQCAEEMETRLCVLRDRLDKMEASTRAEVEQTHTQLVDTYRELGAWTAPFEVSDQDVGLRFLGWLQEELEVLPTIVTGLMSFASLVTCEGAVEDPMLKRSAGALFDRMWGPHGREIVRERSDRAMDQMAHDEEVEDLGDLDSALLEASGVELAPPSDAVKGPLATPAPTGAGEDPVPATVPTEATEAGNANFVATSTVVPADDNLSGSRFECFESDAESSPRVEVGETADLPSASTCRRRRVVSKRSVGEISRSGRRCRMGMERGRLRVDRIGKRELLSSPIGASIGEGDLRNLFEGEELKIMLFNYREMGIIPKVEPM

SEQ ID NO: 61657 - protein, 108 aa, Zea mays
  Coding DNA Sequence Number=SeqID_18282
  Subcellular localization annotation: CTP_CleavageSite=22; ConfidenceScore=5.47e-01
MAPRTLPDDGGSRPPYGSKRTSARTRRPRQLSLRQLSAPLRKQEDVSKDSTAPTAVPPPGSSAPPTDPTTKAVSPSSTVRPVAPVPLTVTDRRRYTPLLLLCSKTNPD

SEQ ID NO: 61658 - protein, 388 aa, Zea mays
  Coding DNA Sequence Number=SeqID_18283
  Gene Ontology: Mol. function=transferase activity; Cellular component= membrane; Biological process=megagametogenesis
  Homolog annotation: Hit_ID=Q6Z527; Match level="QueryCoverage=99%, HitCoverage=85%, E-value=1e-104, Identity=61%"; Hit description =Exostosin family-like protein
  Pfam annotation: Domain name=Exostosin; Domain location=105-339; Score=171.1; E_value=3e-48; Accession=PF03016.6; Description =Exostosin family
MAVSLLALFCWALVNSRINVAMPYSAFVMRDVDKTPAFTGLEDRQRHPAGDPAWTSAAPQAVPVTSNVTAGSVKLGDPVLREPLAGEAERERSERCDADSAALRVYMYDLPAEFHFGMLGWERKGKLAWPDVRDAHAAPHYPGGVQPAAQRGVLAHAGTSCPPPCRPAATWYSPDVANLKKDVIAPYKHVLRSLGDGDSPSFEQRPILAYFQGAIHRKAGGKVRQKLYHLLKDERDVHFTYGSVRQNGIRRATAGMSTSKFCLNIAGDTPSSNRLFDAIVSHCVPVIISDDIELPFEDMLDYSEFCVFVRSADAAKKGFLLRLLRGISREEWTKMWMRLKKVTHHFEYQYPSRSGDAVQMTWSAVARKMHSVQLQLHKRARFHRTVSV

SEQ ID NO: 61659 - protein, 153 aa, Zea mays
  Coding DNA Sequence Number=SeqID_18284
  Gene Ontology: Mol. function=carboxyl- or carbamoyltransferase activity; Cellular component=ornithine carbamoyltransferase complex; Biological process=amino acid metabolic process
  Homolog annotation: Hit_ID=Q8SA97; Match level="QueryCoverage=43%, HitCoverage=12%, E-value=9e-12, Identity=56%"; Hit description =Ornithine carbamoyltransferase
MAAGEILAPSLCDVVAVGGALEPGGGTAVRAVESLLTFSCFRWGDVEAPPRSRSSPSSVAEVESEPLGQARRRPLAKARAEFESWGRAKQSSSSSGAEPKSEPWVGQSGVRRLPGLSPSPRPGSGGAEFAVFRGLARVRALGRAERSSPSSGA

SEQ ID NO: 61660 - protein, 159 aa, Zea mays
  Coding DNA Sequence Number=SeqID_18285
  Subcellular localization annotation: CTP_CleavageSite=37; ConfidenceScore=5.42e-01
MQAACNRAKWAHFSDSQRAQHGGPGPRVMRPARRMLRAGRSSGHVDSQAYVPSGGSERTLSHDGPGKGDTPKRTLPHEGTRLRASLLIRGSKAGPSEGFNSRLRARGLHTHYWSEVQRPAPRKGSTAASGYSGSAPTTDQGFEGWPPKGSQPPQTQSEG

SEQ ID NO: 61661 - protein, 316 aa, Zea mays
  Coding DNA Sequence Number=SeqID_18286
  Subcellular localization annotation: CTP_CleavageSite=8; ConfidenceScore=5.02e-01
MPVPRTARARATATPRTTRPVALTLRQDRRRLWQAKQVTLRFRHNDRVKKGTGKGDTPKGILLREGSGPRAPLLIRGSKAGPSEGFNSRLRALGLRAHYWLAPEGFDSRLRRRARDDPGYVRYITKARAALPRGLGAALANLAPAKPLTTSTYQPENLGLDCAPGLRPPRARAADPGGFTSRLRVPSSNGHTFGSPEAQSSPRSNLGWIATPTDRIAGAFNARMPSPASGAIGSSASPDPRARPRPRKTTNSASPDPRARTQPWPQTMVSASPDPGLGLDLDLGRQTRPRPRRSLRLARPRARTDHVTGGPSLSYP

SEQ ID NO: 61662 - protein, 534 aa, Zea mays
  Coding DNA Sequence Number=SeqID_18287
  Gene Ontology: Mol. function=6-phosphofructokinase activity; Cellular component=6-phosphofructokinase complex; Biological process=glycolysis
  Homolog annotation: Hit_ID=Q6Z522; Match level="QueryCoverage=100%, HitCoverage=100%, E-value=0.0, Identity=85%"; Hit description =Putative diphosphate-fructose-6-phosphate 1-phosphotransferase
  Pfam annotation: Domain name=PFK; Domain location=178-485; Score =11.0; E_value=1e-13; Accession=PF00365.11; Description =Phosphofructokinase
  Subcellular localization annotation: CTP_CleavageSite=49; ConfidenceScore=5.12e-01
MAAVLKTSGSFCSTQQQHFQQSRRDQFLHGSYSNFKHCKSKKIIKPAPLCARVTSSKVELDVKDPYWKQKFQEDWESRFDLPSITDIYDLKPRPTTFSLKKNSTICCCPSRTLTGDENVDMWNGYVNNDDRALLKVIKYSSPTSAGAECVDLDCSWVEQWVHRAGPRKEIYYEPEEVKAAIVTCGGLCPGLNDVIRQIVFTLETYGVKNIVGIPFGYRGFFEKGLKEMPLSRGLVENINLNGGSFLGVSRGGAKTSEIVDSIQARRIDMLFVLGGNGTHAGANAIHEECRKRKLKVSVVAVPKTIDNDILLMDKTFGFDTAVEEAQRAINSAYIEARSAYHGIGLVKLMGRSSGFIAMHASLSSGQVDVCLIPEVPFTLDGEFGVLRQLEHLLKSKGFCVVCVAEAAGQDLLQESGATDASGNVILSDIGVHMQQKIKMHFKDIGVPADVKYIDPTYMVRACRANASDAILCTVLGQNAVHGAFAGFSGITSCICNTHYVYLPITEVITAPKRVNPNSRMWHRCLTSTGQPDFH

SEQ ID NO: 61663 - protein, 88 aa, Zea mays
  Coding DNA Sequence Number=SeqID_18288
MQPKAASVDPRLRHVPIAIQAPQSPLSRAVNGGRDIVLALLREGAEGLIDLRENGSRLVGKVCNLYRVLETGISVMLMVKSGLGILFD

SEQ ID NO: 61664 - protein, 140 aa, Zea mays
  Coding DNA Sequence Number=SeqID_18289
MGKSKKGGGSSHHSGDKREPTPPSEDFGDSEYSEEEFSSESEGSPAPASPPASSDDSDDSHGIAAEVWTYIRAVERAGLEGSDESEYSSDEENSSDSSEEGGGGDGGDGGGDSGKGGDGSGKGGSGDGSSGSKGSNKASG

SEQ ID NO: 61665 - protein, 459 aa, Zea mays
  Coding DNA Sequence Number=SeqID_18290
  Gene Ontology: Mol. function=transcription regulator activity; Cellular component=nucleus; Biological process=regulation of transcription
  Homolog annotation: Hit_ID=A2YRU3; Match level="QueryCoverage=97%, HitCoverage=100%, E-value=6e-66, Identity=43%"; Hit description =Putative uncharacterized protein
MGDHAEMLHATPAMYNGAGAAPRGGWWSTAVPATTCSTELAGGFTTWSSALAASYDLAAEGAKANKSATTASSESPGNNSSVTFQEPAGGVGTAVVQQPLAGCADWRHPYLSSGAATLHGFLQDGHQQDMSSSTTEQSPMAASSLMNPSSNNLALALQQGHHHQEPDHQQMLSNFGGSEAELLLSPTTSPYGFQSSLLRSLMEPTADAAKPALPGYQQQYDQYQQMGMGQARSFAPAGGAASREALQFTNDAPSWNPSAAAGFGVPPAPAPAPAPADQASSSVRSVKPSPAARATATLALKTALEGVGESASSIITKKKANGELVPAFKKSRLQTPSPLPTFKVRKEKLGDRVTALQQLVAPFGKTDTASVLHETVEYIKFLHDQVGVLSAPYLKNNGHQVPYLKRSSPDRSEDDNSHAGERSLKGRGLCLVPISSTFAVASEVPVDFGWSTAFAASFR

SEQ ID NO: 61666 - protein, 107 aa, Zea mays
  Coding DNA Sequence Number=SeqID_18291
MAMLHGTGARDVRLARLGVLTWTKPVPALALAHRWADLSGGQHTTAWATRRGSDDPLAWWSWPTRGLWRGRPLGGVYGGALAVRSQRCCCLLVLHSGPTVMAGYPAV

SEQ ID NO: 61667 - protein, 174 aa, Zea mays
  Coding DNA Sequence Number=SeqID_18292
  Gene Ontology: Mol. function=protein binding; Cellular component =cellular_component; Biological process=response to virus
  Homolog annotation: Hit_ID=Q6Z6T3; Match level="QueryCoverage=21%, HitCoverage=11%, E-value=2e-15, Identity=97%"; Hit description =Nuclear protein-like
MEPQEGWAEQVPWPACAQGASEEARPGHPDYKSPDLAEQRGMKNRGGEREQRTKSEEQAKAAQHPYLQKSCSSSVGLLTFYGDFYLKKYEEHKAAAVGRVLLNDVSNLPLICLLDEYFYWINKSGWFEMPFNIWCGGCNSMIAKGVRFNAEKKQVGNYYSTKVNHIILVIGFTV

SEQ ID NO: 61668 - protein, 111 aa, Zea mays
  Coding DNA Sequence Number=SeqID_18293
MARWFIPWFGQDQRLPTPRCGVPTDEGCNQPLSSGPKTHLNTTVFCLLYSILFARNLHTLEPLALTLEVHKEARRESGGSAPHEDQDLELKKQELELCQTVPKSPKYLEMT

SEQ ID NO: 61669 - protein, 219 aa, Zea mays
  Coding DNA Sequence Number=SeqID_18294
MTLEPHPLQAGWRSLDSESFGYRAEDTIEAIALHGLTTSADSIPWSWLPTPIGLFPAEKEDDPMWKDRVEHAKDIWAIYPGQTAHLTVMRGEAMSHLMALLEATKITLDNREELVVGLSQEMVEKDLQVEQLSTDIQELEELVGTRENTIEVLEDQLINTQQQLAEANEHLDMHHQEIQDQEANEDVDIEGGDEPASSVDTAGSGRPPSPESSVASFAH

SEQ ID NO: 61670 - protein, 106 aa, Zea mays
  Coding DNA Sequence Number=SeqID_18295
MAHEVHGPDYDPSTKLIDPDVLMRVRARSTSSSPAIRPRHDSSQHRIQQLEAQLEEERRERHEMEARIMAEREVEREARLGQSGAASNNPPEGFSPTQHQSNRPPP

SEQ ID NO: 61671 - protein, 37 aa, Zea mays
  Coding DNA Sequence Number=SeqID_18296
MGTLPGGFFAECPRWHSTKIDSLPSDAGQTLGKGKKN

SEQ ID NO: 61672 - protein, 101 aa, Zea mays
  Coding DNA Sequence Number=SeqID_18297
  Subcellular localization annotation: CTP_CleavageSite=65; ConfidenceScore=5.62e-01
MWALRGLSLQPSSAPSSLPSSLRSAYPISAPFSMPPSDFLVVVINQSVQVAGEHRDYAWFVSWVTAVRGRPGLLGDFSPRMKLHRDSVPFRGPATSQRHRW

SEQ ID NO: 61673 - protein, 108 aa, Zea mays
  Coding DNA Sequence Number=SeqID_18298
MGQGRNFWKVGSTRDRINSSPCDGHLSMYHHEMVNTWKGGGIDLPPNQHTRRIFRQPQQQPAEMDPPPPPPPVGVDPTVAAQMRMMQQMVDTMADMHSQMQQEHQEMR

SEQ ID NO: 61674 - protein, 48 aa, Zea mays
  Coding DNA Sequence Number=SeqID_18299
GNETDGFGYVYGVGKWYSFRLERHCNHCTGEDEAVEGDFQEFQDYDEF

SEQ ID NO: 61675 - protein, 364 aa, Zea mays
  Coding DNA Sequence Number=SeqID_18300
  Subcellular localization annotation: CTP_CleavageSite=50; ConfidenceScore=5.07e-01
MGKRIQQHPVRAVVNSSQISARRGASLLALPARARSDEAAAVPGPATAVVQAPVAAAGVHAGGIPEKAGEIVCLENGMSIAQWFKFCIGVGGSIANTRCDWPEWAHMKSSPEEHILKSLASRNSGTGKMGLLSRYGKITGHMNKSTYSSDLSIEGGGHTNVNKPTYSKVTASYYYSWQCTGTYEAGVEAGGGGRGHGGAGASSAGARAGPARSRGGRVGTRVGSDGGSAAGARIGGAWRGAGQGVGTDVVDIGEATDRGVLWWGQRWRVTGWPGRGGGCDRWSVAVGGAGEVEVVLWYSGPMAGSGAVAVMVLLYLDQSEICQVASPQQRLPWRSLGCDGTSQVIRPTYSCPCPTDLRQPCRCS

SEQ ID NO: 61676 - protein, 127 aa, Zea mays
  Coding DNA Sequence Number=SeqID_18301
MLHQLKNQLKITETTSKNTAEGSIKNAKEGTPKRVVEELIEEVDESISVSSTVLKEEENTSLVEGSSRDPEEDHLESAATNLQPGSDTCIDFPPSATKPIDQSVAAFLVEQPNLYPRQVTIAAPPAL

SEQ ID NO: 61677 - protein, 156 aa, Zea mays
  Coding DNA Sequence Number=SeqID_18302
MASPSPVLLRAIQALRELPGTRVTGIAQSCSPEFKNPPAHVDREPPTTPAACARGQGSSDHLRHQPAHRRDRCDLPDVTDHPAGALLPPGALRNVSDLKPIVEPRGCSVRKEKGKNPQGPRRSLEEMVAGITWPSTLPPGWTVEWDPASAEEEREE

SEQ ID NO: 61678 - protein, 142 aa, Zea mays
  Coding DNA Sequence Number=SeqID_18303
MEIKERKMNNGNLCHLKTFVNCPLKSIKTTPIHYNNLKENIILKDCNLADGEYILVPEQGAAQEVAPDPAPEPAPEDLPATALEGKPRNSASAFGNQTPQPNSCMSRGSLEEMVAGITWPSTLPPGWTVEWDPASAEEEREE

SEQ ID NO: 61679 - protein, 108 aa, Zea mays
  Coding DNA Sequence Number=SeqID_18304
MGCTGGAPNGCSPRPSSGFLKIIHSKTYIRVIERSGLEGSDESEYSSDEEDSDGGGEDEDEDDDDDDDEGDGGGDGDGSGRGGGSGSKGGDGGGSRGGSGGGGSRASG

SEQ ID NO: 61680 - protein, 189 aa, Zea mays
  Coding DNA Sequence Number=SeqID_18305
  Gene Ontology: Mol. function=catalytic activity
  Homolog annotation: Hit_ID=Q6Z8B8; Match level="QueryCoverage=94%, HitCoverage=62%, E-value=5e-33, Identity=39%"; Hit description =Putative uncharacterized protein P0470A03.13-2
MEDGVFCGVFDGHGRCGQLVSKLARDHLPFMILSQRNALLLGSDDDGDGDGDDPAFNDASPTAPSSTDGSRSRWSSPSLAPAPAQMLEVWREAYANGEDLVVANLGDSRAVLATVSETGYLKVVQLTTDQKPNPNQESSVLVMSRAFDDYYIEDCGVILAPEVMQRRIDNSDQFDILATVKVAFVPAYL

SEQ ID NO: 61681 - protein, 196 aa, Zea mays
  Coding DNA Sequence Number=SeqID_18306
  Homolog annotation: Hit_ID=A2X6T6; Match level="QueryCoverage=32%, HitCoverage=5%, E-value=4e-11, Identity=53%"; Hit description =Putative uncharacterized protein
MEKEPLDMVESSVRVIETHVDIIRSLVTDGVVDTSEPESVYTLKTTLFQIGDVCDMLEKCALSIKKYADSKRAKIIQDEALQYAEDDEAADDLEELPSPDLLTQADILEKYFGIEYDSDQSRVRQRRHGCDVIMLKDPKKRLSPVVYHLPLFVGFTDGWKPLVIANDLRAEDVCELVKGPDDGEPVYYVRMCGHKI

SEQ ID NO: 61682 - protein, 561 aa, Zea mays
  Coding DNA Sequence Number=SeqID_18307
  Homolog annotation: Hit_ID=Q4DYV2; Match level="QueryCoverage=44%, HitCoverage=55%, E-value=8e-07, Identity=24%"; Hit description=Mucin- associated surface protein (MASP), putative
MPSLGGRKVRSPRFALDLRGRDPASVVREAEDEAVRIVGRYVPKTEAQRSWDIRGSNDCLNRVFELNSLPYGGYPGEDVVDRHGKKPAAVTEDDPAPEATPASKKRKLGTAVGELGVSDSFAMELMGTCAAPGGRMSSPELRESSARMLEVTGGRWPKDVPIPRVAGEDFFTSRMARDLRVFPYGRNIVAVVSAVMNKDRQEAAQKRRAVIRLPEARPKRARGTAKATAPGGSQPMLAAKPAAPGSSKVPESVKAAGAGGTKSAPNGAAKARELPSSGKRVADFGTNISLDDYLVGSGEGQLVVVPPAVATMMSVAVPGVKGSARSAGGEISAVAAVKDEAGTVSRRLREASQQLSQAADFADRVASGALTADVSAEVERLRAQHADAVREKSAADSKCRKLAEKARMERAEASTRSEVERTRKQLVDSYRELGARTADFEVPDREAGLRFLEWMQEELLALPTIVEGFMSFASLVTCEGAMNALSREGCSHYEVFDRSDEDFGREIYKVEDPMVKDSAGALFDRMWGPYGREVVRERSDRARDQMVRAKDVEDFGPLNGT

SEQ ID NO: 61683 - protein, 57 aa, Zea mays
  Coding DNA Sequence Number=SeqID_18308
MRFDIVSGSIQILVVLCFKLLRTRKSLTKQTARKLFRARDDEDDSADAGTNDHVVPR

SEQ ID NO: 61684 - protein, 58 aa, Zea mays
  Coding DNA Sequence Number=SeqID_18309
MVDTSAVTARRQPRSDDTTEAAAMKTLTTFCGYHPLEMVMHPLGLFPAKKRDDPMWCN

SEQ ID NO: 61685 - protein, 148 aa, Zea mays
  Coding DNA Sequence Number=SeqID_18310
  Subcellular localization annotation: CTP_CleavageSite=23; ConfidenceScore=5.12e-01
MPEGAYKCPWCAAVHSSLRLTPRAETPTPASSPPPAITARARPPWPTLPVDPQPRPNPWTASPRGGEAFPSLSRGIASPEKRARHRRTSADRHRAWTGSHNCNLADGEYVLIPEQGAVQEDVQEPAPEPATEHLPAAPAFEGKPRFYA

SEQ ID NO: 61686 - protein, 151 aa, Zea mays
  Coding DNA Sequence Number=SeqID_18311
  Gene Ontology: Mol. function=binding; Cellular component=mitochondrion
  Homolog annotation: Hit_ID=A7R3D3; Match level="QueryCoverage=50%, HitCoverage=15%, E-value=6e-18, Identity=59%"; Hit description =Chromosome undetermined scaffold_504, whole genome shotgun sequence
MENNPGKQCYRKGGPSEEEGPQQKYQELLVIASLRRFADLSKVMVRSSMNPIVSDQAICLDLIAKSRGIAVAKRYVLDLLETSKTYFRYDTLLNSYCKVLMIEKAESLMEKMKELNFLSYFIRERWSTGGTKYLEYVLTRIHSWDYKKRES

SEQ ID NO: 61687 - protein, 112 aa, Zea mays
  Coding DNA Sequence Number=SeqID_18312
TGAEDTVESTALHVLTTFCGFHPLELSTHPIGLFPAEKEDNPMWKDRVEHTEDCEVRQCDEAEVPDLSASRDNSDLAEDDPCDPTTTSKPEAPMQSLNQLPVVTDLADVRSA

SEQ ID NO: 61688 - protein, 42 aa, Zea mays
  Coding DNA Sequence Number=SeqID_18313
MAIALLIQPSKGTVRGLDEDAGRGDLVGCVGVYGRGQGGFYN

SEQ ID NO: 61689 - protein, 735 aa, Zea mays
  Coding DNA Sequence Number=SeqID_18314
MTEEDPSQKAAPATKKRKLGTAVGELGVFDSFAVELMGTCAALEGRMSSPELRESSVRMLEVTGGRWPKNVPIPRVAGKDFFMSRMARDLKVFPYGWNIAAVVSAVMNKDRQDAAQKRRAVVRMTDPMREAKRARGSGKGAASGSSKLVLAAKAATPGPSKASVSTKTTASGGSKPPPGGPAKGWELPSPGRHVAEFGTNISVEDYFVAAAAKDVAGSMSQWLREASQQLSQQMTQQLKQATDFADRMSSGVLTADVAAEVESLRAQHADAVREKSAAESKNRRLAEKVAAMEAEKTDLRHQLAEERREANQAIAEAQATRAEANVAQAESSLASQRVEELEARFNALRSHVDKAEASTRSEVERTHAQFVDAYHELGAQTADFEAPGQEVGLRFLEWLQEELLVLPTIVEGFMSFASLDTCEGTMNALSREGCRHYEVFDQSDENFEREIFKAEDSVMKQSAGALFDRMWGPHGREAVRERSDRAIEQMARAEDVEDLGGLAGAPSEAAEVNPVPPSDAGEGSSAVPVPTMAGEDPLSAPVPTGEDALRVAAEPAAEDPTATVGPSQGFGPAHATATDNANFVAASTVVAKDDSDDSVSKCFESDDSGSLIVWTEESSDEDLDYFAALDEAAAETSPRVMGAENLPGASAGHRRRRAMAKQRVGELSRSDRRHRGEMEGGRLRVDGTGKRELLSSPAGASVGEGELRSLFAGEELRIMLFNYREMGIIPKVEPM

SEQ ID NO: 61690 - protein, 28 aa, Zea mays
  Coding DNA Sequence Number=SeqID_18315
MASSCSIAHRPPQAQPGTLSLGSSPNLE

SEQ ID NO: 61691 - protein, 220 aa, Zea mays
  Coding DNA Sequence Number=SeqID_18316
MAGIARSTCAGGCSRRRRVYRPNHGDLVQSKGTVMKHTTTFIFGPSLDHKPIHNDPNRIVVPGGVGQTHNEIHANVLPFPRRNGKRLVAILESMVTQLHWAFRLKASATTLALPGWLQLLSYLDVYILIGPFCLHVLNFLTVQIQVLVGFLKLLLCGLELIFQNLDGVFPGLHLVFKLLNLGGHLLYLEVLFHQLSGCWGPSAYEGPQKQDLTIFLEYNV

SEQ ID NO: 61692 - protein, 191 aa, Zea mays
  Coding DNA Sequence Number=SeqID_18317
MADYDRVGQEKWSKVYKLRNGMGNWMEFVAVIEAKFGVDAYPKALRKLLNLRHTESVEAVCKLILGVDVTRLDAPFCQAVSDEVVSQPDVLAPFMEHEVLGQCQSGLAVHPEFHRSSVSPEEITEQSSQPERLSRSSGRRYVLGLAAGHGHHLLLDRLPANEALAEEEEDPACALASVDVNGVVAVAVYDK

SEQ ID NO: 61693 - protein, 77 aa, Zea mays
  Coding DNA Sequence Number=SeqID_18318
MATAESHPYMARRGHGWRGILDGSEGVQPDFGLYKSYPLNRNLVLEIYVIVDITPQLITLNQRSKSNKYHKNKHSST

SEQ ID NO: 61694 - protein, 518 aa, Zea mays
  Coding DNA Sequence Number=SeqID_18319
  Gene Ontology: Mol. function=nucleic acid binding; Cellular component= nucleus; Biological process=response to DNA damage stimulus
  Homolog annotation: Hit_ID=A2X5J2; Match level="QueryCoverage=97%, HitCoverage=62%, E-value=1e-176, Identity=56%"; Hit description =Putative uncharacterized protein
  Pfam annotation: Domain name=DEAD; Domain location=295-507; Score= -14.6; E_value=0.00052; Accession=PF00270.20; Description=DEADDEAH box helicase
  Pfam annotation: Domain name=HIRAN; Domain location=112-219; Score =48.0; E_value=3.2e-11; Accession=PF08797.2; Description=HIRAN domain
  Pfam annotation: Domain name=ResIII; Domain location=291-501; Score= -37.7; E_value=0.07; Accession=PF04851.6; Description=Type III restriction enzyme, res subunit
  Pfam annotation: Domain name=SNF2_N; Domain location=297-516; Score= -25.7; E_value=2.6e-07; Accession=PF00176.14; Description=SNF2 family N-terminal domain
  Pfam annotation: Domain name=UBA; Domain location=7-43; Score=18.1; E_ value=0.033; Accession=PF00627.22; Description=UBATS-N domain
  Pfam module annotation: Pfam domain module=DEAD::HIRAN::ResIII::SNF2 _N::UBA; Domain location=295-507::112-219::291-501::297-516::7-43
MVKEREEQVAIVRMVLGEGTPEMDIIRALHMAGDDPTKAINILLDLNKAAPPLPPSPSPFPCPSPSPSPGKPAKALVDSTPPCKAPTRPMPTAEKPKSTTSNGGSEEHWWLVGSAEMVGLSTCKGRRITSGDVVTFSFPNATTAVGKSRPSRPALASCSSEIMRFSTPSHGEVGRIPNEWARCLLPLLKENKLKVKGSCKSAPEVLTIMDTVLLSAAFTPEDLYSRKRPTETKSSIGSPAAKLTSGRLRLSSDGNEDDHGEETVSDSDLDDIIGISDSCALEERAPPDSLMCDLRSYQKQALHWMLQLEKVKIKILADAMGLGKTIMTIALLLSDSSKGCITTQNAAQTPREASGLGESHDAVKKLANPFSFSKHKKPKAPLIGGSNLIICPMTLISQWKAEIEAHTKPGTANIYVHYGQNRPKDASIIGQSDIVLTTYGVVSSEFSIDGSTENGALYSVHWFRVVLDEAHMIKSSKSLISLAAAALTADRRWCLTGTPIQDYGADILLLFFTHVFAY

SEQ ID NO: 61695 - protein, 75 aa, Zea mays
  Coding DNA Sequence Number=SeqID_18320
MPVRGGIPALLFLETVPGFLKLVELCKGLVVDHLPFTSEVSKGLANPGDMGYTTCGSALTLLLINLTLHMNSHLW

SEQ ID NO: 61696 - protein, 116 aa, Zea mays
  Coding DNA Sequence Number=SeqID_18321
MGVPGESVMAISVALCLGCCPAPIDGSGPLAGVYGCSSGLRRAGSALWGGYSSPYFLHHRWPHLIGNRLCHAIADSYYIPFHLNGDLIRAAGSGSCGLDDKIPLRPTHLSKENPAL

SEQ ID NO: 61697 - protein, 103 aa, Zea mays
  Coding DNA Sequence Number=SeqID_18322
  Subcellular localization annotation: CTP_CleavageSite=61; ConfidenceScore=5.19e-01
MNSRLPKRSTAPGRRGCWRLPIWSLTVNTQQAPTWRANCRRFETGGSLRPTSECRGVPQPRWVERVGEREGGKKRGGRRKERIQVYNGGVAVCYVSSGGELAP

SEQ ID NO: 61698 - protein, 219 aa, Zea mays
  Coding DNA Sequence Number=SeqID_18323
MTPTSLLTLSRKGWVARPITRDAARGCHFHDALDTLLRRAFDRHTWSVEYRCVVYQHSRGVYPDRWEATCLVRCPENSLQGAERDSAEAAMQDAARRALSHYCSVFGGAADGLDLKYYPRRSSGSTGGVIVSPVGEGNPRLSSTVNLAAVLNTELDHALDELSRARAEIALLRAERAERRHLEDGSPAPVGTQHPYRSPQRGHQSYGNPDCKTKITLEP

SEQ ID NO: 61699 - protein, 55 aa, Zea mays
  Coding DNA Sequence Number=SeqID_18324
RIRGVVRFAVVPSMGLGRHCGTGGYEIDGSGYDYGAGEDEAVEGDFQEFQDYDEF

SEQ ID NO: 61700 - protein, 546 aa, Zea mays
  Coding DNA Sequence Number=SeqID_18325
MESSSLRTERESRLMDGSRYRWSEIKWFYLWFWFNDANDVSSMRKCCPKKGKSESGPRNHHSSRCKGKYSSGKYKSKGGFNKEALKKKYLQKAKIKERVFLASLSDLDHDSDDIVSSSSDEETERRVEDKLNRLCFITDTAGGFCTMALGEDVVDTNDNKDIGDDTTFEVLPAADDLAVEIEELNAALASQDKLPRQASRERREFRSKYESMLRELESARASVEVSDETECDECALHMSNINTLQTKYSTLLDECDELRSRSIMLEGLSPHIRTSLSSFTTCTHDKYNHSRLYGQSLNLYSYGPNPRVMKAGEHREDKKGECFVRFGHGGGLTPSGITAKKKEIGSQMDVRCQTSFCQNEDDFPKLLRACTVHLGIRSQPEYDGREFVEHGTEKCVVTVYIGSSPHHVEWSVTAGGHRFKDTCQVVARKALRALCQINEEEVADTPLRFFSPFQRNRLVWMARMCALEVQQLLEDDPSVRSAAVSSMWISPQLKPVVTCLGKVVKSLLVEALKQAKDEHVQKLMEALRIQEPASSNLVQPMRAEDP

SEQ ID NO: 61701 - protein, 186 aa, Zea mays
  Coding DNA Sequence Number=SeqID_18326
  Subcellular localization annotation: CTP_CleavageSite=16; ConfidenceScore=5.24e-01
MNAQTSPELNSPPFARARRVRGHPSPCRRRPASPAIPDPVRPSETSEHTSVKLPEQGIEVCFAGDASPRSPEFTTPPECVDRIALIWPAHSPPMKTPACAHCNLADGEYVLVPEQGAAQEVAPDPAPEPAPEDLPATALEGKPRIPSEMDTSSLEDMVAGVTWPSILPPGWTVEWDPTSAEEEHEE

SEQ ID NO: 61702 - protein, 144 aa, Zea mays
  Coding DNA Sequence Number=SeqID_18327
MAAAGPWPRDLAPVSPTWLGRRAWSQIRDGDVWIRWARGHTWPSLGSWLRGWALRWHTCSVGCGPRQSGRLGAASIRGGGRGAAWRRPLPVAQVGAVGGRNRLALGRQSDPEVQWLDLPSLRPMSVVERRRASSPWWCGGEERR

SEQ ID NO: 61703 - protein, 119 aa, Zea mays
  Coding DNA Sequence Number=SeqID_18328
MTHRIARSTRVGGRPKSGEDDLGSPVKFCRVRALGKLHGPTAKLTEGQARLGSDWSGLATMDEAWAVMAGGRELAGAKEGRLASEGVIGFCLLVSKIWSPEVWFVPLLEPEANPWFYHV

SEQ ID NO: 61704 - protein, 141 aa, Zea mays
  Coding DNA Sequence Number=SeqID_18329
MGKSKKGGSSSHHSGDKRKREPSPPSEDFGDSEYSEDEFSSESEGSPAYASPPVSCDDSDDSQGIAAEVWMYIRAVERSGLEGSDESGISSDEEESSDSSEEGSGGDDDDEGDGGDKGDDDDGSGKDDGGSGRASGKAPLV

SEQ ID NO: 61705 - protein, 15 aa, Zea mays
  Coding DNA Sequence Number=SeqID_18330
DLFGKLNRDLFGFQM

SEQ ID NO: 61706 - protein, 107 aa, Zea mays
  Coding DNA Sequence Number=SeqID_18331
MDEQSANQEQRNRMKKKREELAVYSQEAVSVWGTGLSGGAPDSVRFSLTPYFFVNLKCKGERLQVVEIPRKRDIERQSKTPWYSSWSLDRLRGVDCNPRPLGRHNVE

SEQ ID NO: 61707 - protein, 168 aa, Zea mays
  Coding DNA Sequence Number=SeqID_18332
MALFIACSIRDSRLLGLERKGFLPIKEFSRRRLEKEGDVPLPRDDEGDPVYSDQLYVGSVNFQLRSNWKVGYLKILLPTSVSSEGEWFYVKNLASSAPCFTGQEPVSTEDWNRESELGLKVEVEPFIGGAQDAEGARSHWFEIGARLYALPSSALDGSSEVDAQVFQC

SEQ ID NO: 61708 - protein, 104 aa, Zea mays
  Coding DNA Sequence Number=SeqID_18333
  Gene Ontology: Mol. function=cysteine-type peptidase activity; Biological process=proteolysis
  Homolog annotation: Hit_ID=Q5NKP7; Match level="QueryCoverage=52%, HitCoverage=6%, E-value=2e-12, Identity=58%"; Hit description =Putative uncharacterized protein 9C20.3c
MAQGHISLSGEHRANCRNIQQSFADGACIDNVFMQCFIECVCDDCSKHIPPLNAHQLILDVNVGIGRIHVLDSNPYGPEMGGTIWKNYHCIPMDMGDRKVHGPG

SEQ ID NO: 61709 - protein, 268 aa, Zea mays
  Coding DNA Sequence Number=SeqID_18334
  Subcellular localization annotation: CTP_CleavageSite=48; ConfidenceScore=5.41e-01
MTKVDALPKTMEGIVCSAPASSCSCTATDRRRSRGQLRGGAASPRRLLAQAKAKVVALRTTQVEARQLCTSVARARRGRARALRPLASRAVALQGKASSLHAECYRARGDWDLLKDDGSRLKMALHRVKSHIELAESSLQEVEVHLVQDGSELAREHDATEELHKMLVQAWDAKVVVDEVRAAAIEKMRELLLAYKNVVASGHRADTLVSERNSELQELRMVASMVCAHLSPPPSTKAPLIDRLRELPDHVERFVTEGICRGGGIALG

SEQ ID NO: 61710 - protein, 94 aa, Zea mays
  Coding DNA Sequence Number=SeqID_18335
MRQQQRANSGSPIQEEEYQRQHQARILAREATLRQQQEELDTLIERFDQVYDNIEQKCLEAKKPQARKTSIQQAEVNQWQHSGTRSRGTHMGSS

SEQ ID NO: 61711 - protein, 110 aa, Zea mays
  Coding DNA Sequence Number=SeqID_18336
  Subcellular localization annotation: CTP_CleavageSite=44; ConfidenceScore=5.09e-01
MKHALSCTSSKSKRAPLRQCSSPPQGLWWDRVCPPFNGNGGCIVAPLEGSIASLEAPFLRLGSGGTPGPWAYGIGIVVANEAEFASLPGKQIEGVIGDPDLGRKSLTPSG

SEQ ID NO: 61712 - protein, 354 aa, Zea mays
  Coding DNA Sequence Number=SeqID_18337
  Gene Ontology: Mol. function=transcription regulator activity; Cellular component=nucleus; Biological process=transcription
  Homolog annotation: Hit_ID=Q10MT6; Match level="QueryCoverage=55%, HitCoverage=37%, E-value=5e-29, Identity=41%"; Hit description =Expressed protein
  Pfam annotation: Domain name=TFIIS; Domain location=54-130; Score =8.9; E_value=0.0012; Accession=PF08711.2; Description=Transcription factor S-II (TFIIS)
MADEQSGLPLRRWRPFFGAFEAIDGVIEACGYPRSEFRDVRGEIVVLLRGATDDGVAEQLCAALDDVMVESLKTLLVAPVPHDLLASTDLARTVGALGSHGSFRIRSLARDVVRGWRVAIEASRATAVAVKKKLDNLCADKIPLPRAAVDEKKLHVPSAKMLPAAAVDNKKPRVPPAKMLHAATAAEVHDKKSNVPPAKRLPAADDEVHNKRSHVPPAKMLPTADEHKKQHPTKTLPTAAILSNQQKNMSETNKPAVTESREDGGYKTQATGELPRSRWSQASAQHPNHQGGGGEAVGAGAMEDTCIPSYEERLSRMSWFVVWCRKSELLSLGAKLGNDDLSKAIGTADAVRVE

SEQ ID NO: 61713 - protein, 39 aa, Zea mays
  Coding DNA Sequence Number=SeqID_18338
  Subcellular localization annotation: CTP_CleavageSite=49; ConfidenceScore=5.20e-01
MTAPSIKKRTSVSRPLPTRTAGRSGGRRRTTTTRSLAIA

SEQ ID NO: 61714 - protein, 418 aa, Zea mays
  Coding DNA Sequence Number=SeqID_18339
  Gene Ontology: Mol. function=transcription regulator activity; Cellular component=nucleus; Biological process=transcription
  Homolog annotation: Hit_ID=Q5W702; Match level="QueryCoverage=70%, HitCoverage=96%, E-value=2e-34, Identity=37%"; Hit description =Putative uncharacterized protein OSJNBa0037H06.8
  Pfam annotation: Domain name=TFIIS; Domain location=54-130; Score =8.9; E_value=0.0012; Accession=PF08711.2; Description=Transcription factor S-II (TFIIS)
MADEQSGLPLRRWRPFFGAFEAIDGVIEACGYPRSEFRDVRGEIVVLLRGATDDGVAEQLCAALDDVMVESLKTLLVAPVPHDLLASTDLARTVGALGSHGSFRIRSLARDVVRGWRVAIEASRATAVAVKKKLDNLCADKIPLPRAAVDEKKLHVPSAKMLPAAAVDNKKPRVPPAKMLHAATAAEVHDKKSNVPPAKRLPAADDEVHNKRSHVPPAKMLPTADEHKKQHPTKTLPTAAILSNQQKNMSETNKPAVTESEKMEATKRKLRESYQEADGVKRRRNIQTIREEEGKLLEQEQWKMHASHLMDKLLYAINCRCRPMMGIGRKNIGSRVMRRVLMICPRLLGPLALRASACSRCCGSKLVDEESELPRASSSSFGRVQPVLGTRSTLSLVLGSATMTQDGLVGYPGKRYLR

SEQ ID NO: 61715 - protein, 271 aa, Zea mays
  Coding DNA Sequence Number=SeqID_18340
MVASWVALPARLVEGSEAKAEEWRRLKSASVRVNMALETVKRMLSGFGDRLLAQAKAKVVALRTTQVEARQLCTSVAHAREEERELYDLCFEICCLQGKASSLHAECYRARGDLDLLKDDGSRLKMALHRVKFHIELAESSLQEVEVHLVQAGSELAREHDATEELHKMLVQAWDAKVVVDEVRAVAIEKMRELLLAYENVVASGRRADTLVSERNFELQELRMVASMVCAHLSPPPSTKAPLIDRLRELPDHVERFVTEGICRGGGIALG

SEQ ID NO: 61716 - protein, 77 aa, Zea mays
  Coding DNA Sequence Number=SeqID_18341
MMLRSIPEPGEPKAKGSYKRPGSFWDYIYRFSKKGNKLPDTTDVDVVSAFTYSTTNEPYSMSSDGGDRRQPPTSLTL

SEQ ID NO: 61717 - protein, 110 aa, Zea mays
  Coding DNA Sequence Number=SeqID_18342
  Subcellular localization annotation: CTP_CleavageSite=6; ConfidenceScore=5.17e-01
MKQALSCTSSKSKRAPLRQCSSPPQGLWWDRVRPPFNGNGGCIVAPLEGGIASLEAPFLRLGSGGTPGPWACGIGIVVANEAEFASLLGKQIEGVIGDLDLRRKSLAPSG

SEQ ID NO: 61718 - protein, 96 aa, Zea mays
  Coding DNA Sequence Number=SeqID_18343
  Subcellular localization annotation: CTP_CleavageSite=36; ConfidenceScore=5.37e-01
MAVGRLLSHGAPDSPMCHWTLSGAPATSASRWGSTVGALTGGASGLSGGAPDRSYRLSGSEFNVEFPGAPDTVRWHTGQSGAPDQGAFGLSFALFI

SEQ ID NO: 61719 - protein, 596 aa, Zea mays
  Coding DNA Sequence Number=SeqID_18344
MDEGTPLGGLESEDNAEPSHGLHTVLSSLWGRGHLAHRLRIRPCDATTPEGFGPETSRWATWCFDYDKTPEGDTSSRLPGKGRSSSPSLTIKEGSALPRQSPTLPRGLEGANPLRVKIFLGKSLSARISFVLFDYFGSGIMKTTEYTSDKRFCYRRASPDTRNKRKRNAALQRDDSMFGPRRPQKTYAYYRRTNPAGSDVDGGGAAAPSASTPPSAKSDRASDGNTGEGSPLRRTTSAPRPGHRRQGLLQESGPSRRLGRPPRSLSQLSPEDTSPTHGLDNSTPALVPPVDGPARLRPTKSSFRANSASVHADTAASGSGSSQSGRGWLTAARSGSSDNDLRSRWPNSNGDGLRTDAAATRPLPTSPLEGRGQAIKAKEPEAQSVDGGGDPVGDEDFFSRHHLRAADGSHLPTGRSPLGSSLTGEHRPPRRGAVPEQRQDSPRTRTLPLAACDVLGGPPILEAEGGAEVAARLASPPPSNWWSPSWVTTGEGMQPGYLMKILEAERWLKGTNFLEVMFRQRQQDESDASAPHPGARKPAWTESSPTRSKILPLRHGGWVPRVMQAGRGQKKPNRRTRSAQQPSGYKHSSTIARTSG

SEQ ID NO: 61720 - protein, 217 aa, Zea mays
  Coding DNA Sequence Number=SeqID_18345
MSVVAAVGPGAAVAAYGHGHGHGQPLCGGGARKRKDVRDHEVGLPGSDGRAAARRGAGLFVLETVEEEEEEEGADAERSSSVGAASEDDAEEEEDGDGDEVDSGGTRWTAGRRRRREGGALEAAMDMGALDDALPIKRGLSSFFSGRSRSFANLLDAASAVGSARDLAKPENPFNKRRRVLRCCSVVRRAASTTSLAALPPIAGDDDNDDDGRSVPS

SEQ ID NO: 61721 - protein, 246 aa, Zea mays
  Coding DNA Sequence Number=SeqID_18346
MARARAYKTLPDFDCTFPRTLKPHWSLARRRLPVRSESAAAQSLCHHRPASGAIPNSVQPSEKTVHTSGRLPEQGIGVCFVGEASPRSPELSTPAEYVDRVNHSTILRFLVHTVATLPREAHRALGLNQFAVVWPVYSPPTRTPACARGPDDSGHPRRQAVPRRDRQSLPEPTPPFAGPPSPPTIQLHYVILKENLSLKDCNLADGEYILVPEQGVAQEVAPDPAPEPAPEDLPATALEGKPRFYA

SEQ ID NO: 61722 - protein, 207 aa, Zea mays
  Coding DNA Sequence Number=SeqID_18347
  Subcellular localization annotation: CTP_CleavageSite=51; ConfidenceScore=5.62e-01
MGAIKVKAQSTQGTRSRLARAQPRAKAADPRGFTSRPRAPSSNGHTFGSPEAQSSQSSNLGQIATPTDPSGAIGSSASPDPRARAQPRRWTTDSASPDPRARTQPRPRKTVFASPDLGLGHSLGLRRRRTPPRPTPGLRLSLGFGRRWTPPRPTPGLGLSLSSRRRWTPPRPTPGLGLNLDLGGIATSPKLGSRPATSPVGPSLPYP

SEQ ID NO: 61723 - protein, 53 aa, Zea mays
  Coding DNA Sequence Number=SeqID_18348
MGTVDVCGAGVPLHVVCLGSLEEMVAGITWSSTLPPGWTVEWDPASAEEEHEE

SEQ ID NO: 61724 - protein, 100 aa, Zea mays
  Coding DNA Sequence Number=SeqID_18349
MAEASFHVFDPSDSFLVRPWDLLKLDPGTLVTGIAQSCSPEFKNPPAHVDREPPTTPAACARGQGNSDHLRHRPAHRRDRRDLPDVTDHPAGALLPPIAK

SEQ ID NO: 61725 - protein, 142 aa, Zea mays
  Coding DNA Sequence Number=SeqID_18350
AILALNAPAIRSVGVAIWPRLLLCEDWASGEPKLCADGGYQLRLGVLGVLLRVSTPGLPLVNPLSHEVLYGQNSFLVRPWDLLKLDPGTLVTGIAQSSRRRPPPPVLVARVTPTTSDTDPHTDVTVATSRTSLTTPPELYCR

SEQ ID NO: 61726 - protein, 99 aa, Zea mays
  Coding DNA Sequence Number=SeqID_18351
MDKLLYTRTENNFYDPDSRETVRRPRRHTSHPSLEASLWRIVSSDLFGDVCCGEVGAALLTRSWFVVWCRKSELLSLGAKLGNDDLSKAIGTADEVRVE

SEQ ID NO: 61727 - protein, 195 aa, Zea mays
  Coding DNA Sequence Number=SeqID_18352
MGSRHSACSAEAECRGSFVLLLLVTLLRGEYFLSEEMARLRHTARKSVIPFLPSRLAERPLRRTVSGQSSHLERLHHRLREEQERQRQQREQQGSSSPPEQEVESDAPAVGGATGGGPGGDPDDDDDGSDHSTKSFEPQEAEGWVARPITRDAACGCHFHDALDTLLCQAFDRHTWSIEYRCVVYQHSRERYPDC

SEQ ID NO: 61728 - protein, 262 aa, Zea mays
  Coding DNA Sequence Number=SeqID_18353
ALLAGVATCLTGRGGDPSFDPDRRMSRNESLMEPNTPTTSSLENFAENVQGPYLAHQMPRTGSASGGFPKKESTTRATWDPSTVIRAMPRPGFRSLGLGAPSTYDGSVSGSVRDPLEWFPSSYQTPCLIPPRPTPGWVSWAKRQRLKPPNVNVYYAGMWYLASMLPLAFSSKPPLTADGSRCPATQRGNDRTTLTKLAATSRRSGGIARRRGAALSVADGSAVCLGQTRVPSRNIEEKELAIVVWEQLDERISQENIDTNNS

SEQ ID NO: 61729 - protein, 240 aa, Zea mays
  Coding DNA Sequence Number=SeqID_18354
MGWVIGRHAWPGVVVSDLGRNVEARGRKHRRGSGEDRGGGWARGEVVDVARGRDHDGGESAGERSSDAGGDPPADLCCDDGAGTAAEGGRSSDGAEASGVKNPTWRILGSTPPDEERGGRRKSMAVDGAKGLLGSLGPAGGARDECVTVRRASERVGILAGSRSRSRLRHTTNGGGPGAAGVIGSDVRKSARPGRWSAWSAEVYSFFPREEGWRCSGWWHNWAEQRFAAHRDAFMWTKSP

SEQ ID NO: 61730 - protein, 416 aa, Zea mays
  Coding DNA Sequence Number=SeqID_18355
  Gene Ontology: Mol. function=catalytic activity; Cellular component =integral to membrane; Biological process=recognition or rejection of self pollen
  Homolog annotation: Hit_ID=Q10G25; Match level="QueryCoverage=84%, HitCoverage=78%, E-value=1e-146, Identity=74%"; Hit description =Expressed protein
  Pfam annotation: Domain name=Peptidase_C12; Domain location=26-340; Score=108.8; E_value=1.7e-29; Accession=PF01088.12; Description =Ubiquitin carboxyl-terminal hydrolase, family 1
MHLPPLRRVPAALLVPARGLLEARVPWVRERALDHVVERERHLVPFLLAKDVLLAATPPPHAVPLHSLPSTIPFPFRPLRFLRLYPSAFALSPHPIEVSPTPRLSALHAAEAQVVDATVPDAADRLLRLLMLAPSRALPLRLVARLRLDLGLASDFQRSLLPNYPDYFALSPDGSLLELVCYRKDLAVSSMQSYAQRTGGYKVGDVVAFPLSFPRGFELDKKVRKWLDEWQRLPYISPYEDGSHLTPRSDITEKRTVAVLHEVLSLTVGKKMEKEVLVKLGEALRLPPGFRKVVAKHPGIFYISHKLRTQTVVLRESYRRHMLVDKHPMMGIRYQYMHLMHMGKEEVGKGKGKDRRSSRSEQIIGEEFGATVDDDENEEYDDEDDVAEDDMEVGVASEDQDSDDDVDEDIKEQISH

SEQ ID NO: 61731 - protein, 476 aa, Zea mays
  Coding DNA Sequence Number=SeqID_18356
  Gene Ontology: Mol. function=catalytic activity; Cellular component =chloroplast; Biological process=metabolic process
  Homolog annotation: Hit_ID=Q10G39; Match level="QueryCoverage=67%, HitCoverage=80%, E-value=1e-171, Identity=92%"; Hit description =Pyruvate dehydrogenase E1 component beta subunit, putative, expressed
  Pfam annotation: Domain name=Transket_pyr; Domain location=154-332; Score=233.6; E_value=4.3e-67; Accession=PF02779.15; Description =Transketolase, pyrimidine binding domain
  Pfam annotation: Domain name=Transketolase_C; Domain location=345 -467; Score=165.0; E_value=2e-46; Accession=PF02780.11; Description =Transketolase, C-terminal domain
  Pfam module annotation: Pfam domain module=Transket_pyr::Transketolase _C; Domain location=154-332::345-467
  Subcellular localization annotation: CTP_CleavageSite=63; ConfidenceScore=5.41e-01
MDLGGARAHLQSQRLWAVTSAAASSPLPVRPSRLVLSAIVAAASIPPPVHHRHLRPTKPNSISSDYKRNPPPLPRTSALRIPQTPDPPNGHRIFAARCGPGHRSPRRLPIHLRGEGRAHGIGTGGTRKAGKGGCAIEHVRRVRTFYSLSMASIHEVLLFEALREALMEEMELDPTVCVFGEDVGHYGGSYKVTKGLADTFGDLRVLDTPIAENSFTGMGVGAGMKGLRPVVEGMNMGFLLLAYNQISNNCGMLHYTSGGQFKIPLVIRGPGGVGRQLGAEHSQRLESYFQSIPGLQMVACSTPYNAKGLMKAAIRSENPVVLFEHVLLYNLKEKIPDEEYVLCLEEAEMVRPGEHVTILTYSRMRYHVMQAAKTLVNKGYDPEVIDIRSLKPFDLHTIGNSIKKTHRVLIVEECMRTGGIGASLRSAIVDNFWDYLDAPIMCLSSQDVPTPYAATLEDATVVQPAQIVAAVEQLCA

SEQ ID NO: 61732 - protein, 343 aa, Zea mays
  Coding DNA Sequence Number=SeqID_18357
MDGQRWFRCRWWSADSPLHPLHHRCRWLTWDRLHPLPWTSIWRHRRILRPLQQQLLVVHHLRRHPWSSGPLLLVVDSPRAPSMLRADASSSLAIAQMGWPHLPPPMGGPNGPRSGRHDSRLGGGGGEEARPLRGQWRSALSAALLLDVEQWSGGGSARPEVGPGATCPAERRRRHRPAVRGRGGLAESATTSPARMGRAAPLARAPWRPSTLARTGTAGPRASSSKARQAPWWSHGRAGKEPRRRLELAAPFWRLLLEGALHPGARSAPWLDEARKPGGLRPGGSWELLPLATARKALVVVAATGVASLAGPACRPPGRCLFGMAGRLGCFSEPKMVYIYPFF

SEQ ID NO: 61733 - protein, 302 aa, Zea mays
  Coding DNA Sequence Number=SeqID_18358
  Subcellular localization annotation: CTP_CleavageSite=57; ConfidenceScore=5.53e-01
MGEGLRSNGRPTNGAPSPAPAAATTTTSAPGGPNSGSTDLRADAAARRPPPMPKLVRQGRAEGRRVGGQSVAGPGYHAGGRTSSSCRGRRRHRERLRSHSRPKAGHAAAASATDDNRSSPPSLSEGAGHRPRRGRPQLGTLPSPALVMKILEAEGGAEAAARLASPHPGTGGHRLGQLHCHLRHRRASSVAEPMSRLEATQRTTQRRQPGATVNAAESGPAVMTVAGGREQRSRRQPGSRPIQGQQESLLSRREDGAPVIRPSNGSRTRNGRPANHSPRRINSAAGQTAFLAGEAGDASPSP

SEQ ID NO: 61734 - protein, 168 aa, Zea mays
  Coding DNA Sequence Number=SeqID_18359
  Gene Ontology: Mol. function=kinase activity
  Homolog annotation: Hit_ID=Q6QP54; Match level="QueryCoverage=22%, HitCoverage=13%, E-value=7e-09, Identity=84%"; Hit description =Putative kinase
MALPVDVAGLCPRSGDVVAPPKPRSSLSSVAEAEPEPLGRARRRLFGRGQGRVRALGSGEAEFIVFWGLAQVRALALDHPRLGVWMMLEGDLASSNAGQHVTASDLLKLEVWVARHEDQGYPQGSGPQTQVLRALVLKSRGELGPPPLGVQSTGYRCWPQVEPVALLG

SEQ ID NO: 61735 - protein, 392 aa, Zea mays
  Coding DNA Sequence Number=SeqID_18360
MRPRPTIFQGCQPDPRPRLIDSGVGPADGQPSQAHIPSGGSKRTPSHGVKTTRPTGGASGRRSGRRFAFAEITAPKKAPSLLTDQRFEGWPPEGFNSRLRSRGPYTHYWAQTRAKSRKTANSAPPDPGLGLGLRPGRRRTLLRPTQGSDSGSAPEDDELRSARPQGSDSALASVDDLRLARPRGSDSASAMEDRLDLGFGGASTSPSLGRGRQQGLDRSNSCPSARHRCSSDGHDITPVGCQDLSGCHIGMYLGRQISPARHVALCYTTVVHLDPLLTPIKGRTRALLGRVGRAGTRTGQALSWGRSLPSPAWTLVTPYCKRTQPGRGTNTKVAGFPPLSRRTPAASLSPPFVLAHALDPSGLGHATLTRRPEGPPVSKRRQIPIESCLEGG

SEQ ID NO: 61736 - protein, 746 aa, Zea mays
  Coding DNA Sequence Number=SeqID_18361
  Homolog annotation: Hit_ID=A2XHW4; Match level="QueryCoverage=41%, HitCoverage=40%, E-value=1e-131, Identity=78%"; Hit description =Putative uncharacterized protein
  Pfam annotation: Domain name=Peptidase_C39; Domain location=523-664; Score=-24.1; E_value=0.0048; Accession=PF03412.6; Description =Peptidase C39 family
  Subcellular localization annotation: CTP_CleavageSite=49; ConfidenceScore=5.13e-01
MPAFYTPTYAACRLPPPLQRRRAAGCPRPRPPPHDHGLNRSASSAIYVRTTSTSPDSAHREEDKWWACGVEVARAAPRSSVRRRGRGTQGMHTSKTTERLDQLDDDLHIFCVKFVGRDHLLQLQKKDSLGSENVKRNATKAYKESAVKGLGKHFEQLKKIKNKECNIDGTSSEKEECNSNSSSMNGMQVSDKISVDETNKGADSLEELTKMAHNFYDETALPKLAQGSLDRRGVFSLDTHSPSVCLLIQLEKAATEEGGVTHSVYSHKEPVHLAEKEKQKLQVWSRIMPCKESFAWAMIPLFEGNHAGGLSDAAYPSSPLATSLLGSTSQDSIVDPILKLTLDGKVNHYSSGSSVIVEISNLNKVKESYIVDSLQDPKRKVHKPVKGVLRLEVEKLHGGHNDVDNTSEGGSMANDLNDAGDINNGRSNRSSFDGIHSFVNSIAIAQKDAHHNGIISNAENGDNFEAFDFRMLTRSEPFSQLFHCLYVYQLTVSLSRKRNLFVRVELRKDDSDIRKPPLEVPHVQQTFTWDCGLACVLMVLRTLGIDCCDGIADLERLCHTTRSITAYDIAFLLLSGHCIAIALVDKSKLNLPCMSDYDVQQHNDEPDYMGHYVVICGYDADNCEFEIRYPASARKCERVTMKSLDEARKSFGTDEDILLCCPNQRWCTGVSYKSSLAGLSNRKEWDEAVASYDCRVPVLYVAENILAVTADSSSVVVSLVSILYVGPCRSPNHGRAKEFSGSKRLC

SEQ ID NO: 61737 - protein, 591 aa, Zea mays
  Coding DNA Sequence Number=SeqID_18362
  Gene Ontology: Mol. function=translation initiation factor activity; Cellular component=transcription factor complex; Biological process =regulation of transcription, DNA-dependent
  Homolog annotation: Hit_ID=A2Y2Z8; Match level="QueryCoverage=38%, HitCoverage=35%, E-value=3e-51, Identity=53%"; Hit description =Putative uncharacterized protein
MASYREDHNTNANRWDDTTMFRFKLPAILWDSRLNTKKGHQNLDHNVDEDGESSSDVQIIDTPLTSTNTQELMFVLWTYIMGIDNAKYLKKHWIQSTKPYPISLSLQKLKDILDVNKPMDTDCFNMAVRMIACNDALFLLEDKYHYMDLQFCSITKFGRDPRLRAKPDINMLAKLLECWPDMEYDVSDCKQILLPFSFMGHFTLYVLNMDTRSIYIMDSMPIPSWFKGDHPSMHYIHNIHYIANNMNAAMELANPTWKDDIYMWRRIVPTWVPRTLNWDLSGFLVINFMHDWNGIRLPCICTVWRDRAHRTFYLGVGVAFPKPTLLPSPSGRCDSTSCPTGRKPSRLCGAALYIAALSHGCNYTKADIVSVVHVCEATLTKRLIEFENTDSGSLTDLGGDNNVCLMNNILLLLSFLICEHAYIFMPLCYIEEFLATTDESNEEPVSKHSPKSGEIICKHKDKGFEHFAHGLCEKCYNKFTKLSGGLEGGSVPPAFQRAEKKRLEAAKRAEEAAAAKEAALEESLCDTQNSEVESAMTPRKGLSGDKSSKMGSEGLINDSMPPKDPEEGGLQRREKVGALILMSPRALGLLK

SEQ ID NO: 61738 - protein, 561 aa, Zea mays
  Coding DNA Sequence Number=SeqID_18363
  Subcellular localization annotation: CTP_CleavageSite=56; ConfidenceScore=5.19e-01
MQAACNRAKWTRFSDSQRASMEAQAHASRNRRAGCCMQATAPPLATPSRLFGCGTNAATRGDPAHDPAAPAWRDAAAPPTTRLVALTPRLDRRRFWQAQRATLRLRRNNRAKKGVRRLAPEGFTVASDAERGMTRGDRVRQITRRYFWACLWAPSRPPTNGARTSTRITRLQLTGDTMFDAHRGLGGCSRKPGSGQTVDSVNIPARELGPRPCTRATACSHEGTTRPAEALRKALRPRRSETTPPRPRGLHPAGALARTHRNKMQPRKAGPLAKKCDESLQASAKTPFEARGLLSGTIIRGTLKTPNSQLVTPISIKLQRPDGARTWAKPQKTTNSASPDPRARTPPWPLPNNLRLARPRGSGSASATEDRLDLGFGGATTSPDLGHRPATSMGSAIITLPRADSGRREQDRLRCSSDSHDITTAGCQDLSGCHIGMAFLEKVGRAGTRTGQALSWGRSLPSPAWTLVTPYCKRTRPGRGTNTKAAGFSPLSRPSPAASLPPFALAHALDPSGLGHAVHSLVGSGTPRSRNADRCYHHDSYCCPHVTEAKGNMQRRQDGTA

SEQ ID NO: 61739 - protein, 142 aa, Zea mays
  Coding DNA Sequence Number=SeqID_18364
MRRVGGCLRGGRLPSSFLGAQGKNCILRLHGDFLQPCRERRAAVSLPGRNATSPAWSIVAPRTVGAAPTLWAVLGEDLPARFEALAGGDGFSIDEIANSASSPGSPSPGLNGWLSSSVGESPSAAAPAPKPLLKLLRRSGRG

SEQ ID NO: 61740 - protein, 333 aa, Zea mays
  Coding DNA Sequence Number=SeqID_18365
  Gene Ontology: Mol. function=catalytic activity; Cellular component =membrane; Biological process=metabolic process
  Homolog annotation: Hit_ID=Q7G3D3; Match level="QueryCoverage=78%, HitCoverage=11%, E-value=1e-139, Identity=93%"; Hit description =Acetyl-coenzyme A carboxylase ACC1A, putative, expressed
  Pfam annotation: Domain name=Carboxyl_trans; Domain location=28-333; Score=89.8; E_value=8.8e-24; Accession=PF01039.13; Description =Carboxyl transferase domain
  Subcellular localization annotation: CTP_CleavageSite=51; ConfidenceScore=5.87e-01
MRINVGATSPRSSFPSSCHACSRRPPCRQTCPRGRASPPWASSRRSSSPPRASPQKNHQFVLADNNMTPKLTTQDYSRLSSSVIAHELQLKNGETRWVVDTIVGKEDGLGCENLHGSGAIASAYSKAYKETFTLTFVTGKAVGIGAYLARLGMRCIQRLDQPIILTGFSALNKLLGREVYSSHMQLGGPKIMATNGVVHQTVSDDLEGVSAILKWLSYVPPYVGGPLPIMKPLDPPERPVTYLPENACDALAAICGIQDGEGRWLGGMFDRESFVETLEGWAKTVITGRAKLGGIPVGVIAVETQTVMQVIPAGPGQLDSAERVVPQAGQVSQ

SEQ ID NO: 61741 - protein, 243 aa, Zea mays
  Coding DNA Sequence Number=SeqID_18366
  Gene Ontology: Mol. function=protein transporter activity; Cellular component=cytoplasm; Biological process=intracellular protein transport
  Homolog annotation: Hit_ID=A2ZLA8; Match level="QueryCoverage=68%, HitCoverage=18%, E-value=1e-56, Identity=71%"; Hit description =Putative uncharacterized protein
  Pfam annotation: Domain name=Uso1_p115_C; Domain location=116-238; Score=133.3; E_value=6.8e-37; Accession=PF04871.4; Description=Uso1 p115 like vesicle tethering protein, C terminal region
MEKRAKGLRKLPYVCPVPHFIDKNLLLPWSTQQFATTLYTISKTLFATNKNNTVTGKHKVSLKQLHAEELLRTGGGTTTDTSQKPSSGRERVQIESLRQELEGAKRQIGALKSEKSQIEAEANNQRNLSVKLESDLKSLSEAYNSIEQANYRLDAEVKALRQGGSVPYPDVEAIKAQAKEEAEKDSEAEQNDLLVCLGQEQTKVEKLSTRLTELGEDVDTLLQGIGDDTAIPDDDDEDEDDEE

SEQ ID NO: 61742 - protein, 69 aa, Zea mays
  Coding DNA Sequence Number=SeqID_18367
  Gene Ontology: Mol. function=catalytic activity; Biological process =metabolic process
  Homolog annotation: Hit_ID=Q949E0; Match level="QueryCoverage=94%, HitCoverage=21%, E-value=9e-09, Identity=53%"; Hit description =Putative enoyl-CoA hydratase
ENAELGLPETSLAIILGTFPLHALTMVIVHAFFDVLKLKGLANYCVPAGEAYQKALDIAFEITQKCHFN

SEQ ID NO: 61743 - protein, 185 aa, Zea mays
  Coding DNA Sequence Number=SeqID_18368
  Homolog annotation: Hit_ID=A2ZZM6; Match level="QueryCoverage=75%, HitCoverage=87%, E-value=6e-21, Identity=42%"; Hit description =Putative uncharacterized protein
MVGMYQHQLRDDPFDTLSGGHCGEQPRVAGGGASSSSPSAVHDPLSAEVHGGGQPRQRVEALADGRSMLRGGGSGIVGAAGGDLGVLVRWMRELAADPVGPLPAPSEHRVRKRHVLAWRRARYLRLEDVADAEELPSFSKVVCGAAAAACGVAVSGSRFSYRLIISDRQRADQPIRSITMAIRPD

SEQ ID NO: 61744 - protein, 101 aa, Zea mays
  Coding DNA Sequence Number=SeqID_18369
  Subcellular localization annotation: CTP_CleavageSite=65; ConfidenceScore=5.12e-01
MAHGEIVKSDGITNISQQEYDVTFSFKAMKTSNPNPMQTFDHTHLKASVTSSSPSHLSFVSIIVGAFAMASRRLFPPIGVAGPLSTDPLLRLKRLRRAARS

SEQ ID NO: 61745 - protein, 297 aa, Zea mays
  Coding DNA Sequence Number=SeqID_18370
  Gene Ontology: Mol. function=protein binding; Cellular component =nucleus; Biological process=cell division
  Homolog annotation: Hit_ID=A7NT00; Match level="QueryCoverage=79%, HitCoverage=44%, E-value=3e-58, Identity=51%"; Hit description =Chromosome chr18 scaffold_1, whole genome shotgun sequence
  Pfam annotation: Domain name=AT_hook; Domain location=267-279; Score =16.4; E_value=0.036; Accession=PF02178.10; Description=AT hook motif
MVGFSYSALVGYVVGHGVPIPRGADRRQFHYKASDIGLQVTWFIIKRFSFHIIPQFIDKRIIGGGQLYMWGKMKNTGDDWMYPKPVMDLSGWNIRCMASGNMHHIVGADDSCISWGVAQNGELGYGPNGQKSSANPKKVDILEGMHVTSVGCGFGLSLIVVDRANVGDRLGQLEIYDGDTGAEVEKVEVQVTKKASASTNSRANKRKKTKDVSESESEEDDDDDEDESGDDENGGVEESKGRRGRKPANRGRGRGGKKATPEAKPSGRGRGRPKKTESSAQKAGGTSGRGKRGRPRK

SEQ ID NO: 61746 - protein, 121 aa, Zea mays
  Coding DNA Sequence Number=SeqID_18371
MSIVLGAEPPTQNALGAGPICGSVRGELCPVPVATGQCPVHPLQCTCPRARVRTGTGGRRSRLVTPWRGVARPRVTRNATTGRRSGTGRTGKAEEEWYSRSALAVSQDGRTGRTVDLLPRA

SEQ ID NO: 61747 - protein, 1204 aa, Zea mays
  Coding DNA Sequence Number=SeqID_18372
  Gene Ontology: Mol. function=protein dimerization activity; Cellular component=nucleus; Biological process=regulation of transcription, DNA-dependent
  Homolog annotation: Hit_ID=Q01K26; Match level="QueryCoverage=78%, HitCoverage=99%, E-value=0.0, Identity=72%"; Hit description=Auxin response factor 11
  Pfam annotation: Domain name=AUX_IAA; Domain location=766-947; Score=- 79.5; E_value=0.00092; Accession=PF02309.7; Description=AUXIAA family
  Pfam annotation: Domain name=Auxin_resp; Domain location=282-364; Score=188.5; E_value=1.6e-53; Accession=PF06507.4; Description=Auxin response factor
  Pfam annotation: Domain name=B3; Domain location=142-260; Score=97.3; E_value=4.8e-26; Accession=PF02362.12; Description=B3 DNA binding domain
  Pfam module annotation: Pfam domain module=AUX_IAA::Auxin_resp::B3; Domain location=766-947::282-364::142-260
MASSQEKATSGVLRNAAALLDEMQLMGETQGAKKVINSELWHACAGPLVCLPQRGSLVYYFPQGHSEQVAATTKKIPNSRIPNYPSLPPQLLCQVHNITLHADKETDEIYCQMTLQPLHSETDVFPIPTLGAYTKSKHPTEYFCKNLTASDTSTHGGFSVPRRAAEKLFPQLVRASAQTRVFNPQDYSMQPPNQELIVRDLHDNMWTFRHIYRGQPKRHLLTTGWSLFVGAKRLKAGDSVLFIRDEKSQLLVGVRRATRQQPALSSSVLSTDSMHIGVLAAAAHAASSGGSFTIYYNPRTSPSPFVIPLARYNKATYLQPSVGMRFAMMFETEESSKRRCTGAIVGISDYDPMRWPNSKWRNLQVEWDEHGYGERPERVSIWDIETPENMVFSSPLNSKRQCLPSYGVPGLQIGSVNMSSIPRAQGNPIGNLQHMPGMGSELALLLLNQSGQNIGSPIACQQSSFSSIIQNAKHSYFPPKTFGASTASMKQESMPSTEAQPQLNALGIQRSDRVSCEVQTASDSNPAQEMSVKPRAPRSTDSHSSQSISDQNSKGEPRTKTRRSKKSSYQKTISDKSELCSVPSQICDDKKHGSEPRLADCEAEQATCGNNEESSGALTHGDFAGELQVQQQVEQHELLAPPKIESSKSPDGGKSVSSFPNQGCIPQFFEGLDWMIPPSYYQDSNGIQSVTASDNIFNPSEGIPSTMNADALDAFQTSCLSECFPSSIQEFIGSPDINTLAFMSPEMQQLDAGSNLPSTSNSYVQMSFSEESHSASLSGLHMEAIHINSSSCSQPLATGSFDAGAFPKLSNIRECQPLPLQEIHTSSMGTPSCSMDAAAEYGTDRSAKQMKPPVRTYTKVQKLGSVGRCIDVTRFRDYHELRSAIACMFGLQGKLEHPGSSDWKLVYVDYENDVLLVGDDPWEEFINCVRCIRILSPSEVQQMSENGVHVGHYLSLPDELARQQTIPFIVRGRYIVLSMMGCKGPTPIELDLKTVYVGRPAQRTQGSVPENQFRRPRPGLHGGRLTEILEPLPEPRETSTAPTREDEHRAAGSPETRPRWTETRESTSSTKARRQQHHTTTTENNTQPTIRTRPGHPESSRSKDFSPEQWIGWNRRALCLCVSLRDREQRKGIHLRSRGKVRYREEGRELRSFNEEAKKTELQLPPPPTSAQPSAPFRLCGFLPRQLVPRPCCPLAGPLGLRAL

SEQ ID NO: 61748 - protein, 114 aa, Zea mays
  Coding DNA Sequence Number=SeqID_18373
MRKVGSCSRTILGSGCVQCALSGVGQTIRLSPSSIKDLDAVERSEGWRFTDRHDAALQLNLLQLHDADQIILCNYLCAVATHKYLNLTAWLATISLAIYKAFDHLDMLKKKKCF

SEQ ID NO: 61749 - protein, 735 aa, Zea mays
  Coding DNA Sequence Number=SeqID_18374
  Homolog annotation: Hit_ID=Q6J9V9; Match level="QueryCoverage=12%, HitCoverage=32%, E-value=1e-07, Identity=41%"; Hit description =Putative uncharacterized protein
MQLYNATTVCLGLGGRKKHMHTTGEPILQVQTSAGGAVAPSTSTPPSAKSDRALDGNTGGGSPLRRTTSAPRPSHRRQGLLQEPGPSRRLDRPPRSLSQLSPEDTSPARGLDNLTPVLVPPGDDPAKPRPTKLPFLSQLCLCPCWHRCLRLRLIAERPRVPLTKQEKLLVARPTEPGDSYASGIRIPHSSPSARGNSRLVKRRNEHTPALKVPLQTGLRFRSRGYEQPPYQEARGTTNSKRLTAARSDSCINGFRANAAAERLSPTKDENQPFKPGGRRSRAAGGVGDLVGRETFSGCHHLSTDGGVHQPTNTAPASDGRPKAHRQVLTPVLATKAGTEDGMLHPSWAATVRLPRHGWRAPPPQSWGMVSTLRSWKKERDASPRRGRPRLASPSAPARMMKILEAEGGAKAAARLASPHHRTGGHRLGTEEAKPPRAERVTAQRLQAFLRLRPNQRVKGRTAMQAACNCTKGAHPFDFDASSLEAQAHTSCNRRADYYVRETAPPLAPVPRLLDCGTGAVTRGDPAHGPTVPTGHIGHGSVSRGRRRDDRYGQKWAGSNGGGRRAEAAVKSPAGSRPLLGQRESPLPRREDDAPVFRSLNGPRTHNGCPANHSSRRINSAAGQGPGKGILRKGSFSAKEAGPEPPYRSEVRRLAPRKGSTAVSEHSGSAPTTGQRLAPEGFDSRLRTRRARDDSGYVRYTTKARATLPRLGGCSRKPGSGQTVDSVNILARELGT

SEQ ID NO: 61750 - protein, 71 aa, Zea mays
  Coding DNA Sequence Number=SeqID_18375
  Homolog annotation: Hit_ID=A2YU57; Match level="QueryCoverage=61%, HitCoverage=10%, E-value=1e-11, Identity=70%"; Hit description =Putative uncharacterized protein
MPSQVNVKSSEEVAGMWKHSIKVSYEATKAAFPGGEVIAHLDHNAPASSKVSEKEKMECNSNFGGRTSVET

SEQ ID NO: 61751 - protein, 366 aa, Zea mays
  Coding DNA Sequence Number=SeqID_18376
  Gene Ontology: Mol. function=protein binding; Cellular component =nucleus; Biological process=transcription from RNA polymerase I promoter
  Homolog annotation: Hit_ID=A2XYN8; Match level="QueryCoverage=37%, HitCoverage=50%, E-value=6e-42, Identity=64%"; Hit description =Putative uncharacterized protein
  Pfam annotation: Domain name=DEK_C; Domain location=3-58; Score=31.4; E_value=3.3e-06; Accession=PF08766.2; Description=DEK C terminal domain
  Pfam annotation: Domain name=SWIB; Domain location=206-282; Score =85.2; E_value=2.1e-22; Accession=PF02201.9; Description=SWIBMDM2 domain
  Pfam module annotation: Pfam domain module=DEK_C::SWIB; Domain location=3-58::206-282
MVSDQEIASCVESVLRGSAGGPGEVSLTAVLQQAEATLGVDLSHKAGFIRDQMDLFFGPRLQPQPLTTPQLAPPPPQAVVAPADAVPQPQPQHQVLPQAPPSAQQMQPQQLAPLQPQLMFQTIHQLPAISPVPVVSAPPAMAFYPPPPLAFRYTTGLAGAATGGTVSFQQPAPGAGGTASPTAAPQVAGDNKESSSKRKRGGPGGLNKVCAISPELQTIVGETAMSRTQIVKQLWAYIRQNNLQDPDDKRKIICNDELRVVFETDNTDISVLEFAQVLPNDIAEGQLHEVKRMKAPTMSPQPGRSIDQPSIVISDALAKFIGTDGTFPHDFALKYLWDYIKANQLEAAMADAERCGWHCVDICLLD

SEQ ID NO: 61752 - protein, 61 aa, Zea mays
  Coding DNA Sequence Number=SeqID_18377
  Homolog annotation: Hit_ID=A2YI01; Match level="QueryCoverage=78%, HitCoverage=12%, E-value=4e-11, Identity=66%"; Hit description =Putative uncharacterized protein
RSELCSTALKRMEDGNVEEACVSDIDPIPVTGNIVELYDEGVDIPMVGGSGIIPTLMKCLM

SEQ ID NO: 61753 - protein, 789 aa, Zea mays
  Coding DNA Sequence Number=SeqID_18378
  Gene Ontology: Mol. function=binding
  Homolog annotation: Hit_ID=Q6K378; Match level="QueryCoverage=91%, HitCoverage=88%, E-value=1e-100, Identity=55%"; Hit description =Tetratricopeptide repeat protein-like
  Pfam annotation: Domain name=PB1; Domain location=407-486; Score =42.8; E_value=1.2e-09; Accession=PF00564.15; Description=PB1 domain
  Pfam annotation: Domain name=TPR_1; Domain location=101-134; Score =19.4; E_value=0.014; Accession=PF00515.19; Description =Tetratricopeptide repeat
  Pfam annotation: Domain name=TPR_2; Domain location=101-134; Score =24.1; E_value=0.0005; Accession=PF07719.8; Description =Tetratricopeptide repeat
  Pfam module annotation: Pfam domain module=PB1::TPR_1::TPR_2; Domain location=407-486::101-134::101-134
MQRRADQLAPSASGGRGRRRLHRAGLRAEGGRHEAIPDQGLRGGRRFKFDKAIKLLPQGHNDVAFLHCNIAACYMHMNPRGSTTVPSTSATRRWMRRRRTRRALLKRARCFEALDRLDLACRDAEKALSLEPNNVTASELYESIKEVMQMEEDVSSLERQVASSSVHHEPAAAISSLAKERIQRRVSRKFRNSIVEEEVWEMIQGEEVDDDHGNNDDGQEDHAGSNEDDGDKERHSGSSTGHHPEEKETKIFKNAAEQYSKQCGASATNEAAGQHSPGRRHGQDEHEKHLNEILVKGIQMPAEKGKHTATTTAQNNQASVVERRNKKHFEVGSHSRHTTTQERYERYANASASLPGKHSLLDEKYMPPERQITIRTSNYGGAREKHPKLYAGSSSRENHEAAREVVKKKFKFVHGDDIRIVLIPENCSLLQVMDIARYKYNPHLKSFLLKFMDKEGDLVTITSTEDLRWVEDLYPQVPVRLHIKEVSPEREITRDLVMPQQLSCLPEREPNLNHYSAHTTSDEYECGSSRRDDERSHPPCATDEWMDTSRESILAQVKAAYEWACTEYVKAGRKFEDSIDVKPDFYEGLIALGQQQFEQAKLSWRYADTCKVDMGTEVLELFNHAEDNMEKGMEMWEGIEYLRVKGLSKSRKGKAAAVVDKLVALSEQGKDLSPDEAFEQASNMRSQLNISWGTILYERSVVEFKLGLSSWEESLQEAIEKFKTGGASVADISVMVKNHCVNGNNQEGLSFNIDEIVQAWNEMYDAKKLKNGTVNLFSHLSAIVCALIP

SEQ ID NO: 61754 - protein, 542 aa, Zea mays
  Coding DNA Sequence Number=SeqID_18379
  Homolog annotation: Hit_ID=Q7XBD1; Match level="QueryCoverage=27%, HitCoverage=39%, E-value=2e-10, Identity=28%"; Hit description =Putative retrotransposon protein
  Pfam annotation: Domain name=Transposase_28; Domain location=20-203; Score=-50.3; E_value=0.0064; Accession=PF04195.3; Description =Putative gypsy type transposon
MDMALLDCVFPEEPLPVYKRLSGPRQVDRAPPPTVRSNVFLLICCKCVVGGSVDRGYPERFGGDGVIAGPHGGVRHLEDFLGSRVGDAAAGRSCRGSRFDVQVHQLTPNDVVALAKYVWAVTSYGGQPSVEVFVKNYCLHWQKRKIGNKIAQFGSCTFTPRNGKTSTEVVEIVPCARNKWGNWWDYWFYVSGGEVEDLPGLPAVVMCSHCYVAFPSFEVAEDDEDEGALRCAARMSSRRDLVEEFIGYGLVRSPTFALDLCGRNPAAFVREVEDGAVRIVGRYVPRTEALRSWDIRGSNVLLNRIFQLNRLPYGAEGLGVSDRFAVDLMGTWVALGGRISSLELWESLARMLEVTGGRWPRNVPIPRAADEDMFTSRLAREMKIFPYGRNIAAVVSAVMDKDRQDATRKCRAFTRVRDPSREVKRVRGIAKSAAPGSSKPPLAVKPAVSGPSKSSSGARAVASSSSKPPSAEPTKEQGPPSPLCTTEAAVGGADLAMDICVDDYRVGGVMMFDAHTSWGLVGVTMARAHLDTKDCEIYEVKA

SEQ ID NO: 61755 - protein, 465 aa, Zea mays
  Coding DNA Sequence Number=SeqID_18380
  Subcellular localization annotation: CTP_CleavageSite=34; ConfidenceScore=5.13e-01
MEETHLHVFDASCPRQSTLARAPACPAPRPSQASAMARARAYKTLPGFDCTLPRTLKPHRSPARRRLPVRSVSAAAQSLCHRRPARRAIPNPIQPSEKTVHTSVKLPEQGIGVCFAGEASPRSPELSTPPEYVDRSLRYPVHHALGLNQFAVVWPSLPEPTPPFAGPPSPPQIALLTRPETRSPIPVMVVTSAVTARRPVGVSEALYAKAFRHIGQDYGAGSNAGQLTVVPAPVAAVLATAAAEAKAEACNATAKACKSSWTSSVCCVYVVANLMDLSWQAAAFADHVASGALTSEFTAERQRLEGRIERLRAHHTEAVRDKSAAENKSRRLMEKLAATEAEKEDLSQVDRTHAQLVDAYWELGARTAPFDAFGKEVGLHFLGWLQEELEVLPMIVTGLMSFASLITCEGAVNALSREGCGHFEVFNQSDEDFEHRIFQVEDPVQKRLAEALYDRMWAPHGRDTV

SEQ ID NO: 61756 - protein, 83 aa, Zea mays
  Coding DNA Sequence Number=SeqID_18381
MDLIFGLLHLFEGLSKYDIRCTAYVNQNIVDHKYFDDTRNDHSIIVRLILELKVLLREKLALNMNRLLLGLPASEPKQLQLGC

SEQ ID NO: 61757 - protein, 149 aa, Zea mays
  Coding DNA Sequence Number=SeqID_18382
MKLTDPRIELYLAGDIRSTSLDFTRSPAYVDRAPRSKILNKKHNREKMGILGEQGYVQLKPSKNPIKPKGVIKNYCNLDDGEYVLIPEQGVAQEVAQEPAPDPAIEDLSAPALEGSLEDMVDRVTWPSILPPGWTIEWDPTSAEEEHEE

SEQ ID NO: 61758 - protein, 174 aa, Zea mays
  Coding DNA Sequence Number=SeqID_18383
MGLLHAQVVLRFRLLSDAPRRPTIELLAKMMQASFPLVHSGGRDKNSVVTVSQDSRPTWYNYNDSHKSQGVMAPTPSNDRLGEVYIGHNSKLAIVEKLVLLYGTPDTPVVGTGQFCALSALHRKVWCHTGQSGSPPKCHQEVAVGYCSLVHRTVRCSQQTAHQWQHFLDVLDFA

SEQ ID NO: 61759 - protein, 142 aa, Zea mays
  Coding DNA Sequence Number=SeqID_18384
MRSGAEAALGRGGDPRGGSDDAPRGGGGGVCERDGRPGGDVGGVGHGGDERGRARPRRTGGRARGGADGRAAVGQLGARRRERAGGAGAAGCATWMGGAPRGGVGLGREGTPAVRGGGAAAVRGGDGLEAVPRIGRRLRLVV

SEQ ID NO: 61760 - protein, 155 aa, Zea mays
  Coding DNA Sequence Number=SeqID_18385
  Subcellular localization annotation: CTP_CleavageSite=61; ConfidenceScore=5.06e-01
GVSLPPVEKMITSSSEPWNPSTGDTTPQADRLPRVNRLCAQVQQISSTDRTALSACVKGMLANADRAERRGHWAAAAELNCNSAPVRCRASILIVVHRGLVLGLPAARCSSSRAGAEDVSLGSGSGSSISVNLPPCSVGGLSIAATRYFESNILI

SEQ ID NO: 61761 - protein, 679 aa, Zea mays
  Coding DNA Sequence Number=SeqID_18386
  Gene Ontology: Mol. function=endonuclease activity
  Homolog annotation: Hit_ID=A2XWS5; Match level="QueryCoverage=54%, HitCoverage=27%, E-value=5e-60, Identity=38%"; Hit description =Putative uncharacterized protein
MYVAETVGHHEDEEKEGQKEDEEQHTLLEFMAASFPDKMETVLDRALLPVVQGFDGQEVPCGSDGGCAHVSERSCLVSAVGVVLSCTQGVPLERISMADAATELRSIRDASPCPRPRCQTASAPRCALPRDTRRQTLVRYPYACSAGSTAPCLLAYLPALLLLSLLPAVASVYTKRNTLTFPRVLFVPLGPTPPQRPLPDRLPLNPCPRPVQQPACSVRLIWGLRDGKTKTISALLWSMLIENQRTVTCAPTNTAVAEVASRVLGVIEESGGGGAATKCFFGDVVLFGNEDRMAVDRKLENIFLDTRVRRLRQCLMPITGWTKSLSSMIALQEDPMVPYERYDEAIQGCVLDLVSEEIKLRNVIVVCSLRTMDDKKVKEIQKDLLEVQKKAREVEREKISFETYFQSNYKKLAKDLRTCVETFVDDLPRSATSEENFCCMAEVLLLLDAFGVLVQSEPVEQLQALFKRHSDVRFRLREAISSCLRKLWLLSSNFKLPEMYDSRTIDLEFLLQNAKIVLCTASSSYRLLYMQKAQPLEVPVVDEAAQLKECESLIPLQLPGVRHAVLIDDEYLLPALVKSKVAEFSSSDNGQDGATLLILLLANEKEKATAVDDIGYGLDKRAPIQCYSHNLCLFHTRSSSQILRLGDIASKDAGEEKACSVVCVFRISVFMGQSVPNEF

SEQ ID NO: 61762 - protein, 66 aa, Zea mays
  Coding DNA Sequence Number=SeqID_18387
MAADRGRRKERGCFLDAKDDQDLACAIIKASIELDGVENLLKFDMLRIGGSRSVPALYSSIVLTFH

SEQ ID NO: 61763 - protein, 214 aa, Zea mays
  Coding DNA Sequence Number=SeqID_18388
  Homolog annotation: Hit_ID=Q6JAD6; Match level="QueryCoverage=96%, HitCoverage=35%, E-value=1e-50, Identity=88%"; Hit description =Putative uncharacterized protein
MRLRYDHLAADPRLFDLQRATAAQVRRFRYVPVESWLPAQRDPAVVDLFSTRIQESFFRAQMSAQIALCAHRLLDLPAFLLAAGADSEVHLTYLPGLLTLLTTSGSLCYDTSDPPSRPHGGVAPGTAHVAALFHLPFSDGSRRSPADFTTAAKFLFELMRRTLLPRMGYREATTHIQLWLLGALVSHSEFDVVDFLICEIEDTVLDGLRARRQL

SEQ ID NO: 61764 - protein, 72 aa, Zea mays
  Coding DNA Sequence Number=SeqID_18389
MEKCKPIKTPMPTNGHLDLDEGDPLTGDHRAPASTVLRRPPALIPSPSVTLTARVPSPVLLVQRQQPLHRPS

SEQ ID NO: 61765 - protein, 138 aa, Zea mays
  Coding DNA Sequence Number=SeqID_18390
MGKNNKRKREPTPPSEDFGDSEYSEEEFSSESEGSPAPIPLRESSDSQGLGAEVWTYIRAVERSGLEGSDESEYSSDEEDSSEEDSGGDGEDDDDDDEGGGGGDGDGGGRGGSSGSKDGDDGGSGGSDSSKGSNKASG

SEQ ID NO: 61766 - protein, 71 aa, Zea mays
  Coding DNA Sequence Number=SeqID_18391
  Homolog annotation: Hit_ID=A7QN56; Match level="QueryCoverage=92%, HitCoverage=33%, E-value=2e-19, Identity=74%"; Hit description =Chromosome undetermined scaffold_130, whole genome shotgun sequence
  Pfam annotation: Domain name=SAM_1; Domain location=9-71; Score=52.1; E_value=1.9e-12; Accession=PF00536.21; Description=SAM domain (Sterile alpha motif)
  Pfam annotation: Domain name=SAM_2; Domain location=8-70; Score=18.3; E_value=0.018; Accession=PF07647.8; Description=SAM domain (Sterile alpha motif)
  Pfam module annotation: Pfam domain module=SAM_1::SAM_2; Domain location=9-71::8-70
MPVVFKVQAFLAESPLDSFLSSLGLEKYSITFQAEEVDMAALRHMTDSDLKALGIPMGPRKKIILALESRA

SEQ ID NO: 61767 - protein, 73 aa, Zea mays
  Coding DNA Sequence Number=SeqID_18392
MDSWLLPWRSFPAINGESLRLTAMRWEILRHVAQGRKAAVHWRAYRSSRKADGKAGEAVGVVSSSPAVTILMW

SEQ ID NO: 61768 - protein, 80 aa, Zea mays
  Coding DNA Sequence Number=SeqID_18393
MASLAEGKRKITAGTYEWKAKTKTFRDTYPLRAMIHRAWGEVSWIPAPETAAKVRFAGNFGTTLALDARGADCPGTVTVT

SEQ ID NO: 61769 - protein, 74 aa, Zea mays
  Coding DNA Sequence Number=SeqID_18394
MATEHPNSFSVFQRLLPCSDSGPRARIPAHQRALDSAMECSLRLLAGSFSSSCRGKVRAERHRPFHDFKPDLIM

SEQ ID NO: 61770 - protein, 163 aa, Zea mays; identical to SEQ ID NO: 55418
  Coding DNA Sequence Number=SeqID_18395
  Subcellular localization annotation: CTP_CleavageSite=14; ConfidenceScore=5.07e-01

SEQ ID NO: 61771 - protein, 138 aa, Zea mays
  Coding DNA Sequence Number=SeqID_18396
MAACRKALEVLSNRKRVRLLFPGVTDISQKGPLVSVYSMFHVLDGVQARPCSGEQLCRPIDAKTGANLWLRPNPSPHERFPQLNCTIGGLGSSGHGNRADEFKNYAFPVMGGHTVQIDDLISITKLCKCLNKKAGDGG

SEQ ID NO: 61772 - protein, 162 aa, Zea mays
  Coding DNA Sequence Number=SeqID_18397
MGKNNKRKREPTPPSEEFGDSEYLEEEFSSESEGSPAPIPLRESSDDSDDSQGLAAEVWTYIRAVERFGLEGSDESEYSSDEEDSDGGGEDEDDDDDDNNNGSGDGDGDDSGKGGGGGSKDGDGGSSRGSNRGGSSRGSTRGGSSRGSTRGGSGGGSNRASG

SEQ ID NO: 61773 - protein, 321 aa, Zea mays
  Coding DNA Sequence Number=SeqID_18398
ESAAAHSLCHRRPASGAIPNSVQPSEKIVHTSVRLPERGIGVYFAGEASPRSPELSTPPEYVDRVNHSTILRFLVHTVAMLPREAHRALGLNQFAVVWPVYSPPTRTPACTRGPDDSGHLRRQAVPRRDRQSLLEPTPPFAGPPSPPALRKGPGPSGRLSWPLRSLSQLSPEDLSLAHGLSSVTPGLVSLVDDLAKLQPPLLHFLSLGNRLLPGRRSLYFEPTPPLSTPTPLPPAPAHRRAAEGPKTEREKPRAARPTEPRDSYASEIRIPHSSPFAQGNSPSVKWNEQPPHLRACGTTNSRWLAGDHCTNSATTTSVSGG

SEQ ID NO: 61774 - protein, 105 aa, Zea mays
  Coding DNA Sequence Number=SeqID_18399
  Homolog annotation: Hit_ID=Q7EZ54; Match level="QueryCoverage=66%, HitCoverage=9%, E-value=3e-10, Identity=54%"; Hit description =Putative uncharacterized protein OSJNBa0036M16.113
MEARFARKRVKFPLQNAGKDGESSLAQHECPNKPLRKNGKITVTTATKLMPDGKRRRRLHGQDDPISLSSYAADALSTTGEDMIECGGLPKPPQVSLEFNLQFDK

SEQ ID NO: 61775 - protein, 102 aa, Zea mays
  Coding DNA Sequence Number=SeqID_18400
  Gene Ontology: Cellular component=membrane
  Homolog annotation: Hit_ID=Q10I13; Match level="QueryCoverage=58%, HitCoverage=50%, E-value=2e-15, Identity=68%"; Hit description =Uncharacterised protein family containing protein, expressed
  Pfam annotation: Domain name=TMEM14; Domain location=4-87; Score =68.8; E_value=1.9e-17; Accession=PF03647.4; Description =Transmembrane proteins 14C
  Subcellular localization annotation: CTP_CleavageSite=68; ConfidenceScore=5.08e-01
MHDFCFTIPYGFAVLAGGVLGYLRRGSTASLAGGAGAGALLLLAGFVSLKAFQKRRNSYVALALETPTAAEASGEGWRLCLRPNICPPRDQFDKVTWCRRRR

SEQ ID NO: 61776 - protein, 516 aa, Zea mays
  Coding DNA Sequence Number=SeqID_18401
  Gene Ontology: Mol. function=carbohydrate binding; Cellular component= cytoplasm; Biological process=carbohydrate metabolic process
  Homolog annotation: Hit_ID=A7PH86; Match level="QueryCoverage=76%, HitCoverage=97%, E-value=1e-114, Identity=53%"; Hit description =Chromosome chr17 scaffold_16, whole genome shotgun sequence
  Pfam annotation: Domain name=Aldose_epim; Domain location=195-512; Score=324.9; E_value=1.5e-94; Accession=PF01263.11; Description =Aldose 1-epimerase
MEQLVGVHHHHHSLSPRAPRTPTRPQPQPQPHPLLHHLPSNRFRDLHSQIHNHIHPAVPAASRVLRATPPFFLILLAAVYLLASVTIFSAPTPLLRLRLASPRPLILPKPAPPPPPPAPELFDLDGGSVRVRLTNVGAAVTSFLVPDKNGAGSLWYLPSVCLCSTAALTLLFHDARLVFLPGVLADVVLGFDSLDPYLLESHFAKLHYGGQLAQLAKSQHLEVNAFSLLDRNQELNGTSPYFGCIVGRVANRIKDGKFTLNGVQYNLSINNPPNTLHGGFKGFDKTIWEVAEYNKGDKPSITFKYYSKDGEEGDVSVTARYSLLPSATLKLEMEAIPLNKATPISLAQHTYWNLAGHSSGDVLSHSVQIWGSQITPVDQTSIPTGELMPVTGTPFDFLTGTRIGSRIDRVPGGYDHNYMLDSGEVRSGLRHVAHVVDPSSSRALDIWADAPGVQFYTGNSLGGVVGKGGAVYGKHAGLCLETQGFPNAVNQPNFPSVVFGPGERYSHTMLFELSTE

SEQ ID NO: 61777 - protein, 148 aa, Zea mays
  Coding DNA Sequence Number=SeqID_18402
MAVYSQKAVRSGAPDCPVVHRTVSVNAYYLFDDEEEEFDTEESSSEDDGGNDFHGDDGDDSDGSHEDGGGDVGAYDVGGIHAGTYDAGAYGAGVAIMEHITLEHMVLEHMVLGVAMPPEIQECDHTQMLQTCLNIMTPVEYVDTLSFT

SEQ ID NO: 61778 - protein, 761 aa, Zea mays
  Coding DNA Sequence Number=SeqID_18403
  Gene Ontology: Mol. function=oxidoreductase activity; Cellular component=membrane; Biological process=biosynthetic process
  Homolog annotation: Hit_ID=Q10I64; Match level="QueryCoverage=68%, HitCoverage=95%, E-value=0.0, Identity=72%"; Hit description=FAD -binding domain-containing protein, putative, expressed
  Pfam annotation: Domain name=ALO; Domain location=197-472; Score= -90.6; E_value=0.00046; Accession=PF04030.5; Description=D-arabinono -1,4-lactone oxidase
  Pfam annotation: Domain name=FAD_binding_4; Domain location=42-184; Score=86.2; E_value=1.1e-22; Accession=PF01565.14; Description=FAD binding domain
  Pfam module annotation: Pfam domain module=ALO::FAD_binding_4; Domain location=197-472::42-184
  Subcellular localization annotation: CTP_CleavageSite=41; ConfidenceScore=5.18e-01
ADHGALGSPPPDPVQCSSGGGTADCTVSSAYGVFPDRSTCRASAAVYPASEDELVRAVAGAAAAGTKMKVATRYSHSIPPLACPGSGRGEGLVISTRRLDRVVSVDPAAGRVTVESGVTLRDLVEEAAKAGLALPYEPYWWGLTVGGMLGTGAHGSSLWGNGSAVHEYVVGMRIVTPAAAAEGYAKVRVLTAADPDLDAAKVSLGVLGVISQVRCERDDDDLAEQVGTFGYRHEFADIAWFPGHGRAVYRIDDRLPLSAPDDGAMDFIGFRATPTLAIQATRLAEDLFERADNGSGKCLTSRVTHATLSAAGYGLQWRSGGLFAGYPVTTFSLPVRRAVLFVAEVRRLRDLEPRALCGVELYDGILIRYVKASTAHLGKPAPRGEPSGDMVDFDITYYRSRDSGRPRLFEDVLEEVEQMGIFKYGGLPHWGKNRNLAFVGAARKYSGLPRFLRVKDAYDPDGLFSSDWSNMMLGIGGRSPTTDAPGCALEGMCVCSRDEHCAPEQGYVCRPGKVYKEARVCTRAEMVDTGRNYTLPAHEWWAARRLISSFHTTRQRKARSPAASPNAIRHRRWLLQQKPELSSSMSALPAPPPAPPARSCGGILDSQNRLAPLCALESAGSILRHLCGLLLLRRLPGDLRSFGCYASPQASSMVANLVEGVSYPFFYSLADMGTLPDHPTRTSLASSRPSASASPTSPRPSRSCSAARWGGGNYPPVFENLQRIFDGVYLNRVQHRIVVYHAAWLQLLIELGLLRCTGYWF

SEQ ID NO: 61779 - protein, 648 aa, Zea mays
  Coding DNA Sequence Number=SeqID_18404
  Gene Ontology: Mol. function=nucleotide binding; Cellular component =intrinsic to membrane; Biological process=defense response
  Homolog annotation: Hit_ID=Q10I27; Match level="QueryCoverage=99%, HitCoverage=82%, E-value=0.0, Identity=55%"; Hit description=NB-ARC domain containing protein, expressed
  Pfam annotation: Domain name=NB-ARC; Domain location=160-453; Score =61.0; E_value=4.1e-15; Accession=PF00931.13; Description=NB-ARC domain
MDISSYLAIGGWFIQVIFDKYLSYQLRQWAADCGIEHELDRLRVALLRTQSVLHGAELVPALSYSSLPWMRELRDVMYDAEDLLDKLEYNRLHHEVEESSANESSSPISAFMLSRFHSQGVAASSLEPCWDRSARVKNKMVNLLERIEQVTSGVSEVLSLPRNIGSSNRNAMTSSIPYGRITGRDFEAQQLVTALISGIGKTALAQHVYSNARITESFDVRMWICVTSLLDELRITKEMLESASSSRFRHGGIANFNRLQVALKARLASKRFLLALDDVWNSDNKTIAIEQENWQKLLAPLKDGAKGSKILLTTRSSIVAEMLQSSSIINLETLQVNDCWSLIKTYVFDETKHTIDSKLENIGRKIAETLSGLPLAAKVVAGHLKPSSPRNWEFEAEQLILLWLAQGFVHPDGCRRLEDIGKEYINDLCNKSFFTIQKKEFVSYYVMPPVIYELAKSVAAEECFRIGGCRLGKLPSRMNNLVNLRNLTAANQIISAITDIGRLKCLQRLPTFKVTREKTQSIVQLGYLLELQGSLQIRNLENVEAPIEAKEAMLCKKRQLSVLQLMWASDRDEHLKMLRQIGPEAYGSGSQMKPFQSLEELVLDDMPELNEWLWSDQTMRNLQNVVIKDCNKLKALPPVPPNLTEITN

SEQ ID NO: 61780 - protein, 53 aa, Zea mays
  Coding DNA Sequence Number=SeqID_18405
MRVEGGKRHGRYWIADGAIDSLSTPTLSQLRLRRRRALGDSGELGGGFGKGGT

SEQ ID NO: 61781 - protein, 224 aa, Zea mays
  Coding DNA Sequence Number=SeqID_18406
MKLRSEVSRLRFDCEEKEKSFKILEKDFIDSWARVHKMREEKNKLEASNTEKDMRIALLEAKLERVKEEHEAKTTKLMQAFAEVAINLSSAQVKIDDLKDEINHKKGEKELSIEESIKNREKAQQAEKVVDIRKKLQSRKSEAPPVAAAARGARAPEPTPPPVANAAVDAAASPPLASAARGRRDLPAVVHSLRGRCPRPQRPAAALPEDAAVPEPEAVVESCH

SEQ ID NO: 61782 - protein, 427 aa, Zea mays
  Coding DNA Sequence Number=SeqID_18407
  Gene Ontology: Mol. function=enzyme inhibitor activity; Cellular component=cell wall; Biological process=cell wall modification
  Homolog annotation: Hit_ID=A2XAB2; Match level="QueryCoverage=70%, HitCoverage=80%, E-value=3e-50, Identity=43%"; Hit description =Putative uncharacterized protein
  Pfam annotation: Domain name=PMEI; Domain location=111-258; Score =77.0; E_value=6.3e-20; Accession=PF04043.6; Description=Plant invertasepectin methylesterase inhibitor
  Pfam annotation: Domain name=Pectinesterase; Domain location=311-427; Score=-147.6; E_value=1.9e-10; Accession=PF01095.10; Description =Pectinesterase
  Pfam module annotation: Pfam domain module=PMEI::Pectinesterase; Domain location=111-258::311-427
MTGPRREPWRRSPPPLSTRGAPIPRRLHLEPIQHRRQPCPQHWIFEISILKDFVEHRQERGEMRRLEVLAWSCAIATVVLALAPGVAAASEATHDVDDVSLAVSRIGTAAPSPTSNVTAICLSTPYPSACETALSSPAQGSSGTDDPFATSVHYAMARVASARAVARNLSAAHLRGARPPPGVQDCAELLDISLDQLGDALAAAARDADGVTTWLSAALTNQATCDDSLAADPDSAGRGAIRARLSALTQFIATALALHVNKSKAHHSGGGSPSSGSLPTPASPFPSWVTQQDRKLLESSHAGASGGLAVDAVVALDGSGTHRTINEAIAAVTTTAANGGGARKVIHVKAGRYEESVTVSSKQKNVMLMGDGKGKSVIVGHKSAGEGYTTYASATVGTTSDARYTSASSYSSFHHPRQHACTKATYP

SEQ ID NO: 61783 - protein, 487 aa, Zea mays
  Coding DNA Sequence Number=SeqID_18408
  Gene Ontology: Mol. function=phosphatidylinositol phosphate kinase activity; Cellular component=mitochondrion; Biological process =phosphatidylinositol metabolic process
  Homolog annotation: Hit_ID=A3AYY4; Match level="QueryCoverage=43%, HitCoverage=17%, E-value=1e-62, Identity=57%"; Hit description =Putative uncharacterized protein
  Pfam annotation: Domain name=NAM; Domain location=218-354; Score= -12.0; E_value=2.3e-06; Accession=PF02365.6; Description=No apical meristem (NAM) protein
  Pfam annotation: Domain name=PIP5K; Domain location=143-369; Score= -127.3; E_value=0.003; Accession=PF01504.9; Description =Phosphatidylinositol-4-phosphate 5-Kinase
  Pfam module annotation: Pfam domain module=NAM::PIP5K; Domain location=218-354::143-369
MGGSPQFTVVPGGSILCVSEDEISNIISRALAVSEERRHLLMDAIAETEPADTTRSKTMDKSYNSLSESSSTSLWSSDSEASISSDDLSSYDTSLLLSSSLHPEIDVNGTTTLKWRYSVICVHSNQFYNLRRKCCPSELAYVASLSRCKRWDAQGGKSKAFFARTIDGRLIIKQIKKTEFDSFIKFAPDYFRHVNHSLDTGSQTCLAKILGIYQHYDEPAGSVMELLEHLEGEARSDTRKLHPLVDEFIPTIDGENGICYTHPERLPATCEQGRACPALLPPAVQGVHDGDEEAAEGAQRRRRRQDAVAQDGQDQAGAVQQQAPRVQEILVLYTNYGKQRKPENNWVMHQYHLGSDEEERDGELVVSKVFFQTHPRQCGYTMARESAVIVPAAAAVTGSSNAFIAGHHQSGGGGSSVLREANGGADQLYSPGAMMGYDQGGLETGHLLPLLCLPTSCLTLLSMQQGLALPLEPRIQDKIQTYQICQI

SEQ ID NO: 61784 - protein, 112 aa, Zea mays
  Coding DNA Sequence Number=SeqID_18409
MKNRLKHIEIAQQEKINKEISRAVTAAAAAAADPSKARIQPPATLPDGTPTAGVRGRKQRAQMGGAEGAEGDPVIAKLISPVTTPTRLLAAAPAPGGEDGDGNGNWGKLERD

SEQ ID NO: 61785 - protein, 268 aa, Zea mays
  Coding DNA Sequence Number=SeqID_18410
  Gene Ontology: Mol. function=structural constituent of ribosome; Cellular component=ribonucleoprotein complex; Biological process =translation
  Homolog annotation: Hit_ID=Q943F3; Match level="QueryCoverage=46%, HitCoverage=56%, E-value=9e-30, Identity=56%"; Hit description=60S ribosomal protein L18a
  Pfam annotation: Domain name=Ribosomal_L18ae; Domain location=122 -266; Score=43.9; E_value=2.4e-11; Accession=PF01775.8; Description =Ribosomal L18ae protein family
MRLDWRSLAKSSQTCISLRCTRLSGVHRTVSDAHAGSKTNSLLLGIVEGAAAKTHRSVWCSQVWRLQVSFVDAQVLSMRVGVSCISARQWVARCQSPLMSTPRSTAWSLRYQRDLLQIQALVLSEEAQVSRRFKSNGQILAIDELYQTNEDEVAVNLIVLQETIGKWDDLEISECNPTKIKNCGIWLCYQCRTGYHDLHKEYRNTILNGAMEQMYNETASCLSPYVQIIKTATINFKLCKRDNTKQFHNSKFKFPLVYCNKSGHKIGS

SEQ ID NO: 61786 - protein, 65 aa, Zea mays
  Coding DNA Sequence Number=SeqID_18411
MGPGTVLALPRLVTKVLDLVLLVTLPLGREWESRLVGNVYDLCRVLETGISAVLTVMSGLGILFD

SEQ ID NO: 61787 - protein, 196 aa, Zea mays
  Coding DNA Sequence Number=SeqID_18412
  Gene Ontology: Mol. function=GTP binding; Cellular component =intracellular
  Homolog annotation: Hit_ID=A2XMJ2; Match level="QueryCoverage=30%, HitCoverage=12%, E-value=1e-22, Identity=89%"; Hit description =Putative uncharacterized protein
MDHGALLGVRGYAWIRVGNIHAMDTNSSGRGVRQFKTYLLHRLEKVLCCMVSHSPGQWIHQSSSADGAAVLPVIGLQSYNAKVVRCFEDDDIVHVDGKVDPRSDIDVINLELIFSDLEQIEKRLDKLSKSKTKDTQVKVKNLILLNLISILMTKRWLNEHQTCSLVETELTEDTFRKHPVKKFWQHFHFILIAVPP

SEQ ID NO: 61788 - protein, 527 aa, Zea mays
  Coding DNA Sequence Number=SeqID_18413
  Gene Ontology: Mol. function=acetolactate synthase activity; Cellular component=chloroplast; Biological process=branched chain family amino acid biosynthetic process
  Homolog annotation: Hit_ID=Q53L28; Match level="QueryCoverage=61%, HitCoverage=84%, E-value=1e-143, Identity=62%"; Hit description =Acetolactate synthase, small subunit, putative
MDRKVGRGPLPTAEQEEASESRAVQPLMVLRPPMKASVERSVAEGRHVLQPLVRGGEQPPRCSGALVQLRLPRNGAPPSSASPADALGNRVLQPAAGMAVPDDGGGVDDEGTTNVAAEVATAASEPKRCWHMILNYGHPLNPPPEGHRCRRRWGRRGCYSRRHGSSSEGAARGWYTGPGMVAPSVVSHATSDEDGPEGATQLLLDNKQVDDLSMEPQVERELMLIKVNAEREKLPEIMGLVRIFKAEVVDLSDYTLTIEVTGDPGKMVAIQKTLSKYGIREIARTGKIALRREKMGETAPFWRFSAASYPDLEVAIPSNFQQNTGVKAINQNPEESSGGDVYPVESYESFSSTSQILDAHWGVMTDGDPTGFCSHTLSILVNDVPGVLNLVTAEKEGTSRITTVVPGTDESIAKLVHQLYKLIDVYEVQDFTHLPFAARELMIIKVAANATARRDVLDIAQIFEAQKVDISDHTITLLLTGDIDRMVRLQKMLEQYGICEVARTGRIALLRESGVDSKYLRGFSLPL

SEQ ID NO: 61789 - protein, 292 aa, Zea mays
  Coding DNA Sequence Number=SeqID_18414
  Subcellular localization annotation: CTP_CleavageSite=63; ConfidenceScore=5.36e-01
MQGHSVPTHINRPHRFPGNRSGLTALAYNAPLTPTGRRAVTALVPTITGMGDLVSGRVRGYVCGQVLWCRLGCWIWGYLLSSSLLRHEDVLSVSKIAVYRNAMNINRGKEKGGAAYRRRGRSGEGWGRLGETLAVTSRYGSTSEMAGIARSTRAGGCPRRRRVYRPNHGELVQSEGTVSITGHAATVCARNRRVVEWFTRSTYSGGVERSGERGLASLAKETPIPCSGSLTEVCTSFSEGRTGLGMALLAGLWWQRGWAAADSLRTGKRRRANSGEVWKVRGRVQSKPGKAL

SEQ ID NO: 61790 - protein, 54 aa, Zea mays
  Coding DNA Sequence Number=SeqID_18415
MDIHLQEDDRGITRLASMEFSIITSSATSDQNQARVSSIMVGAQQVGEMQGVTA

SEQ ID NO: 61791 - protein, 237 aa, Zea mays
  Coding DNA Sequence Number=SeqID_18416
  Subcellular localization annotation: CTP_CleavageSite=63; ConfidenceScore=5.25e-01
MQGHYVPTHINRPHRFPGNRSGLTALAYNAPLTPTGRRAVTALVPTITGMGDLVSGRVRGYVCGQVLWCRLGCWIWGYLLSSSLLRHEDVLSVSKIAVYRNAMNINRGKEKGGAAYRRRGRSGEGWGRLGETLAVTSRYGSTSEMAGIARSTWAGGCPRRRRVYRPNHGELVQSEGTVSITGSRSDCVRKESKGGGVVYPRGWAAADSLRTGKRRRANSGEVWRVRGRVQSKPGKAL

SEQ ID NO: 61792 - protein, 76 aa, Zea mays
  Coding DNA Sequence Number=SeqID_18417
MRLHTLRDDGVLYPQRYEDRGFLFHSYAYIEVIFAGAYCSSRGVGSSSTYTFTLIITLPRRSYDLIRNFLSKDVCF

SEQ ID NO: 61793 - protein, 89 aa, Zea mays
  Coding DNA Sequence Number=SeqID_18418
MGSRHSACSAEAECRDGSRYNDYVYGFGSTMMMVFLDEEMPNGAFAEYVDVYSSLLYHQTPGCPHCNHCSGEGEAVEGDFQEFQDYDEF

SEQ ID NO: 61794 - protein, 192 aa, Zea mays
  Coding DNA Sequence Number=SeqID_18419
MEWIKGEVVAFNKVLTGRENDPELKDTLAELEVVHKTIDEAIDEGKRRLNRVFDAIRFVYPNYSFLVQGKGKERKSALKPPLAVMKQKRLKVLAKRPKSYSEDRAMVLSALMTSIEDVFTQTAPTVGPKVRSPVLTKEEKKDEEEINKVLIQDEVPLASLQLEAQPKVEAQPKPKAAPGSTPQEGKQGWLTF

SEQ ID NO: 61795 - protein, 255 aa, Zea mays
  Coding DNA Sequence Number=SeqID_18420
  Gene Ontology: Mol. function=carboxyl- or carbamoyltransferase activity; Cellular component=ornithine carbamoyltransferase complex; Biological process=amino acid metabolic process
  Homolog annotation: Hit_ID=Q8SA97; Match level="QueryCoverage=58%, HitCoverage=18%, E-value=6e-15, Identity=40%"; Hit description =Ornithine carbamoyltransferase
SFRGEVESVFQGQGRVRAPRSGRGGRPLTNARAESEPWGRAKQSSSSSGAEPESEPWGRAKRSSSSSGAEPESEPWGRAKRGSSSSGAEPESEPWGRAKQSSSSSGAEPESEPWGRAKRSSLSSGAEPESEPWGRAKRSSLSSGAEPESEPWGRAKRSFPWRLGPDLATVSLTLSSGTAVRAAQAALSSCQAGQWSGEATFALNAPAIWLVGVAIWPRLLLGEDWASGEPKLCADGGYQLRFSSIEGTPNYGPRQ

SEQ ID NO: 61796 - protein, 99 aa, Zea mays
  Coding DNA Sequence Number=SeqID_18421
  Homolog annotation: Hit_ID=Q7XBD4; Match level="QueryCoverage=59%, HitCoverage=6%, E-value=1e-08, Identity=59%"; Hit description =Cinful1 polyprotein
MSEDKKAVAESKLSLSEEMHLGFLQSMAKTNTEKITREILEGAKGSSTTRLNRLSGIPSADRPGPCGGPSATPVDPRTEPMQKSKSALRTVRRKSKDRP

SEQ ID NO: 61797 - protein, 37 aa, Zea mays
  Coding DNA Sequence Number=SeqID_18422
MESKALIPHVGSRTPARGEFMLYEALSFTPIKFNDPS

SEQ ID NO: 61798 - protein, 139 aa, Zea mays
  Coding DNA Sequence Number=SeqID_18423
  Gene Ontology: Cellular component=chloroplast; Biological process =electron transport
  Homolog annotation: Hit_ID=Q4R1B1; Match level="QueryCoverage=100%, HitCoverage=100%, E-value=5e-54, Identity=81%"; Hit description=PGR5
  Subcellular localization annotation: CTP_CleavageSite=37; ConfidenceScore=5.46e-01
MAAAVSFSRVRALPTWSSSVSGDDHHAYSVLATSSVSARPRSGARPLRSPAQMMGNVNDGKGLFAPLVVVARNIIGPQTLQPAEGESNRAALADHLPSHISSFDQVINEFCKTIGADSKQRQGLIRLAKKNGEKLGFLA

SEQ ID NO: 61799 - protein, 52 aa, Zea mays
  Coding DNA Sequence Number=SeqID_18424
MAPKRKTSISSAVVIPPIDPNSQLPFTEYSTIERQGLPSLSVSRASRLNSGY

SEQ ID NO: 61800 - protein, 150 aa, Zea mays
  Coding DNA Sequence Number=SeqID_18425
MGKNNKRKREPTPPSEEFGDSEYSEEEFSSESEGSPAPVPLRESSDDSDDSQGLAAEVWTYIRAVERSGLEGSDESEYSSDEEDSDGGGKDEDEDDDDDDGDGDGDGSGRGSGGGSKDGDGGGSRGSNQGDSNRGSTRGDSGGGSNRASG

SEQ ID NO: 61801 - protein, 198 aa, Zea mays
  Coding DNA Sequence Number=SeqID_18426
  Gene Ontology: Mol. function=ATPase activity, coupled to transmembrane movement of ions, phosphorylative mechanism; Cellular component=membrane; Biological process=metabolic process
  Homolog annotation: Hit_ID=Q94IM5; Match level="QueryCoverage=82%, HitCoverage=27%, E-value=7e-63, Identity=73%"; Hit description=P -type ATPase
  Pfam annotation: Domain name=Cation_ATPase_C; Domain location=70-194; Score=-16.1; E_value=0.0014; Accession=PF00689.12; Description=Cation transporting ATPase, C-terminus
MYCSSTQDVKFIQFQLTVNVAALIINVVAAVSSGNVPLNDVQLLWVNLIMDTLGALALATEPPTNHLMERPPVGRREPLIINIMWRNLIIMALFQVSFLLTLNFKGISLLQLKNDDPAHADKVKNTFIFNTFVFCQVFNEFNSCKPDELNVFKGISENHLFIGIIAITVVLQLNLRFLFPCLEEVMIIVRSRLNVEHS

SEQ ID NO: 61802 - protein, 85 aa, Zea mays
  Coding DNA Sequence Number=SeqID_18427
  Subcellular localization annotation: CTP_CleavageSite=28; ConfidenceScore=5.06e-01
MAAAAPGPGPSPHQRPLRCFLLLVLLVSSPHYSSGARTSPDLAGGTLQYGARKLISIDNPVTPPPPAPVSGPPIGPGFVRPPQEV

SEQ ID NO: 61803 - protein, 166 aa, Zea mays
  Coding DNA Sequence Number=SeqID_18428
MKNDFRTRLYGSLRATRDPLPSGYMVFRKHVVIQVVLDLGDPCIGTALSIWMGALRGWVEGINNRLSKVPLCMGVQFGALMESSSTAELLLPHTHEPHGGTGILFEQRVGPRARASLKTWAPPAGSLDVRRGGLGPYKGSRGARGGTEPTPEQGAGREVSDPIRQV

SEQ ID NO: 61804 - protein, 444 aa, Zea mays
  Coding DNA Sequence Number=SeqID_18429
  Gene Ontology: Mol. function=protein tyrosine phosphatase activity
  Homolog annotation: Hit_ID=Q6F2V0; Match level="QueryCoverage=92%, HitCoverage=99%, E-value=0.0, Identity=55%"; Hit description =Expressed protein
MDAGEMEDVRAAAAAEEVISSRGGSVLGKKTILKSDHFPGCQNKRLSPQIDGAPNYRQAGSLRVHGVAMPTMEGIANVLNHIGAHKKGKQTRILWHSLREEPVIYINGRPFVLRDVEKPFSNLEYTKSTKLINHKGINRERVEQMEFRLKEDILQEASRYGNKILVTDELPSGQMVDQWESVVYDTVKTPLEVYEELQHQGYLVDYERVPITDEKAPKEGDFDNLVRRISQVDIETEIVFNCQMGRGRTTTGMVIATLVYLNRIGASGIPRTGSIGKVFYAGNDVDDYMPSSEEAILRGEYAVIRSLVRVLEGGVEGKRQVDKVIDKCDSMQNLREAIATYRNNILRQPDEMKREASLSFFVEYLERYYFLICFAVYVHSVSSAHQTTLSVEVSFSDWMRARPELYSILRRLCRVSTKTFCLEGSLASTKWYIDLCARFFLDGS

SEQ ID NO: 61805 - protein, 412 aa, Zea mays
  Coding DNA Sequence Number=SeqID_18430
  Gene Ontology: Mol. function=nucleoside-triphosphatase activity; Cellular component=nucleus; Biological process=regulation of transcription, DNA-dependent
  Homolog annotation: Hit_ID=Q6F2U8; Match level="QueryCoverage=95%, HitCoverage=57%, E-value=1e-154, Identity=75%"; Hit description =Putative DNA helicase
  Pfam annotation: Domain name=ResIII; Domain location=208-411; Score= -39.5; E_value=0.098; Accession=PF04851.6; Description=Type III restriction enzyme, res subunit
MAGRGGGGKGAAGRMMSLQEFVSCMQPLIDLEKAAEISAESETSAKSLERRGCVIANLKCTDAQCDVGKTRKFLYIHRMFIENMFMFTGTDNASFPFFIPLQFGTHDVVALKPNKADAGSASLGQGVVYRLKDSSITVAFDDIPEDGLNSPLRLEKLANEVTYRRMKDALIELSKAVQTGPCANLVPVLFGEKAPMRSKDAMKFSPFNKNLDDSQCFAKKEAISKALGSRDVFLLHGPPGTGKTTTIIEIILQEVKRGSKILACAASNIAVDNIVERLARYRTKLVRLGHPARLLPQVLDSALDAQVLRADNSSLAGDIRKEMKVLNSKLLKAKDRNTKRDIRKELKTLAKEERKRQQLAVTDVLKNADVVLTTLTGASSKKLNGITFDLVVIDEAAQALEVACWIALLKHA

SEQ ID NO: 61806 - protein, 98 aa, Zea mays
  Coding DNA Sequence Number=SeqID_18431
MAFLLDIMSNSLRALRRTARSADYGLQEMVVFAAGDLRRRMGEKEGLLAGLGKKGAAKQGQGDGGRGRTEREVVAWSGRSGSGVGGQSHERTVEIHRG

SEQ ID NO: 61807 - protein, 143 aa, Zea mays
  Coding DNA Sequence Number=SeqID_18432
MASGHCCRSTSAHLRCRDDATILDIIVVERARYGEYRSLLAGLPNEVHPGLISENNPRVVDIGDDHEVPMFDDGQREVELAVAKFLLVVGERRQRERLVLVVFVRGFQLMALALTSDSSARPVLRCLFTLCDALLLLDYLDDD

SEQ ID NO: 61808 - protein, 111 aa, Zea mays
  Coding DNA Sequence Number=SeqID_18433
  Homolog annotation: Hit_ID=A0EVH6; Match level="QueryCoverage=64%, HitCoverage=20%, E-value=2e-07, Identity=45%"; Hit description=Milt putative polyprotein
MQKHFVFVYFLYPLLVPLLHEPTCKKVSVRHEVADKGKGKNVLIGDPHTSNISQEIARKALDKKTNKSGGTRGQTQLRSRARQPNPSIADGPTPLCEQSDALIDGPVDSTR

SEQ ID NO: 61809 - protein, 245 aa, Zea mays
  Coding DNA Sequence Number=SeqID_18434
MRHLAVASHPQKKRKKLWLKKKLSLKLIILQPRITSTLTFAEWTLNLLQHKESPENKCRLDDRGSFNWPHASSWVNFASVGPIPERPPHNGSGEMARVACTLRGKRLEIGAPGHGQTVQAFAWTVRPLRRPSDFLYRTARDHTRATAWCPNNSEHNWPARVYHRTHRIRRTYCRTLCTKLLHTTTAVRSAPIRGLLHSRRSCKKKHLRKISMEIMPKMPYRELRHNVMPKTKSCTDLKMKRQIDP

SEQ ID NO: 61810 - protein, 72 aa, Zea mays
  Coding DNA Sequence Number=SeqID_18435
MARSSHGHASLCSMEAPSLTLVASGAAPDPLRRMWTGDTVCKYAPQDNLASVASAFGQNPASIAIMHHVIFT

SEQ ID NO: 61811 - protein, 53 aa, Zea mays
  Coding DNA Sequence Number=SeqID_18436
MGLGVCGSLCQGGNEIDGFGYDYGAGCQHCNHCSGEDEAVEGDFQEFQDYDEF

SEQ ID NO: 61812 - protein, 680 aa, Zea mays
  Coding DNA Sequence Number=SeqID_18437
KRMIGDEVAQFGSCTFTPKTGKTTMSVVELVPCARNKWGNWNEFWFYVAEGTVEDHEGLPVSEMCSHFYSAYPPFEVAEEDADEGALRCAAGLSSGRDLVEEFVAYGVWPLAHGWVLGEVCPRQMPSHGGKLVRSPAFVLDLQGRDPAAFVREVEDGAVQIVGRIDEDMRGPGGKDVFARAPGVFGADAKVMDKDHQGAAQKRQAVVRLQEVRPKRQRGAAKDAAPGRGKPPLAAKSAVPASSKAPEAAAGTGGSKTAKTVPAPSRVPEVAKAARGLPSSGKHVADFTTDISVDDYLGGSDEGQLVVVAPAAATTAAAVVPKAKGGALSAGGEMLALAAVRDEAGAMFRRLKEVKEVLSQAAAFADRAASGALTAVVSAEVERLRTQHADAVREKSAADSKCRKLADKVAALEGEKTDLRRQLAGERREVNEALAQAQAALVEAKAEAAARTEAERTRKQLMDSYRELGAQTAEFEVPDREPGLRCLEWVQEELQALPTIVEGFMSYASLVTCEGAMNALSREGCRHYEVFDQADEDFERDIYKVEDPIVKESAGAIYDRMWGPHGREVVRERAETARAQAARDERVDDFGALNSALPDPESNLAEAVPESALEPPPETAESAPDVLASAAAGGGPPPETAEGAPDAPAAAAPRAEGPATVAAEAPAEATAEAPATAGSS

SEQ ID NO: 61813 - protein, 164 aa, Zea mays
  Coding DNA Sequence Number=SeqID_18438
MVGSKDDKGKMRGKGGNNDKRRHPPTPLLEDFNDSEYSEEKSSSRDERTPVPTPQSSSFVYTNDSMGFTVVERAYIRAIERAGLDGSNDSGEKEEFKDEEEDDEAGYDGVDEGGDDDKVDSDGGGGKVGNDKGGSGKVDSGVDGDDGSGGDVGSSSVGGRSPPA

SEQ ID NO: 61814 - protein, 66 aa, Zea mays
  Coding DNA Sequence Number=SeqID_18439
MLAVMSGQGSSIDKRYLIRDVWVTGGDKNDGFGIDYGDGCPCCNYCSGQDEAMEEDFQEFQDYDEF

SEQ ID NO: 61815 - protein, 152 aa, Zea mays
  Coding DNA Sequence Number=SeqID_18440
MARTRKTACKSTGPLGVPHHQLAPRHEGSSSGSNDPIGDLEAKDSAIDWAVNSRSITWDREAKARARVAELSTALDSLQVYCNTLHEEVHVLYARLHPDVPSDAAAMGTGPSGTTNEGPDEDLDLFRPPPSMNLANEWSPAGGNEETKDDED

SEQ ID NO: 61816 - protein, 189 aa, Zea mays
  Coding DNA Sequence Number=SeqID_18441
MPLLPRREMKRLSPTMQPTSTSHKCLLEDGLDEGRVIELVVEILYHDRLGHVGNVVHYEVIQIVDVVAREMLEPLKCILPEHDRQPLDHPELGERAQTLHVPEPRGGPPRCGRGGDPIVETNVVGPAAFLGPADLALGCSSRRQWCSFSQHGSALVRCGFDRTPPATSVHSRDDGRMKHRYCFARLANF

SEQ ID NO: 61817 - protein, 73 aa, Zea mays
  Coding DNA Sequence Number=SeqID_18442
MQERDLKWGNLPSIEDDCGVEGDANGAVVNRRRTPYLARKLLEFGTGCALRCSPCSAFGRTTTSISTRWLSFE

SEQ ID NO: 61818 - protein, 238 aa, Zea mays
  Coding DNA Sequence Number=SeqID_18443
  Gene Ontology: Mol. function=hydrolase activity; Cellular component =integral to membrane; Biological process=mRNA transport
  Homolog annotation: Hit_ID=Q2QYE1; Match level="QueryCoverage=58%, HitCoverage=32%, E-value=8e-40, Identity=55%"; Hit description =GDA1/CD39 family protein, expressed
MASSSSYPSSAVLADSVLGQKAGVIVDEVSAPESSTLGARTGRYAMIFDAGSIGIRVHVFRFDRKLDLLEICDDGIKVFAKVKPGLSSYAGQPQEAANSMLPLLDKAKSVVPKQLTKRTPLRLRVRNLIHIKSKFQYKPEWINVIEGSQEGSYLWKHYKLPEGDTHTELVTEPPKSLGPPTVVLVQRTSDNPVGAPESLDKFGICFSYLSQERFTRHADITSIGVTRMRKQLHELTFV

SEQ ID NO: 61819 - protein, 204 aa, Zea mays
  Coding DNA Sequence Number=SeqID_18444
MGVGVSEALYAKAITSHGSSDEGNAQSHTDGLAREGFPRILWEVLQGAGYTTPPQYAVQLFEKHRVPRCRPGLRSLDFESFGYRAEDTIEAIALHGLTTFYGFHPLEPSTHPIGLFPVEKEDDPMWKDRVEHAKDIWAIYPGQTAHLTVRCMNAMYRLQVMRGEAMSHLMALLEATKITLDNREELVVDLSTEMVEKDLQVEQL

SEQ ID NO: 61820 - protein, 98 aa, Zea mays
  Coding DNA Sequence Number=SeqID_18445
MGLSVAVRAYWKSNERAGLGGSDDSEEEEASLEEVEDSSDSEEWSGGEGDGGEGDASSGDNDGEGSGDGDDDDEGGDGNGEDNGDGDDKSDDKSLMKL

SEQ ID NO: 61821 - protein, 150 aa, Zea mays
  Coding DNA Sequence Number=SeqID_18446
MAAIFFRVGLDAPLGDDEPQEHASGDSEDTLLGVEFYALRLETSECRFKVRKEVGGFPRLDYDVIDVSLDRSTNVFTEHVVHAPLVRHTHIPQTKWHSNVAVHAKRVGKPFGMEYLFDEPCGPSACGSPRLWLCAFLCRIGTKAASRVGL

SEQ ID NO: 61822 - protein, 95 aa, Zea mays
  Coding DNA Sequence Number=SeqID_18447
MEITEEKTSPPSDSQAGNCFYFDICGSEPDSPTNEGKPRRADRGPFNWSHASSWHTLESLFLSRVRKQQTFVAFAPRWFQRKKNKTEVLEERILH

SEQ ID NO: 61823 - protein, 133 aa, Zea mays
  Coding DNA Sequence Number=SeqID_18448
MGRGKRGKGWPHRTDGKRKRPLSPPLEDFGNSKYSEEVSFEYDWSPAPTSLTASSEDSDDSMGLSVAVRAYWRSIERTGKGGDGDGKDNSDDKGDGDGKGDGDGKGDGDDDNSGDGDGKGDDDGKVGGIMLLA

SEQ ID NO: 61824 - protein, 420 aa, Zea mays
  Coding DNA Sequence Number=SeqID_18449
  Gene Ontology: Mol. function=iron-sulfur cluster binding; Cellular component=integral to membrane; Biological process=cell death
  Homolog annotation: Hit_ID=Q94CH1; Match level="QueryCoverage=16%, HitCoverage=13%, E-value=2e-24, Identity=89%"; Hit description=Seven transmembrane protein Mlo4
  Pfam annotation: Domain name=Mlo; Domain location=4-307; Score= -319.4; E_value=0.00038; Accession=PF03094.6; Description=Mlo family
MAAEQGRSLAETPTWSVATVTTLMVAACFLVERSLSRFAKWLRKTKRKAMLAALEKIREGSGALLCLSLPKLMNKPIGNSKRCQYKKLLLKHCSINSMAARCGYEGSVNEAIKMFNPMVHAGFIQNMWHVPAICFVAVYNELCFLQCLYLPAQLHLAVEECLFGSFRLTTRSCGFLFRHMRGAQPNQQQSKDVVKALKKWIGHRNPKVQLLALSVWKAIVWQRARAEFHKRPEKHALCLMIYSSILKDSYICPLPESVVPFDVYGVEDFKIEDTNVHNPTTHKFQEDPKSDPRHCKLQHEYEITGLTNNSYFDGAHEVRHYLRKHSDLGRIVLEVAKVYVSTVQANNYPITCTQWHPEKAIFEWRKPMIPHSEDAIQALTSIIIQFKLAVLHVGLSICKKGPWFDETCKSGERKMEFMLT

SEQ ID NO: 61825 - protein, 143 aa, Zea mays
  Coding DNA Sequence Number=SeqID_18450
MGWTRAFGYKYRGSRPLSPSANISLHLVTATHTSERAPPGKIGRHYRISGHRQYGPNGWSRRLAEIWGNQCPPQFGDVMLGVDEISRRDRTPAARPPFNVDWSFGANNEGSWPTMASPWLVAGVRAAGWGRREEWGIHASHRM

SEQ ID NO: 61826 - protein, 83 aa, Zea mays
  Coding DNA Sequence Number=SeqID_18451
MTNGKEEGVGGISPCDDDGRRGLSDVKNSQGILGQPERCLPPLLLHDTREVRPWGGVVVCDLRGWALQEGNVVVSQARSWVVY

SEQ ID NO: 61827 - protein, 255 aa, Zea mays
  Coding DNA Sequence Number=SeqID_18452
MAAFPPCSITRDRLEDLEAKGLRAGLSRGGRPFVGSFNVQLHGSRMASYLSILLLSSVHGYEREWFFVWNLEGSAPAFTGLVPAGKPKWDYGAKKKFKPKISFILDVVAKQQRKRQRDAEEASMIAWKKQSYWRKGEKKRERLTRVGSGRSITLLTNTKYMTSSTSSGVQRSVSKSVSRRPDDAATSSGALQKADADAGVGASVVLVGPFEGEPVLPGLLLLPLRRLGLVRHHFFLRHQTRKGARPVAVLPSVSH

SEQ ID NO: 61828 - protein, 56 aa, Zea mays
  Coding DNA Sequence Number=SeqID_18453
MQAACNRAKWAHFSDFRHAHTSCNRHAGRYATQDRERGIPRKGSFSVKEIGSEPPY

SEQ ID NO: 61829 - protein, 431 aa, Zea mays
  Coding DNA Sequence Number=SeqID_18454
MSSRSLMHRVFPPSEPPNGGYPQSFRLVVGGTQLHESWYLSAIVRLQGFSLVSPAASPRRWSPKTVTTSPWVGRSKPGCDLGPTLSFKDVHHPRWGGGRAEPELYLPHGFVGQPLLQRSGERALTDPARGADFDNAGLVDGGRHQPQRVGLAGLAPGAPSCREGSCRAARKGGPPKTPRAARATFVFWGGPTFAPVRRPRAEVGGGGSRSPRRRRDHHHHPRFGPPALCTCPRPSSIGVGEGKVAAAFALRPSLLQFGHSQRGSLSLLLERATESLGSVDLAVRGFSCLVKGTPRPLFDEPKPGVAVSARTEAELARKEDLVGRSLAGSSVSGTDAGVDLPRPRARLMSSGDNWPRPRGDQPSRLLEPDSWRRPRQRWPRRDDEVILQSGYPRTASPSEARPDLAEGVVDAEGAAAPFNRQDPSLQDRIIL

SEQ ID NO: 61830 - protein, 153 aa, Zea mays
  Coding DNA Sequence Number=SeqID_18455
  Gene Ontology: Mol. function=carboxyl- or carbamoyltransferase activity; Cellular component=ornithine carbamoyltransferase complex; Biological process=amino acid metabolic process
  Homolog annotation: Hit_ID=Q8SA97; Match level="QueryCoverage=100%, HitCoverage=23%, E-value=2e-20, Identity=45%"; Hit description =Ornithine carbamoyltransferase
  Subcellular localization annotation: CTP_CleavageSite=50; ConfidenceScore=5.24e-01
MAPPVDVAGLRPRLGDVEAPPKPRSRLSPSPSPGSGGAEFAVFRDLARVRALGRVERSSLSSGAEPESEPWVGQSGVRRLPGLSSSPSPGSGGAEFAVFRDLARVRALGRAERSRSVGRRSDGGHFGSASRGARVRIKLYADGGYQLRIRSLE

SEQ ID NO: 61831 - protein, 152 aa, Zea mays
  Coding DNA Sequence Number=SeqID_18456
MTCGSCAGGSEWKGPTDLTHRSARAGERTGGRADERDPWDSERRCVCVEEIGADKSDPLGSKRERGRGVTDANAGTGAVTFSVIMRPENGTPRNLYPETRHLKQEILLTTGRSTSAAIPNAAIVATPRIESGKEWSATPGTNTRTRPFPETY

SEQ ID NO: 61832 - protein, 37 aa, Zea mays
  Coding DNA Sequence Number=SeqID_18457
MNVWCDTFHSQLRAIQWPPNFKISNVDKYKPKQDRGS

SEQ ID NO: 61833 - protein, 1110 aa, Zea mays
  Coding DNA Sequence Number=SeqID_18458
MPSSSSSAADTPPVGASSEDTLSNVAAEELRPGDTVEFGVSRMSSVRVQDMQQLGYFGSGVGRVPGAEEVLRRFEVQVHQLTPNAVVALAKYVWATTSYGGTVEDHPGLPVAVMCSHYYIAYPQFEVAEDDEDEGALLCAARMSSGRDLVEEFIGYGVWPLAHGWALGEVCPREMPSRGGQLVRSPAFALDLCGRDPAALVREAKDGAVRIVGRYVPKTEGLRSWDIRGSNDRLNRVFELNRLPYGGYPGEDAADRRGKKPMGGTEEGPSQDAAPAAKRRKLGTTVGGMGVSDNFAVELMSTCAAPGGRMSSPELRESSARMLEVTEGRWPKNLPIPWAEGEDMSTSRIARGLRIFPYGRNIAVVVSAVMNKDRQDAAQKRRAVIRIADPRHEVKRARGSAKAAAPGSSQPMSTAKPAAPGSGKSSASAKTAAAGGAKPPRSRLRKYGSCPHRENVLPTSARTSAWRTILLVSFFGGLLTGDVLQGRARDKWLLSRLWWRPLRASAVVRAKGTAQDPWAAFCVSSEILTAVAAKDVAGTMSQQLSQHADAVREKSAAESKNLRLAEKVAALEAEKTDLRRQLVEERKEVNQAIAEAQAAQAEAKVARAEGSLASQRDEEWEARFNALRGRMDKAEASTRSKVEWTLAQFVDSYRELGARTADFEVPDQEAGLRFLEWLQEELLVLPTIIEGFMSFASLVTYEGAMNALSCEGCRHYEVFDQSDESFEREIFKAEDPIVKYFCSVNVLLLQMERAEDVEDLGGLVGAPPEAAEGNPVLPSDAGESPLAVPVPAMASEDPVSAPAPTVEGAPEVVAEPAVEDPMAVAVPSQGFGPAHATATDNANFVAASTVVAENDSNDSVSKFFESDDSGSSVVWSEESSDEDLDYYAALDVAAAEASLRVMGAEVLPGPSAGHRRRREVAKRRVSEVEGGRLRVDGASKRELLSSPAGASVGEGGVVNLFEGEELRIMLFNYREMGIIPKVEPIQVQPEAPQEAPPRPTPGLGPRLGLGRRSPPHPTPGLGLNLDLGRRLRGNKTGIPSRLASVTSNDGSPRAPMTTVALSPLQKQGDISKVPTAPIAVLLQGPSAPPTATTSHAQGSSTSPIATLACT

SEQ ID NO: 61834 - protein, 132 aa, Zea mays
  Coding DNA Sequence Number=SeqID_18459
MRHEPWHGDARPGERDGEERAWVAVGRGAPPAHRNDDAAARACSDDCVDHGRDVRPGYLGHRTQGPRSGTPATRTAQSSATLQYREREGKVEDSHLCMSIDVEARTRRAQGLSEARDLSKHDRTPRPAGGSG

SEQ ID NO: 61835 - protein, 27 aa, Zea mays
  Coding DNA Sequence Number=SeqID_18460
MTAMAEPSAQSSSRTEPLFSHYRRQAS

SEQ ID NO: 61836 - protein, 124 aa, Zea mays
  Coding DNA Sequence Number=SeqID_18461
MGVEGAGGGIYKRVGVLGCGVAMTEQVTRGSRCDKGVGGLLPATMVVEGTLQRGGGRRYCPAKGAWAVVARMEAGTPAGVQMTGGVDDPDVCGIWFPESLPLCMLVLGFKGKLPGIFLGKALFS

SEQ ID NO: 61837 - protein, 93 aa, Zea mays
  Coding DNA Sequence Number=SeqID_18462
MGISSPRVERESWLMGKRYRWFEIQELRYGFGSTMMMLFLDEEMPNGTFAEYVDVYSSLLYHKTPGCPHCNHCSGEGEAVEGDFQEFQDYDEF

SEQ ID NO: 61838 - protein, 22 aa, Zea mays
  Coding DNA Sequence Number=SeqID_18463
MARRWPGATVADLCGCTGNGGV

SEQ ID NO: 61839 - protein, 366 aa, Zea mays
  Coding DNA Sequence Number=SeqID_18464
  Gene Ontology: Mol. function=DNA binding; Cellular component=nucleus; Biological process=regulation of transcription
  Homolog annotation: Hit_ID=Q67UM4; Match level="QueryCoverage=91%, HitCoverage=93%, E-value=6e-74, Identity=49%"; Hit description=Gt-2 -related-like
  Subcellular localization annotation: CTP_CleavageSite=11; ConfidenceScore=5.18e-01
MSTAGDPAGAAAAAAAAAAAAAAAPAPSGRAPRLPRWTRQEILVLIEGKRMVEGRGGRAGRGRLAAAAAAAAAAASGEASATAAAAAALEPKWAAVAEYCRRHGVERGPVQCRKRWSNLAGDYKKIKEWERAAPAERDPSFWAMRNDARRERRLPGFFDREVYDILEGRARPVLDDRAARNAAAAEEAVAVAVAVHVEEEDREAEVPEAVFDSGRPATEEALFSEDEEEEEVEDAPAVAPPPPAPSVVAVPVSEKPEASRHQQSAEQGTSKDTQPEQSSERDAPAEQGGQKRPRTDEAAGEGEGTAYLQSKLIEILDRNSRLVAAQLEAQNQNCELDREQRNDQANSLVLVLGRLADALGRIADKL

SEQ ID NO: 61840 - protein, 435 aa, Zea mays
  Coding DNA Sequence Number=SeqID_18465
MEVVELVPCARNKWGNWNEFWFYVAEGTVEDHEGLPVSEMCSHFYSAYPPFEVAEEDADEGALRCAAGLRSGRDLVEEFVAYGVWPLAHGWALGEVCPRQMPSHGGKLVRSPAFALDLQSRDPAAFVREAEDGAMRIVGRVFELNRLPYNGYPGQDDVDRCGKKPVVESGDDPAPAAAPSSKKRKLVMDKDRQRAAQKRQAVVRLHEARPKRQWGAAKATAPGGGKPPLAAKSVVPASIRAPEAAAAAGGSKSAKAAPAPGKVPEAAKAARDLSSPVKHDADFATDICVDDYLVGSDEGQLVVVPPAAATTAAAVVPRAKGGALSAGGEMPTLAAVRDEAGAVSRRLKEMKEALSQAADFADRAASGALTRLCLPKSRDFGRDMLTPSGRNRPPTCHTRILGAPRSGREHKLVKILGWLELSIAFKVGQNFISNY

SEQ ID NO: 61841 - protein, 235 aa, Zea mays
  Coding DNA Sequence Number=SeqID_18466
MDKDHQDAARKRRAITRVEDPMREVKRARGGAKSAAPGSSKPPPAAKPAVPGPSKSSAGSRAAASGVGKLPSAEPAKERRSPLPVRTDEAATGGADFDTDICVDDYLVAGYCPVSGGGHFACGGSWSEGYFVGPVVQILCQWPDLVGHCRQRRGGLYDPAAEACIASAEACKPFGTSLVRCFYVVASLMDVSWQATAFADHVASGALTSEFAAERQRLEGRIERLRAQHTDAIRD

SEQ ID NO: 61842 - protein, 93 aa, Zea mays
  Coding DNA Sequence Number=SeqID_18467
MDLDPDAEAVEHELEDHNERLDEMALFGTSTGSNAGAAIDMFEVLSCIKDWELANKHMQNTVEKETKSKVEKQTLVDDDGIFTEVSGTAQGPD

SEQ ID NO: 61843 - protein, 136 aa, Zea mays
  Coding DNA Sequence Number=SeqID_18468
MSEIFMCYIFIIEELDEECHYLCLGSNSFCRENSLLGLVFAHSVNPIEVKWQRELFKSSQKETKKFSTKEEKLGQIGSHWISSENKDQHWRPPLVNSFDHLRQASTFVMPPKKTAAPGAALQPLDVNQEMLHEARS

SEQ ID NO: 61844 - protein, 27 aa, Zea mays
  Coding DNA Sequence Number=SeqID_18469
MAPPRKSAAAVSSEGNFIPETPALFSK

SEQ ID NO: 61845 - protein, 54 aa, Zea mays
  Coding DNA Sequence Number=SeqID_18470
MAPKRASSKAAPSVDEAAKAAVGGLRLPKVSSDSNRYHSGRSPKSTKVNTASKL

SEQ ID NO: 61846 - protein, 92 aa, Zea mays
  Coding DNA Sequence Number=SeqID_18471
MARYEFSSVQTRPDTIGYGSGPARTSLRELSAFRDRGVPKPTSECRRVPQPRLVDARPSAKGGSEVAGDGRERGGNPAAFVFVPRPGRVRLQ

SEQ ID NO: 61847 - protein, 189 aa, Zea mays
  Coding DNA Sequence Number=SeqID_18472
MGVGTFQPSFGFKDFHHAARLHPSTGGHPRCFKDVHHPRWGGGRAEPELYLPRGFVGHPLLRRSRERALTGPTGGPDFDNAGLVDGGRRHPQRVELVGLAPGGPSCRRAAAAPSGGLMAPAVGAEAEAAREVPVADEITATIHASGLRVLCACPRPSSVGVGDDKIAAAPTLRPALLQFGHPERGSLSS

SEQ ID NO: 61848 - protein, 133 aa, Zea mays
  Coding DNA Sequence Number=SeqID_18473
  Subcellular localization annotation: CTP_CleavageSite=24; ConfidenceScore=5.15e-01
MGRKQSLEVVWASGPPCDAASHPPAAASGTTARRTTTHAGHSTGSPLGPALLCYSGLDFAIARPSHQPCRTPPLEKGRRRNEREDGRERLQLRDPWGMRDLGAGREGSTGGSGCGAAAGSVGDAGSGGGAMRG

SEQ ID NO: 61849 - protein, 149 aa, Zea mays
  Coding DNA Sequence Number=SeqID_18474
  Gene Ontology: Mol. function=hydrolase activity, acting on acid anhydrides, catalyzing transmembrane movement of substances; Cellular component=integral to membrane; Biological process=copper ion transport
  Homolog annotation: Hit_ID=Q6JAG2; Match level="QueryCoverage=72%, HitCoverage=30%, E-value=3e-22, Identity=91%"; Hit description =Putative copper-exporting ATPase
MKQYTNHYRRRSEQDRAHTRWSSEREANNDTEKLYPSSSLSMEDIKIDTELHEITVLYKPDQTGPRDLIEVIESAISGVVTASIICRSRMKGASQSHVNESMITGESLPVAKRKGDTVIGGTVNENGVLHVRATFVGSETALAQIVRLV

SEQ ID NO: 61850 - protein, 76 aa, Zea mays
  Coding DNA Sequence Number=SeqID_18475
MSGAPRPYRAELATLGFLQALSAIIHRTVRCANGVTTIQRSGRLQRYSAQQCAAESEAHRTMNSGCPVWRRTVRCH

SEQ ID NO: 61851 - protein, 195 aa, Zea mays
  Coding DNA Sequence Number=SeqID_18476
  Homolog annotation: Hit_ID=Q7XBD4; Match level="QueryCoverage=85%, HitCoverage=22%, E-value=1e-11, Identity=30%"; Hit description =Cinful1 polyprotein
MAQRHISLSILGAYSKAEDEAMMVAFGACSKKRLNRVFDVIGRIETAYVPKLSERVETTPLAIEIVHVVPIEAIAVLAREPEPEKVAEKMPEPQKMIVTALPKLPVTIGTPRKRRMASVLEAVLESMKTPPPPSSEASGSKTEDVPEMITASTSAHAEAGPSEAILENIAEESLPTIPSVPAPEAPSSSDLNFIV

SEQ ID NO: 61852 - protein, 90 aa, Zea mays
  Coding DNA Sequence Number=SeqID_18477
MAEHNLPQRTTSRVSTSAGSKVIMLKAHHAAVVGLARTDVRDVAYKNLAVERIWLWEESEGLFGKAPAPASLALDPDPREELILLILLKN

SEQ ID NO: 61853 - protein, 34 aa, Zea mays
  Coding DNA Sequence Number=SeqID_18478
MVTRSWARGWRAGGDMLQLTALSFHLVLGYMRRI

SEQ ID NO: 61854 - protein, 337 aa, Zea mays
  Coding DNA Sequence Number=SeqID_18479
  Gene Ontology: Mol. function=phosphoprotein phosphatase activity; Cellular component=cytoplasm; Biological process=negative regulation of tyrosine phosphorylation of Stat3 protein
  Homolog annotation: Hit_ID=P48578; Match level="QueryCoverage=82%, HitCoverage=89%, E-value=1e-160, Identity=95%"; Hit description =Serine/threonine-protein phosphatase PP2A-3 catalytic subunit
  Pfam annotation: Domain name=Metallophos; Domain location=48-243; Score=139.6; E_value=8.7e-39; Accession=PF00149.19; Description =Calcineurin-like phosphoesterase
MSSPHGGLDDQIERLMQCKPLAEPEVRALCEKAKEILMEESNVQPVKSPVTICGDIHGQFHDLAELFRIGGKCPDTNYLFMGDYVDRGYYSVETVTLLVSLKVRYPQRITILRGNHESRQITQVYGFYDECLRKYGNANVWKTFTDLFDYFPLTALVESEIFCLHGGLSPSIETLDNIRNFDRVQEVPHEGPMCDLLWSDPDDRCGWGISPRGAGYTFGQDISEQFNHTNSLRLIARAHQLVMEGFNWAHEQKVVTIFSAPNYCYRCGNMASILEVDDCREHTFIQSLEISPLTVCLSVRAIESSWDSVHIDFVFLFLRLLSCFMVTVASLMGSAKV

SEQ ID NO: 61855 - protein, 454 aa, Zea mays
  Coding DNA Sequence Number=SeqID_18480
  Gene Ontology: Mol. function=oxidoreductase activity; Cellular component=chloroplast; Biological process=electron transport
  Homolog annotation: Hit_ID=A2XN43; Match level="QueryCoverage=46%, HitCoverage=39%, E-value=1e-106, Identity=78%"; Hit description =Putative uncharacterized protein
  Pfam annotation: Domain name=Rieske; Domain location=264-371; Score =97.6; E_value=3.8e-26; Accession=PF00355.17; Description=Rieske [2Fe- 2S] domain
MDSKKFASEGAPPAHSRITTPTLGIHKDHDNTESPRPDAPDENATSHRQHSDRAPPAPGRTDRPPFPREPRPVKTKLEQCIFPISGEERWDDRPGSRAARFARISGGGEEARRCDFVFFGLERGFFGDRDPDAEGTRSYRPTGAGVPATPRLPPNHSHEFPAPPAPATPPILSRVSAAGRHHAMDPLSLLQLPRASRPPMPLAAAAAPLVSARLSVSGGARSVRRRRRRRAAGLSVFAVATETPRTEEQQPSPSGEERFDWLDQWYPLAPVCDLDPRAPHGKTVLGLSVVAWYDRGAGEWRVFDDACPHRLAPLSEGRIDDRGRLQCVYHGWCFDGAGACKFIPQAPALGPPVHTSSRACVASYPCVVQNNILWFYPRADPEHSDVLQRKRPPLIPEIDDPDFVTVYGIRDLPYGYDILVENLMDPAHVPYAHKGIMRGIRKKEDPGRYVPDLT

SEQ ID NO: 61856 - protein, 121 aa, Zea mays
  Coding DNA Sequence Number=SeqID_18481
MAVGCQASSDLQASKPFRIRRHDFSFQESRESLFGISLRGRGCRPWFPPHGQEICPAGGSGISAQRRQADCGAPVPAGCCEMKTPANSIPAFPAHVQTRRVLSRKVLTNRSRRKMVVAIAY

SEQ ID NO: 61857 - protein, 662 aa, Zea mays
  Coding DNA Sequence Number=SeqID_18482
  Gene Ontology: Mol. function=catalytic activity; Cellular component =cytoplasm; Biological process=metabolic process
  Homolog annotation: Hit_ID=A2XN42; Match level="QueryCoverage=97%, HitCoverage=84%, E-value=0.0, Identity=78%"; Hit description =Putative uncharacterized protein
  Pfam annotation: Domain name=AMP-binding; Domain location=214-646; Score=100.1; E_value=6.7e-27; Accession=PF00501.19; Description=AMP -binding enzyme
MAASARGSVWEIQPRDVEAAGLAAADAAAFHAALRSAAGSAAASGDAVWAAVAAAGVLRPEHPHALHQLVYYSAYAGWDRAARGPPPYWFPSPTDCKQTNLGRLMEVNGPKLLGSSYRDPISSFNHFYRFSVENQEVYWSMVLKQLAVKFKQEPMSILSTSDRSKKGGTWLQGAVLNIAECCLLPCPSLKRTDDSTAIIWRDEGLDDYPVNRMSLKELRSQVITVAHALDAIFEKGDPIAIDTPMTCNAVIIYLAIILGGFVVVSIADSFAPQEIGSRMGVSKAKAIFTQDFIVRGGKKVPLYSRVIQGTSSKAVVIPAIGDSLGIMLRDGDMSWKDFLSHAAGRSSSYSPVYQSVDALTNILFSSGTTGEPKAIPWTQLSPIRCASDTWAHLDVRPCDIGCWPTNLGWVMGPIIIYSCFLTGATLALYHGSPLGRDFCKFVQDAGVTVLGSVPSLVKSWKAGNCAEGLDWTKIRVLGTTGEASDIDDNLWLTSRASYKPIVECCGGTELASSYIQGSLLRPQAFGAFSGASMSTGFVILDEQGTPYPDDIPCSGEVGLFPLYFGATDRLLNADHDKVYFDGMPIYKGRQLRRHGDIIQRTVGGYYIVQGRADDTMNLGGIKVGGPSSKVFNHLISSLCYMKETITCQHIPLQISGSLPKGI

SEQ ID NO: 61858 - protein, 537 aa, Zea mays
  Coding DNA Sequence Number=SeqID_18483
  Gene Ontology: Mol. function=catalytic activity; Cellular component =membrane; Biological process=sphingolipid biosynthetic process
  Homolog annotation: Hit_ID=Q75HI8; Match level="QueryCoverage=80%, HitCoverage=97%, E-value=0.0, Identity=73%"; Hit description =Putative phosphatase
  Pfam annotation: Domain name=PAP2; Domain location=183-315; Score =74.7; E_value=3e-19; Accession=PF01569.12; Description=PAP2 superfamily
  Subcellular localization annotation: CTP_CleavageSite=72; ConfidenceScore=5.73e-01
MAFASLTSSQNHNARPTLSSKRSSTGPSSSPRDPDDPVRLGLRLPATRVRPRAPRYQRAPPPPHSAARRSCPCAPDREEPDAGVWNSDMEAAAAVVGFGAGAGLTRWQAAALSAVAGWVWAASFYDLTRRARALVQPWVTRRVHAETAAILRFQRLEHKLLDNIFSVLSCVVSVPFYTGFLPLLFWMTLLMAFCDYLGNSVKDIVSAARPCSPPVRRVTATEDEKENAMEYGLPSSHALNTVCLTGYLLHYILTFGEHGSVTVAAGLSLAFLLVMLVGIARIYLGMHSLTDVVAGIGFGVVILAFWLAVHDRVDAFVVSGENGTSVNLSALGASNFVEEHDHEVWRWKSIKYHPNSFPRLAVATFWAGLSLLLCFAYPKPEFPTPSFEYHTAFNGVAFGIVYGIQQTYFHFHTPDAPVVFSAELPLLTFAGRVLVGIPTILAVKFCSKALSKWLLPVVCSTLGIPTVSSCYVPALRADSGSGSGKNRQGPGHLQRLLFSHFPRKAYDVDTGIRFVQYASLAWSVVDLVPAMFAHLNL

SEQ ID NO: 61859 - protein, 330 aa, Zea mays
  Coding DNA Sequence Number=SeqID_18484
  Subcellular localization annotation: CTP_CleavageSite=16; ConfidenceScore=5.16e-01
GDVGVPPKPRLSLPFVAAAEPEPRGRARRKSFGRGQGGVRALGSGEAEFRRLPGLSPSPSPGVGRSGVRRLPGLSPSPSPGSGGAEFAVFRVLARVRALGSGGAEFAVFRVLARVRALGSGGAEFAVFRVLARVRALGSGGAEFAVFRVLARVRALGSGGAEFAVFRAALSFCQTGQWSGGVTAVTSALPGARVRIEARAKRDRVHSCGLIPDLIVPIKPLQLYADGGYQLRIRRLEALSGFCDWEGSAVNQPGPTWQREEVTGAHPVEVEVAEQTPTEGSAAGATGAEAVTDTATAVVETADAGGTGGCGQTELRTGEVNAFVTGRSGE

SEQ ID NO: 61860 - protein, 126 aa, Zea mays
  Coding DNA Sequence Number=SeqID_18485
MERGEVAGDDGRRWWPPERSPDYRKAETRRLETESLRLGEEMRQSPWLGRAGGDFLKREMGTPDSLQWLSGAHRTAHSRCPVNHRTAHRKKGTSRAAAGAPDIAQCSVRCTPDCPVRQALDAIQGI

SEQ ID NO: 61861 - protein, 93 aa, Zea mays
  Coding DNA Sequence Number=SeqID_18486
  Subcellular localization annotation: CTP_CleavageSite=47; ConfidenceScore=5.68e-01
MALGSRARATSVDSAWALARGCSRGTPAGGSATRGGGGRARPGLLRRAGARSSANGRSAVCPRERERSGMAKVASQRSMPEPGLGRAEGAPTV

SEQ ID NO: 61862 - protein, 25 aa, Zea mays
  Coding DNA Sequence Number=SeqID_18487
MGKRGSGKQCRPLRFDCRASHPDND

SEQ ID NO: 61863 - protein, 33 aa, Zea mays
  Coding DNA Sequence Number=SeqID_18488
MVVAPWVKYLSQVYDPMLTWVFAPTAPPFAHLQ

SEQ ID NO: 61864 - protein, 401 aa, Zea mays
  Coding DNA Sequence Number=SeqID_18489
MPGKANCCCPARVQHSVLCPGDGGQPHRGVSQHIVRREGGTRVLGRSHSRSRGEDENEDLPVRFGAAGARWCGVGGQVDAAVGAEVGEAGEGFSADEIANSACTPGPPSPWLKWLVLVLCGRELFHRSVCPEAVAAAVLPPRTEVVAAAVGACGGEPLGVRCPAGLLEQFVCSVLSAFRDRGVPKPTSECAACPSPDGSSVWASAKGGEARWPESSVREVQGDVGVPPKPRLSLPFVAAAEPEPRGRARRKSFGRGQGGVRALGSGEAEFRRLPGLSPSPSPGVGRSGVRRLPGLSPSPSPGSGGAEFAVFRVLARVRALGSGGAEFAVFRVLARVRALGSGGAEFAVFRVLARVRALGSGGAEFAVFRVLARVRALGSGGAEFAVFRVLARVRALGSGGA

SEQ ID NO: 61865 - protein, 239 aa, Zea mays
  Coding DNA Sequence Number=SeqID_18490
  Homolog annotation: Hit_ID=Q6QP51; Match level="QueryCoverage=26%, HitCoverage=29%, E-value=2e-14, Identity=66%"; Hit description =Putative growth-regulating factor 1
MQVACNCTKGAHPFDFDASSMEAQAHTSCDRRTSYYVRKTAAPLVPAPCLLDCGTGAATRGNHAHGPGVPTRHASHGTVTRGRRRDGQYGQKWADNNGGGRRAEAAVKSSAGSRPLLEQRESPLPRDQERGILRKGSFSAKEAGPEPPTDQRFEGWPLGRVRQPPQSTRAPCPQLIRGSKVGPSEGFDSRLGALGLRTHYWSERLGDPAPAKPLTASTYQPENSEPDYAPGQRPVRMRE

SEQ ID NO: 61866 - protein, 239 aa, Zea mays
  Coding DNA Sequence Number=SeqID_18491
MRWGPSDFHTPCITVETKRKENLHVEPTVVLLQHSLGGTTSLRHAWVCAGERTHLAFRARGVSLGGARPLEARSATSTTAKADCDWGTCLRGSPVTSQTGLVGHGARTVMWAAHARRPRPRIGLLRVDGKEKPEERGRRRGGSPHARDNGQDGEVLRRGRGQRRGELATEAGRNTSGGLMHASWRGGRWRCWARVGEKTAPRALFGEDEQGLGEIVAASAATRGDEPWEGARWVDRGGA

SEQ ID NO: 61867 - protein, 89 aa, Zea mays
  Coding DNA Sequence Number=SeqID_18492
MAVAGGQEQRTGGASGRRSERRFAFAIMTALKKAGPSEGFNSRLRACGLHTHYWSEVRRPAPRKGSTAASGYSGSAPTTDQGFEGWPPK

SEQ ID NO: 61868 - protein, 329 aa, Zea mays
  Coding DNA Sequence Number=SeqID_18493
MEAQAHTSCNRRAGYYMQETAPPLAPAGGSGSRVVSKLTSPPGIEKGPSPTAEDDTTDDTFGRRSRRRFTSAIMTASKRASPSEGFNSRLRALGLHAHYWSEVRRPAPRKGSTAASGHSGSTPTTDQGFEGWPPKGSTAASDAERGMTLVDRVRLTAAKSGLGRHRKLRLARAQGSDSGSAPEDDELRFARPQGSDSGSAPEDDELRLARPQGSDSGSAPEDDELRLARPQGSDSGSAPEDDELRLARPQGSDSGSAPEDDELRLARPRGSDSALTSDDELCLARPGARTRPRPRKTDSTPTSEEPPPRPTQGSDRPRHRGGHHHPIPS

SEQ ID NO: 61869 - protein, 100 aa, Zea mays
  Coding DNA Sequence Number=SeqID_18494
MASSLNVEEDSAIYVAPTAVPLDRVRLTAAKSGLGRHRKLRLARPQGSDSGSAPEDDELRFARPQGSDSGSAPEDDELRLARPQGSDSGSAPEDNELRLA

SEQ ID NO: 61870 - protein, 162 aa, Zea mays
  Coding DNA Sequence Number=SeqID_18495
  Subcellular localization annotation: CTP_CleavageSite=23; ConfidenceScore=5.23e-01
MGAIPENSAACAAPTAVPPARVRLTAAKSSLGRHRNLRIARPQGSDYTSTSDDGLRLARPQGSDSTSTSDDGLRLARPQGSDSTSTSDNGLRLARPQGSGSTSTRKTVSALPDPRARAQPRHGRRSPPRPTPGLGLNLDLGGVTTLLGPTTPQGGHHYPTPS

SEQ ID NO: 61871 - protein, 292 aa, Zea mays
  Coding DNA Sequence Number=SeqID_18496
MSGVLGVGEARPLGMVACRLHGYPPFRPLVWAKVESRFPRRLGTQVGRVAFKRRVTLLEGDRVFALPYASPVAPLRRRSPKTVTSSPWMGRGKPGCDLGPTLSFKDVHHPRWGGGRVEPELYLPRGFVGRPLLRRSRERALTGPASGSNFDNVGLVDGGRRQPQRVGLVGLAPGAPSCRKAAAAPCAREDRPRYRALPGRRSCSGAVLPLHRYGASTQRGNPRPLFDEPRPGVAVPGRTEAELARKEDKSGDPWTASPFEARSDLAEGVVDAEGAAAPFSRQDPSLQDRIIL

SEQ ID NO: 61872 - protein, 239 aa, Zea mays
  Coding DNA Sequence Number=SeqID_18497
  Subcellular localization annotation: CTP_CleavageSite=41; ConfidenceScore=5.23e-01
MAPPVDVAVCALGRATWGAESEPWGRARRSFVVFRVLARVRALGSGGAEFAVFRVLARVRALGSGGAEFAVFRVLARVRALGSGGAEFAVFRVLARVRALGSGGAEFAVFRAALSFCQTGQWSGGVTAVTSALPGARVRIELYADGGYQLRIRRLEGTPNYGPRHKVMSEVSVSRRRRNPSARSALPAYVGIPYLSASYLSQKVMSEDSTFEVVEKHEKCSGRKIFSEENFDAEGVPPF

SEQ ID NO: 61873 - protein, 116 aa, Zea mays
  Coding DNA Sequence Number=SeqID_18498
MGRREAEREGGSEVVGDGRERGGNLAAFVFVPRPGRVGRCGGSSEVEVESEPLGRARRRQLAEARAEFESKRSSSSSGAEPKSEPWVGQSGVRRLPGLSPSPNPGSGGAEFAVFRC

SEQ ID NO: 61874 - protein, 214 aa, Zea mays
  Coding DNA Sequence Number=SeqID_18499
MVSPVSCKRVIQVDVRAPFVGGRLGAQRHAQKYLRQLARRLLDAWAWVPKLACQKSEKRVRLARLHAACMAARPFCPLVWAKMGGRLGGPWSVLEKTQPAAPGGAPSCLPIFQAPGWGYPPPFRLLVGGTQLHGSWYLSAIVRLQGFSSCCPAAPLRRRSPEMATSGLMVGESEPGCGLFPSLSLKDFHHQGWGGECAELRLAPAWAAARSFTQ

SEQ ID NO: 61875 - protein, 25 aa, Zea mays
  Coding DNA Sequence Number=SeqID_18500
MNPVLWLQMTNMISYQGLVRAFPRP

SEQ ID NO: 61876 - protein, 51 aa, Zea mays
  Coding DNA Sequence Number=SeqID_18501
MVTNRALLNFVTKGRLKGPFGKAPAPASLAPDPDPCEELILLILLENQNHF

SEQ ID NO: 61877 - protein, 68 aa, Zea mays
  Coding DNA Sequence Number=SeqID_18502
MSGDHAKREIVTGGDKSASSGRTHSRESGHKHKEESASSIKSQRRGDKKKKMKKVVGVSRPGGPRADE

SEQ ID NO: 61878 - protein, 110 aa, Zea mays
  Coding DNA Sequence Number=SeqID_18503
  Gene Ontology: Mol. function=isoleucine-tRNA ligase activity; Cellular component=cytoplasm; Biological process=tRNA aminoacylation for protein translation
  Homolog annotation: Hit_ID=A3ABX3; Match level="QueryCoverage=50%, HitCoverage=4%, E-value=4e-18, Identity=80%"; Hit description =Putative uncharacterized protein
MDGIRGVSEEATPIARGYLLAMAADNLVRLNLPLQSTRASEKQEDGKYKHTVDLLKTTFELRANSVQRELELQKLWDDNQVLKRVSERNTGGIFIGHVVGDALTHANRED

SEQ ID NO: 61879 - protein, 104 aa, Zea mays
  Coding DNA Sequence Number=SeqID_18504
MSKNTRDTRFIPRFGHTTKVPYFLVEAPTKSLVSFNPNPPCTYHKDCWSEVKGVRGQLNYPLVPVQLVLTREFRRENPGSTARRQVQLVYGQRGSQLKLKFNWS

SEQ ID NO: 61880 - protein, 296 aa, Zea mays
  Coding DNA Sequence Number=SeqID_18505
  Homolog annotation: Hit_ID=A2YAJ5; Match level="QueryCoverage=56%, HitCoverage=100%, E-value=4e-43, Identity=52%"; Hit description =Putative uncharacterized protein
  Pfam annotation: Domain name=DUF573; Domain location=95-186; Score =8.1; E_value=2.7e-05; Accession=PF04504.5; Description=Protein of unknown function, DUF573
  Subcellular localization annotation: CTP_CleavageSite=80; ConfidenceScore=5.76e-01
MDEAASASAAAARLRASTPRSKKRTSRSKSRGRSPNPNPSSRRERAADHGSAAPSRKSDRKPNRSFPDSATLATAMASVPAASAPSSGGGRGSAGAVQKLWSEVDEVALLTGAAAFKDRTGIAPRLPDMGELFESIRGSLAPHLDQAKVYYKLKRLKSKFQHSVLGDSSTAHEHRLRDLGAALWGAELTRPEENAVVTAEETTDPDEGFIDEDREGSVKLPMVKEVLGEYWRLNGQTMSGVSLEKGLVLLGSQQASVVEVKWRRQLEADMRMQMRRHDLEKEVYGLLIDAIKGLGP

SEQ ID NO: 61881 - protein, 94 aa, Zea mays
  Coding DNA Sequence Number=SeqID_18506
  Subcellular localization annotation: CTP_CleavageSite=57; ConfidenceScore=5.30e-01
MPTRASNQVRWMQHVQIGARSLAFAFPASLARPLGLCMRGGPSEGTGPRSFLCYSVRALASFQKKVHLVDQFLNHASKQTGTRIPNPSRSPVIR

SEQ ID NO: 61882 - protein, 263 aa, Zea mays
  Coding DNA Sequence Number=SeqID_18507
MRQHAEISFAKVNENGDLENGIRVQMSQVDVIKIKEATEKRRDGKAEAAEKERSVNYRLVGILCWDSCPVANPPRTEFPRRKNPDGDEAEKLSFRNYRHVWRLATGPAAAALAAAASGAAHAAAALGAALAAAASAAVAAITIAVASVVVVAVVVVVIFALAAVRVLLVRGELRLIRALEPGALDGPDVRPDLRRKPLGSDDSRRGMGAGDPSDSEENSSSEYSESPNSSDGGVGSRLRLLFLPMVEADRREEKKAVKSSEEM

SEQ ID NO: 61883 - protein, 141 aa, Zea mays
  Coding DNA Sequence Number=SeqID_18508
MAKAHQMRVHSSDSKKRLHTATLPLCPAHSTQQDYGEVYGVDSTNEVSLTYSNFSVWREVHGCDIFLLHNELDTCSAVHGCGQPYIGNTEYRYWNLNGVGKAALMMMLTNMHHFKDGRIIILVRVQIDELDFTVWSLLATG

SEQ ID NO: 61884 - protein, 38 aa, Zea mays
  Coding DNA Sequence Number=SeqID_18509
MDYMVFEVAELDGATMIYHTNNKMKDAIAPIGKATKSP

SEQ ID NO: 61885 - protein, 339 aa, Zea mays
  Coding DNA Sequence Number=SeqID_18510
  Homolog annotation: Hit_ID=A3AWE5; Match level="QueryCoverage=100%, HitCoverage=100%, E-value=7e-20, Identity=52%"; Hit description =Putative uncharacterized protein
  Pfam annotation: Domain name=DUF241; Domain location=87-334; Score= -23.8; E_value=0.00018; Accession=PF03087.5; Description=Arabidopsis protein of unknown function
MAGYRRTISFPAPKPGADALALATASDKLAAYRIRSSSLPCRFHPLLLQLDDDVAALRLVIGQSPPCPSAPSPSASSVSAAASQVCRVLVSLSELLRHPQVREPLRRLLGRSRLAERLLDDLLRLADAHGSFRQALVALAALQAETRAALRRGDPTRLASASRAQRRAGRDLPRLAAAARAVAARAPAPLPEGLPPDAAALAAAVADATAAVASGSAAVFSGVSSLSNAAASARVEVASTPCWVTAPRETVGRAGDQPPPHMRRSAEKQKGVDEDEESSTAQFRPEARVKPEERARKAAFERHENLERCIANVDGSGEKVFRALVDTRVSLLNILSPGF

SEQ ID NO: 61886 - protein, 360 aa, Zea mays
  Coding DNA Sequence Number=SeqID_18511
  Gene Ontology: Mol. function=oxidoreductase activity; Cellular component=cytoplasm; Biological process=electron transport
  Homolog annotation: Hit_ID=Q5JN40; Match level="QueryCoverage=60%, HitCoverage=30%, E-value=1e-109, Identity=92%"; Hit description =Putative glucose inhibited division protein A
  Pfam annotation: Domain name=GIDA; Domain location=50-220; Score= -71.8; E_value=7.9e-13; Accession=PF01134.13; Description=Glucose inhibited division protein A
  Subcellular localization annotation: CTP_CleavageSite=32; ConfidenceScore=5.52e-01
MARPSPPGHAATSWPRIPLQAPGSVPPPAHPRQRRGTPVTCVEDLPPPLRLEVPTPLSFALFTPPLGDYQQALLCLQHRRVVVDAAHLRQRRGTPVAEVEDLTPPPRLEAFTLSRYPSPSLPSSYFEFWGQGFSTGLPERLQLSLVRTIPGLENCLMLRPAYAVEYDYLPAYQCSRSLMTKKIEGLFFSGQINGTTGYEEAAAQGIISGINAARHSDGKSLIILERESSYIETLIDDLVTKDLREPYRMLTSSSEHRLLLRSDNADSRLTPLGREIGLIDDRRWELYQSKQARIKQEKERLRSTKVPGGEFAAEVTAVSNQPVKDSSTLEAILKKPHVQYKLLTSMDAEMKIYLELRRNV

SEQ ID NO: 61887 - protein, 109 aa, Zea mays
  Coding DNA Sequence Number=SeqID_18512
  Gene Ontology: Mol. function=isomerase activity; Cellular component =cellular_component; Biological process=tRNA processing
  Homolog annotation: Hit_ID=A7NVR3; Match level="QueryCoverage=99%, HitCoverage=17%, E-value=2e-36, Identity=66%"; Hit description =Chromosome chr18 scaffold_1, whole genome shotgun sequence
MMREGESRETGLYYSIAQKQYTALIWTSRDLTDDDLHNISIMKEMEIVQKTPIRVLHRRSPLERKRIIHWMEIEKITGSSNYYLLHLCTQAGTYIKEFVHGDLGRTHPR

SEQ ID NO: 61888 - protein, 410 aa, Zea mays
  Coding DNA Sequence Number=SeqID_18513
  Gene Ontology: Mol. function=isomerase activity; Cellular component =cellular_component; Biological process=tRNA processing
  Homolog annotation: Hit_ID=A7NVR3; Match level="QueryCoverage=92%, HitCoverage=61%, E-value=1e-76, Identity=44%"; Hit description =Chromosome chr18 scaffold_1, whole genome shotgun sequence
MEAEARNILERAAESSFPPLHAVHHLLSVGCFSCALGAFSSIGLVCVRCILRLLGAYSSACSYACLTASVLHSFLEEHDESIKGGSCPCLSMNDAYCSVCLGVLLPTFHRDEGLETPNGISHIDNMSSVISQAVHGESYQVDEFSLEISLPPVIAANERAVRLYMKQKYGNENWFKDKMFAQQTMSVKEALRLLIAPSLEKLMNAKHGNNSFRIRLTYTHGDASQKLHSLLPNEHSRKRKPDSRKGGDASNEAHKRNSADGNPIQTSESDSFIYKSLEGIQDQEFCNAFQLPPEKVFKPCHLLISCLRSPTYLGGRYLKLSRNVSQSCWIIDDERMGEASVEEIIGENVRAICRGDSCKFHAAGREDIDVRMLGSGRPFLVEVLNVRSIPSETEVQQIEERINNSEKENM

SEQ ID NO: 61889 - protein, 363 aa, Zea mays
  Coding DNA Sequence Number=SeqID_18514
  Gene Ontology: Mol. function=hydrolase activity, acting on ester bonds; Biological process=lipid metabolic process
  Homolog annotation: Hit_ID=A2X852; Match level="QueryCoverage=90%, HitCoverage=93%, E-value=1e-59, Identity=40%"; Hit description =Putative uncharacterized protein
  Pfam annotation: Domain name=Lipase_GDSL; Domain location=36-340; Score=81.2; E_value=3.3e-21; Accession=PF00657.13; Description=GDSL -like LipaseAcylhydrolase
MASRGGASVVLVVLCSSLLGFAPRPGAAGKPLVPAMFVFGDSLVDVGNNNHLASVNDSCKANYRPYGVDYHPGQSPTGRFSNGYNLADHLGRLVVLLVIVVDALRPSICGGAVVSMAEQVGNFTSLVRTTTWEGSKRRERTAPGLVSESLVFISVGSNDLFEYSDFFADPKNRNVSRNDTAFLGGLVALYATYVKDLYAAGATMFSVVSPSLVGCCPSQRKIAEDTHDVDGFGCLGTANNLSRQLYPMIGSMLESLSQDELPGMKYSLGDAVAMAQWIFTHASTPPNNFTTPDRACCGSGDFGSGACNSSAPLCPNRSSFFFWDRFHPTETLAAVTAQQLFSDNGTFVHPINVQQLVAPSSRP

SEQ ID NO: 61890 - protein, 440 aa, Zea mays
  Coding DNA Sequence Number=SeqID_18515
  Subcellular localization annotation: CTP_CleavageSite=82; ConfidenceScore=5.38e-01
MSWGSIKDSRIKDSPVIPFTRSSSSSQDRSVLGLRWILPMSFGPVNQQHRRDLLYSGMTRRFRKSSTTCIEARPPAAKPLILSNTGRSSGTSPTRRNGRREKCRGPPPRTSHRGGRRWPPGGWSGCEVLVLELEPELLQQQQEEGRDRQCQPARDVGDEQNELPGGEVAEGDGAGTNSSSEPWRALPQAAHQIECRLRLEVVRMAKRSHGVGGGTGVEQESVNAKGHRELEGERAQRLGENAKASTSHTAGVLVSECEESKPPRRERTAAHDHAPLRGRCRGIFFNQGGGNEAPCAWPDGTARRGAVSQSAAGTDMAVDARILPCGGPGGHCRYPEIRAMACSSHRRLLWVHSSARLHHMGGSGAATCPEKVIYSKASTISPDPHGERQTPRYAIRISKVGSGPPHVQAGPLGWDLDPPVWDPDRPQWGPKVLGQNIHGP

SEQ ID NO: 61891 - protein, 143 aa, Zea mays
  Coding DNA Sequence Number=SeqID_18516
  Subcellular localization annotation: CTP_CleavageSite=74; ConfidenceScore=5.06e-01
MVAPRRQVACFRPPQKRQRTVGGAEEAGSQAQSAASSTSAPKVAPPPPDTMPAGGSGSQQQASAGSGAGDPPPAAATETAPPGSRAPAGGSGSSGANAKQRRSGGGEPNCTDDYRSLNDGDVVEYTVGSGGGGPNSAHSCRRG

SEQ ID NO: 61892 - protein, 286 aa, Zea mays
  Coding DNA Sequence Number=SeqID_18517
MDESCTQLLSSDPMINLNTTVFFFSLLFPVCEESPQLGVSRPYNKDQSESTRPTIEDLEPLAHRTVRCPHLTVGSATRHARIARPTVGPVDRWLIGQSGAPPDSPVNYSLGGVHQGGILPVCLRAVQAGAGPQGLQKRPPEGVCPRARGEPEGEEVGQEGGDLEPGGGSYNRAPGQAEGPGPNPRGPANPAGGGRRKIRKWEEKLEAKAGDIALAEENLKDKDASLDRRAANLARRDADLAFQEEMLERRGKLLVEHELEAKEKEKEKKLEERIQQFQAAQAAPGP

SEQ ID NO: 61893 - protein, 34 aa, Zea mays
  Coding DNA Sequence Number=SeqID_18518
MVQPHVGDDGAVMSGSIPGPYKFVGAVRCPEGDS

SEQ ID NO: 61894 - protein, 165 aa, Zea mays
  Coding DNA Sequence Number=SeqID_18519
  Subcellular localization annotation: CTP_CleavageSite=33; ConfidenceScore=5.48e-01
MGAIPVKAPSTQGDTISPHPSPASSRNGLGLILDSGRRSPPRPTPGLGLNLDSGRRSPPRPTPGLGLDLDLRTMVSASPDPQAQTQPRLRKTISASPEPRAWTRPRPLDDGLRLARPPGSDSTSTSGRWSPPRPTPGLGLSLDLGGVTTSLGPTTPQGGPSLPYP

SEQ ID NO: 61895 - protein, 106 aa, Zea mays
  Coding DNA Sequence Number=SeqID_18520
MELRPGLERLLETPHLELDGKLFVNTQQAPTWRANCWRFRPRGVPGPTKRSQSPMYMPAWLSERCWSPVHVASWPSEERLSPIEAQLSGVSDPCDQMGTPVLFPVA

SEQ ID NO: 61896 - protein, 73 aa, Zea mays
  Coding DNA Sequence Number=SeqID_18521
MVGTSAVTARRQPGSVEHCTIHELVDGVTWPTTLPPGWTVEWDVAPAGEEHEEQWARPCLFPHYRRHRLSVAL

SEQ ID NO: 61897 - protein, 322 aa, Zea mays
  Coding DNA Sequence Number=SeqID_18522
MPSSSSSATATPPAAASSEETLSNAMVEELRAGDSVEFGVSRMTSGRIEDMQRLGYFGGGVARAPGTEEVPEPEGELVVFEAFFAAGLRLPAHRVFELNQLPYDGYPGQDEADRRGKKPAVEAGGDPALAAATSSKKRKLVMDKDRQAVARKRQATVRVHEARPKRQRGASKAEASGGGKPPLPAKAGASAPGKAPEATVGAGGPKLSKVVPSASGVAEAAKAARSLPPPGKRVADFGTEIDVEDYLGGLDEGRLALVVPGAAVATAAPAPKAGVETLGAGGEVTALALVRDEADAATRRLKGAMEALSQPYCVGGPYGDDV

SEQ ID NO: 61898 - protein, 179 aa, Zea mays
  Coding DNA Sequence Number=SeqID_18523
MGVAGACPASALAELLLACYFTVLVVRSTRESHTAAAELSKRGVKSSRPAFMCMQHGLWWGGGGAAQATRSQVQQERTHAAFARLSLRPPGFSPVPVVPVRACASLNEKAYRSGRPRHCLLQAGEAMLSGLQPAERRQACAAAGRQGKGKRRSHPLDRDSRKTDDDYRASEPDTRFPAM

SEQ ID NO: 61899 - protein, 107 aa, Zea mays
  Coding DNA Sequence Number=SeqID_18524
MVLDLWSRQRCRTLVAAVPYGRGGGVQERILRLCLPHPTAPSDGNSMGRKETYSRWREQRLGCGTVAAAGEEMRINVVFGVVRDRVRAQPEAEIEAWCGGIDVFFGV

SEQ ID NO: 61900 - protein, 53 aa, Zea mays
  Coding DNA Sequence Number=SeqID_18525
  Gene Ontology: Mol. function=tRNA-pseudouridine synthase activity; Biological process=pseudouridine synthesis
  Homolog annotation: Hit_ID=Q654A2; Match level="QueryCoverage=94%, HitCoverage=10%, E-value=1e-11, Identity=68%"; Hit description =Pseudouridylate synthase
MEEGKHKSSKTLENSEHNIKPQSFDVAKVDEILKPLAGKTLSYKMFAPDTQAS

SEQ ID NO: 61901 - protein, 96 aa, Zea mays
  Coding DNA Sequence Number=SeqID_18526
MNVCELTLAVSHTPQVKTRYCRMMLMEDAAMSSTPVIYKDVTFDPVPLYIICVRLGPSIPGRRAALRLRLRSRSRWSLAALEAETAAGCPDEDGSR

SEQ ID NO: 61902 - protein, 132 aa, Zea mays
  Coding DNA Sequence Number=SeqID_18527
MWSTLPTSSPAADLPPSLVYSLSTTPHALYYPWLGRVAWRWFDIFCSMGGDRDGEGGEAVELSIVESSNDFDDDDEQAQERMEGVDLCFLRVRENKITQTGILAMYGSFKIHFLLAAPNISMIGLCRAKNHG

SEQ ID NO: 61903 - protein, 374 aa, Zea mays
  Coding DNA Sequence Number=SeqID_18528
  Homolog annotation: Hit_ID=Q8SA86; Match level="QueryCoverage=14%, HitCoverage=6%, E-value=3e-07, Identity=61%"; Hit description =Putative retrotransposon protein
MTASKKVRHVIRFRILFLFLFLSLTTGTGKGDTPKGILIREGNGPRAPVLIRGSKAGPSEGFNSRLRALGLRAHYWSEVRRPAPRKGSTASSGHSGSAPTTDQGGSGAALTNPAPTKPLTASTYPPDNLGPDRAPGLRPARMREQTRSVEASRNALRPQRSQTTPPRPRGLHPAGSDSGSAPEDDELRLARSQGSDSGSAPEDDELCLARPQGSDSGSAPEDDELRLARPQGSDSALASADGLRLARPRGSDSTSASGDRLDLDLGGASASPNPGLGPTTSQEAPSLPYPKLTQATGNKTGVPYGSPRVRSTARVTREGEESEATETAPISKVMRQSGLVVTEGAIDEGAPTAEAEQADIEKKMLMKKRKTITL

SEQ ID NO: 61904 - protein, 180 aa, Zea mays
  Coding DNA Sequence Number=SeqID_18529
  Subcellular localization annotation: CTP_CleavageSite=72; ConfidenceScore=5.08e-01
MSLAHAPQLPFEPRPHPLSLPCLISHTLALSRALSSSLAIAALTGNPRSPADRVCLVFGDFAATDRQHRSPSCKASAHPITIVRPRSNAKIGLGRHRKLRIVRPQGSDSGSAPEDDELRIARPQGSDSGSAPEDYELRLARSQGSDSGSAPEDDELRLARPQGSDSGSAPEDDELHLARS

SEQ ID NO: 61905 - protein, 102 aa, Zea mays
  Coding DNA Sequence Number=SeqID_18530
MEEGSNGGEWGKEKQCQRQADGCRVGVLACSGAVDSWPRAWRGWASWARGVRGGAGKGRRGGVESGRSGLGRGVGAWGHAAQGREVALGWGGVGQGRPGGAH

SEQ ID NO: 61906 - protein, 683 aa, Zea mays
  Coding DNA Sequence Number=SeqID_18531
  Gene Ontology: Cellular component=cytoplasm; Biological process =protein transport
  Homolog annotation: Hit_ID=Q6Z371; Match level="QueryCoverage=92%, HitCoverage=83%, E-value=0.0, Identity=82%"; Hit description =Putative uncharacterized protein P0519E02.19
MGEGEGKRQGGPEERCRRQQQMYGLLGGLLGWALTSKEISDLEGELLSIRNLLNTQAALIHGLSEGVQIDSLTSGPEGSAEDDISKVEDQEPSEIQKWSADFPDMLDVLLAERRVDEALDALDEAERVAVDAKRKQTLTAAEVSALKRSISDNRQRLADQLAEAACQSSTRGIELRAAASALKRLGDGPRAHSLLLSAHNQRLQCNMQTIHPSSTSYGGAYTAALAQQVFSVIAQALSDSVDVFGNESCYASELVTWATKQVMSFALLVKRHVLSSCAAAGGLRAAAECVQISLGHCFLLEARGLSVSSVLLKQFKPSLVQALDANLRRIEESTAALAAADNWILTYPLTGIRPLTRSSAANLALQPKLSSSAHRFNSMVQDFFEDIAPLLSLQLGGSSMDGITQIFNSYVNLLISALPGSMDDEANLDGLGNKIVRMAETEEQQLALLANASLLAEELLPRAAMKLSSINQSMDDLHKRGTDKQNRVPEQHEGDTHLSAEMYISMDNTVEEPEWVPSPIFQELYVKLNRMASIAAEMFVGRERFATLLMMRLTETVILWLSEDQAFWEEIEQGAKPLGPLGLQQFYLDMQFVIIFGQGRFLSRHVHQVILDVIDRAMAAFSATGMNPDSVLPGDDWFMDVSQEVVSMISGRGRVANGDREVNSPTASVSAHSISSFKSHGSS

SEQ ID NO: 61907 - protein, 879 aa, Zea mays
  Coding DNA Sequence Number=SeqID_18532
  Gene Ontology: Mol. function=protein transporter activity; Cellular component=Golgi-associated vesicle; Biological process=intracellular protein transport
  Homolog annotation: Hit_ID=Q6Z382; Match level="QueryCoverage=100%, HitCoverage=100%, E-value=0.0, Identity=82%"; Hit description =Coatomer subunit gamma-2
  Pfam annotation: Domain name=Adaptin_N; Domain location=26-572; Score= 536.6; E_value=2.8e-158; Accession=PF01602.11; Description=Adaptin N terminal region
  Pfam annotation: Domain name=Gamma-COP; Domain location=621-877; Score=320.6; E_value=2.8e-93; Accession=PF08752.1; Description =Coatomer gamma subunit appendage domain
  Pfam annotation: Domain name=HEAT; Domain location=103-138; Score =4.5; E_value=5.8; Accession=PF02985.13; Description=HEAT repeat
  Pfam annotation: Domain name=HEAT; Domain location=315-351; Score =9.4; E_value=1.1; Accession=PF02985.13; Description=HEAT repeat
  Pfam annotation: Domain name=HEAT; Domain location=387-423; Score =0.3; E_value=24; Accession=PF02985.13; Description=HEAT repeat
  Pfam annotation: Domain name=HEAT; Domain location=512-535; Score =0.9; E_value=20; Accession=PF02985.13; Description=HEAT repeat
  Pfam annotation: Domain name=HEAT; Domain location=536-572; Score =11.1; E_value=0.59; Accession=PF02985.13; Description=HEAT repeat
  Pfam annotation: Domain name=HEAT_PBS; Domain location=123-149; Score= 1.1; E_value=71; Accession=PF03130.7; Description=PBS lyase HEAT-like repeat
  Pfam annotation: Domain name=HEAT_PBS; Domain location=299-331; Score= 3.6; E_value=30; Accession=PF03130.7; Description=PBS lyase HEAT-like repeat
  Pfam annotation: Domain name=HEAT_PBS; Domain location=520-552; Score= 13.2; E_value=0.99; Accession=PF03130.7; Description=PBS lyase HEAT -like repeat
  Pfam module annotation: Pfam domain module=Adaptin_N::Gamma -COP::HEAT::HEAT::HEAT::HEAT::HEAT::HEAT_PBS::HEAT_PBS::HEAT_PBS; Domain location=26-572::621-877::103-138::315-351::387-423::512 -535::536-572::123-149::299-331::520-552
MAQPLVVKKDDDLDEEEYYSPFLGIEKGAVLQEARVFHDPQLDARRCCQVITKLLYLLNQGDTFTKVEATEVFFATTKLFQSKDVGLRRMVYLMIKELSPSADEVIIVTSSLMKDMNSKTDMYRANAIRVLCRIIDSTLLTQIERYLKQAIVDKNPVVASAALVSGIYLLQTSPEVVKRWSNEVQEAVQSRAALVQFHALALLHQFCNMEHFDMLKFFVNAQISYILIYLMFQIRQNDRLAVSKLVTSLTRGSVRSPLAQCLLIRYTSQVIRESGVNQGGDRPFFDFLESCLRNKAEMVILEAARAITELNGVTSRELTPAITVLQLFLSSSKPVLRFAAVRTLNKVASTHPLAVTNCNIDMESLISDQNRSIATLAITTLLKTGNESSVDRLMKQMTNFMSDIADEFKIVVVEAIRSLCLKFPLKYRSLMNFLSNILREEGGFEYKKAIVDSIIILIRDIPDAKESGLFHLCEFIEDCEFTYLSTQILHFLGNEGPKTSDPSKYIRYIYNRVILENATVRASAVSTLAKFGALVDSLKPRIFVLLRRCLFDGDDEVRDRATLYLKLLGGEATVGETEKDVNEFLFGSLDVPLVNMETSLRNYVFLGHFNLMLRMRSFFRPFPNSLIFGKLFKSSAPVELTEAETEYSVNVVKHIFDGHVVLQYNCTNTIPEQLLEQVIVFVDASEADEFLEVASKPLESLPYDSPGQTFVAFEKPEGVIATGKFSNILKFIVKEVDPSTGETEDDGVEDEYQLEDLEIVSADYMLKVGVSNFRNAWENMDPETERVDEYGLGVRESLAEAVSAVISILGMQPCEGTDVVPSNSRSHTCLLSGVFIGNVKVLVRLSFGISAPKEVAMKLAVRSDDPEISDKIHEIVANG

SEQ ID NO: 61908 - protein, 291 aa, Zea mays
  Coding DNA Sequence Number=SeqID_18533
MAAPRTTRHVALTPRRDRRRLWQEKQATLRLRHNDRVQRGSEPPYWSEVRRPAPRKGSTAASGYSGFAPTTGQSRLRHRARDDPGYVRYITKARATLSRQPGPTSGTIGNSASPDPGLGLGLSPGRRRTPLRPTQGSDSGSAPEGGELRSARPRARTRAQPRKTANSAPPDPGLGLGLSPGRRRTLLRPTQGSDSGSASEDDELHFARPQGSDSALASADGLRLARPRGSDSTSASEDRLDLDLGGASTSPNLGHGPTTSTGGAIITLSQADSGYGKQDRRPIWLAPPDKQ

SEQ ID NO: 61909 - protein, 125 aa, Zea mays
  Coding DNA Sequence Number=SeqID_18534
MEKCHSLVARSILDSRSGLGPHVCHPDLKPGEVRYRHMSWPKGWGSDPFKHDPDPQSGRAQRCRIATHLGPAPCPGRSPVPTRGRTHLTRDKRISLQGPTQQQRRDTCPEDLASPALPDTSRFVL

SEQ ID NO: 61910 - protein, 151 aa, Zea mays
  Coding DNA Sequence Number=SeqID_18535
MEQLPRTAKYRMTRNDEIRIPVRGYTQNTPAQQHQSNSRLRLRLQLQLPPKGYRYTYTASTTCVASARYPRTKVGIAVDRNNTKVDTEPKVRAGKLRRDSKEWNRLKDEKAIQTSIDYYRVIIKCEQYPRTVHADLAFTFCVTPVLSSLLD

SEQ ID NO: 61911 - protein, 223 aa, Zea mays
  Coding DNA Sequence Number=SeqID_18536
  Gene Ontology: Biological process=protein localization
  Homolog annotation: Hit_ID=A2ZAC0; Match level="QueryCoverage=72%, HitCoverage=3%, E-value=4e-62, Identity=76%"; Hit description =Putative uncharacterized protein
MTTVVLSPLRKQGDFSKVVVTVATLSFFCHRPTVIAIMEFMNAINLANGSDTDKDKSTYLATKEDNAIEESKSDLETEPSIKPLLAKGKSRIVFHLTSSMAEAQILLVNENGDWLATLSQNNLSTDIKVFTSSFNIKVALRNLKISDDNLLSSHPYFWVCDMRNPGGRSFVELSESKSPAGWRSAPALNPEMRRGLGVLLDRWNEREELKNTQGFRVVRTAGA

SEQ ID NO: 61912 - protein, 345 aa, Zea mays
  Coding DNA Sequence Number=SeqID_18537
MEVRYQTSFCQNEDGFPKLLKACTVRLGIRSQPEYDGREFVEHGTEKCVVTVYIGSSPHHVEWSVTAGGHRFKDTCQVVARKALRALCQIYEEEVADTPLRFFPPFQRDRPAWMARMRALEEQQLLEDDPTVVYLTAYLLTLDAQYDFLARHHRQMIARAEDAEKLNRKLHVDLTTAQARVAALENREVIAVEALKQAKDEHVQKLMEAYLVTHNQRELKTPQILEGHPVSMRGEKKAWELPEGAIVLEGIPVFPQAMDKQEHPESSQDPLPELFEPLAMKKIPAPSLEVKEEAASTPPAPPPSKELQEPVQLEEEFDCVLPSQSPPKEVINISSLLTHPGDVSD

SEQ ID NO: 61913 - protein, 399 aa, Zea mays
  Coding DNA Sequence Number=SeqID_18538
  Gene Ontology: Cellular component=integral to membrane; Biological process=protein processing
  Homolog annotation: Hit_ID=A5AIR8; Match level="QueryCoverage=41%, HitCoverage=20%, E-value=6e-32, Identity=47%"; Hit description =Putative uncharacterized protein
PLPIGAEVVAATGGADVVASAGEAIHCRGGCLRWRDRQCHLPPDLWPFGFNGLTVTPRRRTGRGPIRSSAHPEVIAAVGEPLGAEIVVAAGAEVVTVVGGLSGTSFQRGSCWCSVVHSCKNGARIPLVRECSRYGTRLSGYHYKKLINVAAAREDGSLELWLVSPGSVGWHNQLTIQGNDESRVTSLVWGRRGGEATGRLLSSNVDGSVCEWDLFYLQQKIVLDTVGIPIWQMAMEPSVDAKNTENNSSEFVVNGHPDQNDYSDSDLSNIDDGDNSEDEDGSTNTISSYHVNDFQRLALACDDELVKAMYLNVESFPCVRLLNLSGEIGCSSESALYMVSNDPELHQKVTGVLVESNGVNNDLQELSPDRKFPKDDFAPYSNHSHDWNPAKRVQTLFKR

SEQ ID NO: 61914 - protein, 256 aa, Zea mays
  Coding DNA Sequence Number=SeqID_18539
MEDTRRISALSSGERNSAGVGTFQPSFGFKDFHHTARLHPSTGGHPKTVTSSSWMGRGKPGCDLDPALSVEGVCHPRWGGERGEPGLYLLRGFVGHPLLWCSRERALAGPAGGSDFDNAGLVDSGRRQPQRVELVGLAPGGPSCRKAAAAPCAREDRPRCRALLGRRSCSGRSCLCTGMAPPRGGRCPTRPGGSEWGSAGGLTAPVVGAEVEAAREVPVADGITATIRASGLRLFVLVLAPRASAWARARLQQRPP

SEQ ID NO: 61915 - protein, 98 aa, Zea mays
  Coding DNA Sequence Number=SeqID_18540
EVATSNGACHNPLSPRSRECLMVTSVGDPSSYGEPRGGPTSAAIYTVTSALLRFDLLSQELSSGQGFTKGGRGSITRRWGCHDVERCDCDVVFGQHTP

SEQ ID NO: 61916 - protein, 176 aa, Zea mays
  Coding DNA Sequence Number=SeqID_18541
MVALSESEAATEEVNPTRSAASDGPQTDGIDTFVRRCTMRNARNKRAVRSVSMNDEENASGMVKIKGVWCGWHVAAARKDLTYVNEQEQSNRSARPTILTAPAGGLGHLADDLHMNPMKTTNQPFIARAKDPFAGVIAESEALSTGAGSVCSHQLNKRHGACSRVLIDVTAILVRG

SEQ ID NO: 61917 - protein, 137 aa, Zea mays
  Coding DNA Sequence Number=SeqID_18542
MADARRQSAGCWPAEEHDGDDAAAETTGGALSGDSSYQALETSTLVRALAHVVAGGGEGYQPPWAGARPENSPPTAIMATPGGTGTGYSPAAPTRPGHYFFEAESRVGALYYAESRVGALYYACQLVPKTNATSERP

SEQ ID NO: 61918 - protein, 84 aa, Zea mays
  Coding DNA Sequence Number=SeqID_18543
MAPLAGPDCLSVSLCQVALQSEWRRRRCPSVRPLYADGGYQLRIRRLEASYSKTIAQMDVKNDFLHDVDASSGMFVIFVVHYMV

SEQ ID NO: 61919 - protein, 87 aa, Zea mays
  Coding DNA Sequence Number=SeqID_18544
MTKQPSSISISAKPYGINLLGLGLIFDLPTRWFALGGGSEDADPHSQHHGLLCYESVELSNAATALQAVAGSSLYGQRPNRKEQQTP

SEQ ID NO: 61920 - protein, 203 aa, Zea mays
  Coding DNA Sequence Number=SeqID_18545
MWAQGHKEYSAWSFLMSVVETIFLCPDTRDLRILGVQGKLLVEGRMSIACCLLDDLDAVCQLMGRDTLNAERARHPSAQWQAGKARTRVSTGPLLILGSSSFWDPAEGIDLASLGLPHDFDGGLLGVLPLTVPGLGPYTAASTTIPPCAHRAQSWARWNRFPVQVNSRSWFGFYPSVRLPPSIIPYHYAPVRGVPECEMKVEA

SEQ ID NO: 61921 - protein, 547 aa, Zea mays
  Coding DNA Sequence Number=SeqID_18546
  Gene Ontology: Mol. function=nucleic acid binding; Cellular component= nucleus; Biological process=mRNA processing
  Homolog annotation: Hit_ID=A5AQI7; Match level="QueryCoverage=74%, HitCoverage=100%, E-value=1e-141, Identity=56%"; Hit description =Putative uncharacterized protein
  Pfam annotation: Domain name=RRM_1; Domain location=354-429; Score =25.0; E_value=0.00027; Accession=PF00076.13; Description=RNA recognition motif. (a.k.a. RRM, RBD,
  Pfam annotation: Domain name=RRM_1; Domain location=472-539; Score =38.8; E_value=2e-08; Accession=PF00076.13; Description=RNA recognition motif. (a.k.a. RRM, RBD,
  Pfam module annotation: Pfam domain module=RRM_1::RRM_1; Domain location=354-429::472-539
MASAFLVSKGRGGAGRGTNHGGEDGGGGEQRAGEPLLQANGDSERCDGGRVRGRYPAGAHQLLRVPPVLLIPARRSRARRRGGQMQIPLGRELRSGHRVEIERGGEGVPGGEDLDGLRDGEGEHRDDERAVGEHGQCGRMSEPSKVIHIRNVGHEIAESDLLQLLQPFGVVSKIVMLRAKNQAQTLLQMEDIHASVSALQYYTSVQPSIRGRNVYMQFSSHQELTTDQSSHGRNSDQESEPNRILLVTIHHMIYPITVEVLHQVFKAYGFVEKIVTFQKSAVPLSFLRDFTNPSLPTEQRPRASQQAYPDPANLYAFQQAGASYAQMGRAAMIAAAFGGTLPHGVTGTNERCTLIVSNLNNDKIDEDKLFNLFSLYGNIVRIKVLRNKPDHALVEMADGLQAELAVHYLKFTIPISLQGAILFGKKLEVNYSKYPNITPAPDAHDYLNSSLNRFNSNMVKNYRHCCSPTKMIHISALPQEISEEAILNHLSEHGTVVNTKLFEVNGKRQALVLFETEEAATEALVSKHASTLEGNTIRISFSQMQSI

SEQ ID NO: 61922 - protein, 78 aa, Zea mays
  Coding DNA Sequence Number=SeqID_18547
  Gene Ontology: Cellular component=integral to membrane; Biological process=protein processing
  Homolog annotation: Hit_ID=A3AB54; Match level="QueryCoverage=53%, HitCoverage=8%, E-value=7e-14, Identity=90%"; Hit description =Putative uncharacterized protein
MTVAPLAHRTVRCTPDSPLVFAVFNGEAWGYLGSRKFLQELDEAAASVNGISSLMIDQVLVRVAKLRVQTPLGRGSRY

SEQ ID NO: 61923 - protein, 122 aa, Zea mays
  Coding DNA Sequence Number=SeqID_18548
  Gene Ontology: Mol. function=kinase activity
  Homolog annotation: Hit_ID=Q6QP54; Match level="QueryCoverage=36%, HitCoverage=15%, E-value=2e-09, Identity=79%"; Hit description =Putative kinase
MALPVDVAGPRPRPGDVGAPLKLGSSLSSVAEAEPEPLGRARRRSFGRGQGGVRALGSGEAEFVVFRVLARVRALGRAERIGVAQAALSFCQTGQWCGEVTVVTPALPGGACQDKGVRPPLR

SEQ ID NO: 61924 - protein, 64 aa, Zea mays
  Coding DNA Sequence Number=SeqID_18549
MEQKMAVKCDGKSAATARKEWKRAGGSVAVGGCKQSPKKNRKKFRSLQVQPKRRGRGAEEADGE

SEQ ID NO: 61925 - protein, 65 aa, Zea mays
  Coding DNA Sequence Number=SeqID_18550
MSNVLADHASMPFKDQCSILGKIPSGVMATLLVFLSVGLVGATDVFPNIYQSMSDHSKFPVALFV

SEQ ID NO: 61926 - protein, 362 aa, Zea mays
  Coding DNA Sequence Number=SeqID_18551
MGDACNPSALSLEGRNSVGVDTFQPSFGFKDFHQAARLHPLAGASRIFIISAGEGSVPSWGRSLRGRRPAPSLSDRGKGVRRSWHGQLPRARLSEPSGFGAAPGAAFRHGSWKRFRRRRASRRHPRTDLQLYGLLPVLASRVGGMGEGLMAAASALRSSLPLFGPPEQNTETHLVDYLNRFTERELPRAKVTSESWLRKGGVVGQSLAGLSTGGADAGVELPRPQAELMSLGSGGPPTASPSEARSDPAEGVVDAEGAAAPFGCQRPSLQDQYPDSFVGNRIVCAGESCFSRKAMSEGSVTDAVEKARKIISAEELSSMKNCSVRGVTYPSASYLSQKVMSETWCVNEVYEQLESILRVEAT

SEQ ID NO: 61927 - protein, 146 aa, Zea mays
  Coding DNA Sequence Number=SeqID_18552
MTLGTFDTWPRLGLRSRGTLGHFRDQQEQFCNGIPSEGGIEPSDPIKRDRVRQITCRRSLRLARPQGSVPASASEDGLCLARPQGSAPALASEDGLRLAQGLASTSTSGGIVSSLGLNLDLGGVSASPDLGLGPTTPQRGSSLPYP

SEQ ID NO: 61928 - protein, 342 aa, Zea mays
  Coding DNA Sequence Number=SeqID_18553
  Gene Ontology: Mol. function=phospholipase A1 activity; Biological process=lipid metabolic process
  Homolog annotation: Hit_ID=Q22WK5; Match level="QueryCoverage=57%, HitCoverage=33%, E-value=2e-07, Identity=28%"; Hit description =Putative uncharacterized protein
RSTSRADSAKEAMAGSTALGRETSAAQDSVSRDTTRWMSAAQGSELRRGRVRGQERERGETEALRGAVDFIVPREGGSAPRRGTERLATIDTTSVTVGRGCVAAVEDGQRFTEVVAHSADGRTEGCEGSAGVRQRRHASVQAHAAAKTRPKSGLGRHRKLRLARSQGSDSALAPEDDKLRLARPQGSDSASAPEDDELRLARPQGSDSASAPEDDELRLARPQGSDLASAPEDDEHRLAQPQGSDSASAPEDDELRLARPQGSDSASAPEDDELSLARPQGSDSASAPEDDEHRLARTQGSDSTSISEDRLDLDLDLGGASASPYLGLGPTTSQEGPSLPYP

SEQ ID NO: 61929 - protein, 702 aa, Zea mays
  Coding DNA Sequence Number=SeqID_18554
  Homolog annotation: Hit_ID=Q6J9V9; Match level="QueryCoverage=21%, HitCoverage=43%, E-value=5e-20, Identity=46%"; Hit description =Putative uncharacterized protein
MELFQGTPSPHPLERLVMLYLLETDKKSRLREPRAIRRKEKEGVDTHQGHKPAVRTHQGLGKGAGVRLPQRDGYPPVEVVDGKGIRGHPQTFQVGLRRHLPKRQPPLRQGKHPPVMNGGNHSRSGEPSFPQLPQGLQKGLEILMSVVWGLVAPVIGGGGHHSLRKRRELPVVISEIEPPALPPFVRGRKDGGDILRRPRLPQLEDTATSPHCRADPSLPHRQGKKLRGEEMSPQVPVRVNPQVSFTNRRENGGLRDGVRTEVVQLHPVDVQNRPHKTACRHSEPPLVKGDEAHDIPRRRGWGGSARGGIHSGCGSPERGRSKPSATRASRSSAMTVEKGHGSRGGTMVTRSNITRQKRWRRKGLGERFPFSGYSLGLRKPKKEASSRAKNRHRSLSRIYKGPGETHSTLHPNPPRGSKLKAKRPFLERLAHAQRPPRTGKGDTPKGILLREGNGPRAPLLIRGSKAGPSEGFNSCLRALGLRAHYWSEVQRPAPRKGSTAASGHSGSAPTTDQGFVGWPSKGFDSRLRRRARDDPGYVRYITKARATLPRYPRTFPRSKGTIFVTESHQREASSPRTPSKGDRVRQITRSAACAAPTAVPLDRVRLTAAKSSLGRHRKLRLTRSQGSDSASAPEDDELHLARPQGSDSASAPEDDEHRLARPQGSDSTSEDRLDLDLGGASASPYPGLGPTTSQEGPSLPYP

SEQ ID NO: 61930 - protein, 250 aa, Zea mays
  Coding DNA Sequence Number=SeqID_18555
  Gene Ontology: Mol. function=protein serine/threonine kinase activity; Cellular component=cytoplasm; Biological process=protein amino acid phosphorylation
  Homolog annotation: Hit_ID=Q9XGL2; Match level="QueryCoverage=44%, HitCoverage=30%, E-value=5e-22, Identity=43%"; Hit description=CsPK3
  Pfam annotation: Domain name=potato_inhibit; Domain location=8-70; Score=86.5; E_value=8.4e-23; Accession=PF00280.9; Description=Potato inhibitor I family
MSHSHSTKTSWPEVEGMPAEVAKRKIQEDRPDIQVILVPVDSAVTDDFNTKRVRVFFDKAGNVAQKSWCADSPSRRRLPTSACLTPPRISTPAATALHARRESRRANRPPARPPASRSARPQRPPPSRRRRIALLPSCFSGPSNGGGEEEQEIDGKERFEFMVEPMAASSKDCVGTYEYLASELVSGSGYDNGVDRWAFDVFLYELVYGRTPFKSHTKVATLKNILSNATEIKRHPFFAGVDWTLIHYNT

SEQ ID NO: 61931 - protein, 154 aa, Zea mays
  Coding DNA Sequence Number=SeqID_18556
  Gene Ontology: Mol. function=acyltransferase activity; Biological process=metabolic process
  Homolog annotation: Hit_ID=Q5W795; Match level="QueryCoverage=52%, HitCoverage=20%, E-value=1e-35, Identity=92%"; Hit description =Putative uncharacterized protein OJ1045_C06.8
MGPRHSPPTSHSLGQSQGHDRTEEAKAKQWTPKATGSAPFGSGDEDNQMDSPTRGWPLLSMRILSKIKSTRHLARHVFLLLCQFVNYLEVVRLPVYYPSEQEKDDPKLYANNVRKLMAVEGNLILSDLGLAEKRVYHAALNGNSLARALHQKDD

SEQ ID NO: 61932 - protein, 297 aa, Zea mays
  Coding DNA Sequence Number=SeqID_18557
MERDSSILPSENVPLPPKPYNGLSAVYDQRVCMGRAARVNVSCIKGEWDMGPLRLDYWSRDSNVVDPSIMAVVDGVAGLLGGAVGVGVVAFLDIGVVGVGGFFGCSLAGIGGGGLLQSCGLWPLWLLGVLWLIDLHLRLGRRSKASFVVGGLSRVSCPSLLRQRSLAAEGNHNAEGGLRLVDVGLLYCELAVVVDPFLGGDILAADPWSMACWSAKALSACTAIPPLGSGALRTGRTSRRVGIVPEEWMVDLWCNACIVVRRKGHLSQRQLGQYVGKRPVTLEVEQEFATEGLPGIN

SEQ ID NO: 61933 - protein, 106 aa, Zea mays
  Coding DNA Sequence Number=SeqID_18558
  Subcellular localization annotation: CTP_CleavageSite=23; ConfidenceScore=5.04e-01
MGANPSGGSSQGRSSEPHVWMLPSRMGWGVFVLRVLVADCLGPAVLSCRMQGVVYEGCFALSARAALGASSREELALVVTFLGAIVGLGVRNTNGGRQMLGRKIVT

SEQ ID NO: 61934 - protein, 201 aa, Zea mays
  Coding DNA Sequence Number=SeqID_18559
MSAPRVHCWAAQRREDGPRVCYFGQVQAAAELNFSLVELSQVQLNFNFNRGLGKFNRGPERFNRDVDPRAIDLAMRITERMFLKMKEDEAKNKIEEENDRWRPNDESTSSQGLSLKSTSHMCFIANGSDSESESEDEEEKQESDSEDEDDLQQFFAQLSKKNRMSLLKLMKRAEEQKEMLHKQEDFLIRKNQRLREVDQRA

SEQ ID NO: 61935 - protein, 44 aa, Zea mays
  Coding DNA Sequence Number=SeqID_18560
MVAFGAIYAQLSERSCRFVEAGSASLRRAVEQEASSVSSHPFAG

SEQ ID NO: 61936 - protein, 149 aa, Zea mays
  Coding DNA Sequence Number=SeqID_18561
MAKLNFNWGPGKFNRGPERFNWGPGKVLPGFFPRTSLLWYYIEFFVDSLLLELLAPRRLGVSYVDPRAIDLAMRIAERMFLKMKEDEAKNKIEEENDRWRPNNESTSSQGSSFKSTSHMCFIANGSDSESESEDEEEQESDSEDEDDLQ

SEQ ID NO: 61937 - protein, 479 aa, Zea mays
  Coding DNA Sequence Number=SeqID_18562
MQAACYHTKGAHTFDFDASSMEAQAHTPCDRRAGYYVRETAPPLAPVPRLLDCGTGAATRGDPAHDPTVPTEHISHGSVSRGRRRDGRCGQKWAGSNGGGRQAEAADRRHRWQAKQATLHLRPDDRVKKGTGKGDTPKGILLREGNGPRAPLLIRGSKAGPSEGFNSRLRALGLRAHYWSEVRRLAPRKGSTAASGHSGSAPTTDQGFVGWPPKGSTATSDAERGMTLAQSCKGLMGAIKVKAQSTQGTRSRLARAQPRTKAADPGGFTSRPRAPSSNGHTFGSPEAMSSPRSNLGQIAMPTDPKSGLGRHKKLRLARPQGSDSGSAPEDDELCLAQPQGLDSSSALEDDELRLARPQGSDSGLAPEDDELHLAQPNLHLARPGARTRAWPRKTTNSASPDPRAWTQPWPQTTVSASPDPGLGLDLDLGRQTRPRPRRSLRLARPRARADHVTGGAIITLPLARSGYGGQDRRPIWLAL

SEQ ID NO: 61938 - protein, 348 aa, Zea mays
  Coding DNA Sequence Number=SeqID_18563
  Subcellular localization annotation: CTP_CleavageSite=7; ConfidenceScore=5.30e-01
MSSHSLHASHPSTFRAPDGEHPRFFRLVIVGGTQLRGSWYRSAIVRLQGFSSDSLTAFPRRWSPKTVTTSSRVGRSKPGCGLCPALSFKDLHHPCWGGERALRRRRPPAMPGKANCCCPARMQHSVLCPRFHGEDGSEDLPVRFGAACARWCGVGGQADAAVGADVVVAGESFSAVEAVSAAYGPTSGSLALMSGSRPLSGDANESLPVAASILGPWLLLQRSLASRLELVAPQALRCGGCSYPRGWNRSSVCNGTLSAGVCSLWLSGPEHDSAIDIVEKARKIILAEEFPSIKTCSVSGIAYPSVSYLSQKVMSEDPTFEVVKKHERRSGRKTFFEENFDAEGVRPF

SEQ ID NO: 61939 - protein, 475 aa, Zea mays
  Coding DNA Sequence Number=SeqID_18564
MSSWQPERFRHPVHVMSWPSEERWSLAEGQLSGLSTEAKSEPWGRARRSSSSSGAEPEFEPWGRARRSSSSSGAEPESEPWGQARRSSSSSGAEPESEPWSRARRSILWRPRPDLAAVSLTLLSGTAVGATQVALSSCQAILALNAPTIRSVGVAIWPRLLLDEDWASGKPKPHSDDMSRVVGQLLKLIATFIEDWGASGGISAVRLAAGISQMEVRCQTSFCQNEDGFPKLLRACTVRLGIRSQPEYDGREFVEHGTEKMRALEGQLLLEDDPTVVEAQSSAPWDLTSSQAHVAALESREVIVVEALKQAKDEHVQKLMEAYLVTRNQRRALWIQEPASSNPVQPMRGEDPQILEGHLVSVRGEKKAWELPEGSIVLEGMPVSPKAMDKQEHPESSQGPLPELFEPLTMKKILALSHEVKEEAASTPPTPLPFEELQELVPLEEEFDPVLPSQSLPEEFINIISLLTHPGDVSD

SEQ ID NO: 61940 - protein, 240 aa, Zea mays
  Coding DNA Sequence Number=SeqID_18565
  Gene Ontology: Mol. function=carboxyl- or carbamoyltransferase activity; Cellular component=ornithine carbamoyltransferase complex; Biological process=amino acid metabolic process
  Homolog annotation: Hit_ID=Q8SA97; Match level="QueryCoverage=51%, HitCoverage=21%, E-value=5e-10, Identity=38%"; Hit description =Ornithine carbamoyltransferase
MAPPVDVAGLRPRLGDVEAPPRPRSSLSSVVEVESEPLVQARRRPSAEARAESEPWGRAERSSSSSGAEPKSEPWVGWSGPESEPWVGRSGVRRLLGLSPSPSPGSGGAEFVVFRDLARVRALGQAERSSSSSGAEPKSEPWVGRSGVRRLLGLSPSPSPGSGGAELPMVPSAGPDCLSASLCQVAPQSERRRRHCPSVRPLYADGGYQLRIRSLEGTPNYGPRQLCSYGPRPAPNIRLP

SEQ ID NO: 61941 - protein, 932 aa, Zea mays
  Coding DNA Sequence Number=SeqID_18566
  Homolog annotation: Hit_ID=A3ACU8; Match level="QueryCoverage=96%, HitCoverage=70%, E-value=0.0, Identity=64%"; Hit description =Putative uncharacterized protein
  Subcellular localization annotation: CTP_CleavageSite=39; ConfidenceScore=5.67e-01
MPARTVASDTPTRATHRASSVSPPTRRGGHAGRQSSAISLMSGTSSTPSVLPGQCIPVLLFVFEDDAVDVSSAAASPDDIGDASSSNQGSTPDGLPKQSLASKSSGSVIMLSRAANKSEGSSGKKLHSSLEGQIRVLIKKCRVLAGMEPGHIGPRGVSNMSHHLPLFSLDTSRVVALLERYINKKQEPLDTIAGLFEDSLCSKSPLDILSLENNYHPTNHDDFQLIKDFIFRQSDALRGKGGYSSNASAGSVAGVGMVAAAAAAAAASAASGKPVNAPDLPTFDKWLSISTSILTALLSGRNVLRCQSESKTHTSPTEKNGQLPVGSNAIEIALSCLESNNGLNMKFSSSWCQRVLPAAKEIYLKGLPAFYPTRMHEVQLQKALRSFGSMVKGPAVRVFSKKLEDECRAIWESGRQQCDAVSLTGRPCKHRRHGDFFSSDAMEQHSSGYVFLHACSCGRSRRLRDDPFDFQTANVSFNCFQNCDDLLPTLALPRGSNDGSFSVSSWCLVRLGGARYYKPTKGLLQSGFSSKERYLLRWIVSVHKGQVRNDIRSNTITSSARSGMNPQTPPIVTGEVKSAITQVTAQIKYAKLENSGKQAEVEPVSNLGINFGKGLPNFTMKKPFSEVVAGTTSKDTEFPALQQTRPPKPGGRKDEQRQMNIVDQTNGRGHVAVSQGSVAETESAKASRNKSSENADGKPFLQIGSNIVPVIAGNETRETSQPVQQFVVYIGFEHECPYGHRFLLSEKHMKEIESSCLQYQRPHLNKEAEVKHAQKLLQNASGLIASAVDINSARKNSKPLESSGRNSQQQSLQLRIDAETSQPSPRLSDPQNAKRWEHYFRSVTIDDGGEAFSLMNRNLPIYMRCPHCKVSERKEHQDVKFAGVVSQLQRIFIVTPDFPVLLASCPLVQFEASTALQIVSVGDVTEKETVMK

SEQ ID NO: 61942 - protein, 139 aa, Zea mays
  Coding DNA Sequence Number=SeqID_18567
  Homolog annotation: Hit_ID=A3ACU8; Match level="QueryCoverage=89%, HitCoverage=9%, E-value=2e-20, Identity=49%"; Hit description =Putative uncharacterized protein
  Subcellular localization annotation: CTP_CleavageSite=45; ConfidenceScore=5.77e-01
MEPPSPPATHSAAVRVLSRTPPPTSPNPSSTGPAAPSPASRDGVVAVGFVGAAGTARLADRILDAHVFSPGGSAGSLAGRVRYHRDAGKRMVFLHLTPPPPAPLEAVAGCCDDGELPEMLFMFSVSSDSYPPFAHYIIR

SEQ ID NO: 61943 - protein, 90 aa, Zea mays
  Coding DNA Sequence Number=SeqID_18568
MESHDLRAEWESRLVGGYEIDGFGHDYDAASGVAAGGDPDDGGGDDSSSHDTDFSANLEPEGWVARPITRDAARGVSLPRCARHPATSGI

SEQ ID NO: 61944 - protein, 159 aa, Zea mays
  Coding DNA Sequence Number=SeqID_18569
  Subcellular localization annotation: CTP_CleavageSite=40; ConfidenceScore=5.49e-01
MGKPPWGARQSTGSGGAGKAPSRGTGETPVSRRAAWLGKRSSTASLREMREAWPGAVGGRGVAERSGQAQELEPLGMEMSAGRKGICPSARKKTEQGAAVRAQGAGRSTRRRGPLGERKSATRLEGNGGRREERAREKKRARRDFYPGRRLIKIEGEAA

SEQ ID NO: 61945 - protein, 105 aa, Zea mays
  Coding DNA Sequence Number=SeqID_18570
MMAAAIKRSTLNASIEKNTTAMVGVLLPWIGQLRCRSDDHPNPEADAQEHIKRDYLPGGSKFSLPSPQPEAPSIRSLGVYGIGMVAKEGKLKEKGRRVTPRVGQL

SEQ ID NO: 61946 - protein, 136 aa, Zea mays
  Coding DNA Sequence Number=SeqID_18571
MARACAYKAPRDFDRTPPHALDLTGAQNHRRLPVHGEASPRSPDSTRPPVSVDRHPPPTRALACARGPDDSGHPRRRAVHRCDRQNLPEPTPPLAGTSLTAGSLEDMVAGVTWSSILPPGWTVEWDPASAEEEHEE

SEQ ID NO: 61947 - protein, 150 aa, Zea mays
  Coding DNA Sequence Number=SeqID_18572
  Subcellular localization annotation: CTP_CleavageSite=38; ConfidenceScore=5.48e-01
MRMTSDESPPHQNLAHQSASSTLPVNPNRSPGLLPRVWAAMKAHDGDNTPMPTRRAAEPPSRVRYVEFPMIKVAREGVSGARLFMVWEPCASRANLDVRRRLVKLTREQAQRWWTSGSYLVQLQIPDEGKYLNLAWEKEGSSNTFTYTSK

SEQ ID NO: 61948 - protein, 237 aa, Zea mays
  Coding DNA Sequence Number=SeqID_18573
MTSHGSLDEGNALSHTDGLAREGFPRILWEVLQGAGYTTPPQYAVQQFEKHRVPRCRVRMTLEPHPLQPGWRSLDSESFGYRAEDTIEAIALHGLTTFCRFHPLELSTHPIGLFPAEKEDDPMWKDRVEHAKDIWAIYLGQTAHLTVEQLSNEIEELEELVGTRENTIEVLEDQLINTQQQLAEANEHMDMHHQEIQDMEANGDVDIDGGEEPASSLDTAGSRRPPSSESSVASFAH

SEQ ID NO: 61949 - protein, 104 aa, Zea mays
  Coding DNA Sequence Number=SeqID_18574
  Gene Ontology: Mol. function=nucleic acid binding; Cellular component= intracellular
  Homolog annotation: Hit_ID=A2XNP3; Match level="QueryCoverage=92%, HitCoverage=48%, E-value=4e-22, Identity=58%"; Hit description =Putative uncharacterized protein
MMISIINTNQRALGVSMRVERASLEQVQKRFEALKKRKDLSAFTEEDLDERIMKQQQEEEERKRQRKEKKKEKKREQATQHEPEDVDPDIAAMIGFGGFGSSKK

SEQ ID NO: 61950 - protein, 148 aa, Zea mays
  Coding DNA Sequence Number=SeqID_18575
  Gene Ontology: Mol. function=structural constituent of ribosome; Cellular component=ribonucleoprotein complex; Biological process =translation
  Homolog annotation: Hit_ID=O22453; Match level="QueryCoverage=46%, HitCoverage=27%, E-value=4e-23, Identity=76%"; Hit description =Ribsomal protein S4
  Pfam annotation: Domain name=Ribosomal_S4e; Domain location=46-121; Score=55.8; E_value=1.5e-13; Accession=PF00900.11; Description =Ribosomal family S4e
MENVYKATVGAIAQNGYYVAYDGWGNREEVLKRDIPWEHYMSTKLISGTCLQLLRRYDHKPESQRAPLLEEFKLCKVSSAQFGQKGIPYLNTYDDRTIRYPDPLIKANDTIKIDLETSKIMDFIKLYLPFHGLHQVIYLVRLNVSTNS

SEQ ID NO: 61951 - protein, 176 aa, Zea mays
  Coding DNA Sequence Number=SeqID_18576
MSLARVQDMQWLGYFGGGVGRVLGAEEVPEPEGELVVFEEFFIAGLCLPAHHFVSEVLQKFKVQVHQLTPNAVVALAKREKLDIRLLNSDRAPSRRSPGRLRWKLWSWSPVPEISGATGGTTGFMFRRLKSKITQGSLPPLCVLIIMWRIRHLRWRRMMKMRGPFGLLSARVVGAI

SEQ ID NO: 61952 - protein, 60 aa, Zea mays
  Coding DNA Sequence Number=SeqID_18577
MVRVACTLRGKRLDGGVSVLLVGVNPVRKQQTFVVFVLRWYPRISPSSEAKSREDVGLPL

SEQ ID NO: 61953 - protein, 170 aa, Zea mays
  Coding DNA Sequence Number=SeqID_18578
MARTRKTSHKSTGPFGVPHHQLAPRHEGSSSGSNDPIGDLEAKVEQLRTELRHQNWAWAQDNQRIAELSADISRLQYEISEWDLAIDWAVNSCSIAWDHEGKARARVAELNAALDILQVYCNTLHEEVHVLYARLHPDVPSDAAAMGAGHREQQVKDLMGSWIFLSPLLP

SEQ ID NO: 61954 - protein, 99 aa, Zea mays
  Coding DNA Sequence Number=SeqID_18579
MESHDLQTERESWLVGKVRNLYRVFETDISAVLAVVCIATTAQEKMKPWKETSRSSKITTSSRRGLAATPSRLPVKAACIYVSFPHFDYCKDYVDVSDI

SEQ ID NO: 61955 - protein, 72 aa, Zea mays
  Coding DNA Sequence Number=SeqID_18580
MGLMAVFYSQDPLRSVVGSATPSGSGMENPAKASPGPQPKGDDEIKKMAEAIMDEVVNRLLNEAAEVVLRED

SEQ ID NO: 61956 - protein, 146 aa, Zea mays
  Coding DNA Sequence Number=SeqID_18581
MADNPCSSVVELDPGARLGCVAIATGPTMELFSGAQIRLPQLRSSRRSSSHGFLRSVLVVSSASDLRRHRELASRCGLVRASTRPWSRPPSSPTLYYQIDYCRCGVPCCALVGVPFVVPLHPLLSLVSTPAITGSVRRSSLLSLHC

SEQ ID NO: 61957 - protein, 124 aa, Zea mays
  Coding DNA Sequence Number=SeqID_18582
MGISPEKSIAYFVVRTRVTLQERARSLFLNKKRLSKQKLGRISQSRSYTQLRATLPTYQNMWATNLKLLSLRQAIHRPLGLSSHRHHYCSLPILEASSKKGANTPNNNVTSGRSPKLVQSIVLY

SEQ ID NO: 61958 - protein, 171 aa, Zea mays
  Coding DNA Sequence Number=SeqID_18583
MAEAPCPDCFPMALASHRNSTGLTASLPRQIARITTPHLRPPADPGRHSGNGFAEVAVGETPYRRRSDVREGARGVRPIVLCVFANLWWPEITTAVEISWMKGSGIVKSSAGASSTLRFRGTSIERGSPVGKGESLNSGELIGVWAELCRLGTRLGRDIVGGRWTDRRSRA

SEQ ID NO: 61959 - protein, 168 aa, Zea mays
  Coding DNA Sequence Number=SeqID_18584
MAVMGSTSDKMYLCQVPNFGILNDKAETGRVTFTRRESRVVSPSESIKDHVDVGLMIEDLLTAALSSAPPAASAPRPASPSLRARPLAASERCSGRRPAGLPGASRRQPPSLLPCALPRPPPRPAFPCALPLPRRAPVALALARAAAASAARRPGRPTPPAPLAVATV

SEQ ID NO: 61960 - protein, 96 aa, Zea mays
  Coding DNA Sequence Number=SeqID_18585
MEQWPRRKKGAEGLTGGETTLVRWSRSTRGRVRPKSGKDDLGSPVTFCRVQGLRELHGPPAKLTEGQAQLGRDWSELAAVAEAWGVVAGGGKARRS

SEQ ID NO: 61961 - protein, 67 aa, Zea mays
  Coding DNA Sequence Number=SeqID_18586
MADDEMRTLNVPTLQTDGTRTTSSLLDALGLPCPMHTGKREQRMVLRTLLKETTTKPSGFHFDKSQH

SEQ ID NO: 61962 - protein, 207 aa, Zea mays
  Coding DNA Sequence Number=SeqID_18587
  Homolog annotation: Hit_ID=A2XIQ6; Match level="QueryCoverage=41%, HitCoverage=15%, E-value=6e-08, Identity=34%"; Hit description =Putative uncharacterized protein
MEGRSGRRGWQERGRRSERMKREGGRLAGMGRDRLMKTAGRCVDTLDAHDGDRFASEKAAEKIVEKIYQTERFKLTREEENAIFQTTFKETTGCKANRLHGHGYLSRYPTRSQVMESKFLEQARATVATNQKNIELESQNEKEYYRKKCKHCKKKKKEKDKCKCLGRFHFPLLSRSFSIRSFGTGSSFYQIAPFIPCAPSSQGRRFL

SEQ ID NO: 61963 - protein, 303 aa, Zea mays
  Coding DNA Sequence Number=SeqID_18588
  Gene Ontology: Mol. function=nucleic acid binding; Cellular component= nucleus
  Homolog annotation: Hit_ID=A2X905; Match level="QueryCoverage=63%, HitCoverage=19%, E-value=6e-70, Identity=71%"; Hit description =Putative uncharacterized protein
MLTVNTNKFIEFYDVRAAEAALRSLNKSEIAGKRIKLEPSRPGGTRRNLMQQLGHDLDQEEPRTYRHSHVGSPIANSPQGAWAQYSSPTDSNMLQAFTRSPTGNGMSPIRIPSLISNAPKIAPIGKDSNRSNPWELHFSTPTHTKITTVTRNRGRSKAIFRTPEHFSTPGTLSGPQFLWGSPKPYSEHSKSPIWHPPGIGGGLLLGMANRASVNPGSSLIGSLTDNTQQQDPKRTSQNSNQTWHRRVQAANNREKKRDSRCFRDERRTRESVCRCVPARSQVGLESGAERRTANRDWGTELGD

SEQ ID NO: 61964 - protein, 227 aa, Zea mays
  Coding DNA Sequence Number=SeqID_18589
MAGSISIKPRVAYAKVLGRRALIASVTRGSNGQRAITYLVTKAEQGHRARATTSSPEQREPAPSANASAHGAGRVRGGVGPTARNCGTVGPQSRLECPRAPSVYLPEALWPRSEAATVTMPRVDGDGDLDMHSGDSTTQTVKAVSSNEADYSRRHRAMGGGGRVLYGRRTSSRCFIARRCNESPKKRRQIRVLRAVVELGANLGKKSGRNVASAVVVDLNGIPSSRL

SEQ ID NO: 61965 - protein, 102 aa, Zea mays
  Coding DNA Sequence Number=SeqID_18590
MPQVDGDGDLDMHSGDSTTQTVKAVDLLFSGLGLIDSRFRPTVNIPLIPLLSHPDFGAPRPGREHNHQGCETARVSSHTFIAQQVVGNNVHELAKGGSSREV

SEQ ID NO: 61966 - protein, 187 aa, Zea mays
  Coding DNA Sequence Number=SeqID_18591
MGPTTARLLPLLPFVAVFLLASPVDADSALDAATRCAATIVSISPCLPHVAAVAPPLASCPPAPTDACCVAFLRAVSPLAAGGGEEGCLCHLLRNPLLLGFPIDAARLAALLPACAAGNAFAAANVEAATLFADACRAAVPELMSKPKEAVPLPPAGSMVRSGTEVTSSRGIPTAALILAAAGAVIT

SEQ ID NO: 61967 - protein, 82 aa, Zea mays
  Coding DNA Sequence Number=SeqID_18592
  Homolog annotation: Hit_ID=Q2QYD3; Match level="QueryCoverage=91%, HitCoverage=24%, E-value=6e-24, Identity=70%"; Hit description =Expressed protein
MVRFSSDDAKEVVHYQTISSKSLAKSVLEEGGWSNFMCSREDTQNNVDVAIVFIGSKLQSSDISKDKQVDPALADTLKVDTV

SEQ ID NO: 61968 - protein, 360 aa, Zea mays
  Coding DNA Sequence Number=SeqID_18593
  Subcellular localization annotation: CTP_CleavageSite=4; ConfidenceScore=5.06e-01
ARARATAASPTTRPVALTLRHDRRRFWQEKRATLRLRRNNRAKKGTGKGDTPKRILPREGTRLRASLLIRGSKAGPPKGSTAASDRVGPTPTTGVRRLAPQGFTVASDTERGMTRDVHSDYPLAAHRRHHVRCPSRRFGGCSRKLGSGQTVDSVNILARELGPRPYTWATASSHEGTTRPAEALRKASRPRRSETTPPRPRGLHPAGALARTHRNKMQPRKAGPLAKKCDESLQASVNTPFEARGLLSGTIIRGTLKTPNSQLEHLMQRWPDIFILTRALRQSRSDRRHFAAPLTGLTEGQRRLRHSDYSATRQSETERQSGPAEGTIGSSAPPDPGLGLGLSPGRRRTPLRQTQGSDSG

SEQ ID NO: 61969 - protein, 114 aa, Zea mays
  Coding DNA Sequence Number=SeqID_18594
MSKTPAEPLRARAASPPSSDVFGTSRWSDRDKTGRDTLRQIRHQTKTCDDVIPQCGLVQLRGPPTSRWVKPSSAFLKGPTKSSPQTANAQVTDYYRRLRLPNKRPSLKAKVVAA

SEQ ID NO: 61970 - protein, 152 aa, Zea mays
  Coding DNA Sequence Number=SeqID_18595
MRTTPVPLLVLSSRDVVDVEPTEVEGPFCHATGRIPIIDDFTKGCHGHHLHEVSVKEVDQLPLGNEDCIEQFLDLRVLCLGLHQHLTNELNGLLHLEHVSLVLPFHNHLNVDHLGGGCNIEEECFTWVRHDQDQWRAQEHIIRSRASWISIV

SEQ ID NO: 61971 - protein, 746 aa, Zea mays
  Coding DNA Sequence Number=SeqID_18596
  Gene Ontology: Mol. function=identical protein binding; Cellular component=extracellular region; Biological process=negative regulation of catalytic activity
  Homolog annotation: Hit_ID=Q2QSI6; Match level="QueryCoverage=97%, HitCoverage=97%, E-value=0.0, Identity=62%"; Hit description =Subtilase family protein, expressed
  Pfam annotation: Domain name=PA; Domain location=354-443; Score=9.7; E_value=0.034; Accession=PF02225.13; Description=PA domain
  Pfam annotation: Domain name=Peptidase_S8; Domain location=126-593; Score=61.1; E_value=3.7e-15; Accession=PF00082.13; Description =Subtilase family
  Pfam annotation: Domain name=Subtilisin_N; Domain location=36-120; Score=25.1; E_value=0.00026; Accession=PF05922.7; Description =Subtilisin N-terminal Region
  Pfam module annotation: Pfam domain module=PA::Peptidase _S8::Subtilisin_N; Domain location=354-443::126-593::36-120
MELDATLLSISLVLIGLLLHTTQATTQENCERSGLCTYIVRVSPHLNISMDMSRMDLESWYRSFLPPRMDRSPRSTSPFIHTYKEAILGFAVDLTKDDAEYVKSKDGVLMVYKDILLPLLTTHTPDFLSLRPNGGAWSSLGMGEGSIIGLLDTGIDSAHSSFDDEGMSAPPSRWRGSCKFATSGGHCNKKLIGARSFIGGPNNPEGPLDDVGHGTHTASTAAGRFVQGASVLGSGNGTAAGMAPRAHLAMYKVCDEQGCYGSDILAGLDAAIVDGVDILSMSLGGPQQPFDEDIIAIGTFSAVKKGIFVSCSAGNSGPFPGTLSNEEPWVLTVGASTMDRQMEAIVKLGDGRSFVGESAYQPPSLGPLPLMLQLSAGNITGNVVACELDGSQVAIGQSVKDGGGAGMILLGGDSTGHTTIAAAHVLPASYLNSQDAAAVRQYINTSSKPTASIVFNGTALGTAPAPVVAYFSSRGPSTASPGILKPDVIGPGVNVVAAWPFKVGPTTNTAGRDRDDDDQHGAAAATFNSVSGTSMSAPHLSGIAAVIKSAHPDWSPAVIKSAIMTTAYVVYGNNKNQPILDEQLSPASHFSVGAGHVNPSQAVSPGLVYDTDVEQYVLYLCGLGYTDSQVETITHQKDACGKGRRKIAEAELNYPSVATRASVGELVVNRTVTNVGDAVSSYAVEIDLPKEVEATVSPAKLEFTELKEKKTFTVRLSWDASKTKHAQGCFRWVSSKHVVRSPIVIF

SEQ ID NO: 61972 - protein, 158 aa, Zea mays
  Coding DNA Sequence Number=SeqID_18597
MEDAMREQKERFREELRQQQITFLQQQLEYMVAYNAQAQQAMNGSGVMGHNTPPPVIRAPGGAYAGEGATTRENPNPLHDFVNEFFAYRATGRWATVAPSTTEQQIGDEKNRAVVDAEKGKRQGDKRSPVKRQQEMRMSVREDKTSTWKRLVRSKEMV

SEQ ID NO: 61973 - protein, 247 aa, Zea mays
  Coding DNA Sequence Number=SeqID_18598
MRVEDPVFISEKFGDPNRLIPSWGSPTTRHMLLLTLLHMSTIPTDPPPHEQVRATREHTTPFRWSFARRVRATLAISPLPVRDCLFMFGIAGFKLTHDEGRHGPGSAIGAAIRSFGQQDAEQKFNARREMLHVDETQPAEENGSPAMGMGGQQGATLGDPAGLGERRPGAGRDLSWAPWETREKLGAQSSTASSRGNRAGAGRAGHDVEESGWVPVGENRARAQELPGEGAGTRDAQVWASADVERD

SEQ ID NO: 61974 - protein, 259 aa, Zea mays
  Coding DNA Sequence Number=SeqID_18599
  Homolog annotation: Hit_ID=A2ZZD9; Match level="QueryCoverage=77%, HitCoverage=45%, E-value=4e-07, Identity=24%"; Hit description =Putative uncharacterized protein
MTNARTSSGEVLLSGGAAYHWYFNPSIEEATAFYNKIESEKINIELPSLDGQEITPPQLPQREHHDLKYILPLNPHDVPDEGYECTVTITNASAIPPEITAIVSRKYTFIVVFNNQSYRFLEKALLIKGIVASYGRMTSLPRVQEKLDVHLPPNPAKNKLITTAAQSPSTVMSRLSTADSPSVSRKLTYSPAKDKPETNPLDADKNRAPATTLESPTKRSHCNQHSGASKIVNEHSDKKLCFSKYEIHNNKKIVLGLIQ

SEQ ID NO: 61975 - protein, 156 aa, Zea mays
  Coding DNA Sequence Number=SeqID_18600
  Gene Ontology: Mol. function=structural constituent of ribosome; Cellular component=ribonucleoprotein complex; Biological process =translation
  Homolog annotation: Hit_ID=A2Y6R4; Match level="QueryCoverage=37%, HitCoverage=39%, E-value=2e-25, Identity=94%"; Hit description =Putative uncharacterized protein
  Pfam annotation: Domain name=Ribosomal_L20; Domain location=48-133; Score=-29.9; E_value=0.0064; Accession=PF00453.9; Description =Ribosomal protein L20
MAVPLPHPSMQLLQRKEKAIVMHGIFSLWQWVDQTCTIFLHITVSSCMRIPATTVKSKPVAYDSSARLETCRIDEEVMQIRSRSNIKERGGIFSGYPVNYGNFIHGLMKENIQLNRKVLSELSMHEPYSFKALVDVSRTGFPGNRPVKKEGLAAIL

SEQ ID NO: 61976 - protein, 225 aa, Zea mays
  Coding DNA Sequence Number=SeqID_18601
  Homolog annotation: Hit_ID=Q8H6I2; Match level="QueryCoverage=88%, HitCoverage=95%, E-value=2e-77, Identity=66%"; Hit description =Putative MURBZC
  Pfam annotation: Domain name=Zea_mays_MuDR; Domain location=5-212; Score=-45.7; E_value=0.025; Accession=PF05928.2; Description=Zea mays MURB-like protein (MuDR)
MEPAVELCSQKLSAAVDAARDTMKASSTACMVDGDYCATFSLGNDVVSTLDVLESAVAAEKSAMSSYSQASAAVDCAKETIAKYCEVNQKLAQALRYSLSLMSDTAKKLQETASLCYTDEDVVDGFKLTQVARSLDELAETIEVTAIDCQVSMMDPTTILEAGYGSEDSAVWEDVFRDREIMNQPLEVETLAEHCAKWGLITMRSGIDLCNIFFCSVFVTLAMLL

SEQ ID NO: 61977 - protein, 201 aa, Zea mays
  Coding DNA Sequence Number=SeqID_18602
  Gene Ontology: Mol. function=electron carrier activity; Cellular component=cytoplasm; Biological process=electron transport
  Homolog annotation: Hit_ID=Q5JL61; Match level="QueryCoverage=90%, HitCoverage=28%, E-value=5e-83, Identity=80%"; Hit description =Putative NADPH-dependent FMN and FAD containing oxidoreductase-like protein
  Pfam annotation: Domain name=Flavodoxin_1; Domain location=1-129; Score=100.1; E_value=6.8e-27; Accession=PF00258.16; Description =Flavodoxin
MDAAERVGREAERGGCPAVDVLSMDSFDPSRLPSERFVVFVVSTTGQGDPPDSMKGFWRYMLRKDLDRQWLEGIHHAVFGLGDSGYQKYNFAAKKLDRRLLHLGAEPVLEIGLGDDQHPSGYEGALDPWLLSMWKSLNEINPSLLPRVSDINDPNLSFLGDPKVHVIYYSSNEVTQDPILLGMNDELGIIYCYAPFCSIRS

SEQ ID NO: 61978 - protein, 105 aa, Zea mays
  Coding DNA Sequence Number=SeqID_18603
  Subcellular localization annotation: CTP_CleavageSite=21; ConfidenceScore=5.12e-01
MAHRTANSACPVHHRTVWCPRRQKLQRSESNGQVTWQAHRTVSGGAPDCLIRPVTQRRSRRARYNGPDHTWASELNEAALWDDFVAGLRLVPNGAKGVPACSVSV

SEQ ID NO: 61979 - protein, 551 aa, Zea mays
  Coding DNA Sequence Number=SeqID_18604
  Homolog annotation: Hit_ID=Q6J9V9; Match level="QueryCoverage=11%, HitCoverage=33%, E-value=2e-07, Identity=45%"; Hit description =Putative uncharacterized protein
MAERYRLPRSCVPPTTRRKDCGHPPSGGLEGGKTRCIREREDTVAFQGGHPPFKGDSPYLSPQPSWAESSPTRSKVLPLRRGGWVPHVMQAGPEQKKPNRRARCMQPPSGYKQFSTFAQTSGRKGGQPCRRHATAPSGCTSPTSNAPSMEAHAHASCNRRAGRYVQATAPPLAPLPRLLDCGTSTVTRGNPAYDPAVPARRDGQCGQKRAGSDGGGRRAGAAVTSGSERRFAFAIMTASKKGPGKGDTPKRTLLREGNRLRASLLIRGSKAGPSEGFNSRLRARGLHTHYWSEVRRPAPRKGSTAASGHSGSAPTTDQGFVGWPSKGSQPPQTHSEEHLMQRWPDTFILTRVLQSTEPKQSGPTSGTIGSSAPPDPGLELGLSPRRRRTPLRPTQGSDLGSAPEDGELRSARPRARTWAQPQKTANSAPLDPGLGLGLSPRRRRTPLRPTQGSDLGSAPEDDELRFARPQGSDSALGLSRRSPPRPTQGLDSTTATEDRLDLDLGGASTSPNLGRGPTTSIGDAIITLPQADSGYGEQDRRPIWLAPPDRQ

SEQ ID NO: 61980 - protein, 302 aa, Zea mays
  Coding DNA Sequence Number=SeqID_18605
  Subcellular localization annotation: CTP_CleavageSite=48; ConfidenceScore=5.05e-01
MAGESKPGCGLCPSLSLKDFHHQCWGGDSRVPGYRTRVASEPLSVSPSATAAGRGSSADEIAGAAYGPTSNSTAFCPSLPHEFGHGRGSPGSSIRPEVIAAAVRPPGAEVVVVAAAGAGDGVPFVGLLLLHRPPQRVGLFVPAEESLGSVGLAVRGFSCLVKGTPRPLFDEPKPGVPVSARTKAELARKEDLVGRSLAGSSVSGTDAGVDLPRPRAGLMSSGDSWPRPRGNQPSRLLEPDSWRRPGRRWPGRDDEVVLQSGDPQTVSPSEARSDLAEGIIDTEGAAAPFNRQDPSLQDRIIL

SEQ ID NO: 61981 - protein, 154 aa, Zea mays
  Coding DNA Sequence Number=SeqID_18606
  Gene Ontology: Mol. function=aspartic-type endopeptidase activity; Cellular component=nucleus; Biological process=regulation of transcription
  Homolog annotation: Hit_ID=Q53QR0; Match level="QueryCoverage=86%, HitCoverage=46%, E-value=4e-29, Identity=48%"; Hit description =Putative uncharacterized protein
MENCSRSVDFFYSVTDVGEDKCVNNKVIRGKVRFQQKTGSRSYIAHMHAVKQAKYGDAPPSASDLFKECHCSSKTSFAEHVKEAIDTMEALVAEPGVEGKESKTHTEAVAQVLASSKFLQNIGLVPATKKSSNGSDPTRVAELEAELESEKQTH

SEQ ID NO: 61982 - protein, 161 aa, Zea mays
  Coding DNA Sequence Number=SeqID_18607
MPPRTRLTARKSTGPIGVPRHQLAPRHENSSSGSNDPIGDLEARDQLADRDLALDWAVQSRLLACAKEARAQARIKELSSTVDDLQVYCNTLHEEVHVLYSQLHPSAPAHPAEAEAGPSHVAGRALGGELDLFEPPPSMRLVDVWTPTPDDEAAKSNGKQD

SEQ ID NO: 61983 - protein, 77 aa, Zea mays
  Coding DNA Sequence Number=SeqID_18608
MQAACNCTTGMHPFDFNAPSMETQANTSWTGKGDTPKGILLCEGSGPRALLLIRGSKAGPSEGFDSRLRALGLRAHY

SEQ ID NO: 61984 - protein, 486 aa, Zea mays
  Coding DNA Sequence Number=SeqID_18609
  Homolog annotation: Hit_ID=Q6BTJ4; Match level="QueryCoverage=49%, HitCoverage=26%, E-value=6e-10, Identity=32%"; Hit description =Similar to CA1621|CaIFF6 Candida albicans CaIFF6 unknown function
MAERYQLPRSCVPPTTRRKDCECTPSGGLGRWKDVMHKGSAKTWLPFKGVTLLLKATLPTCVLSHRGLSLLQHAPRSSPYDTGAGSHASRKLARGRRSQIAARAVRATAQRLRAILHFRPDQRVKGRTAMQAACNRTKGAHPFDFDASSMEAQAHTSYNRRAGCYVQETAPPLAPLPRLLDCGTWTGKGDTPKGILLREGNGPRAPLLIRGSKAGPSEGFNSRLRALGLRAHYWSEVQRPAPRKGSTTASGHSGSVPTTDQGGNDLIMESHQREASSPRTPSKGDRLTGDTMFGALQGQHGAFPPSSLRKDDAGAQEDSAACATPTAVPLDRVRLIAARFGHRHHRKLRIARPQGSDSGSAPEDDELHIARPQGSDSGSAPEDDELRLARPQGSDSGSAPEDDELRLARPQGSDLGSAPEDDELRIARPQGSDLGSAQEDDELRLARPQGSDSGSALKDDELRLARPQGSDSGSAPEDEELCLARP

SEQ ID NO: 61985 - protein, 305 aa, Zea mays
  Coding DNA Sequence Number=SeqID_18610
  Homolog annotation: Hit_ID=Q5GAV6; Match level="QueryCoverage=28%, HitCoverage=21%, E-value=1e-06, Identity=43%"; Hit description =Putative uncharacterized protein
MATPGHHPTRRDHHGRTHHHRGRPCGSDNRRQRWKVDKEPRGRWKSRTTEDGWPGPRKAPDCREECCRALGPEQGPQTPCPLDESLQVAIIRAEATQKVQHQGPVSDRLAEVAEGVRHALHLVAVLSHGELNGDGAVEPREDNIVHEAPGGSQRSVEVVEDVPLQCEKDLSLPTGVVGGRRVQHHGHEGPDVVKSSGLSMESGDVVDVEARGGDGLWDHRGSSRVTDGRLRRRRYVVAIWVVKAAPRACSCSRVRDVVRSRSCEAATTTWIMARAAKSEESVVGSAKDATMSVPVGATRAGNPGG

SEQ ID NO: 61986 - protein, 122 aa, Zea mays
  Coding DNA Sequence Number=SeqID_18611
MDGMFSKIKLDGGSIMAMMGSTSEMMYLCQEAKARARATELSAALDNLQVYYNTLHEEVHVLYSRLHPDVPADPVAMGVGPSRTTGEGNDEELDLFRPPPSMNLADDRSPIVGNEETKDDED

SEQ ID NO: 61987 - protein, 266 aa, Zea mays
  Coding DNA Sequence Number=SeqID_18612
MGWREGGDIRGEREESRMANEVAATEGRTIIIMRRQVPLLFFFYVLHSDRVVAWPRCNGTVAECRRLFCLLASRLLEHQKPHGCARSLLPLCTLASPSPTAPLPLNGEALQLAALPSRFCPLLSSKLRRYYYSALSHTDVARCSAALHLARAPSLAPHPEPSALHPAVKSPLPPVVCAAREEHGQELLLMPGGGYFSRALLSPCDDDAVIIFAKILRGRRNAEHISVHCGVSHRRSPSLCTGGIALSTDQDESAFYVTTTIGILLI

SEQ ID NO: 61988 - protein, 225 aa, Zea mays
  Coding DNA Sequence Number=SeqID_18613
MNPDTQVILDEIARRFSEHDVKWDRCLTEQESRWDAAFSDFTKGQERRVQALEQNTSLIADWRSSMEGVVDDLRLEVGKVSKNWERAVVDKSTSMAGVLAPSPPVVERPAARFTAEPPHGHHIELFTEEDGFGSVTTLLHPPGQSILWMGYVLIFAQLCLLIIPRPSILREGRKFSRVRMSEDKVRTKDLCWSVGTIYDPSELPGVSTASPGIGQGVTSGIRADL

SEQ ID NO: 61989 - protein, 184 aa, Zea mays
  Coding DNA Sequence Number=SeqID_18614
  Subcellular localization annotation: CTP_CleavageSite=20; ConfidenceScore=5.75e-01
MAGARLSIPASPPSPSGCLTASEPQPALSPSLSLLPPSSSPLPRRGRGRTPNSPPLVPLPGPAVARPWHVARALAVTGSARGAAHGLCALAGAAHAVVGSSPGVAACIPKQCAPDAVTCATLRSVPRRGVPPAQSLMLLCDVFPHGAFVEPRVLGSPKPALTTCTCIRVRVARRLVFDDPIYPP

SEQ ID NO: 61990 - protein, 223 aa, Zea mays
  Coding DNA Sequence Number=SeqID_18615
  Subcellular localization annotation: CTP_CleavageSite=41; ConfidenceScore=5.22e-01
MSSFPYAILVNKLSKTSFSFFQLRHPSPYDAIPKLVPSFVTATFKGGAHAPPLGVPVTGGDPDDKDNDNSKSSHNIDLSEEQELEGWSLDASLVTPLLGVTSTMRSTPCYARHSTDALGPSSTAVLCSSTVVGHTQSAVRRLAWCVVRIMVSGVQNVCSEHYSVSERDTIEAVMHDAARHEPSHYCSVLGGVADSLDLRYYPRHPSGSTGGVVVSLVGEDNPR

SEQ ID NO: 61991 - protein, 287 aa, Zea mays
  Coding DNA Sequence Number=SeqID_18616
MTPYLRSYYATTRTTQNRITDEELPSRRRIPPEKCFQKVYDEGYSPFSTTERDDQGLPGLGEGLRCWLSRVRCELERLSPHIRTGLSSFTTCTHDKYNHSRLYGKSLNLNLHGLNPRVMTTGEHREDKEGECFVRFGHGGGLVPSGTIVKDRDASTFEASALASEDEVGAAAVALAAWRPKSDQSPGLPESALETSALLSSGAVVATTTEVPHLAVSVAPAEHASLLCACCLTSTECNHISELVSQILQHKKRGYPHSGDSHYKDPNPSYFIMISIKTQDKQTILTN

SEQ ID NO: 61992 - protein, 68 aa, Zea mays
  Coding DNA Sequence Number=SeqID_18617
MGYRIPRKILNPALIPAVAEPPKLLGPHAPALVSKTSDGYACAPDNLTGSVRVSQGPRINHEQPGSQD

SEQ ID NO: 61993 - protein, 218 aa, Zea mays
  Coding DNA Sequence Number=SeqID_18618
  Homolog annotation: Hit_ID=A2ZJP5; Match level="QueryCoverage=57%, HitCoverage=30%, E-value=6e-27, Identity=56%"; Hit description =Putative uncharacterized protein
MVDKPVDTILLKLRGLYARAKELSENEISASNALIGLLDGLLQSGASTAQKKKIGEYWNLEPRFCKIGSCFLTRSMQYSTVVAFYISEVGEQKKKRIKSDTDSARFSAASMRNQLDQAASLKGEQRGGDAENPNVNGGDPSQTVQVDLHVFRALMLHGIGGEVDLADVVAIDEAGALERAVELVKLTQPGGLCHAVGHNAALGLLAGVGDDGLPLGGP

SEQ ID NO: 61994 - protein, 65 aa, Zea mays
  Coding DNA Sequence Number=SeqID_18619
MAMTSPALNLSIIVNKKRRKSGHCIYHVERRYEVLDEEPGDDEESTQKYVRVKFLPICPFLVPCI

SEQ ID NO: 61995 - protein, 69 aa, Zea mays
  Coding DNA Sequence Number=SeqID_18620
MDIGITVDALKIYVESQESNPGLGGATRKSLTARLTIIDYEYASFNPVAYDIANISVSWQQTIIHQSLI

SEQ ID NO: 61996 - protein, 111 aa, Zea mays
  Coding DNA Sequence Number=SeqID_18621
MGKNNKRKREPTPSSEEFGDSEYSEEEFSSESEGSPAPIPLPDSFETVSASLGHQTDAFRNSCRVTCRRCRRFRGNCRVTEHNIGVLEITVGRLETISEGDVSVLEVTPSD

SEQ ID NO: 61997 - protein, 218 aa, Zea mays
  Coding DNA Sequence Number=SeqID_18622
  Subcellular localization annotation: CTP_CleavageSite=36; ConfidenceScore=5.03e-01
MTLRQGTSSTAAAGGARLAAMRLREKMKRSDSNRVREMEKSEGVSNIKDGGLRFNMCTCAPRWHVHQICSLHQAPDSPRPRPAHPRDPYLSGRHPSPCPSRVGLFAELAEGQPDMSSSVGGGSAGGGGVDMVSLLEKAKDLDQLKKEQDEIVADINKIHKKLLACILGCAAIDVNHVLQLDSDGAKEPRQYNDVHMSPYKGDGVGDVEEDVAIEGVAL

SEQ ID NO: 61998 - protein, 77 aa, Zea mays
  Coding DNA Sequence Number=SeqID_18623
MACAPDMLPLVDACRFKFTYMHEYEICGKIVNDAKVYKIKIYLCNMYTTCRGFENLGTIRFMFGGGAIADSLRMENR

SEQ ID NO: 61999 - protein, 171 aa, Zea mays
  Coding DNA Sequence Number=SeqID_18624
MGDQGEARRAELHGELAWQQSWSREMGRSDRRWRGRAGHDVEESGWVPGGRGKQAASRHLGARRGGRWSREGAPPEEARRAGSEEEDELKRWEISWAFGKIHGRRAAATGRWATVAPSTTEQQIGDEKNRALVDAEKGKRQGDKRSPVKRQQEMRMSVWEDKTSTWKRLNT

SEQ ID NO: 62000 - protein, 272 aa, Zea mays
  Coding DNA Sequence Number=SeqID_18625
  Homolog annotation: Hit_ID=A2FD36; Match level="QueryCoverage=58%, HitCoverage=4%, E-value=3e-07, Identity=22%"; Hit description=Viral A-type inclusion protein, putative
  Pfam annotation: Domain name=zf-CCHC; Domain location=1-18; Score =30.6; E_value=5.9e-06; Accession=PF00098.14; Description=Zinc knuckle
MDCYNCGELGHLAHQCTKPKKNKSKGKKDDESEDEKKEKKFFKKKEGKQKRFHKRKNGKAYIVGERKVQNDVTNVDECDSDCDAEYASPTYDELADLLKEYTQIIRMSKAKYDKLKDENEFLTAKYDIVIKASDEMKEENKTMSSTRNELKISLKDAKEKCEKMSEANRELNDRLVNIKEDYTKIKIDHDNLVVAYELLSCDTHEAINPFVKLDVAPSCDDLSNGDQSSLHDDLVEKLEVMTLENKKLKKYLTDATTKGKFAIESKDFNNEL

SEQ ID NO: 62001 - protein, 82 aa, Zea mays
  Coding DNA Sequence Number=SeqID_18626
MVSHSGYGGYKCGHCTTAVGVSEALYAKAVSPDLLAGNRWGWLICVGTECLATSFSGGHGCWSDLDVHLATGLDSRVGPYLG

SEQ ID NO: 62002 - protein, 42 aa, Zea mays
  Coding DNA Sequence Number=SeqID_18627
MALLSTVETCPASALNSCCLTVLLVLECGEGMIHQLILQRVD

SEQ ID NO: 62003 - protein, 98 aa, Zea mays
  Coding DNA Sequence Number=SeqID_18628
MAEREEEIEVTEEETPPPSESQAGNHFYFDICGSEPDSPVNEGKPRRADRGPFNWSHASSWVRKRQTFVASAPRWYQTRKNKTEVREDSVLHLGSFVY

SEQ ID NO: 62004 - protein, 1121 aa, Zea mays
  Coding DNA Sequence Number=SeqID_18629
MPSSSSSADAASPAAASSEETLSNVVVEELRAGDSVEFGVSRMTSARIEDMQRLGYFGGGVARAPGTEEVPEPEGELVVFEAFFVAGLRLPAHRFVSEVLRRFSRSNTSADTDPHSGAGEKRMVENGVAQFGSCTFTPKTGKTTMPVVELVPCARNKWGNWNEFWFYVAEATVEGHKGLPVSEMCSHYYSAYPPYEVAEDDADEGALRCAAGQSSGRDLVEEFVAYGVWPLAHGWALGEVCPRQMPFHGGRVVRSPAFALNLRNRDPTAFVRDAEGLAVRLVGRYVPRTEGQRSFDIRGSNERLNRVFELNQLPYDGYPGQDEADRRGKKPAVETGGDPALVAAASSKKRKLGTAMGRLGVSDSFARELMRTCAASGERMSSPELRESSARMLRVTGGCWPKDIPIPCAAEEDCFTSRMVHRWRVFPYGRNIGHVVWAVMDKDRQGAARKRQATVRVHEARPKRLRGTAKAEASGGGKPPLPAKVGASAPGKAPEVTVGAGGPKLTKVVPSVSGVAEAAKAARTLPPPGKRVADFGTEINVEDYLGGSDEGPLALVMPGAAIATAAPAPKAGGEALGAGGEVSALALVRDEAGVATRRLKGATEALSRATEALNQVADFTSRTASGALTAALSAEVERLRTQHADAVREKSASDSKCRKLAEKVAALEKEKADLRRQLAGERREANEAIAKEQAAQAEARLARAEGNIAKELAGELQRRLTALESRAEGAEAAMRAEAERTRTQLMTAYRELGVRTGDFEVPEREAGLCCLEWVQEELQELPTVLAGLMSFTSLVTCEAAMNALSREGCRHFEALDQADEDFGRDIFEVEDPVVKESGGALYDRMWGSYGCEVVQARAEAARAQAERGERVDDLGALNSALPDPETTPAEAATGVAPGPTPETAEDAPGAPAPAAAGEDLPPKVAEGAPDAPAAAVPSAEDPAEVGAEAAAEASAEAPAAAGPSQVQDFGPAHATATTEFLAASTAEDGNEYGGSVSEFFDFTDSRSSVEWTEESSEGDLDYFAALDVAAAEAAPHAADAPDVPGPSTGHRRRRAIAKRRISAEERAQLRVSRAGRQELLSLPAAAGVGEGELRSLFAGEELRIMLFNYREMGIIPKVEPM

SEQ ID NO: 62005 - protein, 122 aa, Zea mays
  Coding DNA Sequence Number=SeqID_18630
MEVEIEELHPMGAEEAKIEEAIDLIAHKVKPLEMLPESDEEEDDGERIALQFVQVLPYSSSALFGAAVTILLKKRLVKAAVRIAAEDTGSSMPALAEGKGKGKRPTEVEEAKMAIEDDTLLG

SEQ ID NO: 62006 - protein, 118 aa, Zea mays
  Coding DNA Sequence Number=SeqID_18631
MRKEYEFEMMKLRQSSAEVAVNLSSAQVNMNGMKAEINHGGQAAEKAVDIRKKLQSKKSKVSTSQVVIEVKHTEVKAKDAAAEAEAISARAIEKAEDDAILKICEQIYDEAMRNDLVN

SEQ ID NO: 62007 - protein, 58 aa, Zea mays
  Coding DNA Sequence Number=SeqID_18632
MKEERDDMWVPYGTGRWKRARAVLVVGRLSGDEGKMDYVKGKVTALTKAKGRSLGMGP

SEQ ID NO: 62008 - protein, 72 aa, Zea mays
  Coding DNA Sequence Number=SeqID_18633
MRRAQPAREILGAAGELHSTINGWSLGFVLAAQAPSTSHRPARSEGGGRRSRIPSRDLNQAIESDRTAENYQ

SEQ ID NO: 62009 - protein, 546 aa, Zea mays
  Coding DNA Sequence Number=SeqID_18634
  Gene Ontology: Mol. function=cation transmembrane transporter activity; Cellular component=integral to membrane; Biological process=cation transport
  Homolog annotation: Hit_ID=A4ZGN5; Match level="QueryCoverage=96%, HitCoverage=98%, E-value=1e-149, Identity=55%"; Hit description=HKT8
  Pfam annotation: Domain name=TrkH; Domain location=160-535; Score =89.5; E_value=1.1e-23; Accession=PF02386.7; Description=Cation transport protein
  Subcellular localization annotation: CTP_CleavageSite=68; ConfidenceScore=5.02e-01
MPPLHVPGSSTPRKFYHLVLFHVHPFWIQVLYFLLISVLGFLMLRVLPMKSSSVPRPSALDLLFTSVSATTVSSMIAVEMESFSNAQLLLMTLLMLLGGEVFTSMLGLHFTCTKLRNKRETPHNNLHGNSLEQSRRRHRPMEMEAQAAAVQMELAGFNKDGHGDFASMARLLMFIVLGYILVVHIAGYALILIYLSVVGSARAVLVRKRISLSTFSVFTVVSSFANCGFVPTNEGMVSFKSFPGMLLLVMPHILLGNTLFPIFLRLSITALERVTRWRDLCELLRDRGPGGGPAAAAAAAAIGYDHLLPGPRTWFLALTVAVFLAVQLVLYCAMEWGSGGLGGLNAFQKLVAAVFMSVNSRHSGEMVVDLATVSSAVVVLYVLMMYLPPYTTFLPVAVEDDQQQQNEAQPHDNSTSKSSTSISIWHNLLMSPLSCLTIFIVVICITERRQIARDPINFSVLNIVVEVISAYGNVGFSTGYSCSRQVTPGGGCCKDAWVSLSGKWSVEGKLTLMAIMFYGRLKKFSMLGDGTGSYDKSICEEFGCIL

SEQ ID NO: 62010 - protein, 118 aa, Zea mays
  Coding DNA Sequence Number=SeqID_18635
  Subcellular localization annotation: CTP_CleavageSite=66; ConfidenceScore=5.07e-01
MAVLVEPCKLHLDGGGLGFHLHGTVKWRPSMLVNTSPPRSIRRVMRRSCALEKDSISTAIMLETVVADTDVKSRSRAEGLGTELDFMGRTLSIKKPKTEIKRKYRTWIQNGCTWNSTR

SEQ ID NO: 62011 - protein, 182 aa, Zea mays
  Coding DNA Sequence Number=SeqID_18636
MKSKLLAGKHNHHSGWCKGKREYTSSKHKPKGSDLDHNFDNTSFPSSHKELKRQVDDKLYGLFFFIDTIGDLCTMALSEDTLGNNDKDISNNSTSEVSLSVNDLTTKVDELTTTLASQDMLLRLASRERREYKCKYKTTLRELECPRASMVVFDETECDKCALHMSNIITLQINVHSVRVCS

SEQ ID NO: 62012 - protein, 610 aa, Zea mays
  Coding DNA Sequence Number=SeqID_18637
  Gene Ontology: Mol. function=binding; Cellular component=nucleus; Biological process=activation of protein kinase C
  Homolog annotation: Hit_ID=Q9FU66; Match level="QueryCoverage=99%, HitCoverage=96%, E-value=0.0, Identity=54%"; Hit description =Putative uncharacterized protein P0013F10.12
  Pfam annotation: Domain name=PPR; Domain location=142-176; Score=5.9; E_value=1.6; Accession=PF01535.11; Description=PPR repeat
  Pfam annotation: Domain name=PPR; Domain location=204-238; Score =45.4; E_value=2.1e-10; Accession=PF01535.11; Description=PPR repeat
  Pfam annotation: Domain name=PPR; Domain location=239-273; Score =15.8; E_value=0.1; Accession=PF01535.11; Description=PPR repeat
  Pfam annotation: Domain name=PPR; Domain location=305-339; Score =33.0; E_value=1.1e-06; Accession=PF01535.11; Description=PPR repeat
  Pfam annotation: Domain name=PPR; Domain location=340-374; Score =11.0; E_value=0.38; Accession=PF01535.11; Description=PPR repeat
  Pfam annotation: Domain name=PPR; Domain location=376-410; Score =11.9; E_value=0.3; Accession=PF01535.11; Description=PPR repeat
  Pfam annotation: Domain name=PPR; Domain location=442-476; Score =12.6; E_value=0.25; Accession=PF01535.11; Description=PPR repeat
  Pfam annotation: Domain name=PPR; Domain location=71-105; Score=22.1; E_value=0.002; Accession=PF01535.11; Description=PPR repeat
  Pfam annotation: Domain name=TPR_4; Domain location=174-197; Score =4.6; E_value=11; Accession=PF07721.5; Description=Tetratricopeptide repeat
  Pfam annotation: Domain name=TPR_4; Domain location=306-329; Score =0.1; E_value=38; Accession=PF07721.5; Description=Tetratricopeptide repeat
  Pfam annotation: Domain name=TPR_4; Domain location=39-64; Score =15.2; E_value=0.24; Accession=PF07721.5; Description=Tetratricopeptid e repeat
  Pfam module annotation: Pfam domain module=PPR::PPR::PPR::PPR::PPR::PP R::PPR::PPR::TPR_4::TPR_4::TPR_4; Domain location=142-176::204 -238::239-273::305-339::340-374::376-410::442-476::71-105::174 -197::306-329::39-64
  Subcellular localization annotation: CTP_CleavageSite=24; ConfidenceScore=5.14e-01
MPDAYTFPPLLKAVARGSSAAPVRAVHAHVVKFGMGRNAHVATSLVTAYAAGGDGAAARALLSERERDTPVVWNALISGHNRCRRFGEACCSFVDMARAGAAPTPVTYVSVLSACGKGTGDVLLGMQVHGRVVGSGVLPDLRVENALVDMYAECADMESAWKLFDGMQVRSVVSWTSLLSGLTRLGRVDEARDLFGRMPERDTVSWTAMIDGYVQAARFREALEMFREMQCSNVSADEFTMVSVITACAQLGALEMGEWVRVYMSRQGIKMDAFVGNALIDMYSKCGSIERALDVFKDMHHRDKFTWTAIILGLAVNGYGEEAIEMFHRMIGVSETPDEVTFIGVLTACTHAGLVDKGREFFLSMRETYNIAPNVVHYGCIIDLFGRAGKITEALDAIDQMPMTPNSTIWGTLLAACRVHGNSEIGELVTERLLQMDPENSTVYTLLSNIYAKCNRWEDVRRLRHTIMEKGIKKEPGCSLIEMNGIIHEFVAGDQSHPMSKEIYCKLESIINDLNNVGYFPDVTEVFVEVAEEEKQKVLFWHSEKLAIAFALLSSEPNTVIRIVKNLRMCLDCHNAIKLISRLYGREVVVRDRTRFHHFRHGFCSCKDYW

SEQ ID NO: 62013 - protein, 576 aa, Zea mays
  Coding DNA Sequence Number=SeqID_18638
  Homolog annotation: Hit_ID=Q6JAD6; Match level="QueryCoverage=87%, HitCoverage=96%, E-value=1e-93, Identity=70%"; Hit description =Putative uncharacterized protein
MEKCKPIKTPMPTNGHLDLDEGVTLFDRVPSPVLPGSSPLVHQIRMPRTKNASAPGGGDDEDPRRPFRQVKGKTVYLEQQEDRKKRRTDREARAAAAAVAAAAQAALGDQPQIPSDQIAFRARRLTSRTRSSSHTSASTPPPTLPAPVTPIAPSTSTAIPTTSSTPASTASPAPAPASAPPVPPPRFRERDETEVRPLVSDPRLFDLQRATAARVRRFRYVPVESWLPAQRDPAAGDLFSTRIQESFFRAQMSAQIALRVHRLLDLPAFLLAAGADSEAHLTYLPGLLTLLTISGRYVEEWVRVFYASVWIDPDHHWMRFRFEREDVTITASQIRQLFGFPESTTRLHSLCYGSSDPPRRPHGGVAPGTAHVAGSVPPAFHRWVATFTSRLYYSSKAEDAAFRQFDTQGTAADDDDDDFGDRQDALQQQLLQDRAESRAFMALMLQHSGISAPPVQSAPPPPLHAPVVPSILSGPPVGTSPLRPVTLAFTSPVLNSVCPQPPVPPASAVTTTAVAVSVIASVLVAPAARPQSESVPAPASTVDPGSETDSDPPPAFALLPRPRPDAPPQPPPASGV

SEQ ID NO: 62014 - protein, 33 aa, Zea mays
  Coding DNA Sequence Number=SeqID_18639
MAHRTVRGLDAFKVLRVDRSPGASPDDVESPRN

SEQ ID NO: 62015 - protein, 368 aa, Zea mays
  Coding DNA Sequence Number=SeqID_18640
  Gene Ontology: Mol. function=hydrolase activity; Cellular component =cytoplasm; Biological process=fatty acid metabolic process
  Homolog annotation: Hit_ID=Q84VJ1; Match level="QueryCoverage=55%, HitCoverage=64%, E-value=1e-104, Identity=85%"; Hit description =Biostress-resistance-related protein
  Pfam annotation: Domain name=Abhydrolase_2; Domain location=144-366; Score=57.7; E_value=4.1e-14; Accession=PF02230.7; Description =PhospholipaseCarboxylesterase
MVICDHIRKREDRSSREYSTRCSAEKPVLPNAEAPPCRTHRFPRAHRAMRPSPHHPKRRTPFPPPKSPLFPDPQAPVAAPSHARARRVAFICPPAARNSDAEPSLSLGLQQRWRKRGGGAAIVRGMSYGGSSSLAPGAKRPFEYGRTHVVRPKGTHKATIVWLHGLGDNGTSWSQLLETLPLPNIKWICPTAPSRPVSLFGGFPCTAWFDVADLSEDAPDDTEGMDASAAHVANLLSTEPADIKLGVGGFSMGAATALYSATCFAHGKYGNGNPYPVNLSLAVGLSGWLPCARTLKNRIEASPEAAQRASTIPLLLCHGKGAYMFYCVSVDAFSERQILKKNRRRCSLHRGGRSARGAGRSAAWCEAR

SEQ ID NO: 62016 - protein, 72 aa, Zea mays
  Coding DNA Sequence Number=SeqID_18641
MEDGCHRGRGRPAKGEKKGVAAKRGGGLPRLDYNVIDVGLDRPANVFAEHMVHAPLASRKDRVSHPAVESTI

SEQ ID NO: 62017 - protein, 211 aa, Zea mays
  Coding DNA Sequence Number=SeqID_18642
  Gene Ontology: Mol. function=protein disulfide oxidoreductase activity; Cellular component=extracellular region; Biological process=cell redox homeostasis
  Homolog annotation: Hit_ID=Q0JM76; Match level="QueryCoverage=64%, HitCoverage=74%, E-value=2e-47, Identity=70%"; Hit description =Monothiol glutaredoxin-S4 precursor
  Pfam annotation: Domain name=Glutaredoxin; Domain location=89-152; Score=29.3; E_value=1.4e-05; Accession=PF00462.15; Description =Glutaredoxin
  Subcellular localization annotation: CTP_CleavageSite=18; ConfidenceScore=5.53e-01
MARSLSTALVRGLMRSSRASTSAAVSRPAIQQFMNYSSGLSGTPNANGDSVTTRVAADHDTHQDFQPTSKSSDMSFSDIVAQDVKEHPVVIYMKGYPDAPRCGFSALAVKVLQQYGVPISARDILSDLKLKESVKAYRYSVVTACVSKGNSTKRRETRSGKCQFGIIGARNSKDKPSKRASVQPSSWRRQANATMQDVQAQLSLACGGRHT

SEQ ID NO: 62018 - protein, 99 aa, Zea mays
  Coding DNA Sequence Number=SeqID_18643
  Gene Ontology: Mol. function=protein kinase activity; Biological process=protein amino acid phosphorylation
  Homolog annotation: Hit_ID=Q7XIR5; Match level="QueryCoverage=79%, HitCoverage=24%, E-value=7e-19, Identity=52%"; Hit description =Serine/threonine-protein kinase bub1,checkpoint-associated-like protein
MARIIPPPDDSTIQVEEEVDTYDLYVIVHMTLHGSGMSVEKVPKIGGGYNYQPKQLFKRYWNVDMWQKLFSNDSDVATLQSLRSVFLGYMCSNQELTTS

SEQ ID NO: 62019 - protein, 131 aa, Zea mays
  Coding DNA Sequence Number=SeqID_18644
  Homolog annotation: Hit_ID=A2WLM0; Match level="QueryCoverage=95%, HitCoverage=18%, E-value=7e-25, Identity=84%"; Hit description =Putative uncharacterized protein
RQGANVWRFLQAISRRHDLPESLKKLKCRTLIFVGENSQFHADAVHMTTKLDRRYSALVELLDKRQGANVWRFLQAISRRHDLTESLKKHKCRTLIFVGENSQFHADAVQMTTKLDRRYCALVEVVELLQG

SEQ ID NO: 62020 - protein, 139 aa, Zea mays
  Coding DNA Sequence Number=SeqID_18645
  Gene Ontology: Mol. function=hydrogen ion transmembrane transporter activity; Cellular component=proton-transporting ATP synthase complex, coupling factor F(o); Biological process=proton transport
  Homolog annotation: Hit_ID=A6N1J4; Match level="QueryCoverage=49%, HitCoverage=65%, E-value=1e-27, Identity=88%"; Hit description =Mitochondrial ATP synthase 24 kDa subunit
MEFQVTLEESVDPRRTRCSRILIRDSEEFQPVVPVVKAEPLKNQWADEDVEEDDVKESWEEEEEEAPDCQKFDKINAKLGIRKEDLPKIEQELELEIAKSELTELKKECVEAMETQLKREEFQDEEMPDVRKQDIRNFL

SEQ ID NO: 62021 - protein, 353 aa, Zea mays
  Coding DNA Sequence Number=SeqID_18646
  Pfam annotation: Domain name=zf-CCHC; Domain location=101-118; Score =21.3; E_value=0.00091; Accession=PF00098.14; Description=Zinc knuckle
MNPNGNEVNDANDNIPTLTTMNEKNESQRYSMNGMKNNKRNRKIFGYMISPPQPQAKATKHMDTQTEESSQAQLYEIQTPNQPSPPAGQAKLSRKELKARSACYYCKNEGHLIGECPKKRLDRIKKKAAKHYLSNSLEDPPFYEYDDEGRLINSPASSFNSLLPLRQPCARPAPVDSIKPVSSPLLSPPLLLQPPLTDSFSLAINGHYLQFLISQTSSLLRQAYKLCRCSLALYLALATPYCSLRRALCPLLLANVVMPCCSASLPSSQREVLCCRHSPPAVILVHARSSSLVYSPESVSYAPRCLLSSFRPPELLSPEHSMLLRQLPCFSSYEALVTRVSSEFAAATSSPYA

SEQ ID NO: 62022 - protein, 365 aa, Zea mays
  Coding DNA Sequence Number=SeqID_18647
MAGKLSEPLHRVLPKNDGQRLLQTPSSSCGCKLERHDPDRLERSRVAGSREGASCHASVCIVFRSFPLALLGVAAITASRIVTLLKRPIIRSFSCFGCLILRYELSGVLFFDLVMTTNIMAPVSLLAHLALQGILPHGYAGARAFGTFSSCDLGPHPEEGSKAKNLLGVEDDRGAKDKCHGVVMNQHCNPYLIAPPAVLTRCCLFVNPVPVQLQWNSIKPVSSPLLSPPLLLQPTLTDSFSLANNGDYLQFLISQTSSLLRQAYKLCRCSLALYLALATPNCTLRRALCPLLLANVVTPCCSASLPSSQREVLCCRHSPPAVILVHARSSSLVYSPESVSYAPRCLLSSFRPPELPSLEHSTLLR

SEQ ID NO: 62023 - protein, 262 aa, Zea mays
  Coding DNA Sequence Number=SeqID_18648
  Gene Ontology: Mol. function=RNA-directed DNA polymerase activity; Biological process=RNA-dependent DNA replication
  Homolog annotation: Hit_ID=Q7XBD9; Match level="QueryCoverage=15%, HitCoverage=2%, E-value=1e-08, Identity=72%"; Hit description =Putative gag-pol
MAADALSKLGSSQAQAPPGVFVQEGNSPFIVVYGSEAILPGDLAFGAPRVTFKSIAEAEAPLLERFGAPSHTISGRTPQAITTLRRTFHSHESVQRDGARSAAHASRIPRTPAAVPAAPRRILPAPSILVGSRLPAPASTQQPHADQSRNPVWIRATRIRAPAPSILAGSRLPAPSILASSRLHADAPRGSEQKSRADQSSRADQSSADPSTRSFHPRVSEQKSHNRPTPTRASRSRADPSTRSFHPHVSEQKSRCRPMPTR

SEQ ID NO: 62024 - protein, 241 aa, Zea mays
  Coding DNA Sequence Number=SeqID_18649
  Gene Ontology: Mol. function=microtubule binding; Cellular component =phragmoplast; Biological process=positive regulation of microtubule polymerization
  Homolog annotation: Hit_ID=Q5N7P7; Match level="QueryCoverage=47%, HitCoverage=22%, E-value=2e-40, Identity=60%"; Hit description =Microtubule-associated protein-like
  Subcellular localization annotation: CTP_CleavageSite=22; ConfidenceScore=5.31e-01
MARSRLPRDRWTLWCCRSRLLRPSSSRSRRGRQLSPSTSPWLLKSNQKLQGLREELNVIVPYLEEMRKKEVERWDQFVDVIEQIKKSDRLKQVMEHPNTLHSLCEVLGVDFKQTVNEVHPSLGEADGSKNLSNCTIESLASAASRLRELKVKRMQKLLVSTYRYDGQDFYQFFFSQIMNALAKIMSFSQHITRGLHPFSKWHHIKSNASAICYFRWNGDIRGPGCNSCISKDYYSLYIRGQ

SEQ ID NO: 62025 - protein, 126 aa, Zea mays
  Coding DNA Sequence Number=SeqID_18650
  Subcellular localization annotation: CTP_CleavageSite=63; ConfidenceScore=5.12e-01
MGVTKGCLGGLNCLLNICDCLASVVRSERSLPASINSMLAPLFSSLILRSSVTFFSLYPLLYPAMGKGKRGRGSPRRAGDKRKRDPSPPSEDFGNSEYSEEEVSSESEGSLAFASPPMSSDDSDDS

SEQ ID NO: 62026 - protein, 88 aa, Zea mays
  Coding DNA Sequence Number=SeqID_18651
  Subcellular localization annotation: CTP_CleavageSite=8; ConfidenceScore=5.05e-01
MRRSSRLRSSPRHGALLSRDLTEFRPCSKSPGRALVLRLTPLFPNAESLSAHLPWRVDLVLAGDGRVDHRQLPSLRRARLLRQFIFVE

SEQ ID NO: 62027 - protein, 277 aa, Zea mays
  Coding DNA Sequence Number=SeqID_18652
MRGAWGGHDFVRSLGNVFANAEGDQGRNIGDVVSTMMEKDRQESLRKKRKTPLQLVDPQHDARTGGTCQELSVDDYLVGGVTMFDALTGMPPAGTETRQLVVAPVRPPVDTGASAKGVAVTLPDPWAHFCAIADGGGEIAGTSATEGVVAVVFADQVASGALVNVATSQLRSERRRLEGKIERLRIQHIKVVRDNSVAENKSQNLLDKVAALEKENEDLDHRLNDEKDAAAEAKTEAENASAKAQATHKRAAELELEVKSMRAYRERMEAATHVGVD

SEQ ID NO: 62028 - protein, 395 aa, Zea mays
  Coding DNA Sequence Number=SeqID_18653
  Gene Ontology: Mol. function=protein dimerization activity; Cellular component=nucleus; Biological process=regulation of transcription, DNA-dependent
  Homolog annotation: Hit_ID=Q2QVD7; Match level="QueryCoverage=100%, HitCoverage=100%, E-value=1e-152, Identity=69%"; Hit description =BZIP transcription factor family protein, expressed
  Pfam annotation: Domain name=MFMR; Domain location=1-195; Score =315.4; E_value=1.1e-91; Accession=PF07777.2; Description=G-box binding protein MFMR
  Pfam annotation: Domain name=bZIP_1; Domain location=285-348; Score =89.8; E_value=8.6e-24; Accession=PF00170.12; Description=bZIP transcription factor
  Pfam annotation: Domain name=bZIP_2; Domain location=285-339; Score =33.3; E_value=8.8e-07; Accession=PF07716.6; Description=Basic region leucine zipper
  Pfam module annotation: Pfam domain module=MFMR::bZIP_1::bZIP_2; Domain location=1-195::285-348::285-339
  Subcellular localization annotation: CTP_CleavageSite=57; ConfidenceScore=5.18e-01
MGSSGADTSSKPNKASAPQEQQQPATSGAATPAVYPDWSSFQAYPPIPPHGFFPSPVASSPQGHPYMWGAQPMIPPYGAPPYVMYPPGVYAHPSMASGAHPFTPYAITSPNGNADATGTTAVACDTDGKPSEGKDKSPTKRPKGTLGSLNMLTGKNPSEHGKTSGASANGATSQSGESGSDSSSEGSEGNSHNDSYKHSGQEQDGDVRSSQNGASRSPSEGKFNQAMAIMPMPSSGPVTGPTTNLNIGMDYWANTASSAPVIHGKVTPTTVPGAVVPAEQWIQDERELKRQKRKQSNRESARRSRLRKQAECEELAQRADVLKQENASLRDEVNRIRKEYEELLSKNNSLKVDLQLFNFIMLKYEKLEGKQHKTDEAGLNNKLQHSGNDIQKKGN

SEQ ID NO: 62029 - protein, 118 aa, Zea mays
  Coding DNA Sequence Number=SeqID_18654
MSSDRDLVEEFVAYGVWPLAHGWDPDEVKIRPMPFLGDRMVQSPAFAIDLRGGGDAATLVREVESEGVKIVGKYLSKTELVRSWDIRGSKVRLNRVFELNGLRYGPYPEGGSADVGDD

SEQ ID NO: 62030 - protein, 185 aa, Zea mays
  Coding DNA Sequence Number=SeqID_18655
MECGDLELLSECLGDSSMRLGVPFIAPRQLGAVGGQQGKPKFPSVGWRTGQSGALPDSHCSMSSVDLLPNLAQPTVATSGWLAHRTLSGAHRTLSGAHRTLSGAHRTVWCPQPTVGAGHASPADCEANRCAGGRWLTGQSGAPPYSPVNYSRTPPKSSESGQFAESQLGAPVTVRCTTGQSGVPD

SEQ ID NO: 62031 - protein, 150 aa, Zea mays
  Coding DNA Sequence Number=SeqID_18656
MGENPEKGLTQMYEDGNLQNGIRVQMHQVQFVEIKETTEKGGDGKSKTTNKKRNINDRFMGILCRNGDAAANPPRVELFWKQNPNVNEMKEVRFRNDGHMVTSEWQLAVGVDRWDDRSNGALPLTLRCHRNLFGGTSRIETSGKQRSGSR

SEQ ID NO: 62032 - protein, 746 aa, Zea mays
  Coding DNA Sequence Number=SeqID_18657
  Gene Ontology: Mol. function=calcium ion binding; Cellular component =integral to membrane; Biological process=protein transport
  Homolog annotation: Hit_ID=Q655Y8; Match level="QueryCoverage=80%, HitCoverage=94%, E-value=0.0, Identity=86%"; Hit description =Putative vacuolar sorting receptor protein
  Pfam annotation: Domain name=EGF_CA; Domain location=516-557; Score =5.1; E_value=0.052; Accession=PF07645.6; Description=Calcium binding EGF domain
  Pfam annotation: Domain name=PA; Domain location=55-163; Score=81.1; E_value=3.5e-21; Accession=PF02225.13; Description=PA domain
  Pfam module annotation: Pfam domain module=EGF_CA::PA; Domain location=516-557::55-163
MAAGRAPWLAAGLVAVLMVVAARARFVVEKSSVRVLAPEHIRGHHDAAIGNFGVPDYGGTLTGVVIYPDTKPTGCDDFDAKFKAKSRRPVILLLDRGECYFALKAWNAQRAGAAAVLIADSVDEQLLTMDSPEASPGTEYIDKINIPSALVNRAFGESLKKMAQKVAGAGSEEVVVKLDWRESMPHPDERVEYELWTNSNDECGARCDEQMAFVRGFRGHAQLLERAGYARFTPHYITWYCPEAFRATQQCRSQCINRGRYCAPDPEGDFGAGYEGKDVVVENLRQLCVHRVANETGRPWAWWDYVMDYKIRCSMKEKKYTKTCAEDVVTALGLDLKKVLECMGDPEADADNAVLSKEQEDQIGSGSRGDVTILPTLVINNVQYRGKLERTAVLKAVCAGFKEGTEPRVCLSHDIETNECLHRNGGCWRDEATNVTACQDTYRGRVCECPVVNGVRYEGDGYTDCKAIGPGRCALNNGGCWSATRGHQTFSACTETALTGCRCPPGFHGDGHKCEDLDECREKLACTCPDCQCKNTWGNYECKCKGNQLYIRGEDVCIANSMSKLGWFITIAAVACVLGVGVAGYVFYKYRLRSYMDSEIMSIMSQYMPLDSQNNENQPLRQHDSEALRATARRSRDGSVATTRRPSPKSNEPSTNRDSAEEDEPLYLRERGEIRMGRRRPQQPGADAAGARSVVGTKGERVRVGMAQRLLREVGGGDGARAGMCSGYCARPVAGTAGTTGARVRV

SEQ ID NO: 62033 - protein, 49 aa, Zea mays
  Coding DNA Sequence Number=SeqID_18658
MGDYVSGRVRGYVDCQVHSDHHHYDIKWIQPIPDLARVLEKSLDFYRDP

SEQ ID NO: 62034 - protein, 65 aa, Zea mays
  Coding DNA Sequence Number=SeqID_18659
MALLGCSMKCSGEAVCRGQHAMMPAGCLLCCAAPSAASSTLATVKVALRALQFDEMLSHVDSPCV

SEQ ID NO: 62035 - protein, 199 aa, Zea mays
  Coding DNA Sequence Number=SeqID_18660
MDREPTALHGRGTGRAWLEERGELLVAMGEKKGAPSRELQQWSARLLDCSLWTAEEGRCSGEGHSRLLARARARFVGEGAGNLERLRRGGTLSMGGSRQLGGMELSGHGVSAPAHAQETERRSCCAEKADQGMEKGTEHMGSRRHGRGCWPSREEQGEGWASMAGASAGGGRRLLVAAEKKNRGGSEKLPICKGERSYL

SEQ ID NO: 62036 - protein, 128 aa, Zea mays
  Coding DNA Sequence Number=SeqID_18661
MDYPNRLYLTETCADQDSATPHNDERATSMCTCLGPMVSHVTRTRYVGRYSRSTTTISICACLGANSQLTRGNVSDKGEALEEQSKEREQFGPDDGPDGSRRSTRPRRSNKMVTGPTWINFMEVLRET

SEQ ID NO: 62037 - protein, 136 aa, Zea mays
  Coding DNA Sequence Number=SeqID_18662
MRRRISCRPVESAPAPLGCAEEDLDFVTTQCRSRPKTKRSPIRFRRGDADGPYNLSVHPYLPMEPSQESAESGSTRLSGGAPDSVRCKGERLQFVEIPRKWDKDKQSKTSWYSSGSLDRLRGVDCNPRPLGRHNVE

SEQ ID NO: 62038 - protein, 185 aa, Zea mays
  Coding DNA Sequence Number=SeqID_18663
  Homolog annotation: Hit_ID=A3AYH5; Match level="QueryCoverage=67%, HitCoverage=27%, E-value=6e-34, Identity=64%"; Hit description =Putative uncharacterized protein
MAGDPPTAAEKETLVSSFLEIAAGQTPETATQFLLMTSWHLEEALQLFYIDGESALTPAHPVAPPPTSAAASALAAAAGAEEAMRFAPPPAAALGDAMLHGFGVGEDDDVRAPLPVKRETLYGEGIVSVFYLNLPWWRAILWSQVLRGIVAVSLLHLVSDASNSLVFFCGVGHSTAAQKHAIYRL

SEQ ID NO: 62039 - protein, 362 aa, Zea mays
  Coding DNA Sequence Number=SeqID_18664
  Gene Ontology: Mol. function=phosphatidate cytidylyltransferase activity; Cellular component=integral to membrane; Biological process=phospholipid biosynthetic process
  Homolog annotation: Hit_ID=Q2N2K4; Match level="QueryCoverage=61%, HitCoverage=73%, E-value=2e-93, Identity=82%"; Hit description =Probable phytol kinase, chloroplast precursor
  Pfam annotation: Domain name=CTP_transf_1; Domain location=94-298; Score=11.7; E_value=6.1e-06; Accession=PF01148.11; Description =Cytidylyltransferase family
  Subcellular localization annotation: CTP_CleavageSite=49; ConfidenceScore=5.71e-01
MAAAAAWTGAASPNSLLLSRSPPHAAALAPSPGSSMRRRLLLGVGTPAVAALAAAAPPAVLQDGAVTVLITAGAYSLVRVFDELTERRLIEKSLSRKVVHVLSGVLFMSSWPLFSNSTEARYFAAVVPFLNSMRLLIYGLRLYTDEALVKSVTREGKPEELLRGPLYYVLVLLFSVLVFWRESPIGIVSLSMMSGGDGFADIVGRRYGSAKLPFNRKKSWAGSISMFISGFLLSAMMMLYFSSLGYIDVIWEEALGKLALVALAATVVECVPVTEVVDDNISVPLATMLGLEEGAVIIDGQPSRSRMGSGKHDPTTNEPIWHIVFYGSCLSDPSAQAPPFGLGPEWYTLGSGQSIVQELESA

SEQ ID NO: 62040 - protein, 222 aa, Zea mays
  Coding DNA Sequence Number=SeqID_18665
MDGKHTLQDNPILQARILTLEGSSSTLGVDNTFGEVRPSLGRRRGPKISTLKDGVITKPGPSLLGSSPGIRLGQAARLVTPRPRPAVHRGHQPDPRPRQASTATMNKNTGIQSAITNGTPVPPPQQGPGKGDTPKRILPCEGTRLRASLLIRGSKAGPSEGFDSRLRSRGPYTHYWSEVRRSAPRKGSTAASGYSGSAPTTDQGFEGWPPKGSQSPQTQSEG

SEQ ID NO: 62041 - protein, 258 aa, Zea mays
  Coding DNA Sequence Number=SeqID_18666
MGLLGIYSLGSDPYETDLESYVCHIDLRPGKVRCYHVPGTKQVEHVPPSAIRAPNLERSRGATYVYSSCPFSPLRRRYGRRELFKITTVVPFFFLSVSFNALSLRCARAAVLPTAVRTPPADVAAPPPSRRRPALPPPRSPAAPPPSRRPAAVPAPPSHRSPSRRTEPTAVAPAHGCRSHAAPPRAHGHRSRPRPGARRPPPNAVARPTPSLAAVHGSRGFPTSTSSTDVVHHRRPRKAFKAIRSGISMVKMLNEQQK

SEQ ID NO: 62042 - protein, 251 aa, Zea mays
  Coding DNA Sequence Number=SeqID_18667
  Gene Ontology: Mol. function=carboxylesterase activity; Cellular component=cytoplasm; Biological process=fatty acid metabolic process
  Homolog annotation: Hit_ID=A2XYS5; Match level="QueryCoverage=86%, HitCoverage=87%, E-value=1e-64, Identity=62%"; Hit description =Putative uncharacterized protein
  Pfam annotation: Domain name=Abhydrolase_2; Domain location=1-227; Score=68.6; E_value=2.1e-17; Accession=PF02230.7; Description =PhospholipaseCarboxylesterase
  Subcellular localization annotation: CTP_CleavageSite=28; ConfidenceScore=5.02e-01
MAATAESPSTGGFVLWLHGSGGSGDESRAQVAPYFSDPGVASSVRLSFPTAPTSFIPCYGDVVITAWFGISEVPITAKTVRDEKEVLKAVEYVHELIDKEVAAGTSPSNIFVCGMSQGGALAIASALLYPKTLGGCAVFSGSVPPNKSFADKVSPEARKTPVLWFHGMADGVVLFEAGHAGCAFLEELGMSCEFKFSQSSTQAYPTLGHSLVDEELQYFQQWILIRLGMAASGAAETARPSSSSNHNDHLQ

SEQ ID NO: 62043 - protein, 296 aa, Zea mays
  Coding DNA Sequence Number=SeqID_18668
  Gene Ontology: Mol. function=histidinol dehydrogenase activity; Cellular component=cytoplasm; Biological process=histidine biosynthetic process
  Homolog annotation: Hit_ID=A2XYS4; Match level="QueryCoverage=86%, HitCoverage=86%, E-value=6e-88, Identity=57%"; Hit description =Putative uncharacterized protein
  Pfam annotation: Domain name=Abhydrolase_2; Domain location=32-288; Score=122.6; E_value=1.2e-33; Accession=PF02230.7; Description =PhospholipaseCarboxylesterase
  Pfam annotation: Domain name=Abhydrolase_3; Domain location=145-274; Score=-91.2; E_value=0.091; Accession=PF07859.4; Description =alphabeta hydrolase fold
  Pfam annotation: Domain name=Peptidase_S9; Domain location=134-291; Score=-60.5; E_value=0.0046; Accession=PF00326.12; Description =Prolyl oligopeptidase family
  Pfam module annotation: Pfam domain module=Abhydrolase_2::Abhydrolase_ 3::Peptidase_S9; Domain location=32-288::145-274::134-291
  Subcellular localization annotation: CTP_CleavageSite=40; ConfidenceScore=5.40e-01
MSSLIRLLFTLAAAIGAASLLVASLRRRAPPPGLPAKLVPSSHMAGRNRSFVLWLHGLGDSGPANEPIRNLFSAPEFRLAKWSFPSAPRAPVSCNSELPPPYTLLNPCMYNCFKSTFADKESLSPRTDGFVMPSWFDIHELPMSAGSPQDETGVLKAVEKVHAMIDREVADGIHPENIFVCGFSQGGALTLASVLLYPKKLGGGAVFSGWVPFSSSVTERISPEARKTPFLWSHGMADKVVLFEAGQAGPPFLQSAGVNCEFKAYPDLGHSLSQEELLYLESWIKSRLNASQEKDG

SEQ ID NO: 62044 - protein, 100 aa, Zea mays
  Coding DNA Sequence Number=SeqID_18669
  Subcellular localization annotation: CTP_CleavageSite=20; ConfidenceScore=5.26e-01
MQTNGSAKGAECLRSGGGTSSAVVGAGAFPLARKDGVTVRLDSRSLTSLRSLGQWALALASQQVEVQGRSSTELMGTHPMLGGIGCLLRLCSLREGVGVE

SEQ ID NO: 62045 - protein, 56 aa, Zea mays
  Coding DNA Sequence Number=SeqID_18670
MTLGGVGTDSSIKVKGDTSIESTIRTKATAYHPTRVTAAWARVIRASVPYRIAHVL

SEQ ID NO: 62046 - protein, 152 aa, Zea mays
  Coding DNA Sequence Number=SeqID_18671
MGKSKKGGSSSHHSGHKRKREPSPPSEDFGNSEYSEEEFSSESEGSPVYTSPPASSNDSDDSQGIAAEVWTYIRTVERSGLEGLDESEVSSDEENSSDSSEEESSGDGDDEGDGDDGGDGDGGKGDDKGDGDGGGDKGDGGSSKASGKAPLV

SEQ ID NO: 62047 - protein, 249 aa, Zea mays
  Coding DNA Sequence Number=SeqID_18672
ERAETARAQAARGERVDDFGALNSVLPDPEPTPAEAVSGAALEPTPETAEDAPDAPASAAAGEDLPPKVAEGAPDAPAAATPSAEDPTAVVAETTAEATVEPTAEAPATSGPSQVQDFGPAHATATTKFLAASTAEGGNECGGSASEFFDFADSGSSVEWTEESSEEDLDYFAALDVAAAEASPHTADARDVPVVEMVASDAPGANWVTAPWDPSPEFSFCDRPPHAVAGPLRDPINRGWDPVIPPPLR

SEQ ID NO: 62048 - protein, 132 aa, Zea mays
  Coding DNA Sequence Number=SeqID_18673
MALWFVSVVGEAQRLGWRAREGGFGMWAEMVQSGPGKAHKMRITLYYSLYTILSITNPTPLKNNLVLEISKQKGYTEVRREMVRVRLADGKKNLVREDSVQGDAIVDITPQLITLNQRSKSNKYHKNKHSSS

SEQ ID NO: 62049 - protein, 19 aa, Zea mays
  Coding DNA Sequence Number=SeqID_18674
MVKKQKGRGFFAKVIGVVC

SEQ ID NO: 62050 - protein, 104 aa, Zea mays
  Coding DNA Sequence Number=SeqID_18675
MDRAIPAISDVKPYLDVTARVSPSQPHPSPDLPRRRHIPSRDLRRGLPFRLWWVQVRSLHDGQSGSVGHCSLEEMVAGITWPSTLPPGWTVEWDPASAEEEHEE

SEQ ID NO: 62051 - protein, 174 aa, Zea mays
  Coding DNA Sequence Number=SeqID_18676
MTSHGSSDEGNAQSHTDGLAREGFPRTLWEVLQGASYPTPPQYEVQLFEKHRVPRCRATKITLDNREELVVDLSTEMVEKDLQVEQLSNEIQELEELVGTRENTIEVLEDQLINTQQQLAEANKHLDMHHQEIQDMEANEDVDIEGGEEPASSLDTASSGRPPSPESSVASLAH

SEQ ID NO: 62052 - protein, 54 aa, Zea mays
  Coding DNA Sequence Number=SeqID_18677
MGKPVPSLLMLLLSGGLRFLPKHNGLRLGLPLKYFSRHSRRFASLVRGGFELQL

SEQ ID NO: 62053 - protein, 58 aa, Zea mays
  Coding DNA Sequence Number=SeqID_18678
  Subcellular localization annotation: CTP_CleavageSite=32; ConfidenceScore=5.23e-01
MTGMTGGTQPTATHAQRRVRQVGPNRQCSTCAAAMLAACVLRRLGSGPHAPVRYDYGK

SEQ ID NO: 62054 - protein, 176 aa, Zea mays
  Coding DNA Sequence Number=SeqID_18679
MLCVRLKLVLLECSAGWLGQEDEVPADSASGTDLLLTDCSGDSAADDEGTASETADAETYWNMVLTEAISEFFPRDGVGVGMGGEIGLPPRLRVVAAVAGAAEWWLESDRWLELPESASRTSARWSSGARVAAAVAGVPHLAVLPALAEHAFLLCGCSLTSAECNHTSELILQLAA

SEQ ID NO: 62055 - protein, 277 aa, Zea mays
  Coding DNA Sequence Number=SeqID_18680
GGPRNAREDMSARNWAETHWIARSTRGGGRPKSGEVDLGPPVKSGRVRGLGKLHGLLAELAEALACPEDGWNGLATVAEALAAMAGGIELAGAKERWLAGEATVEHVFPLPLPLFKRRLGANLREFGWYPETISAAKRGSATKRSTPRPWRAETTAKATACERDPHRRPISVHLPSTFTIPDEPPCSLSLGFVRAWRRLVSPGPRIGYLYRRPCLHWRQILLRPELHAAEKTDPPRAVDEYGWVTQGQRRRSADEEETGSWKVDRPLSPWVAESEFS

SEQ ID NO: 62056 - protein, 90 aa, Zea mays
  Coding DNA Sequence Number=SeqID_18681
MTVWPRRCASGYGDWGSNSAPTSSPARDLSLYIGIHVPLGMNRNAGEDHNAGSPVAGSVIEPIVVVRGNEMVLVAHPGKWEVAAHPPSLS

SEQ ID NO: 62057 - protein, 94 aa, Zea mays
  Coding DNA Sequence Number=SeqID_18682
MGCHTTWASRLGEDVGWRDFIVGLRLAVRRTKGDLRRSSSFRCAVKIISPSLFLYGDVDYRVIVDHCSLWSFGISSTNCAGQNVIGFLPALLLH

SEQ ID NO: 62058 - protein, 96 aa, Zea mays
  Coding DNA Sequence Number=SeqID_18683
MPKASSTELVESQANKGKIAEASKLQSEAETKPAEVETAASWASAEAGPSEPADKQPSEFEEKAAEEEAIEQSFPEKTPASGQRQKNEKLNTMPRS

SEQ ID NO: 62059 - protein, 142 aa, Zea mays
  Coding DNA Sequence Number=SeqID_18684
MRLILRYLFLTCGGCETARRLRIFTHKSCYPSAKRWPIPYTSTEEARQEGGGTGTEQTQEPPSDVEKKVLPEEANGLGRSRFLGPPSLICCNLRSKGEEASTRFLYPLYESVPAEEENDPPQDRRGGSDMGVWLSSSPWGGW

SEQ ID NO: 62060 - protein, 127 aa, Zea mays
  Coding DNA Sequence Number=SeqID_18685
MPRRGRAGPSRLRGAAPRRGPTAQGADRAADTHTAHEGHRLRAMAAPCAANTREESCARAAGWPCGQGATPDGAAVSSSVGRAPRAAAGRATCQAARDHAEEVREKGREGEGRGGFTSTAQASSAVD

SEQ ID NO: 62061 - protein, 59 aa, Zea mays
  Coding DNA Sequence Number=SeqID_18686
MEKLKRRPQGDAEHDEATKSRSSGSAAFDDNASVSIKKQRYASLCTKRREGVFRLQLKR

SEQ ID NO: 62062 - protein, 69 aa, Zea mays
  Coding DNA Sequence Number=SeqID_18687
MGIWSRIETVCLARQTCVINDVDRKPSSCFRLSRRISQGTLINRVMRKTSQVDPKRGLLRMVMLMDEPA

SEQ ID NO: 62063 - protein, 141 aa, Zea mays
  Coding DNA Sequence Number=SeqID_18688
MEKTRARLWELQAKRAQGSWARAQNRGREGREEAGAVARRSRARRAEGFARSHGRTRGSTRMEMSAHRGRSRGRERSSWAHRENAPWLRELGTQERRAEEALRARIRRRGRKKEERLSGGEETRLGRDSSWHRRTPWEQWS

SEQ ID NO: 62064 - protein, 25 aa, Zea mays
  Coding DNA Sequence Number=SeqID_18689
MTSTGNRHRASDYRVKLVRVIGVVC

SEQ ID NO: 62065 - protein, 160 aa, Zea mays
  Coding DNA Sequence Number=SeqID_18690
MEKTRAELRELQAKRAQGSWARARNRGREGREEAGAVARRSRARRAEGFARSHGRTRGSTRREMSTQRGRSRGRERSSWARRENAPWLRELGTQECRAEEALRAGIWRRGRKKEERMSGGEETRLGRDSSWHRRTPWEQWSWALGSLAGWDKHQRRAADR

SEQ ID NO: 62066 - protein, 933 aa, Zea mays
  Coding DNA Sequence Number=SeqID_18691
  Gene Ontology: Mol. function=cysteine-type peptidase activity; Cellular component=transcription factor TFIID complex; Biological process=ubiquitin-dependent protein catabolic process
  Homolog annotation: Hit_ID=A2YID1; Match level="QueryCoverage=94%, HitCoverage=87%, E-value=0.0, Identity=69%"; Hit description =Ubiquitin carboxyl-terminal hydrolase
  Pfam annotation: Domain name=DUF1055; Domain location=95-244; Score= -53.6; E_value=0.1; Accession=PF06337.3; Description=Domain of Unknown Function (DUF1055)
  Pfam annotation: Domain name=UCH; Domain location=274-930; Score =358.1; E_value=1.4e-104; Accession=PF00443.20; Description=Ubiquitin carboxyl-terminal hydrolase
  Pfam module annotation: Pfam domain module=DUF1055::UCH; Domain location=95-244::274-930
  Subcellular localization annotation: CTP_CleavageSite=43; ConfidenceScore=5.46e-01
MATAATASHPASASTSGRDALAAASSSPAAVCLVPFRWWARVREEEAAGGVQYAATAAASPSYYGLRLLHSLLHPDLVLRLERGECRAGGGNGGGRSYALVPADELSRALARFSVFTRVSSNVLSLSALPQVQSRQNSGLGLQNKHSFAGDSAGAYPLVLRISVRETSILTLKISKKDNPFENYKRANKIFNVDSQPVHVWDFSGQTNLILMNEWNRLHDCCHADQENLLEVQVYAMSDSLTSKIGGTNKENYGDISDMNSDSSYRSFGRAGSMGLIGLENLGNTCFMNSSIQCLAHTPKLVEYFLGDYAKNINRTNPLGLNGELALAFGELLRSLWTTDGKPVPPHYFKEKIACFAPQFGGFNQHDSQELLAFLLDGLHEDLNQVKCKPYEEAKDASGRPDEEVADEYWSNHLARNDSVIVDTCHGQYKSTLTCPTCSKTSVTFDPFMYLSLPVPSTAKRVMTVTVFSTDGSREPCSYDVSVPKFGTLSDLVQALSIVCLLGDDEILLVTEVYNNCIIRYLEEPSDSVSLLRDGDKLAAYRLPKRHEKSPLVVFTHQHFVQHSSDGNLTPQMREFEAPLLAALPEEISGLSLQDIYLKLLSPFQLSNGASSLNDCMESNSDSVDTPSDSGSINFQNSQLEDGPESNHCSASECEVTKGPDDLYDGVSGSNKEAHMDFEFYLKSERGEGQQQKIEINELHLLLETAPSRLHVNVHWLQNASRKYATSMLNNLPEIHKLELIPKGTEDSVALHGCLEAFLKEEPLGPEDMWYCPRCKKHQQAMKKLDLWRLPEVLVIHLKRFSYTQFTRNKLETFVDFPTVDLDLSSYVADKSEQPSSHYRLYAVSNHYGNMGGGHYTASIYVSPSTRSVESLSVLSPQTVFGSVLIPRLTIKAGCWLHEEGKGWYKFDDDCVTPMSEDSIKTPAAYVLFYRRE

SEQ ID NO: 62067 - protein, 373 aa, Zea mays
  Coding DNA Sequence Number=SeqID_18692
MTTSLVVERSESGCSLPPALSFKDGRRASTSLAEEANFGYAGSAGCRRRQLPRVWLLGLDGFGAASGAASCCLVGVWLSVHRTGDGRVVRRSATSTASPAPPAVLGVVQDVVHRGGGDRVLGWSCPHSYSEDESDDLFAHAEAAAAHRCGEAAAAVGAEVVASAGEPLGASYPTALLVWRVVERAGPRYGTRLSGYTGFGPPQETNAKRPHRLRTTPWNGVPFSRAGSQAVGPSNFRIGGPKLQAWLLNSDVVMSRQMGIPGPIGNLEGFPEEGMLQLRRPGSTGPSGVRLVVSTGVGASSEDILQVPLGRLIPEVPFSRGHLAIIHLFFAKSATRWGAIFGRLLVSLTDTFCEVNDLATLHGAVVTVGVHRA

SEQ ID NO: 62068 - protein, 152 aa, Zea mays
  Coding DNA Sequence Number=SeqID_18693
  Subcellular localization annotation: CTP_CleavageSite=56; ConfidenceScore=5.41e-01
MAIATNVHDHRGVTAAHALCTPTVTTAPWSVARSLTSQNVSVSDTSSLPKMAPHLVADLAKKRLPTGYMQEWPQPKTRAPMSNADGDLGLVPSPTPSLQFRAPDTKVGRSDSLGAGSRERDPVPWGGPEPVWPLSLVPYPKACTLHHPVMGT

SEQ ID NO: 62069 - protein, 25 aa, Zea mays
  Coding DNA Sequence Number=SeqID_18694
EIVDEAFLPPFSKGSKDFAPMKKAL

SEQ ID NO: 62070 - protein, 400 aa, Zea mays
  Coding DNA Sequence Number=SeqID_18695
  Gene Ontology: Mol. function=chromatin binding; Cellular component =signal recognition particle, endoplasmic reticulum targeting; Biological process=chromatin assembly or disassembly
  Homolog annotation: Hit_ID=Q8LSQ2; Match level="QueryCoverage=94%, HitCoverage=96%, E-value=1e-143, Identity=68%"; Hit description =Probable signal recognition particle 43 kDa protein, chloroplast precursor
  Pfam annotation: Domain name=Ank; Domain location=123-158; Score=3.3; E_value=11; Accession=PF00023.21; Description=Ankyrin repeat
  Pfam annotation: Domain name=Ank; Domain location=159-191; Score =17.5; E_value=0.052; Accession=PF00023.21; Description=Ankyrin repeat
  Pfam annotation: Domain name=Ank; Domain location=194-226; Score =34.7; E_value=3.4e-07; Accession=PF00023.21; Description=Ankyrin repeat
  Pfam annotation: Domain name=Chromo; Domain location=271-317; Score =2.8; E_value=0.27; Accession=PF00385.15; Description='chromo' (CHRromatin Organisation MOd
  Pfam annotation: Domain name=Chromo; Domain location=321-374; Score =38.6; E_value=2.3e-08; Accession=PF00385.15; Description='chromo' (CHRromatin Organisation MOd
  Pfam annotation: Domain name=Chromo; Domain location=68-127; Score =9.4; E_value=0.04; Accession=PF00385.15; Description='chromo' (CHRromatin Organisation MOd
  Pfam module annotation: Pfam domain module=Ank::Ank::Ank::Chromo::Chro mo::Chromo; Domain location=123-158::159-191::194-226::271-317::321 -374::68-127
  Subcellular localization annotation: CTP_CleavageSite=43; ConfidenceScore=5.34e-01
MEAVLRHPSLSRTRPPNLNPPTTPSPSLHAPSLLRLRARRLIAAAVFQDQKPKEPASKGGDDEEEAYGEVDRIVSSRTVSSPVFAEDGSATAAVATEFLVEWKDGHEPSWVPAEAIAADVVAEYETPWWTAAKKADSEALAALLADETLRRDPDAEDAQGRTAAHFAAGLGSEECLRALGAAGADVGRRERAGGGLTPLHMAVGYGRAGAVRALLELGADPEAPDGQGRTPLELVQEVLARAPKGNPATFQLRQGLEAAQKELEKAVYEWAEVEKVIDGRGEGKWREYLVEWRDGGEREWVKAAWVAEDLVSDFEAGLEYAVAEAVLDKRQAATATAEEEDSWEYLVKWVDIEEATWEPAENVDTELVQKFEQQQSGSAGEVDEVVDKVVDYFGNNFVNF

SEQ ID NO: 62071 - protein, 488 aa, Zea mays
  Coding DNA Sequence Number=SeqID_18696
  Subcellular localization annotation: CTP_CleavageSite=40; ConfidenceScore=5.11e-01
MPSHSPLCIAPFHLPSPRMGSARVAFVLLSLEERNFVEVEASRAATSAPPSASRIFIILAGEEAKASRGLPSRGPASRFFLWLLGVETILQLCGGGALQPCWGRRTAAAQSRVQHSVLCPGDGGQPHRGSHNTSYASREVDVTVGAEVVAAGESFSANETVSATRGPTSGSLALISGSRPPRGDTNESLPAVASVLGPSLLLQRSPASHPEFVVPQALRCGGCSYPREWNRSSVCNGTLSADVCSLRLSGPEHWGAKGSHLANKKTNVGFNKRAKGQPKAPLVWRTGLSGVPPDMSGAPEDSSSNSLPSGKSRGNSTIIHRTVRCTPDSVRCSKEERPQELASFGKLQRLLHYNSPDMSGVHRTIRCNYGATTISAPTATCSAFIARQSAQKSGTRVVAHRTLYSTCPVRHRTSRRAQKTELQRSNPNGFGDVAAAPDMSGVHRTVRRGADIFLRGGDLPTVSPSEAGLDSVEGGVDPEGAAAPPTDV

SEQ ID NO: 62072 - protein, 214 aa, Zea mays
  Coding DNA Sequence Number=SeqID_18697
MARDDDAVGGEVQTLGEVRGRVAHRLRGKTVEEVGGSLQGLCPVAGRERRLEEEAAEHIGGGADHAFGSAVLCRGVGARETQLDAVSEEERARGVVIELAAIVTLQSMDRATKLSGYPGEEVCEGGECVRLQPKREGPEKMGKIIQNYQIVFITRKTEYRGGPKITVNQVKSLLSPRRSSKWETRWPRRRCHVVEVVETRTGGGDTLAVEGWSV

SEQ ID NO: 62073 - protein, 67 aa, Zea mays
  Coding DNA Sequence Number=SeqID_18698
MPSYDFVELVNLPLNMFEASANEPWEGVFWTFGSPKLKRLFSRIKLVTKNDLAPRKGLLLGLCFVAE

SEQ ID NO: 62074 - protein, 125 aa, Zea mays
  Coding DNA Sequence Number=SeqID_18699
MAGLFQEKAGSLLESGHGEGVSRVSGRTIRFGRCRLDGINTEPSKTGAHTILQDQRSPGASTTAMATATEQFGLAAMVSDEDSSAARTNTIAVTTPRRIGAGEIGGRTPGIDLYPGHAPTLTGTS

SEQ ID NO: 62075 - protein, 195 aa, Zea mays
  Coding DNA Sequence Number=SeqID_18700
  Gene Ontology: Cellular component=nucleus; Biological process =multicellular organismal development
  Homolog annotation: Hit_ID=Q9LRW1; Match level="QueryCoverage=53%, HitCoverage=38%, E-value=1e-22, Identity=47%"; Hit description =Putative LOB domain-containing protein 22
  Pfam annotation: Domain name=DUF260; Domain location=63-163; Score =120.2; E_value=6.2e-33; Accession=PF03195.5; Description=Protein of unknown function DUF260
  Subcellular localization annotation: CTP_CleavageSite=64; ConfidenceScore=5.86e-01
MPPVAQEGAPTWSLSPGSGAASSASASSNPSSSLSLPPPVPTSSSAPSSSSPPPSPPPSPTSPCAACKHQRRRCLPDCLLKPYFPADEPDMFKNALRMFGVRKLQHMVRSVRPERRDACARAIALESKSRAEDPVRGCSGVIQDLEEQLMDTAVELEVLLRRLDSYRHARDSLPQRPPNPHDAGAAADYSPATLQ

SEQ ID NO: 62076 - protein, 215 aa, Zea mays
  Coding DNA Sequence Number=SeqID_18701
  Homolog annotation: Hit_ID=Q2QMZ1; Match level="QueryCoverage=72%, HitCoverage=14%, E-value=4e-07, Identity=31%"; Hit description=HAT family dimerisation domain containing protein
MAFFYLGLVCTGSSTRERGMGAQGQGGRRGAAVTGWCGTARLGRGRLWRAGLDAVGGEIRVARWAVYEAIRDCMERGTSNAPPTLDEDSPSSDTHLSSTLFTSLVHEQGGTKEVQEWADETVTPTLASGRQDLVHQIGNEKGVKIIDQIEDGEEDDDNDDSTTDPSAGDDDNHGDAGLYGAVESGARGSGTGDWRSSGGSRFTHATEDSYHDAPH

SEQ ID NO: 62077 - protein, 52 aa, Zea mays
  Coding DNA Sequence Number=SeqID_18702
MGLGVCGSLCQVWVRPLGRSGNEIDGFGYDYGAGEDEAVEGDFQEFQDYDKF

SEQ ID NO: 62078 - protein, 247 aa, Zea mays
  Coding DNA Sequence Number=SeqID_18703
  Homolog annotation: Hit_ID=Q8H6I2; Match level="QueryCoverage=100%, HitCoverage=100%, E-value=3e-92, Identity=71%"; Hit description =Putative MURBZC
  Pfam annotation: Domain name=Zea_mays_MuDR; Domain location=50-247; Score=-48.6; E_value=0.043; Accession=PF05928.2; Description=Zea mays MURB-like protein (MuDR)
MESVAELCAQKLSSAVVAARDTLNASAAASVVAGDFCATTSLGNHVVSTLDVLESAVKAEKSAMCSYQQASAAVDCAQETLAKYCEDRILHMILFFKKLRANVVLFIRVISSVYQFILAEQQKMNKKLSHALRYAMSQMSDTAKKLQDTVYFCYTDEDVVDGFMMTQVARSMDELAEILEVTSIDYQVSMMDPTTILEAGYASEDSTLWEDIFRDREIMNQPLEAETLGEHFANWGLSFNEIWDRSV

SEQ ID NO: 62079 - protein, 289 aa, Zea mays
  Coding DNA Sequence Number=SeqID_18704
MTSHGSSDEGNAQSHTDGLAREGFPRILWEVLQGAGYTTPPQYAVQLFEKHRVPRCRVRMTLEPHPLQPGWRSLDSESYGYMAEDTMEAIALHGLTTFCGFHPLELSTHPIGLFPAEKEDDPMWKDRVEHAKDIWAIYPGQTAHLTVRCMNALYRLQVMRGEAMSHLMALLEATKITLDNREELVVDLSTEMVEKDLQVEQLSNEIQELEELVGTRENTIKVLEDQLINTQQQLAEANQHLDMHHQEIQDLEANEDVDIEGGEEPASSLDTAGSGRPPSPESSVASFAH

SEQ ID NO: 62080 - protein, 109 aa, Zea mays
  Coding DNA Sequence Number=SeqID_18705
MTEGKDGLPDLLSTAPSCLGAIKGTPRRMEEHTKHSYNIPKHQDIDLTHSFIVIASRALVECELLELCCELLLRLSCVRCSFPLCSVFFVNFNCKGERLQVVEIPRKRD

SEQ ID NO: 62081 - protein, 175 aa, Zea mays
  Coding DNA Sequence Number=SeqID_18706
  Gene Ontology: Cellular component=endoplasmic reticulum
  Homolog annotation: Hit_ID=A3BM19; Match level="QueryCoverage=30%, HitCoverage=11%, E-value=8e-14, Identity=59%"; Hit description =Putative uncharacterized protein
MGQADPLGQALVLDPGLPPEQLLAPTRGPSPRHARSLPMVGHGWEGLCWPVYGGGGSAGRGHVARGANTGDLWLRYGETDGYPSQKGITYDAHRKDIDITRIVIFGRSLGGVVGAVLSKNNPDKHRVPHRQRGARSLNLKQPAIVPPQPSEATESVEGSCSVVFPDDNVELDPSI

SEQ ID NO: 62082 - protein, 308 aa, Zea mays
  Coding DNA Sequence Number=SeqID_18707
MELLEKLAQPESLNHAIGHNAVLDLSFGVRDNRLSLGGLGDEVGAQEHDAELGEDSCLKDHGEEDMKRIDPDPPGGEAGQTAHNHQKAHQASGEQMAYPWKKLDDRGCRQSPADASPTHAHRNICSYTWRRMLQYHGPVERPSHDHDLDHDHDHVVWEIRDQEMDARGRQQQVHESWRELSLDALLDCLDQSRRGDMKIPGFILGGRTKVMNLNLVAKNIAIRKSKDVSKPPVAHLIPAAFDIEIEIRKVIRTFLISQLDPKGRIELSNNFIIPIDMLMLLGENHRIIKIDMLEGPEPITIDPSITNA

SEQ ID NO: 62083 - protein, 371 aa, Zea mays
  Coding DNA Sequence Number=SeqID_18708
  Homolog annotation: Hit_ID=Q75HB0; Match level="QueryCoverage=43%, HitCoverage=45%, E-value=8e-71, Identity=82%"; Hit description =Expressed protein
  Subcellular localization annotation: CTP_CleavageSite=26; ConfidenceScore=5.17e-01
MHPQQPGPRISALIVPSHTIAQWAPTVDTVSSPPPPWSILRSRFPHARCACLLPPRPPHLPPALALALAAVTISRRYGATPGRDSLLSIEVVVESREVSRFLIPGWVSFGSRSIVQQQHGNYVIARRSIQFISTAKNTEFENCREMQFAAMKRGDLLELCRQHGFATRGSKFVLTCALLNLKCNVLILYITLPFMQLNAMSSFSAGHGHRPKKKVYHREPGLDRAMDLQKKPALLLCLRDLILAQKTGSLLVRDLEKEVGFVQKWNFLSLIERHPNIFHVSGGSASQEPISVTLTEKARKISSEEAEARELMEPILVRNLRKLLMMSMDCQIPLDKIELIQSELGLPNNFKRNLIPRLREIQCLYIEQQRF

SEQ ID NO: 62084 - protein, 34 aa, Zea mays
  Coding DNA Sequence Number=SeqID_18709
MEKPPRYPRGRPSWWGGSLTGMRRDRREWRLRRG

SEQ ID NO: 62085 - protein, 180 aa, Zea mays
  Coding DNA Sequence Number=SeqID_18710
  Gene Ontology: Biological process=response to stress
  Homolog annotation: Hit_ID=A2Y3M2; Match level="QueryCoverage=84%, HitCoverage=84%, E-value=3e-53, Identity=68%"; Hit description =Putative uncharacterized protein
  Pfam annotation: Domain name=Usp; Domain location=18-175; Score=72.5; E_value=1.4e-18; Accession=PF00582.17; Description=Universal stress protein family
MAAEVAGGGAVGAPSSSPRRVVVAVDESEESMHALSWCLSNVVSAGKAAVAPPPSVVLVHARSPRPLYYPTIDGTGTGYVMTQQVVDCMEQYMASAADTVVTKAKTICTAFPDVRVETCVEKGDPRDVICGAAEKAGADMLVMGSHGYGFLQWALMGSVSNHCVQNCKCPVVVVKRPDSA

SEQ ID NO: 62086 - protein, 132 aa, Zea mays
  Coding DNA Sequence Number=SeqID_18711
MSGAPTALWLPTVDFAVEGKKSGTGHCPPLPALNVVRMWCRPPRAEADWPSDVRSYLSGFRPPAGHHTPTSDQAPPSATTRAPVTTHKCPTARTTTPITVKYNNYVKSKGKMTQTEKRNTWKSQIPKFEELF

SEQ ID NO: 62087 - protein, 74 aa, Zea mays
  Coding DNA Sequence Number=SeqID_18712
  Subcellular localization annotation: CTP_CleavageSite=32; ConfidenceScore=5.07e-01
MAAPPTTRPVALTPRLDRWRFWQEQRATLRPRRNNRTKKVSTYQPENLGPDRTPGLRPARMREQPDQPKHYARH

SEQ ID NO: 62088 - protein, 167 aa, Zea mays
  Coding DNA Sequence Number=SeqID_18713
  Gene Ontology: Mol. function=kinase activity; Cellular component =ornithine carbamoyltransferase complex; Biological process=amino acid metabolic process
  Homolog annotation: Hit_ID=Q6QP54; Match level="QueryCoverage=88%, HitCoverage=37%, E-value=1e-11, Identity=38%"; Hit description =Putative kinase
MALPVDVAGLCPRLGDVEAPPKPGSSLSSMAEAESEPLGWARRRSSVETESEPLGRARRRSSAEAESEPLGRAMRRSSAEAESEPLGRARRRSSAEAESEPLGRARRRSSAEAESEPLVGQSGVRRLPGLSPSPSPWSGRAEFAVFWGLARVRALGRAERSSPSSGA

SEQ ID NO: 62089 - protein, 256 aa, Zea mays
  Coding DNA Sequence Number=SeqID_18714
  Gene Ontology: Mol. function=transcription regulator activity; Cellular component=nucleus; Biological process=regulation of transcription
  Homolog annotation: Hit_ID=A7QUD3; Match level="QueryCoverage=79%, HitCoverage=81%, E-value=7e-29, Identity=39%"; Hit description =Chromosome chr11 scaffold_177, whole genome shotgun sequence
  Pfam annotation: Domain name=HLH; Domain location=52-93; Score=17.9; E_value=0.0019; Accession=PF00010.17; Description=Helix-loop-helix DNA-binding domain
MDKYWEETQRYLEYEELSIYLEAQEDAMSCYDSSSPDGSISHSSSSAAACGNKNILMERDRRRKLNDKLYALRSVMDKASIIKDAIEYIQQLQVEERRVLQELRVLDDDTAAAATAQVECCDVDGGLLRREAERAKKMKRAQSVASGAQSAPPPPPPPHVEVLELRVSEVGDHVLVVSVTCRKRRDAMARVCRAIEDLRLRVITANVTSVAGCHVHTVFVEVDKIDHIQVKNMIEAALTLLDAPGSPHSSMSYYET

SEQ ID NO: 62090 - protein, 124 aa, Zea mays
  Coding DNA Sequence Number=SeqID_18715
  Gene Ontology: Mol. function=transferase activity, transferring hexosyl groups; Cellular component=Golgi apparatus; Biological process=carbohydrate biosynthetic process
  Homolog annotation: Hit_ID=Q10LZ0; Match level="QueryCoverage=75%, HitCoverage=14%, E-value=7e-32, Identity=68%"; Hit description =Glycosyl transferase family 8 protein, expressed
MKEPGYFAFHILTDAQNFYAMKHWFARNSYKNAAIRVINYEAIILEKLPKYTIRQLYLPEEFRVLIRSIKRPTENTRMKYLSLFSHSNFVIPEIFNTYLGVIAYGAELCYLGAISYGAEQRVQK

SEQ ID NO: 62091 - protein, 274 aa, Zea mays
  Coding DNA Sequence Number=SeqID_18716
  Homolog annotation: Hit_ID=Q6QP51; Match level="QueryCoverage=20%, HitCoverage=25%, E-value=1e-12, Identity=63%"; Hit description =Putative growth-regulating factor 1
MKILEAEGGAEIAARLASPHPGAGGHRLGAEEAKPPCAVRATAQRLRAFLHFRPDQRVKGRTAMQAACNRTKGAHPFDFDASSMEAQAHTSCNRRAGYYVQETAPPLAPLPCLLDYGTSTATRGNPAHDPTVPTRHISHESISRGRRRDGRYGQKWAGSNGSGRRAEAAVKSSAKLTTGDTFGGRSRRRFTSAIMTASKKGPGKGTPRKGSFFAKEAGPEPPTDQRFEGWPLGRVQQSPQSTWAPRPLLVRGSKAGPSKGFNGRLRPLGLRAHY

SEQ ID NO: 62092 - protein, 217 aa, Zea mays
  Coding DNA Sequence Number=SeqID_18717
  Gene Ontology: Mol. function=anthranilate synthase activity; Cellular component=cyanelle; Biological process=glutamine metabolic process
  Homolog annotation: Hit_ID=A3AUL0; Match level="QueryCoverage=75%, HitCoverage=59%, E-value=1e-65, Identity=77%"; Hit description =Putative uncharacterized protein
  Pfam annotation: Domain name=GATase; Domain location=10-208; Score =78.7; E_value=1.9e-20; Accession=PF00117.19; Description=Glutamine amidotransferase class-I
  Pfam annotation: Domain name=Peptidase_C26; Domain location=15-191; Score=-87.6; E_value=0.0011; Accession=PF07722.4; Description =Peptidase C26
  Pfam module annotation: Pfam domain module=GATase::Peptidase_C26; Domain location=10-208::15-191
MILSTGCPLKVPEGAGTVKVREGKICRALEPLCLRVVAAIIGAAGDAIVHAMFVETILELGPTIPIFGVCMGLQCIGEAFGGKIIRAPSRVMHGKSSPVYYDEELGNALFNGLSNLWYVLLSKAFRVDAALAPFASMDNPFTAVRYHSLVIEQETFPHDALEATAWTEDGLIMAARHKKYKHIQGVQFHPESIITLEGKKIVLNFVRFIEELEKQRS

SEQ ID NO: 62093 - protein, 352 aa, Zea mays
  Coding DNA Sequence Number=SeqID_18718
MDGGNHSRSGESPLPQHFQGLEKGFEVLLSLVRGPMTPGVGGGGDYLLGERWEQLTVIPEVEPPALPPLVRGREDGGDVLRRPRLPQQEGAAAGPHRCTDLPLPRRQGEKLDEEEMSPQIPMGGDPQIPFAHRYKDSGLRDGVGGEVMQLHPIVEQDGPHKAARRHAESPLVKGDEAHDVPRRWGWSDSAHGRNPFWPLLIGERAKQTLADQLFQIARRHRGKGPRVARGDYGHPISHHQNGKGGGARGQERAFSSLKGKCALGPFLSILVIECQHKCFNVNQCPWMNKCKSTTKKQIEEEKRRLGCVQPRDCFGLGAPDCPVVHRTVSGGAPDSVRCARLPRPKSLLSGIC

SEQ ID NO: 62094 - protein, 578 aa, Zea mays
  Coding DNA Sequence Number=SeqID_18719
  Homolog annotation: Hit_ID=A2WV63; Match level="QueryCoverage=49%, HitCoverage=42%, E-value=2e-31, Identity=35%"; Hit description =Putative uncharacterized protein
  Subcellular localization annotation: CTP_CleavageSite=23; ConfidenceScore=5.04e-01
MASPARPAAASVSGAFGLPPDARCSYDQPLPRRREADSRRAQGLQDGRLVRTFVAAYGQPPPPQQQQQQQDGFLYPKDAVVAAVEECTRKQADALLHSLGAIGGRLSQLELYCYKLERSIGELRSDVMDYHSDSNANFKCIDRNLRQVHKSLQLLQDRQDLAETAKELSKLQIAHEAPSQTKGEAAGFPMLAARENGHSTRAPKHEVALLPLHQVNGTMHSPAVPVQVQTSNGFVLQHLVPVALSTQQHEQQQLNQAPVFYVQSRDRAKCTEGKAALEPLVQVVQPLAHSPDAVVQVELPQKASQAAAAELYPQPQTQSHRLQTPTQQVDLHTWHPQQPMVQVQQQQYSIQQVSRHMVVAQQPSSSPQSQLSAPQATPLFPPFSSVKPSSCNTETITRRMAGQPPYSSSQQQYQQQQHEVAHSFYGQGNTVLLPVADHNAQHQQPQPVQLHSQGPSCPPQPGKPSHCSAAPYAVQGNGQTYSSAYKNPSNCPATAAVVALLPQPPAIACMAYHPLGPQVVHNHPFGNTMVETSRSSVVGYPRDQFEMLPAITAAQPVLPVDKLNAGSNVTSSPREWSA

SEQ ID NO: 62095 - protein, 268 aa, Zea mays
  Coding DNA Sequence Number=SeqID_18720
  Gene Ontology: Mol. function=protein binding; Cellular component =integral to membrane; Biological process=protein amino acid phosphorylation
  Homolog annotation: Hit_ID=A3AYI5; Match level="QueryCoverage=89%, HitCoverage=59%, E-value=8e-44, Identity=34%"; Hit description =Putative uncharacterized protein
  Pfam annotation: Domain name=LRR_1; Domain location=102-124; Score =5.7; E_value=27; Accession=PF00560.24; Description=Leucine Rich Repeat
  Pfam annotation: Domain name=LRR_1; Domain location=144-166; Score =3.7; E_value=63; Accession=PF00560.24; Description=Leucine Rich Repeat
  Pfam annotation: Domain name=LRR_1; Domain location=168-190; Score =12.3; E_value=1.6; Accession=PF00560.24; Description=Leucine Rich Repeat
  Pfam annotation: Domain name=LRR_1; Domain location=192-214; Score =8.2; E_value=9.4; Accession=PF00560.24; Description=Leucine Rich Repeat
  Pfam annotation: Domain name=LRR_1; Domain location=52-70; Score=6.4; E_value=20; Accession=PF00560.24; Description=Leucine Rich Repeat
  Pfam annotation: Domain name=LRR_1; Domain location=78-100; Score =9.9; E_value=4.5; Accession=PF00560.24; Description=Leucine Rich Repeat
  Pfam module annotation: Pfam domain module=LRR_1::LRR_1::LRR_1::LRR _1::LRR_1::LRR_1; Domain location=102-124::144-166::168-190::192 -214::52-70::78-100
MESALPRWYGLSRAQTHGTGGRFHEPHGFQRAADPAADFRVRFQRGVHSETVLTELSLDDNYFTGIPTTCSIPDVFGEMRRLDLRNNSLSGEIAIDSSLLPKLNTFDVGTNYLSGAIAPGISVLQHLRNLTSLVLTRNFRGGETMQVLILTNCLLIGVNPTWLQSLGSLNVLEISCNKLDGNIPPWLGKLDNCFNIDLSNNSFSGKLSVSFTQMRSLNSNNGSSKRSPTEGSHCSAIKANPPSSPLDWELWSGFSSCCAYVTVSRIVH

SEQ ID NO: 62096 - protein, 269 aa, Zea mays
  Coding DNA Sequence Number=SeqID_18721
  Gene Ontology: Mol. function=nucleoside-triphosphatase activity; Cellular component=microtubule; Biological process=cell division
  Homolog annotation: Hit_ID=Q5QMP6; Match level="QueryCoverage=97%, HitCoverage=70%, E-value=1e-116, Identity=77%"; Hit description =Vacuolar protein sorting factor 4B-like
  Pfam annotation: Domain name=AAA; Domain location=153-269; Score =51.5; E_value=2.9e-12; Accession=PF00004.20; Description=ATPase family associated with various cellular activities (AAA)
MADGEPSLTRWTFEDFVVHYEARFGLRREADGDDAPPPRGSDHGASRPATARANGGADLAVFEQFERMERKVEISNGAIEDGPLQKSLLPSFESAEMRNLAETLLRDIIRGSPDVKWESIKGLENAKRLLKEAVVMPIKYPKYFTGLLSPWKGILLFGPPGTGKKSFAYSNSPSDAGDSEKLVKVLFELARHHAPSTIFLDEIDAIISQRGEARSEHEASRRLKTELLIQMDGLTKTDELVFVLAATNLPWELDAAMLRRLEKRVSFSK

SEQ ID NO: 62097 - protein, 105 aa, Zea mays
  Coding DNA Sequence Number=SeqID_18722
  Homolog annotation: Hit_ID=Q10BD2; Match level="QueryCoverage=34%, HitCoverage=11%, E-value=3e-07, Identity=72%"; Hit description =Armadillo/beta-catenin-like repeat family protein, expressed
  Subcellular localization annotation: CTP_CleavageSite=57; ConfidenceScore=5.38e-01
MAFDFTPRATLLTVSARCPSSSHLVGAPPSLPPSLGACFLPMIQSVARYVSIHTGLSIVYAWSQGVNHAIIRHNQPEVWAFCLGNGYAGLKDALGSNDSRLQRIC

SEQ ID NO: 62098 - protein, 136 aa, Zea mays
  Coding DNA Sequence Number=SeqID_18723
MYSASAVERATEFCFFEAHDNKDLPKNWQVPDVLSSILIPRLIGAERPSNTEVPEGPGRSRRKAEAPERKRTKGGTQKDGRTGNSKRRAEDRERAKEERGRLGGDPRPGQVHETRSRRPLVPKVIDGFSIRHFLLA

SEQ ID NO: 62099 - protein, 314 aa, Zea mays
  Coding DNA Sequence Number=SeqID_18724
  Subcellular localization annotation: CTP_CleavageSite=46; ConfidenceScore=5.16e-01
MPNREGLPSDCMCTDVSSVRPRHPARAQAGPLGLRVGTSRELLCLRARARPRPRIRRRGGRGLAPAPVHPGTVRARPPDLGGPPRARLHDWLLGDPPGKGAASASDPAQGQARSGPSTRASRRGKGAASASDPAQGRARSGPNTRASRRGACPAARPRRSSSGAAPRLLGALMDGRAPCQCGARCSIVGRAPCLCGASHGWKGPLLVLACSQRWDLGRRGSEREGRGSDPERAREMERSGEETAVEDGKERHRRKPRLLEDGKERRGRAGCEETAAAGGGGWQNRAPLVVDVYTTYLCSGRDKHIMTCLWIIII

SEQ ID NO: 62100 - protein, 233 aa, Zea mays
  Coding DNA Sequence Number=SeqID_18725
  Gene Ontology: Mol. function=small conjugating protein ligase activity; Cellular component=UBC13-MMS2 complex; Biological process =regulation of protein metabolic process
  Homolog annotation: Hit_ID=Q2V4C1; Match level="QueryCoverage=100%, HitCoverage=100%, E-value=2e-49, Identity=91%"; Hit description =Ubiquitin carrier protein
  Pfam annotation: Domain name=UQ_con; Domain location=82-226; Score =137.9; E_value=2.9e-38; Accession=PF00179.17; Description=Ubiquitin -conjugating enzyme
MANSNLPRRIIKETQRLLSEPAPGISASPSEENMRYFNVMILGPAQSPYEECFWAVLWLMSLSFYLQNSVSYVEGQWKPVLKVARGYMASHPFQSSRPRHLNHHMTTIPLLVLGIFVTPNWFPCGVFKLELFLPEEYPMAAPKVRFLTKIYHPNIDKSRTSLLQLGRICLDILKDKWSPALQIRTVLLSIQALLSAPNPDDPLSDNIAKHWKANEVEAVETAKEWTRLYASGA

SEQ ID NO: 62101 - protein, 221 aa, Zea mays
  Coding DNA Sequence Number=SeqID_18726
  Gene Ontology: Mol. function=zinc ion binding; Cellular component =intracellular
  Homolog annotation: Hit_ID=Q5QMP3; Match level="QueryCoverage=100%, HitCoverage=100%, E-value=5e-59, Identity=52%"; Hit description =Protein DEHYDRATION-INDUCED 19 homolog 3
  Pfam annotation: Domain name=Di19; Domain location=38-218; Score =36.8; E_value=3.3e-12; Accession=PF05605.3; Description=Drought induced 19 protein (Di19)
MDSEHWISRLAAAKRYYAAQLGHVDDVPGIGTEEVEMEIEDDGGLEMEMEMALGLGDATWPDVACPYCYEDHDVASLCVHLEEDHPYEPHSANGHRSRRYIIPESHAISALSRDLRGTHLRALLGGGHGHRSSNAVTTNISSDPLLSSFGLGFSPSDAPEPSKSASSIPDGASIRKETPVQPWESSIDSSLTSEEREQKRKQATGRATFVQGLVLSTLFGD

SEQ ID NO: 62102 - protein, 587 aa, Zea mays
  Coding DNA Sequence Number=SeqID_18727
  Gene Ontology: Mol. function=sequence-specific DNA binding; Cellular component=nucleus; Biological process=regulation of transcription, DNA-dependent
  Homolog annotation: Hit_ID=A2WTN2; Match level="QueryCoverage=87%, HitCoverage=33%, E-value=1e-167, Identity=59%"; Hit description =Putative uncharacterized protein
SFDSLVAALDTRGTREAQLRSMLQMIETTFKEAIKRRSASIELSATVYPKNGATDMIRANYHREVGSSSSTPFNDTSDSVTAYSDSFKVELGRNDFEKAAISKRADIFLKWMWRECYNQEETCAMRYGKKRCSELLHSCNCCYQIYLAEERHCSSCHKTFKSIYNFSDHTTQCEEKWRTDPYWKMQIADYSVPIGMAYIPSEALQPFWTDVYRKSWSVKLYATKSIAETFQLLTVLEGAIIPDRLSSDFETTSECLNSQVIAPQNPVLPAGFASVLPWVPDTTSAVMLRVLDLDSAILYVQNQKMERDDGGFMKFPSRYTVVKSKQETIPLEPTGMDLYDGRWLPGSGRRGRGRGSRGGSRGGRGRSRGGRIPRGVSSSSRIEFKDGIAASGRAPRKNARRGRGRGRGRGRRTVRPRQPSVGRGRSIPKENLMGSFSMLTSSKAADIEESPRSSGADEWGLETRMTYTERDENSSGSRYEDNEENGQPMDEDYEEQVPDYSIDYSSGSRHHEMMSMMDHETDEEDEDAEGDENVEEDDADHAVDDADVEMDEGDDEIGDDGEDGGVGGEMTPDEDPDATSYSSDYSE

SEQ ID NO: 62103 - protein, 112 aa, Zea mays
  Coding DNA Sequence Number=SeqID_18728
  Homolog annotation: Hit_ID=O48967; Match level="QueryCoverage=93%, HitCoverage=22%, E-value=4e-23, Identity=55%"; Hit description =Putative uncharacterized protein
MVRIAEHRGETSEDFPMEEEAASSTPQSSRHPTLGAGAVRPARRRTPVQASRTPSEDAPAGALSMARELLHHLPSPMASLGAMRQWRDDMDRLLSMAHTGSIKPKCNTLNLG

SEQ ID NO: 62104 - protein, 158 aa, Zea mays
  Coding DNA Sequence Number=SeqID_18729
  Subcellular localization annotation: CTP_CleavageSite=28; ConfidenceScore=5.10e-01
MQSACNRAKWAHPFDSNAPSMEAQAHMSCNRRAGCYVRATAPPLAPLPRLLDCGTSTTTRGNPAYDPTVPARHIDHGSVSRGRRDRERGHPERDPSPRRKRAPSPPTDQRFEGWPLGGVQQPPQSARAPRPLLVRGSKAGPSEGFNDRLRPLGLRAHY

SEQ ID NO: 62105 - protein, 168 aa, Zea mays
  Coding DNA Sequence Number=SeqID_18730
MNKTPALKVPLQTELRFRPRGYEQPPQRGACGATSSVRLASDLCSSSYGGADGLDGGEASSSCHHVSTDGGVRLSTNAAPASAGRSKAHRQVLTPVLATKARRRTECCILAGQQQFAFPDMAGGCLFRRAGGWFPPPEAGRGGGQPTHAGGRASAHPALRPSKDDEDP

SEQ ID NO: 62106 - protein, 415 aa, Zea mays
  Coding DNA Sequence Number=SeqID_18731
  Homolog annotation: Hit_ID=O40947; Match level="QueryCoverage=35%, HitCoverage=16%, E-value=6e-08, Identity=21%"; Hit description=ORF 73
MTLLEILVRGITGEAFIPESLIPPQGISPLYDNPGLRSAVLALLPTLDESGVAVHQTGGRDPHRGIHIPGAPVGGSQSADVAPWASPAVPSSSDKGKGPASSSSTPDAAGRSEETDRRLRRGSGSNNSRGGSSSSNDNERPASKATGRFTVPSLDPPFACQGLFFFGIRGRSFPADRHAHRMTLVLRWRRRTPRIRLSPSRQHLQIPKFQEIEAAIRREWEALETEHQRLGDWCTQLEKRTKAASWQFASERAELEQECENFKEDIRKVSDREEEVTRKERSLVKKKEHLDQKEEAVTVLHDKLKAYNTVLEKQRDKQVAAEAKLQKLQQELADKDSDIARAEDNLKAREASLAKWATDLTWQEEDLAFREEMWARRNKLLDELELEVEEKGKRLEGKEQALEEQVCQFQAAQAV

SEQ ID NO: 62107 - protein, 238 aa, Zea mays
  Coding DNA Sequence Number=SeqID_18732
MGRPKGTTWRGRIMPPRKHHRVRTSAEEHRTPVSTSPELPRRHDGSPGWVPGPPERGSGLGKVLGQGGPRHRQGSGADTCPDFALRSPLRRRPAAVAWLVARDISQRAEPDARPIRLCSLCIYCGEDTPPATTLTSDAPSQHLMRLVQSAGRRRQGHPADGAPDQSVGEQCARAERRTTLIIPSTRSFPCTPRIRRSQALGHKKIAPAATFVAPSAIFFMSLGPHVGAQYLCACPLQL

SEQ ID NO: 62108 - protein, 45 aa, Zea mays
  Coding DNA Sequence Number=SeqID_18733
MVQALICAPSWIRGSQHEKSAPILVEGDDGDIEIVEFPKGVVASN

SEQ ID NO: 62109 - protein, 187 aa, Zea mays
  Coding DNA Sequence Number=SeqID_18734
  Gene Ontology: Mol. function=protein disulfide oxidoreductase activity; Cellular component=extracellular region; Biological process=cell redox homeostasis
  Homolog annotation: Hit_ID=Q0DAE4; Match level="QueryCoverage=78%, HitCoverage=69%, E-value=7e-36, Identity=57%"; Hit description =Glutaredoxin-C8 precursor
  Pfam annotation: Domain name=Glutaredoxin; Domain location=86-160; Score=57.8; E_value=3.7e-14; Accession=PF00462.15; Description =Glutaredoxin
  Subcellular localization annotation: CTP_CleavageSite=39; ConfidenceScore=5.12e-01
MVALLGRRIGVAAAAAAFIALVAFGSASSSPKSFVKSTVSAHDVVIFSKSYCPYEIHNLDWILYQIKKSPAQFYPSNHVTVIVLYVFLYQSTYSYQHFICLESYRYCKRAKAVFKELELKKEPYVVELDQREDGSEIQDALLEIVGRRTVPQVFVHGKHLGGSDDTVDSYESGKLARLLNIGVKDDL

SEQ ID NO: 62110 - protein, 56 aa, Zea mays
  Coding DNA Sequence Number=SeqID_18735
PESEPWVGRSGVRRLPGLSPSPSPGSGGAELSMAGQWSGEVTAVTSALLAEGRASG

SEQ ID NO: 62111 - protein, 122 aa, Zea mays
  Coding DNA Sequence Number=SeqID_18736
MEYLFDKPCRHQLVNLLAYNSALLLVESAQRLPDGSGPGPNIQRVLGDFSRYVGHVRGTPRKNVGVCVEKVDEHCFLFGVEPETDPDLLGGVAAGVERDGLNRLRWLEVASMSLHVWHLFGE

SEQ ID NO: 62112 - protein, 144 aa, Zea mays
  Coding DNA Sequence Number=SeqID_18737
  Gene Ontology: Mol. function=carboxyl- or carbamoyltransferase activity; Cellular component=ornithine carbamoyltransferase complex; Biological process=amino acid metabolic process
  Homolog annotation: Hit_ID=Q8SA97; Match level="QueryCoverage=92%, HitCoverage=21%, E-value=4e-13, Identity=42%"; Hit description =Ornithine carbamoyltransferase
MALPVDVAGLCPRLGDVEAPPKPGSSLSSMAEAESEPLGRARRRSSAETESEPLGRARRRSAEFVVFRGLARVRALGRAERSSPSSGALPESEPLVGRSGVRRLPGLSPSPSPGSGGAEFTVFPGFARVRALGRAERSSPSSGA

SEQ ID NO: 62113 - protein, 143 aa, Zea mays
  Coding DNA Sequence Number=SeqID_18738
MDVLMIRNLGEDQQGLGKGLGVEEEQQGCPQQEGDQVRLGCGSISGCHKEGHKYFQCKAKTGDKQRQKLNQKSTSQIYNTYINKVDKKAATPYLIKKKKNGKVIAIKANKQANKGKGVKHIWVPKEVISTMKSTKKVWIPKEK

SEQ ID NO: 62114 - protein, 113 aa, Zea mays
  Coding DNA Sequence Number=SeqID_18739
MDLPHLRVDNGVVLEDSLEEFLSTPTPLAESLAFAAGVSFAAPPAPAVQAPAPEGDDPDDSGDNDEDDEDEEEEEDNNNEEANEEQEDKFMGIWPVTEHYTSMFETGHFPNLL

SEQ ID NO: 62115 - protein, 152 aa, Zea mays
  Coding DNA Sequence Number=SeqID_18740
  Homolog annotation: Hit_ID=A2XFR6; Match level="QueryCoverage=95%, HitCoverage=41%, E-value=3e-28, Identity=44%"; Hit description =Putative uncharacterized protein
MDVGDRGFRTLSAHESLTPLSTYAASVSNAARRALWSLSHTYRQQLHDMKCKHLPLRLCGESHTNIVSGEAGEDRLNTLVGVVAGLNTDLDSATLDLSKVHLELEDTHARIAALEAQLEGRDPPEAQVPAMALSPPRKRIHYGEPGSITRLL

SEQ ID NO: 62116 - protein, 144 aa, Zea mays
  Coding DNA Sequence Number=SeqID_18741
  Homolog annotation: Hit_ID=Q337I5; Match level="QueryCoverage=46%, HitCoverage=14%, E-value=5e-14, Identity=59%"; Hit description =Expressed protein
  Subcellular localization annotation: CTP_CleavageSite=65; ConfidenceScore=5.17e-01
MWNYDTLISPNGINLKGLGVTDPSRAHAALPSSAAPRGLRARFAAALEAARGAPPATRPEKLIVVFSHGVSVDIARGLAEGFEAVEDDLLEKFISDSDEENEHGWVVVSLGSSEELRNFRAFERLMSWRVLARFCFHQTSRWTR

SEQ ID NO: 62117 - protein, 107 aa, Zea mays
  Coding DNA Sequence Number=SeqID_18742
  Homolog annotation: Hit_ID=Q8W0X5; Match level="QueryCoverage=29%, HitCoverage=10%, E-value=3e-08, Identity=87%"; Hit description =Putative pol protein
MDVKSAFLNVPIKEEVYVEQPLGFKDDRYLDHTSSDLQESLAATNTTLAILDGELEDANLHEGVDEVVGFVLAQGADRGERLLNFQSGYEFGTGDLPDDVAGGPGGF

SEQ ID NO: 62118 - protein, 58 aa, Zea mays
  Coding DNA Sequence Number=SeqID_18743
MDPKSKGKVTDKKEKEISSNETPKGATIDSGSSKKDEKKDEYNKVSDLDNAKEIWDTL

SEQ ID NO: 62119 - protein, 200 aa, Zea mays
  Coding DNA Sequence Number=SeqID_18744
  Homolog annotation: Hit_ID=Q6QP51; Match level="QueryCoverage=24%, HitCoverage=22%, E-value=2e-13, Identity=75%"; Hit description =Putative growth-regulating factor 1
MQAACNRTKGAHPFDFDASSMETQAHTSCNRRAGYYVRETAPPLALVPRLLDCGTGAATRGNPAHGPTVPTEHIGHGSVSRGRRRDGRYGQKWADSNGGGRRVEAAVKSSAGSRPLLGQRENPLPRDRERGYSERDPSPRRKRAPSPPTDQRFEGWPLRRVRQPPQSTRAPCPLLVRGSKADPSEGFDSRLRPLGLRAHY

SEQ ID NO: 62120 - protein, 233 aa, Zea mays
  Coding DNA Sequence Number=SeqID_18745
MGSARVAFVLLSLEEHNFAEVGTFQPSLGFKDFHQAARLHPLADGHPRRVQHSVLCPGDGGQPHRGVSQHVVRREGGARVLGWSHSRFRGEDGSEDLPVRFGAAGARWCGVGGQVDAAVGAEVVAAGESFSADETVSATRGPTSGSLALIYGSRPLSGDVNESLPATASVMGPSLLLQRSLASRPEFVVPQALRCGGCSYPREWNWSSICNGTLSADVYSLWLSGPEHRCIWA

SEQ ID NO: 62121 - protein, 841 aa, Zea mays
  Coding DNA Sequence Number=SeqID_18746
  Gene Ontology: Mol. function=pyridoxal kinase activity; Cellular component=cytoplasm; Biological process=pyridoxine biosynthetic process
  Homolog annotation: Hit_ID=A2ZME7; Match level="QueryCoverage=20%, HitCoverage=72%, E-value=2e-60, Identity=65%"; Hit description =Putative uncharacterized protein
  Pfam annotation: Domain name=IQ; Domain location=589-609; Score=23.4; E_value=0.00085; Accession=PF00612.18; Description=IQ calmodulin -binding motif
  Pfam annotation: Domain name=IQ; Domain location=631-651; Score=27.0; E_value=7.2e-05; Accession=PF00612.18; Description=IQ calmodulin -binding motif
  Pfam module annotation: Pfam domain module=IQ::IQ; Domain location =589-609::631-651
  Subcellular localization annotation: CTP_CleavageSite=7; ConfidenceScore=5.29e-01
MDHGAVVSSRGSPPLPTGTTRIQPVPFVTDAPDPAKLSLPSVRSHRHPPLVGPLHRPSPVPFRASHDCRRTPLAAARRSSLRPRAPRGGRRAPLLPQLLLTRSGRTRTTAAAAYPKMARPPILSVALPSDTGRVLSIQSHTVQGYVGNKSAVFPLQLLGFDVDPINSVQFSNHTGYPTFRGQVLNGKQLWDLIEGLEENQLLHYTHLLTVASMLTPNQFEVELLTGLRITSEEDGLTACNTLHSAGPQKVVITSALIEGKLLLIGSHKKTEEQQPEQFKIEIPKIPAYFTGIIAIKIGGIKNGRDERDNHTIKCATSAMNCFRKVVSEVFGVTKGSSGELKSTWWWTEDVQKAIKEKKECYRSLFHDRSAVNIERIQESEVKEALKRMKGGKAMGPDGILIEVMERYKEQKDLHMVFIDLEKPYDKISRNLMWWALDKERSLMWGRTYVRQKREAAGGAGSSARKEGMAKESAHKEDMAKESARKEGMAKEKPSLRQRGITSPEKTAILMDRRSMTPGISSRLFSPPPAAHPSPPPAAAPSAAAMPSHPPSPTPDAFTRLKESFGRFAEQWDQFVVMFHRYKEKTEKELQAAVQLQTAARGFLARRQVQSLRGEKHLAVASRATPWPSSHEQAVVRLQAAVRGFLVRRAVRKLHLLISSSLHQLAACAPNHQVSSILFEPPAEVEIWVCSPPARPKRVVSFIRAPALVLDRPNIRTSWFLLHLSSNVKAAVQLFPWDPGGQEDIAAVQIYILVPQLFSRGRAGPQGKGRCHGHHRERSLMWGRTYVRQKREAAWGAGSSARKEGTGAGSSARKEGMAKESAHKEGMAKESARKEGMAKESD

SEQ ID NO: 62122 - protein, 191 aa, Zea mays
  Coding DNA Sequence Number=SeqID_18747
  Gene Ontology: Mol. function=carboxyl- or carbamoyltransferase activity; Cellular component=ornithine carbamoyltransferase complex; Biological process=amino acid metabolic process
  Homolog annotation: Hit_ID=Q8SA97; Match level="QueryCoverage=59%, HitCoverage=19%, E-value=3e-35, Identity=71%"; Hit description =Ornithine carbamoyltransferase
MASPVDVAGLRPRLGDVEAPPKPRSSLSFVAEVESEPLVRARRRPSAEAKAESEPWGRAERSSSSPGAEPKSEPWVGRSGPESEPWVGRSGVRRLPGLSLSPSPGSGGAEFAVFRGLARVRALGRAERSSPSSWVQPESEPWVGRSGVRRLPGLSPSPSPGSGGAEFAVFRGLARVRALGRAERSSPSSGA

SEQ ID NO: 62123 - protein, 142 aa, Zea mays
  Coding DNA Sequence Number=SeqID_18748
MRWRDPAAKTQPRQRIPVQPMPCSPGFSPESDPCTLTNVRDHVPGAERREWWDSTAADSRYSSLVVAGRKGQREEHEVGLGPHLKPGRCRILSSEDHARRINSRRIPSGEEEHGHPTCGPAQVRGFSRDEWVTGGVTEPVIG

SEQ ID NO: 62124 - protein, 106 aa, Zea mays
  Coding DNA Sequence Number=SeqID_18749
MAHRIARSMRGGGRPKSGDGDPTVPVRQGFDPCLEKLHGSSRKLSKGSVKAEGLWKWLAAVAGARGLGRVAQSSPELRTMSSQRRLMGFADWSQRYGVMKFGLSHC

SEQ ID NO: 62125 - protein, 164 aa, Zea mays
  Coding DNA Sequence Number=SeqID_18750
  Subcellular localization annotation: CTP_CleavageSite=20; ConfidenceScore=5.43e-01
MGAIPVKAPSTQGTRYRLARAQTRAGTVDQGRFTPRPRENSAACPAPTAVPLARVRPTTAKSSLGRHRKLRLARPQGSAPVSASEDGLHLARSQGSDSTSTSEGGLRLARPQGSNSASTSDDGLRLTRPQASDSASTSEELPPRPTSGSDRPRHKGAHHYPTPS

SEQ ID NO: 62126 - protein, 71 aa, Zea mays
  Coding DNA Sequence Number=SeqID_18751
MWSLEGCLSHGAPDSPVRTGTLSDCNLADGEYVLIPEQGTVQEEDQEPAPETATEDLPAPPAFEGKPRFYA

SEQ ID NO: 62127 - protein, 81 aa, Zea mays
  Coding DNA Sequence Number=SeqID_18752
MKRASHDVDSFAVVETRFGGNEQFVDSGEQLEASAGALDGSLEWWPVNLSSRGGGRKEGGVLVHAIGGNYRGKLTGDHRMG

SEQ ID NO: 62128 - protein, 260 aa, Zea mays
  Coding DNA Sequence Number=SeqID_18753
AARGERVDDFGALNSMLSDPEPTPAEAVSGVALEPTPETAGDASGAPASAAVGEDLAPEVAECAPDASAAAAPSAEDPAAVATETTVEATAEPTAEAPATSGPSQVQDFGPAHTTATTKFLAASTAEDGNECGGSASEFFDCADSRSSVEWTEESSEDLDYFAALDVAAAEASPHVADAGDVPGPSTGRRRRRAVAKRRVSGAEGARLRVSGAGRQELLSLPAAVSTREGELRSLFAGEELRIMLFNYREMGIIPKVEPM

SEQ ID NO: 62129 - protein, 82 aa, Zea mays
  Coding DNA Sequence Number=SeqID_18754
  Subcellular localization annotation: CTP_CleavageSite=44; ConfidenceScore=5.31e-01
MAQWLTRSTFAGGRRDSGDRGLASPAKQTSIPRSGSFTEVCSVVSEGRTGLAKAGLADLRRQGLGWPRTRRARANDSEFELQ

SEQ ID NO: 62130 - protein, 113 aa, Zea mays
  Coding DNA Sequence Number=SeqID_18755
  Subcellular localization annotation: CTP_CleavageSite=33; ConfidenceScore=5.45e-01
MAQWLTWSTFAGGRRDSGNRGLASPAKQTSIPRSASFTEVCSVVSEGRTGFGKAGLAGLRRKGLGWPRTRRARANDARPSRKRANLRKNPARVFSWHLGMSLIRESPWQICPR

SEQ ID NO: 62131 - protein, 417 aa, Zea mays
  Coding DNA Sequence Number=SeqID_18756
MQVVELVPCARNKWGNWNEFWFYVAEGTVEGHEGLPVSEMCSHFYSAYPPFEVAEEDVDEGALRCAAGLSSGRDLVEEFVAYGMPFHGGRVVRSPAFALNLQNRDPAAFVREAEDGAVRLVGRYVPRIEGQRSWDIRGSNDRLNRVFELNQLPYDGYPGQDDVDRRGKKPVVETGDDPAPTTTPSSKKRKLGTAMGGLGVSDGFARELMRTCAAPGERMSSPELRESSARMLRGFSLRAEYCCCCVSSDGQGSPGSCTEAPAAVRLVEARPKRQRGAAKAAAPGGGRPPLAAKSGVPASSKAPEATAGAGGSKPAKAVPPSSGVAEVAKAARALPLSGKRVADFATDISVDDYLGGSGEGQLAMVAPAAATTTAAAVPKAKGGALSAGGEVSALAVVMDEAGAASRRLKEVTEALSQ

SEQ ID NO: 62132 - protein, 104 aa, Zea mays
  Coding DNA Sequence Number=SeqID_18757
MESHDFRAVRESQLVGGNENDGFGIDYGNGKWYSFRLERVVCIATTAQERMNPWKETSRSSKITTSSRRGLAATPSRLPVKATCIYFSFPHFDYCKDYVDVSDI

SEQ ID NO: 62133 - protein, 163 aa, Zea mays
  Coding DNA Sequence Number=SeqID_18758
MGMSNKRKREPTPPSEDFGDSEYSEEEFSSESEGSPAPVSPPASSDDSDDSQGIAAEVWTYIRAVERSGLEGSDESEFSSNEEDSDGGEDEDDDDDDGDDDDGGDGDGDGSGSGGGSGGKGSTRGGSSTGSTRGGSSKGSTRGGGGNDSTRGGGGGSSSKASG

SEQ ID NO: 62134 - protein, 146 aa, Zea mays
  Coding DNA Sequence Number=SeqID_18759
  Homolog annotation: Hit_ID=A3BF17; Match level="QueryCoverage=68%, HitCoverage=30%, E-value=5e-31, Identity=72%"; Hit description =Putative uncharacterized protein
  Pfam annotation: Domain name=DUF1336; Domain location=1-90; Score= -80.0; E_value=0.00028; Accession=PF07059.3; Description=Protein of unknown function (DUF1336)
MGRGSSAPPSTATCAACLLGHTLTCHYHRGDDYLEIDMDIGSLAIASAVLHLALGAVMLVTIEMGFLVESQPEEELPWRLFVAVHITQMEMDAAEYVKLPPDEAMPETAHRARAGFRAPDRLSSLALEIPSIGCEEGHDQSDNKDN

SEQ ID NO: 62135 - protein, 197 aa, Zea mays
  Coding DNA Sequence Number=SeqID_18760
  Pfam annotation: Domain name=DEK_C; Domain location=101-156; Score =11.3; E_value=0.034; Accession=PF08766.2; Description=DEK C terminal domain
MRELIQRFALRKHGIIKKLEVMAPKLEMLVVCDATKAYISAPNLSVVSWDSDTGYNPLCHHFANAARHLHLLHLGSKCVSASLMRQFDEVDVLKLKLNLLNFKEIASCVKSVLRGSAGGPREVSLVVVLQQAEATLGVDLSHKVGFIRDQLDLFFGPRLQPPPLTMPQPAPVGVLGPTAHPGLPLKVFLGVGRCRRL

SEQ ID NO: 62136 - protein, 174 aa, Zea mays
  Coding DNA Sequence Number=SeqID_18761
MKAGEHREDKEGECFVWFGHGGGLTPSGITVKVRTCEERKRFGIRVSRRSQMEVRCQISFCQNEDGFPKLLRACTVRLGIRSQPEYDGREFIEHGTEKCVVPVYIGSSPHHVEWSVTAAGHRFKDTCQVVARKALRALCQIYEEEVADTPLRFFSPFQRDRPVWMARMRALEGQ

SEQ ID NO: 62137 - protein, 1228 aa, Zea mays
  Coding DNA Sequence Number=SeqID_18762
  Gene Ontology: Mol. function=nucleotide binding; Cellular component =intrinsic to membrane; Biological process=defense response
  Homolog annotation: Hit_ID=Q69XW4; Match level="QueryCoverage=97%, HitCoverage=99%, E-value=0.0, Identity=51%"; Hit description =Putative disease resistance protein
  Pfam annotation: Domain name=LRR_1; Domain location=1006-1030; Score =3.5; E_value=70; Accession=PF00560.24; Description=Leucine Rich Repeat
  Pfam annotation: Domain name=LRR_1; Domain location=1055-1076; Score =5.8; E_value=26; Accession=PF00560.24; Description=Leucine Rich Repeat
  Pfam annotation: Domain name=LRR_1; Domain location=1078-1099; Score =1.9; E_value=1.4e+02; Accession=PF00560.24; Description=Leucine Rich Repeat
  Pfam annotation: Domain name=LRR_1; Domain location=1101-1122; Score =8.7; E_value=7.4; Accession=PF00560.24; Description=Leucine Rich Repeat
  Pfam annotation: Domain name=LRR_1; Domain location=1124-1145; Score =6.3; E_value=21; Accession=PF00560.24; Description=Leucine Rich Repeat
  Pfam annotation: Domain name=LRR_1; Domain location=1147-1170; Score =2.1; E_value=1.3e+02; Accession=PF00560.24; Description=Leucine Rich Repeat
  Pfam annotation: Domain name=LRR_1; Domain location=631-652; Score =10.1; E_value=4.2; Accession=PF00560.24; Description=Leucine Rich Repeat
  Pfam annotation: Domain name=LRR_1; Domain location=858-880; Score =6.6; E_value=19; Accession=PF00560.24; Description=Leucine Rich Repeat
  Pfam annotation: Domain name=LRR_1; Domain location=981-1004; Score =5.2; E_value=34; Accession=PF00560.24; Description=Leucine Rich Repeat
  Pfam annotation: Domain name=NB-ARC; Domain location=193-517; Score =179.2; E_value=1.1e-50; Accession=PF00931.13; Description=NB-ARC domain
  Pfam module annotation: Pfam domain module=LRR_1::LRR_1::LRR_1::LRR _1::LRR_1::LRR_1::LRR_1::LRR_1::LRR_1::NB-ARC; Domain location=1006 -1030::1055-1076::1078-1099::1101-1122::1124-1145::1147-1170::631 -652::858-880::981-1004::193-517
  Subcellular localization annotation: CTP_CleavageSite=55; ConfidenceScore=5.00e-01
MAHIFNSARLQLIGSCTIQTINYVLYRNILDSMAGTTTVVGWVVSPILRKMLSLVQSYVSSQYNWKSNMVSDLKNLEATLMEVLLVVDEAERRHLKDRNQVALLCQMREAVCDTEDVLDKFDYKLIREKVEHQSMARSIVASSLSLGKRLVGLDKLRSELHMVIKSMARVKSCAEMFASVMAVESTNSIKPSDCVGTRVTGSFPREGTIFGRKEEVDELVSWLLHRRNINPSNDEGSFTIQLHSIHSKKNIELHSIVGIGGIGKTTVAQSIYNDQRIVNAFDKRMWVSVSHNFDKINLIKEIIAHASDDKNIKLIHFNFNMLQEELQRIISNKKFLLVLDDVWYDESYGEHINREKWWELIAPMENAVAGSKILVTTRMELVAKVLDSSRSFLHGLGQDDSWALFRHCHNSILSSSTLESIGMQIVRKLNGSPLALNVIGRHLYGRHKVAEWNEVLHSNILNSDDMLTILRPSYEGLPVHLQRCFSYCSLFPKGYHIDPEKLIYMWIAQDFIDTKGSTNKSLKDSGRSYFDELLSRSFFQMLKPGSETFYVMHDIMSDLALHVSQGECLRVECESMEPMPLYTQHLSIYSENLENLVNCDLPKLRSLIVLNKSWFCSKICLNHAILGKLKSVRVLDITGCCLEQLPDAVNRLIHLRYLEKAYVLMLSSTLKLPFVECAGEFHVNDEGSLLGLKDLNMIRGHLTLLSLDKVQNKEEASKAHLHHKEHIMKLELQWGSLNFASSTKQGVEVLDVLKPHSDLEELTISGYPGARSPSWLESGWLSRLQFICLRDCNRWEVLPPLGDLPLLKTVEIRRMQGLRTLGQKFFGRAGFPSLERLLLERLPELEWCCVDNDQVFQNLRHLSVAGCPKLREYPTYPWTLEHIAILDEERIQVKTFIPSARVSRTFCILVSSFFHVLRAHHLEFVEDMEIYVNHVVCMSREVLENLKSLQNLKIYGIHRANTCSVIAKLWDENGSAVFPSSLRSLQLVQCYLKPSYFSKQLNNLSSLETLRLINCDTIEMPCPPVNMWHLRILKQLVLYKCDWITFLEGSEALVSLEEMAISDCYDLKYVPDLNNMPSLEKLHLRRCPQVMRLSSADYQTRLKELVIESCDALSSLRELQGLVSLTKLIVANCSKLELLPGMDSFCALGILIIEDCRLLRSLPERGLPVSLRTFVLDGCHQALDEQFQKGEGPDWNKVAALPGCMRYEHMADVEDESVWHSFYNLYYF

SEQ ID NO: 62138 - protein, 186 aa, Zea mays
  Coding DNA Sequence Number=SeqID_18763
MTGWKTALRFRRARRSVHGVAGKSDREIVIRVPEERKRERVRRQSPIAVGAAILAAGANTDADAKAKDAPVISPPFESIPELHEGAMKGNLVEDKMNYSKEPSQQDLQPEPAAASAEAANKAVPTPAEAEARADGRGAAADEQQPGGDSGSGSRTKGRLVLKLPLLLNADKRATCSGQHGISVNHH

SEQ ID NO: 62139 - protein, 426 aa, Zea mays
  Coding DNA Sequence Number=SeqID_18764
  Gene Ontology: Cellular component=endoplasmic reticulum
  Homolog annotation: Hit_ID=Q5VML4; Match level="QueryCoverage=59%, HitCoverage=83%, E-value=1e-102, Identity=74%"; Hit description =Putative uncharacterized protein P0529C07.1
MARRAVALLVAVALATVLLHTAEVAAGQKKPATAARREDIPYIRCQVCERIAREISAQVAKKHQALPPSKKVPEIEIIEVAENVCNLKKQEADWMLRIDIVEKGDKLELVEQDEEGHCNAECKTIERACQEVIGYADTDVAEFVYKNNPSVDQLMKFLCKDLSKACAKDPPPVPKDRVPGEPFARKPSKDAEMEKILRSMEGMPGAPSMKMYSRDDLMKNNFGTEDDDEEDDEDEDDNFPKNLGKALKNKGSQKKDLKQQVVQQFKDTSKKLKGHVNKVSAGTGSVSDGGGSQEASAEEAEEEVVRLSPELATHDAIDPVTLPSSTSKRRLSISVSKKLSMNIPDKLRLSRRKHKDHHHKVESEDTLWKKGIIPGEKCRIPGEREAEPVDPATRSPPAASAGVEGEKDATMPAGCNVHSNSDVIAL

SEQ ID NO: 62140 - protein, 115 aa, Zea mays
  Coding DNA Sequence Number=SeqID_18765
  Homolog annotation: Hit_ID=A2Y9E7; Match level="QueryCoverage=56%, HitCoverage=27%, E-value=8e-26, Identity=86%"; Hit description =Putative uncharacterized protein
MASPLQDSACAELPGSKAPATPPPTQPTERLSSWGLGSSGGAEEEEAGDPGRIPAAVFERDVSESNKDWSMMSTESMFGLQVAPSGDFTGFFLAHPEVMDSGTPPRSNSSSGADC

SEQ ID NO: 62141 - protein, 810 aa, Zea mays
  Coding DNA Sequence Number=SeqID_18766
  Subcellular localization annotation: CTP_CleavageSite=45; ConfidenceScore=5.12e-01
MNKNTGIRSAITNGTPVPPPQVRTTPLRGGRPAEQRKADERRAVTCSSSGDDDDFCSGGPNSGNADLKVDAAARRPPPMPKLVRQGRAEGRRVGGQSVAGPGYRASGRTSSSCRGRRRRRKRLRSHSRPKTGRAAAASATDNNRSSPPSLSEGAGHRSHRGRPQLGTLPSPALVMKILEAEGGAEATARLASPTIKPEAGGSSSHVVSQSHVPSRDSKRASSHGVKTGPGKGDTPKRTLLCEGTGLRAPPTDQRFEGWPSEGFNSRLRSRGPDTHYWSGVRRPAPPKGPMAASGYSGSAPITDQGGNDLVTESHRREASSPRTPSPGDRVRQITRSSPEAPCSVPIEGNMALSPLLLAERRRRGVCKKAESVPDRPLALCGGSGAALANSAPARPLTASTYQPETLGPDRAPGLRPVRMREQPDQPKALRKALRPRRSETTPPRPRGLHPAGALARTHRNKMQPRKASPLAKKCDESLQASANTPFEARGLLSGTIIRGTLKTPNSQLVTPISIKLQRPDGARTRAKTRKTANSAPPDPGLGLGLRPGRRRTPLRPTQGSDSGSAPEDDELRLARPQGSDSALASAERPPPRPTQGLGLGLGNRRQTRPRLRRSLHVARPGAQARHVNGKRHHHPTPSRLGSQRTRPVSHLASSARWAMMVPHKLCDDGGSQLSYESSHDITPAGCQDLSGCHIGMAFLEKVGRAGPRTGQALSWGRSLPSPAWTLVTPLLQAHPTWARDEHEGRGISTSLTPVSGHLASPPFALAHALDPSGLGHAAHSLVGSGTPRSQNADNMFAIAILGYLVIVIPD

SEQ ID NO: 62142 - protein, 341 aa, Zea mays
  Coding DNA Sequence Number=SeqID_18767
  Gene Ontology: Mol. function=cysteine-type peptidase activity; Biological process=proteolysis
  Homolog annotation: Hit_ID=Q6J9V9; Match level="QueryCoverage=22%, HitCoverage=26%, E-value=3e-20, Identity=63%"; Hit description =Putative uncharacterized protein
MAAILLSSYMNKRRGYPIYKYDKEVHTGSPSDVEILDSPTNHKKRKLLHVLDNSEVLMEDEDGPITQADLQRWFVDEWDKRTPTKVSADGCTDDFLMSGLSTKDMPVTKADLIDVLCDYIMTIQDDRTLEMIWVRSFNPFKIEISVKDLQNILSINLDMTLKCFDMAVRLLANKESRRLKGEIIKNRKHYMDMRFWRMIGFGKLPKYHQDPTAEELTKTLDCWPSMNYYITACKYVLMPWKFNGCYALFVIDHGKKYVTFIDFAPIQDWCKHMPYKRLNTSYLILQAMTMWGNDSPMKFVRDAKVFRRNFIIELLSYEENSCRYAIPANIQQRVNNIIKKD

SEQ ID NO: 62143 - protein, 313 aa, Zea mays
  Coding DNA Sequence Number=SeqID_18768
MNKNTGIQSAITNGTPVPPPQVRTTPLDRGGPAEQQKTDERRAVTRSSSGDDDDFCSGGPNSGSTDLRADAAARRPPPMPKLMRQGRAEGRRVGGRTGGASGRSSGRRFAFAVITAPKKGPGKGDTPKRILPREGTRLRASLLIRGSKAGPPKGFDSRLRSRGPYTHYWSERLGGCSRKPDSGRTVDSVNIPARELGPRPYTRATASSHEGTTRPAEALRKALRPRRSETTPPRPRGLHPAGALARTHRNKMQPRKAGPLAKKCDESLQASANTPFEARGLLSGTIIRGTLKTPNSQLVTPISIKLQRPDGCD

SEQ ID NO: 62144 - protein, 566 aa, Zea mays
  Coding DNA Sequence Number=SeqID_18769
  Gene Ontology: Mol. function=6-phosphofructokinase activity; Cellular component=6-phosphofructokinase complex; Biological process=glycolysis
  Homolog annotation: Hit_ID=A7PEE3; Match level="QueryCoverage=82%, HitCoverage=94%, E-value=0.0, Identity=75%"; Hit description =Chromosome chr11 scaffold_13, whole genome shotgun sequence
  Pfam annotation: Domain name=PFK; Domain location=155-404; Score= -4.0; E_value=9.3e-13; Accession=PF00365.11; Description =Phosphofructokinase
MAPPPASPADSAPDPRPTASAPVPITVPSPRDHAHHHHLVDRRDTPRGRAWEPERNRRGEAMDGAAAVKLVPGEAGYVLEDVPHVSDYLPDLPTYSNPLQDNPAYSVVKQYFVNPDDTVCQKIVVHKDGPRGNHFRRAGPRQKVYFEPDEVHACIVTCGGLCPGLNTVIREIVCGLSDMYGVTKILGIQGGYRGFYARNTITLTPKSVNDIHKRGGTILGSSRGGHDTVKIVDSIQDRDINQVYVIGGDGTQRGAGVIFEEVRRRGLKVSVAGIPKTIDNDIPVIDKSFGFDTAVEEAQRAINAAHVEAVSAENGIGLVKLMGRHSGFIAHYATLASRDVDCCLIPESPFYLEGEGGLFRYIEKRLKDNGHMVIVVAEGAGQKLIAETMQSIGKDASGNELLLDVGLWLSQKINEHFKKNKMTINLKYIDPTYMIRAIPSNASDNVYCTLLAHSVVHGAMAGYTGFTIGQVNGRHCYIPFYSTLGCARGVARDDSKRPMWKQKVPSAVTGEQSRFSGTFVPPRKRKTGRQGEAGIRNGGGLPAEDIFALGAMTQLMRSYRGASIAG

SEQ ID NO: 62145 - protein, 474 aa, Zea mays
  Coding DNA Sequence Number=SeqID_18770
  Gene Ontology: Mol. function=nuclease activity; Cellular component =Mre11 complex; Biological process=DNA metabolic process
  Homolog annotation: Hit_ID=A8IE00; Match level="QueryCoverage=51%, HitCoverage=20%, E-value=3e-63, Identity=51%"; Hit description=DNA repair protein Rad50
MVFVQQQISYSKTEHILHLRENIAQDQEKSDASKSQMEQLKEKICGTEREILQMETSLDELRRLQGQIDIKATERSTLLTQQHEKLAALSEENEDTDEELMEWQTKFEERIALLETKISKLAHLTMKHERDSDIKNICTKHNLGPVPEHPFTNDVAMNLTNRIKARLSSLENDLLDKKKSNEDQLDVLWKHYLKINARYSEVDGQIQSKIESMAPFPNILSNFQSGILRRRKDKEKERDAAEVELSKFNLSRIDERERHMFHHNCLEMWRLMDLAYLTPAFLYILYLLFGVWNFLFLVNEHKDKIKKVLRGRNPFEKDMKKEINQAFWSSDRVVGIARTPEDAKVLIRGGGAEEGDERSGMRDRLGGKMVEECAGREVGGATNHVLGSTTWMGGVKAQQPQLHTVGEKEGARHGVIKLLSIITLNSLDSVTELSRHPHKEVRKTGEGVRLTVERKGPQVVREVIQDDQIVSVEE

SEQ ID NO: 62146 - protein, 378 aa, Zea mays
  Coding DNA Sequence Number=SeqID_18771
  Homolog annotation: Hit_ID=A7P225; Match level="QueryCoverage=46%, HitCoverage=44%, E-value=3e-21, Identity=33%"; Hit description =Chromosome chr19 scaffold_4, whole genome shotgun sequence
MIQGDLFYLTIVEAPILGNSKVCYKGAVCYCSATRFVTAPQQDLLVSSKHGAGNKSEKDNSTLLDKAGNAPVVKEQSIDAHASKSRAQNGKTMPNNGGSLANMWGRASAKPKPSSTTNSIAVESVSATLDAQICAKEEADGDSNDDEQGIKYKGESTNANNRKRRAVFDFSDDEEVDNIISIASPEVPKQHTPDPVIETAEDTKVNQKNLENKDDVPNTEKENSSDPPVSNKKQDSAVEPASTAPKRIKVLKTRIDERGREGDRRVGDGRGDVEAELGLWCGGAAFWRRRDGELGGGGTEADEIGQGSDAAELAKRGERATGRRASAAARPTGGGAATLFCCGGTRVMLETLMEILTTTNSKSNDAPVIFLWEIAHVI

SEQ ID NO: 62147 - protein, 229 aa, Zea mays
  Coding DNA Sequence Number=SeqID_18772
  Gene Ontology: Mol. function=nuclease activity; Cellular component =Mre11 complex; Biological process=DNA metabolic process
  Homolog annotation: Hit_ID=A2X530; Match level="QueryCoverage=65%, HitCoverage=9%, E-value=3e-62, Identity=83%"; Hit description =Putative uncharacterized protein
MSTVDKMLIKGIRSFDPDNKNVITFFKPLTLIVGPNGAGKTTIIECLKLSCTGELPPNSRSGHTFVHDPKQRRLCFISGVGAQAFQKLRTVVNVAGETETKGQIKLRFKTAAGKDVVCIRSFQLTQKASKMEFKAIESVLQTINPHTGEVDGEADNVDVIAVDEGSPCEWAVELLKELLEPAHLRHAIGYNAILILSIGSGDHGLTLGGLGDEVVSKEHNVVEGGPTDV

SEQ ID NO: 62148 - protein, 156 aa, Zea mays
  Coding DNA Sequence Number=SeqID_18773
MWAWCAGRVHNEGDCHMGGAGIREGGRDREGGGADSGVVVGDGGSAQGSEGGCDGGASTADNRDGVQDDDRLMLRDDSECWVQIEVGSNAVAREEEGHMQGNIGIAREVGRVRCAGGGRQKQGRSRPVCRRGEHGEDDDTCDDAGARRGAGCGRWT

SEQ ID NO: 62149 - protein, 204 aa, Zea mays
  Coding DNA Sequence Number=SeqID_18774
MVPIRGRRVAPPVEAAISDDSVAAAGSTVSVSKTSWAAAACALARSAVGAAVPIWAAATCAPMGMRGCPLCRLLSRCFPCQPELFVSVVVDRSRAVGSTAAQSLELCCRRTCCIRRLRCCYFRSRCCQFRRRQPCCPRRCRCSRCCCSRSCAAATSASCWRRALEVTECRDMATFRATFWCHFWSQLQLKMEDQELIKSSCRSM

SEQ ID NO: 62150 - protein, 299 aa, Zea mays
  Coding DNA Sequence Number=SeqID_18775
MEGFMSYASLVTCEWAMNALSREGCIHYEVFDRSDESFEREIFKAEDPVVKQSVGALFDRMWGAHRREAVRERSDQAREQMEHAEDVEDFGGLVGAPPEAAEVKPVLSSDAGEGPSEAPVPAMAGEDPVSAPVPTVEGAQEVQGFGSAHATATDSANFVAASTVVAENDSDDSVSKFFESDDSRSSVVWTEGSSDEDLDYFAALDVAAAEASPRVMDAEVLPGPSAGRRQRRAVAKRRVSEVEGGRLRVDRAGKRELLSSPVGASVGEGELRSLFEGEELRIMLFNYREMGIIPKVEPM

SEQ ID NO: 62151 - protein, 83 aa, Zea mays
  Coding DNA Sequence Number=SeqID_18776
MSRPDSSPPTSIPACARGPANSDHPRRRPAHRCDPRDLPYVLDHFTGAISPPEMVDGVTWPTTLPPGWTVEWDVAPAGEDHKE

SEQ ID NO: 62152 - protein, 105 aa, Zea mays
  Coding DNA Sequence Number=SeqID_18777
MEESTKHTMNILRLPHSILAHSIDILSDLSSVLVVYVQRFLRLRAQAPTVPNEIVIEAMIKHVGRRVETAGRFASVGSVRSAKASSEGWRLRLRPNICPPRDQFD

SEQ ID NO: 62153 - protein, 288 aa, Zea mays
  Coding DNA Sequence Number=SeqID_18778
  Gene Ontology: Mol. function=nuclease activity; Cellular component =Mre11 complex; Biological process=DNA metabolic process
  Homolog annotation: Hit_ID=A2X530; Match level="QueryCoverage=54%, HitCoverage=12%, E-value=9e-82, Identity=97%"; Hit description =Putative uncharacterized protein
  Pfam annotation: Domain name=ABC_tran; Domain location=105-280; Score= -39.6; E_value=0.0013; Accession=PF00005.18; Description=ABC transporter
MDYGEGGTRGGRSPVERRQLLVKVRNSASRLYVPDIDIALPWLTTDVGLWIGLLEGGCLIPSTARYVISNMRQSTTCWWAAPLRGSFGLSCSGPLGCRTFTQDQGCLLVLSVFSLLLLLLVWSQQGWGTLALMRFHSMKMEEINKIIKELWQQTYRGQDIDYISINSDSEGAGTRSYSYRVVMQTGDAELEMRGRCSAGQKVLASLIIRLALAETFCLNCGILALDEPTTNLDGPNAESLAAALLRIMEARKGQENFQLIVITHDERFAHLIGQRQLAEKYYRVSKDE

SEQ ID NO: 62154 - protein, 96 aa, Zea mays
  Coding DNA Sequence Number=SeqID_18779
MDTAAASQSQRIISTSSTTPLSVVPIGAANRDDTINVDVDMDSDDDDDEPSGKRAKKSTSEVWQYFTKYWVTVEVDGKQERQRWATSLKLTSLLVS

SEQ ID NO: 62155 - protein, 210 aa, Zea mays
  Coding DNA Sequence Number=SeqID_18780
  Gene Ontology: Mol. function=prephenate dehydratase activity; Biological process=L-phenylalanine biosynthetic process
  Homolog annotation: Hit_ID=Q6JJ29; Match level="QueryCoverage=37%, HitCoverage=17%, E-value=1e-17, Identity=62%"; Hit description =Prephenate dehydratase
  Pfam annotation: Domain name=PDT; Domain location=35-174; Score= -68.0; E_value=0.00029; Accession=PF00800.9; Description=Prephenate dehydratase
  Subcellular localization annotation: CTP_CleavageSite=44; ConfidenceScore=5.49e-01
MASAATPAPLLPVTSTPARLDPPRVLRHGLLPRQPGRRCRLLPRGLAPGAPFLPPRPLTDETLVLARAYTARRLAVGREHLPLALPGVRRELLTRVISHLQALAQCELTLNAMGLNVAREAFDDTAGAAEHIAVGGLRDNAAIASARAAELGSFPSGTQAARASLGLALSPAAISGHLSPAPRRRDHLSPYTSTSAQIRRWARSSALLPL

SEQ ID NO: 62156 - protein, 159 aa, Zea mays
  Coding DNA Sequence Number=SeqID_18781
  Gene Ontology: Mol. function=nuclease activity; Cellular component =Mre11 complex; Biological process=DNA metabolic process
  Homolog annotation: Hit_ID=A2X530; Match level="QueryCoverage=72%, HitCoverage=8%, E-value=9e-36, Identity=62%"; Hit description =Putative uncharacterized protein
  Pfam annotation: Domain name=Rad50_zn_hook; Domain location=6-59; Score=32.5; E_value=1.6e-06; Accession=PF04423.5; Description=Rad50 zinc hook motif
MPRLENFANGMREMLAPFEHLARKNHVCPCCERAFTPDEEDEFVKKQRMQNSSTAERSKALAMESSNAEALFQQLDKLRTIYDAYVKLVEETIPLAEKNLNQHLADESQKAQAFDDPEIRSHGESNPGPEECYSDHLTNSAQRTTRPNHTFNLAGPRLE

SEQ ID NO: 62157 - protein, 559 aa, Zea mays
  Coding DNA Sequence Number=SeqID_18782
MRGPRGKDVFARAPGVFGADAEVMDKDRQGAAQKRQAVVRLHEARPKRSRGTAKAAAPGGGQPTLAAKSAAPRSSRVPEAVKAAAAGGTKSVPAGAVKARELPPPGKRVADFATDISVDDYLVGSDEGQLVVVPPAVAIAAAAVVPRAKGSALSAGGEIPALTAVRDEAGAVSRRLKEALSQAADFADRAASGALTAVVSAEVERLRAQHADAVREKSAADSKCRKLADKVAALEGERTDLRRQLAEERKEANEALAKAQQRAQELEERLNALQTRVERAEASTRSEAERTRKQLMDSYQELSARTADFEVPDRELGLRCLEWLQEELLALPAIVEGFMSYAFLVTCEGAMNALSREGCRHYEVFDQADEDFERDIYKVEDPVVKESAGALFDRMWGPHGREVVQDFGPAHATATANFLAASTVDDGNESDESASKFSDFGDSGTSVEWTEESSDEDLDYFAALDVAAAEASPRAVDAEVVPGPSAGRRRRRAVAKRRVSEADGGRFRVGRVGRQELLSLPAAASAGEGELRSLFAGEELRIMLFNYREMGIIPKVEPM

SEQ ID NO: 62158 - protein, 83 aa, Zea mays
  Coding DNA Sequence Number=SeqID_18783
MVELNQGARGASQEVSGAVGAMNLKMAHHEARSTCGDGRLESGDGLSVLCEFQVKIWSGVGDMVAPSQVCLDCSARDKTHANS

SEQ ID NO: 62159 - protein, 87 aa, Zea mays
  Coding DNA Sequence Number=SeqID_18784
MDMVSPSPTIRTPPQRMVVGGCGKVLAETWLYFDNCESEPDSPTNEGKPRPVDQGLSYLATCPENGTGGGSVGIVDIKVYEKHMSCG

SEQ ID NO: 62160 - protein, 344 aa, Zea mays
  Coding DNA Sequence Number=SeqID_18785
  Gene Ontology: Mol. function=hydrolase activity, hydrolyzing O -glycosyl compounds; Cellular component=cell wall; Biological process= carbohydrate metabolic process
  Homolog annotation: Hit_ID=Q6Z998; Match level="QueryCoverage=64%, HitCoverage=74%, E-value=1e-81, Identity=65%"; Hit description =Putative xyloglucan endotransglycosylase
  Pfam annotation: Domain name=Glyco_hydro_16; Domain location=22-206; Score=294.1; E_value=2.7e-85; Accession=PF00722.12; Description =Glycosyl hydrolases family 16
MAVAAALMIVMATEAPAGVALLKDDIGFMWGPDHSFFYDDGNALALCLEKSHGSGFRSNAANLYARYDIDVKLVANDSAGTVTTVYLTTDDVRPGYHDEVDMEFLGNVTGEPYTLHTNIFVNSVGNREQQFRLWFDPTKEFHTYSVEWTPKNIIFLIDGTPIRVYKHEPSLGGTFPTQRHMRLDGSLWNADDWATQGGRVKTDWTRAPFYAYYRNFRVTPCAPSSPSGVASCSDEPPAPAVLQKGFVWDARAEATVDVACFASRSWLGDMLGDILGESLNDGDARGCRFPVEGVTFPGAVFHGRKPSPSRTSDGDILDVTPFLMASLLKFVSATTSTSFDAFAS

SEQ ID NO: 62161 - protein, 72 aa, Zea mays
  Coding DNA Sequence Number=SeqID_18786
MARSVRAQGRVRRRLLLRPRPGSGSGEDAIPPEAEPHPGGWHSSRSGASDAVFLSGRSVEGRSDCGHFALAD

SEQ ID NO: 62162 - protein, 105 aa, Zea mays
  Coding DNA Sequence Number=SeqID_18787
MEAIARQKVGLLPRIVAFGVLPTVWRGTPAPPQVRREIGSRTVVFPASQRHDEHSRTLAALLEHTADFKRRWRPRTAAAEVGFTLLSLLRLPPCMSWCLRRPALI

SEQ ID NO: 62163 - protein, 37 aa, Zea mays
  Coding DNA Sequence Number=SeqID_18788
MRGSKRRMAEQVCQRLVWWQRRAGDAVPGGAGHGRSD

SEQ ID NO: 62164 - protein, 176 aa, Zea mays
  Coding DNA Sequence Number=SeqID_18789
MVSHTRHTYGRALLASTLDHSHARAWWLPCGPRLSGVSSSARYDLFWAHRTPRSSVTRHHGPSRATPPTRSLAMLTMWDRLYGDFFPNQTSDIPSGFPTSVTNVGVSGYVHHPRSLSLVHISKPLHSPIGHRRAEALDFAVSTLAGQTERKKPPPWVRVPVAVRSMTSTLGASTRP

SEQ ID NO: 62165 - protein, 246 aa, Zea mays
  Coding DNA Sequence Number=SeqID_18790
MGSTRVAFVLLLLEEHDLVGDDDHQFGGGEKQAGLRPLPRPQLQGSSSSVLGRRAGRVGACLRVGRRPNSSSGIWGRKASSSSAEEASSSHAGLGELLLPGQGAAVRPPPGRRPCRAWAGYVQVLPASSAAQHVVRREGGTRVLGRSRSRSCGENGSEDLPVHFGAAAACWCGVGGPSGVEVVHTCGSGTGVPFVMNLRPLCDELEPEAAVLAWTEAESARKEASSAQEQVASQAEEVQQRQLELG

SEQ ID NO: 62166 - protein, 316 aa, Zea mays
  Coding DNA Sequence Number=SeqID_18791
  Homolog annotation: Hit_ID=Q6J9V9; Match level="QueryCoverage=27%, HitCoverage=30%, E-value=3e-18, Identity=62%"; Hit description =Putative uncharacterized protein
MQVACNRTAVTHPFGFVASGMEAQAHTSWTGKGDISKGTLLREGSEPRALLLIRGSKAGPSEGFDSRPRALGLQALLLIRGSKASPSEGRLRARRVRDDSGYVRYMAEAWATLPRRIQCGDRLTPHPDTRASVSKVEPRAQQEALPRPTLGLDLGRRSLPRSTPWLGLNLGLGRRSPPRPTLGLGINLGLGRNRVLARPRPRPQEKSLPRPTLGSDRPRHGGYIITLPLASSGYEGTRPVSHLARPGLRHSSDGHVITYTGLKHFSDSHVGMAFMRGGTRGNELTNRLTLSPVNACNPYYEHTPLGPPGSETPTIM

SEQ ID NO: 62167 - protein, 69 aa, Zea mays
  Coding DNA Sequence Number=SeqID_18792
  Subcellular localization annotation: CTP_CleavageSite=51; ConfidenceScore=5.77e-01
MKTSDWKGRQQMSHSSASFSTDSVTVASSSSSNPASSSSSTTTLAFFGVPPSEEVMVFFPVMVYHLERE

SEQ ID NO: 62168 - protein, 535 aa, Zea mays
  Coding DNA Sequence Number=SeqID_18793
  Gene Ontology: Mol. function=transcription regulator activity; Cellular component=nucleus; Biological process=regulation of transcription
  Homolog annotation: Hit_ID=Q5N6W0; Match level="QueryCoverage=80%, HitCoverage=84%, E-value=0.0, Identity=73%"; Hit description =Putative uncharacterized protein OSJNOa013M08.1
MHIDDLRALAPLWLSKTEEVRQDKSHWSTNITGDIYGMGWISEMYGYSFGAAEVGLRHKINDDIMIYPGYTPRPGIEPLILHYGLPFKVGNWSFSKLEHHEDGIIYDCNRLFNPPPFPREVEMMESDPNIKHGLFLSIECINTLNEGLLLHHASAGCPKPQWSKYLSFLKSRRFSELTKPKYWKGEQVDIIMTMQHVALSKANNEYPKIHTLFSIECSSYFDWQTVGLMYSGQPGNITRLLSCTDEDLKKGHDLAPTHYVPSMSRHPLTGDWYPVINKPAGVLHWLNHVQTDAEFLVILDADRIMRGPITPWEYGAKRGHPVSTPYEYLIGCDNILAKIHTRNPSACDKVDGVIIMHIDDLRRFALLWLHKSEEVRADKDHYATNITGDIYNSSWISEMYGYSFAAAEINLRHIIRRDIMIYPGYVPLPRVKAGDWRRYIAKSGILELGSTQHIAESSGTVQTIRSVFAVTSGNKSAVQRHEAERSPGLAKIFGKDLNLVRPSVGLAIGVSNSKVDERTWEQRSAVGGTSLLPSV

SEQ ID NO: 62169 - protein, 152 aa, Zea mays
  Coding DNA Sequence Number=SeqID_18794
MRLHILRGMKAEVILAFADICTHEEFYARERDERDHDSGEQRRHSRMGVGRRGVAQPTGGGAGWDDGGAVVVEAGGGRGRHGGAEEEDMTYGEGFTVYRGVRAIDLGADPPPRGTRRRGVDTQDLWRRPPGTCHVPCHVGKIDANDVGAALR

SEQ ID NO: 62170 - protein, 130 aa, Zea mays
  Coding DNA Sequence Number=SeqID_18795
MQYLNKFDHLSQYAIDQVNTDLKKKNCFMRGLNDRLQRKMATCLDLTYSKAISTALAVEDKNTCQGKSKGFGVTGPIRDLRSEPVGAVLLLETCHYAEALWMIASALLLRGSVEGVSSYRIFGDEAYPQQ

SEQ ID NO: 62171 - protein, 240 aa, Zea mays
  Coding DNA Sequence Number=SeqID_18796
MGLSKIRWTRTTVGGPNDLGGSVTAGIGAKPISSDMPRTRKTARKSTGPIGVPCHQLAPRHEGSSSGNNNPIEDLEAQVEQLQTELRHRNRVWEEDGQRINELAADVRRLQDELAERGLAVDWAINSRSVAWDREAKARARVTELSATLDNLQMPSRTRAHDGAGTFRGREDTPNPPPVPPTLAEAITALVNATADNTHFLREMAGNQFQQQGGRAPPQGPRETSYLDFSETRPPLFVKA

SEQ ID NO: 62172 - protein, 304 aa, Zea mays
  Coding DNA Sequence Number=SeqID_18797
  Subcellular localization annotation: CTP_CleavageSite=38; ConfidenceScore=5.44e-01
MSLLMMSSRKPKRTARGFLNAASRILPGARSLFQGSSSSQSRQEALLRHARPELRDTPIALQRTTDEEEDDEEEVQHHEEEDEQAHEEEEVQAHEEEDEQAHEEEDEVGIDAEADDDTTEAPVVRRRGTRKGHFVLPPSAPAQSEARVLIISVGDSQWEDTSFDGRGHHRQVNQVLDVYLTVDQYMEVTLPWMEHRPQAYKALCEIWASPEWIEKSNRNRHRQRHQQDEDDDEVVVNHTYGADGHIRLAKRMETYGQEMVKKYGEDYDWRGAPTIDAEVVHSLGGKAHGRVAFSWRLFVAGGLW

SEQ ID NO: 62173 - protein, 338 aa, Zea mays
  Coding DNA Sequence Number=SeqID_18798
  Gene Ontology: Mol. function=protein binding; Cellular component =nucleus; Biological process=defense response signaling pathway, resistance gene-independent
  Homolog annotation: Hit_ID=A2ZRJ5; Match level="QueryCoverage=65%, HitCoverage=69%, E-value=2e-88, Identity=75%"; Hit description =Putative uncharacterized protein
  Pfam annotation: Domain name=BCAS2; Domain location=12-266; Score =288.5; E_value=1.4e-83; Accession=PF05700.2; Description=Breast carcinoma amplified sequence 2 (BCAS2)
MASSATREVLMLEAPPPSDPAAGPWRAVPDAEAIDALPYIDGDYGDAAVKREVDRLVEEEMRRGKRKPADFLRDLPPVPTAGFEVRSAFRVQRRVVRELGFAVVEVTVNQNHPMLSKEYERVRAGKPPFMLDMSRYGLEPPPMNKRNDVGAWRQALRNAQSQLQHQIIRIENLELMLKYGVDVWKLQNRQMESVLSRMQKMAVEYNERIENVNRERKFHQQNTGGQLHALKMEWQELCQKNIAIQAACVDLQNHIDQLKLEAKELYVYSLLPPSLSLGLFIVWLQPSPTQEDHSKPHIEAMYMLVCIVSKPLNPWVHLLPAVGAPSYLIEVADTGPAN

SEQ ID NO: 62174 - protein, 57 aa, Zea mays
  Coding DNA Sequence Number=SeqID_18799
MESHDLRAERESQLVGGNEIDGSGYDYGAGCQHCNHCSGEDEAVEGDFQEFQDYDEF

SEQ ID NO: 62175 - protein, 86 aa, Zea mays
  Coding DNA Sequence Number=SeqID_18800
MCDHRSHHKSKINLHPLHGRNPQLKMRSKELKMIAMIKGELMKNRIRRRKKKVHMCHTHEFAPPYKEVIWVKDALEDLDWVMAIQE

SEQ ID NO: 62176 - protein, 66 aa, Zea mays
  Coding DNA Sequence Number=SeqID_18801
MGQKVSELEASKKNKHITSLEAKLKREKEEYEAEINKIRRTSAEAAVDLSAAQVKIGDLNDEVNHM

SEQ ID NO: 62177 - protein, 153 aa, Zea mays
  Coding DNA Sequence Number=SeqID_18802
SPREATPPPARGAGMPTTRAGAAGLFFLAPAGDRVCEELLPRASAGGAPAPPLSAPAPGVAAGGDPDGGGGDSSSSHDTDLSADQELEGWVARPITRDAARGRGVYPDRWEATCLVRRPENSLWGAEHPYRSPRRGHQSYGNPDCKPKIDLEP

SEQ ID NO: 62178 - protein, 123 aa, Zea mays
  Coding DNA Sequence Number=SeqID_18803
MWWHIEENRRSERGGARGGTARSERVPSDAWMQMARRTTREAEQASVDVRACNAGGGGPRGRGRMTMRERHRGCGHLQLVYSRWSEGEEQLFVAEFDDTRSRGCGSRMDEDVWLIEREIKREA

SEQ ID NO: 62179 - protein, 88 aa, Zea mays
  Coding DNA Sequence Number=SeqID_18804
MKPIGKEKMNSEQDSPSFSERILNLEDGILFKGRHLLPPSLTAKRGPPVRRSFHLAPPRQARALVSRAATATSATGESPKADVVPSND

SEQ ID NO: 62180 - protein, 144 aa, Zea mays
  Coding DNA Sequence Number=SeqID_18805
MGKNNKRKREPTPPSEDFGDSEYSEEEFSSESEGSPAPVSPPASSDDSDDSQGIAAEVWTYIQAVERSGLEGSDESECSSDEEDSDGGDEDEDDGDDDDDDDDGDGDGGGSGRGGGDGSRGSTKGDSSEGSTKGGGSGRGRASG

SEQ ID NO: 62181 - protein, 28 aa, Zea mays
  Coding DNA Sequence Number=SeqID_18806
MAGGIEIAGAKERGLAGEDSKGRRRGWV

SEQ ID NO: 62182 - protein, 54 aa, Zea mays
  Coding DNA Sequence Number=SeqID_18807
MESHDLRAERESRLVETFWFTGGNEIDGSGYDYGAGEDEVVEGDFQEFQDYDEF

SEQ ID NO: 62183 - protein, 113 aa, Zea mays
  Coding DNA Sequence Number=SeqID_18808
MRTQIICVGHLITKILIEICLRAYFPFKAANNDYLMQYYNYEEAKVAQVFDDECDDDRMLFSSDVVLVSVPSTSSAMLSPMQASLLRLVGVTAVGTNSTRIAAGSSLVGTYLS

SEQ ID NO: 62184 - protein, 181 aa, Zea mays
  Coding DNA Sequence Number=SeqID_18809
  Homolog annotation: Hit_ID=Q6QP51; Match level="QueryCoverage=80%, HitCoverage=78%, E-value=8e-17, Identity=76%"; Hit description =Putative growth-regulating factor 1
MKNLRTSPQQSRNSNSKGKRHLWQAKLAPFHLRHDNRVKKAGPSEGFDSRPRARRVRDDPGYVRYVAEARAMLPSHFDPLLTVLTGKQRYSPRSDYCANHPGLGLSLGHGRRSSPCLTPGLGLSLGLGRRSPPRPTSGLGLGRSLRLARPRASASVEVSASPDLGLGPTTPQGIHHYPTPS

SEQ ID NO: 62185 - protein, 139 aa, Zea mays
  Coding DNA Sequence Number=SeqID_18810
  Homolog annotation: Hit_ID=Q5NKP3; Match level="QueryCoverage=30%, HitCoverage=17%, E-value=4e-14, Identity=85%"; Hit description =Putative uncharacterized protein 9C20.7
DEEVTDVGQHVVEVLAAVVDLQGGEGDDEYYNYEEAKVARVFDDECADDCMLFSSDVVLVSVLSTSSAMLSPIQASLLRLVVVTAVGTNSTHIAASQESSILAMSCVFDDYYIKDYGVILAPEVTQRRIDNNDHSPSSG

SEQ ID NO: 62186 - protein, 82 aa, Zea mays
  Coding DNA Sequence Number=SeqID_18811
MGYMSGDQGSNCYAPQFGIAPKSVEERRKIKLVVASPNQGKRALGPGFGFGQTQAPVVERIGQCASLSELCASPSFVEGAEM

SEQ ID NO: 62187 - protein, 86 aa, Zea mays
  Coding DNA Sequence Number=SeqID_18812
  Homolog annotation: Hit_ID=A2X781; Match level="QueryCoverage=77%, HitCoverage=17%, E-value=3e-11, Identity=46%"; Hit description =Putative uncharacterized protein
  Pfam annotation: Domain name=LRRNT_2; Domain location=50-83; Score =18.5; E_value=0.011; Accession=PF08263.3; Description=Leucine rich repeat N-terminal domain
MAVKLMRRNVPIKSIMCNSKSPSKLAMLMVLFFLYCYRVEKVHCSTVHENNQDFHSLLDFKNNITNDPKGVMNSWTNNTHFCSGTV

SEQ ID NO: 62188 - protein, 437 aa, Zea mays
  Coding DNA Sequence Number=SeqID_18813
  Gene Ontology: Mol. function=protein serine/threonine kinase activity; Cellular component=cytoplasm; Biological process=protein amino acid phosphorylation
  Homolog annotation: Hit_ID=Q6ZI44; Match level="QueryCoverage=74%, HitCoverage=89%, E-value=1e-175, Identity=92%"; Hit description =Serine/threonine-protein kinase SAPK6
  Pfam annotation: Domain name=Pkinase; Domain location=4-260; Score =299.4; E_value=7.1e-87; Accession=PF00069.16; Description=Protein kinase domain
  Pfam annotation: Domain name=Pkinase_Tyr; Domain location=4-258; Score=27.9; E_value=4.2e-14; Accession=PF07714.8; Description =Protein tyrosine kinase
  Pfam module annotation: Pfam domain module=Pkinase::Pkinase_Tyr; Domain location=4-260::4-258
MEKYELLKDIGSGNFGVARLMRNKDTKELVAMKYIPRGLKIDENVAREIINHRSLRHHNIIRFKEVVLTPTHLAIVMEYAAGGELFDRICSAGRFSEDEARYFFQQLICGVSYCHFMQICHRDLKLENTLLDGSPAPRLKICDFGYSKSSLLHSKPKSTVGTPAYIAPEVLSRREYDGKMADVWSCGVTLYVMLVGAYPFEDPDDPKNFRKTIGRIVSIQYQIPEYVHISQDCRQLLARIFVANPAKRITIREIRNHPWFLKNLPRELTEAAQAKYYKKDNSAPTFSDQTVEEIMKIVEEARTPPQSSTPVAGFGWAEEEEQEDGKRSDDDEQYGEDEDYDGEDEYDKQVKHQPLGRNDRHGCANLAQSGGHSGELELRRQGTVEIHFHRTGHRPPPWCAGLRGRGILYLDLGRVHYQAIRGMSSPSALGGRRSLCR

SEQ ID NO: 62189 - protein, 146 aa, Zea mays
  Coding DNA Sequence Number=SeqID_18814
MGKSNKRKREPTPPSEDFGDSEYSEEFSSESEGSPAPVSPPASSDDSDDSQGIAAEVWTYIWAVERSWLEGSDESEYSSDEEDSSDSSEEGGGGDGGDDDDDDGGDGDDGDDSGGGGDGGSKGGNGGSSRGSNGGGNSKGSNKASG

SEQ ID NO: 62190 - protein, 74 aa, Zea mays
  Coding DNA Sequence Number=SeqID_18815
MFYFEKQRQIRKVQKTRATARLLLRPFIEYKHSRGATYQEIELLVTKWNEAKQPREIKAIFTTVTVSAERNKYV

SEQ ID NO: 62191 - protein, 735 aa, Zea mays
  Coding DNA Sequence Number=SeqID_18816
  Gene Ontology: Mol. function=DNA binding; Cellular component=nucleus; Biological process=regulation of transcription
  Homolog annotation: Hit_ID=Q6ZI39; Match level="QueryCoverage=82%, HitCoverage=80%, E-value=1e-82, Identity=38%"; Hit description=Myb -family transcription factor-like protein
  Pfam annotation: Domain name=Myb_DNA-binding; Domain location=177 -226; Score=27.8; E_value=4e-05; Accession=PF00249.22; Description =Myb-like DNA-binding domain
MAFLCFHRTQALRMIKVLKPLLVDLERDETARFHHSIKLFSDCSGTLEAIRRRDNTLNQESLEKTQGFCLKVLKKWQIQCRRLPHEYGRGKPCTANAKALISRSSREQASGHRINLDVPALNTQNEKIVRVPSKQLAQSHRVTNVTCPVSNPKQLSHIVPSPTHLDPNGASKKRKKAKAWSKEEDADLAAGVQKYGEGNWEVILHKCNFDNTRTPDQLSQRWALKRPGGSTKPASTKHASVGSEERSATIKALHLAVGPMPVSSALRSGREQSIQHKSTAFAPKMPQVRSAVTPSLAPALALPVQPLRVAAEVQSPLRHGQQAPGQGAPPKLSNASNNTRKKQAALPNSTFSPSSIQAAAIAAGGRLATASTAANLLKAAQSKNAVHIRSLGATSLKSSASFDHGTQSGGSQHLESLNASAVNGVSGVSAVNQSGPPAGAETKKALGTTLAPVPCDSEENEDGSEFCAITLDDLFPEDAKQPETVDTKAKQPETTGPKAKQPENADPKAMHQETMDPKSKQPDTLKVGILDPKDKDMLEFDQYVASQGAHLNTDDLNKSKCTNSASQAQGLVGSQKNPLKLTPVDGKANPVTAAGRGKPVAAGVASTGKKATIPISHLAAGTPRGIVDTVNANAPIRRTLTRRAAALVPAGCQAPPPKHAIDAKGCQMTNSIATFVSSGVPASSQASTPAKDANKASPPSSSCQPKPDSVAVNGAIRAVKSVAKKGNLPAAAARQ

SEQ ID NO: 62192 - protein, 151 aa, Zea mays
  Coding DNA Sequence Number=SeqID_18817
MTVGEGLCRMAHRIVRCASHVTRLLGSNRLELLTMGPPDNPVVHRTGHVHCPVRLLAPALTSACAGALFTVPCSVADNHWRGRPLLRLAHRTVRCYTGQSGELERSGLPELPKVESLEWNSLVHRTLSGGTPDSPVRQTRAVFGLSFALFI

SEQ ID NO: 62193 - protein, 72 aa, Zea mays
  Coding DNA Sequence Number=SeqID_18818
MEIISGEDLRADYFLKSTRSSGATPIGSPTSSPACARGPTYSDHHPRRPAHRRDRQDLPYTLDHFTGAISPP

SEQ ID NO: 62194 - protein, 347 aa, Zea mays
  Coding DNA Sequence Number=SeqID_18819
  Gene Ontology: Mol. function=transporter activity; Cellular component= membrane; Biological process=transport
  Homolog annotation: Hit_ID=A7PQI8; Match level="QueryCoverage=47%, HitCoverage=24%, E-value=2e-69, Identity=78%"; Hit description =Chromosome chr6 scaffold_25, whole genome shotgun sequence
  Pfam annotation: Domain name=Xan_ur_permease; Domain location=1-347; Score=-41.2; E_value=1.5e-06; Accession=PF00860.11; Description =Permease family
  Subcellular localization annotation: CTP_CleavageSite=56; ConfidenceScore=5.36e-01
MVIHGHDTTLDIMLKLVSAPYLWLSLGSPTFSTILSPLRLLCSPSFIFHSWLATNSSSMRRSVRNGIKTGMLLYSFPLESHIRALDHYCPHEQQLLPVEDHVLGARQSIINLFQISLDLEYGSFPDVDIYGDLGFTFPWWDKRDIVFALQTKKEISFSLGVQKQYLRKIKLFGYKVFLIYAWGTPVFSWKMGLVMCVVSVIASVDSVGSYHASSLFVATRPPTSGVVSRGIGVEGVSTVLAGLWGTGVGSATITENVHTIVVTKMGSRRAVGFSAILLVLLSIVGKVDAFIASIHDVMVAALLCFMWAMLCALGLSNLRYRATGSSRNSIIVGLALFLSLSVPSYFQ

SEQ ID NO: 62195 - protein, 65 aa, Zea mays
  Coding DNA Sequence Number=SeqID_18820
  Subcellular localization annotation: CTP_CleavageSite=39; ConfidenceScore=5.14e-01
MEAAGYPFAVSPPFVFRLAPTHLGWDTQRQFTRRARDPPGSKRRQNHPATGLPVHHSSRLNRRTF

SEQ ID NO: 62196 - protein, 663 aa, Zea mays
  Coding DNA Sequence Number=SeqID_18821
IPKGPAKTPRRLSGFIKLGRKRSGGFEGWGLRGSQAPPGGEFGRLSICKGAGATGRRGSLQLEEGGPPVQPECRRSRKAAPSVSRCRGKRVADFGTDINVDDYLGGSDEGQLAIVAPAAAIATAAIVPKTRGEALGARGEVSALAVVRDEAGAATRRAEGGDGGAESGPLSYTLSLFLGIGLTCALQVADFASRTASGALTAAVSAEVERLRTQHADAVREKSASDSKCRKLTDKVAALEREKADLRRQLAGERREANEAIAKEQAAQAEAKLARAEGNLAKELAEHLQERLTALESRVKGAEATMRAEAERTRTQLMDTYRELGARTGDFEVPDREPGLRCLEWVQEELQELPTVMGGFMSYASLADEDFERDVYKVEYPVVKESAGALYDRMWGPHGREVVRERAEIVWAQVTLSALPDPEPTPAEAVSGVALEPTPETTEDAPDAPTSAAAGEDLPPKVAEGAPDAPAAVVPSAEDPAAVAAETTAEAAAEPTAEAPAASGPSQVQDFGPAHATATTEFLAASTAEGGNEYGGSASEFFDFTDSGSSVEWTEESSEEDLDYFAALDMAAAEASPHAADARDVPGPSTGRRRRRAVAKRRVSTEEGARLRVSRAGRQELLSLPAAASTGEGELRSLFAGEELRIMLFNYREMGIIPKVEPM

SEQ ID NO: 62197 - protein, 156 aa, Zea mays
  Coding DNA Sequence Number=SeqID_18822
  Homolog annotation: Hit_ID=A2Y3P0; Match level="QueryCoverage=91%, HitCoverage=16%, E-value=8e-15, Identity=72%"; Hit description =Putative uncharacterized protein
MYDKLRHSRRLDAVQSGCSTLSIVKQGDLMVVANVGDSRPSQESSILNMSRAFDDYYIEDCGVILAPEVMQGRTDNNDQFVILATVGKQSYVAACAAMYDKLRRSRRLDAVQSDCSVLSIVKQGDLMVVANVGDSRVVLGTAFDDDVITSSSSSST

SEQ ID NO: 62198 - protein, 92 aa, Zea mays
  Coding DNA Sequence Number=SeqID_18823
MGDEEGSRGVVVELMAIITLEGMDRTMELGGDPGKELGEGEAEDRRSPEITVDKIKGLNSPGRGSGKRKTRVLAELTSMTEALRGASGIGDV

SEQ ID NO: 62199 - protein, 88 aa, Zea mays
  Coding DNA Sequence Number=SeqID_18824
MARRLPCPRCRHGGARALDDGQRAALAHVVRLGGAAVPVPAHAQGGLHVPHARPTTFGAALGALLSWKEGRYSIYVHALPSYRSNFTS

SEQ ID NO: 62200 - protein, 180 aa, Zea mays
  Coding DNA Sequence Number=SeqID_18825
MAPNEIIKPGNPTANLRWSNQVIDQLPAAAQGMEQHAWWPVSWYPMWASGRLNRWQGMDPCVSGYLGERGSSRGSKDRHELRWATRPAAAESGEEEGSTLAPEDRHGERGAHDAWVVRHGRRWKGTVGEDFGVAQGRRRCKEDVRRFGSDLIVGRARVRATKTGEDAGRMRGTSVAPPSL

SEQ ID NO: 62201 - protein, 256 aa, Zea mays
  Coding DNA Sequence Number=SeqID_18826
  Gene Ontology: Mol. function=heat shock protein binding; Cellular component=endoplasmic reticulum lumen; Biological process=protein folding
  Homolog annotation: Hit_ID=A5BIW0; Match level="QueryCoverage=89%, HitCoverage=93%, E-value=1e-44, Identity=60%"; Hit description =Putative uncharacterized protein
  Pfam annotation: Domain name=DnaJ; Domain location=30-92; Score =132.9; E_value=9.3e-37; Accession=PF00226.22; Description=DnaJ domain
  Pfam annotation: Domain name=DnaJ_C; Domain location=142-255; Score= -8.7; E_value=9.7e-06; Accession=PF01556.9; Description=DnaJ C terminal region
  Pfam module annotation: Pfam domain module=DnaJ::DnaJ_C; Domain location=30-92::142-255
MTALGKGGVARFAAALFVLLNLSAAIAGKSYYDVLQVPKGASEDQIKRSYRKLALKYHPDKNPDNEEANKRFAEINNAYEVLTDQEKRKIYDQYGEEGLKQFQGGGGGGGGMNIQDIFRNFFGGGGGGMEEEEEQILKGDEVIVELDASLEDLYMGGSVKEVLFFEEGEPKIDGEPGDLKLQALVGFEKTINHLDNHLVEIGTKGITKPKEIRKFKGEGMPLYQSNKKGDLYVTFEVLFPKTLTDEQKGKLKDVLV

SEQ ID NO: 62202 - protein, 166 aa, Zea mays
  Coding DNA Sequence Number=SeqID_18827
MGGGLLAAASALRSVLPLFGPPEQKSSSSLLLEQVTARHSPVDYLNRFTKHESPRVKVTSEPGCPLAGPTPELTSQGLGSGWRPWKMVGRGPRGDRPSRLLGPDSRRRPWRRWPGRGDDVVLRSGGLRTASPSEARSNLAEVVVDAEGAAAPFQRQDPSLQDRIVL

SEQ ID NO: 62203 - protein, 380 aa, Zea mays
  Coding DNA Sequence Number=SeqID_18828
  Subcellular localization annotation: CTP_CleavageSite=69; ConfidenceScore=5.74e-01
MQAACNRAKWTRFSDSQRAQPGGPGSRVMQSARRMLHASNCTVTCATTAPLRLRNQYRDSRRPGTRPSSASLDRRRFWQEERATLRLRRNNRAKKGVRRLAPEGFTAASDAERGMTRGDRVRQITRRYFWACLWAPSRPLTNGARTSTQITRLQLTGDTMFGAHRGGSRAALANPAPAEPLTASTYQPENLGPDRLGLGLSPGRRRTPLRPTQGSDSGSAPEDGELRSARPRARTRAKSRKTANSAPPDPGLGLGLSPGRRRTPLRPTPGLRLGSAPEDDELRFARPQGSDSALASAERPPPRPTQGLGLGLGHGRQTRPRLRRSLHVAQPRAQANHEDVSKDSTAPTAVPPPGSVAPPTATTSHQLGAKISPAATSACT

SEQ ID NO: 62204 - protein, 476 aa, Zea mays
  Coding DNA Sequence Number=SeqID_18829
  Pfam annotation: Domain name=Extensin_2; Domain location=63-462; Score=-137.6; E_value=0.066; Accession=PF04554.4; Description =Extensin-like region
MGTYQWSAEVRRRPSTELGRNPPAVNSEYYIKGRTRALLERVGHAGTRTGQALSWGRSLPSPAWTLRHSLVGLGTPRSRNADSSACSRLSRGSPTLLPTAAARPRFRRTPSFDGAPSFDDHSHAPAPSHSHARASKQPPHGALPPHRTRATIARSAPSPRMERYLRIVRSAEPFPHGFSNSMLHSLLSSSPHDALPSPKTAALHDERPEDSKEGRVGQDADLHEDPNRSVGMAAVAEQEKELLSSVVDDTSSYSGSDPLHPWLWYGTTAYRSIPETLTNRRVVSFRSGTVALGRVSRKLSVPPSPSMRQRNPARAVEHLDERDVGDVGVGRRRRHMQFGAWTPATAPIPSGHPASPMSHTPHHPLSCPHPHNNGGVHTEPHPSPARARSPARHHLRPQVRHTPATSPSSCSCCSPLVPSPDRVAPLPWSHSPNAPAPETPPGRCLLRSSPCSASLWAPSPFHSRRHRARPFVLKVA

SEQ ID NO: 62205 - protein, 182 aa, Zea mays
  Coding DNA Sequence Number=SeqID_18830
MALPVDVAGLRPRLGDVEAPPKPRSSLSSVAEAESEPLGRLYADGGYQLRIRSLKDHNARCKCATNVKLGAVVFHETARQTVDLPSTVHVNALLRPLLKCNHVDPPHWSESRSSRTLLVHVSAPRPPRASLANRQTPDSFQAALNAGTKRPRRETENGDAGGEEEEGYNGEGEAVSLHAWER

SEQ ID NO: 62206 - protein, 98 aa, Zea mays
  Coding DNA Sequence Number=SeqID_18831
MIVQKYLIRSNRKKKGNLGELDNVQLKPSKNLMKPKDVIKDCKFIQNLKNEDCNLADGEYILVLEQGVAQEVVQEPAPEPAIEDLPAPALEGKPRFYA

SEQ ID NO: 62207 - protein, 119 aa, Zea mays
  Coding DNA Sequence Number=SeqID_18832
MARVAGLRWLGLGRLLAHRHECLYLARALGNTWGVTALPLKGISSRDLGRDPLEGYQEGVMIQRAGGGGVLGYVPTPFGRKSGKRERRKSSVSDVASSSVWLLLILYIRIDLARGDLPM

SEQ ID NO: 62208 - protein, 53 aa, Zea mays
  Coding DNA Sequence Number=SeqID_18833
MVGTSAVTARRQPGSVEHCTMQELVDGVTWPTTLPPGWTVEWDVALAGEEHEE

SEQ ID NO: 62209 - protein, 180 aa, Zea mays
  Coding DNA Sequence Number=SeqID_18834
MTNTAGYRVIPYPTLMGKRGKGWPHHADGKHKRPPSPPLEDFGDSEYSEEVSSEYDRSPTPASPVASSEDSDDSMGLSTAAWTYWRSIERAGIGGSDDSEETSLEEVEDSSNSEEWSNDEGNDSSGDDDGKGGGDDDYEDGNNEGDRGGDSKGDGKGDGSGSGKGDGKGDGKAGDIMLLA

SEQ ID NO: 62210 - protein, 38 aa, Zea mays
  Coding DNA Sequence Number=SeqID_18835
MVIGGVAFLAGAAVSGGAVNVYMAILGRALLGVGLGCT

SEQ ID NO: 62211 - protein, 59 aa, Zea mays
  Coding DNA Sequence Number=SeqID_18836
  Gene Ontology: Mol. function=sugar:hydrogen symporter activity; Cellular component=integral to membrane; Biological process =carbohydrate transport
  Homolog annotation: Hit_ID=A2Y936; Match level="QueryCoverage=100%, HitCoverage=10%, E-value=8e-16, Identity=67%"; Hit description =Putative uncharacterized protein
MVLSCVTATLGGAIFGYDLGTSGGVSSMGSYSFLEEFFSDVYHRMKGDVRISNYCKFDS

SEQ ID NO: 62212 - protein, 206 aa, Zea mays
  Coding DNA Sequence Number=SeqID_18837
MDPNLKSMFEEMMRLMGTKVFKEIAKGFADHDAILNQRFADLSVAEENRNVLIQALEEAATEFDRSFTAWKPEIGSSRSNIRLEISKLNKFFERDACVDSASQPGVLGTESAPSRQPAGSRADGPIDHRTDNHTRDDESGIRSSILMQQPLDLDTACVLASLQEEEFISTKKPEYKRQVDPIYSAKSEYWPTAKPANPLPSPTISR

SEQ ID NO: 62213 - protein, 115 aa, Zea mays
  Coding DNA Sequence Number=SeqID_18838
MAGMAHRSFSVPLEAFSPPFSPLCPWIHGLFPAIEFAVAPSSPLPNSGDPGATLARASLKSGDLTAAERSSAARSHLLPHDKEQSEVPECVVADLLDQKPGEGKCPLTYYVLHTL

SEQ ID NO: 62214 - protein, 257 aa, Zea mays
  Coding DNA Sequence Number=SeqID_18839
  Homolog annotation: Hit_ID=A2YGC2; Match level="QueryCoverage=70%, HitCoverage=78%, E-value=2e-11, Identity=30%"; Hit description =Putative uncharacterized protein
MPPAPPQGIPGAGGDPNGDNDDAGGSSSHGTELSEEPEPEGWIARPITRDASRGCHFHDTLDTLLRRAFDRHTWSIEYRCVVYQHRRGLYLDQWEATCLVRRPDDDLQGVEAFSEHYSITEKDTAEAAMQDAARRTLSQYCLLFSGVADGLDLKYYPRRSTGSARGVIASPVGEGNPKLNSMVNLAAVLNTELDHALDELGKVRAKVVELRAECAARHYLDGGSPAPVRIQHPYRSLPHGRFDYGALDYRTHIDLDP

SEQ ID NO: 62215 - protein, 72 aa, Zea mays
  Coding DNA Sequence Number=SeqID_18840
MTIEQMFLMQTQAVQAYETTDQAKDGGKKSFEVPSAREKVKETRNPKPGVKKKTCKVKVDRVKSYGASRITT

SEQ ID NO: 62216 - protein, 83 aa, Zea mays
  Coding DNA Sequence Number=SeqID_18841
MGVTGILSDSTHDAVTKECVALVSNKTFAEWYSTENEDGMPGCSDAGIDFILAGCSDGTTAEETASGTAAAGSDADAGAGDLA

SEQ ID NO: 62217 - protein, 78 aa, Zea mays
  Coding DNA Sequence Number=SeqID_18842
  Subcellular localization annotation: CTP_CleavageSite=65; ConfidenceScore=5.14e-01
MAEESVGSAMTSWGNDDRWGHECSDRANARRGVTAAGMRVPQSSEGRKSRSTRVRLPCGPNVSARASGRKMGCAGVNG

SEQ ID NO: 62218 - protein, 195 aa, Zea mays
  Coding DNA Sequence Number=SeqID_18843
  Homolog annotation: Hit_ID=Q75HV8; Match level="QueryCoverage=33%, HitCoverage=11%, E-value=3e-17, Identity=62%"; Hit description =Putative uncharacterized protein OSJNBb0092G21.7
MGVSDFCARWRAFNALQEGLKFSSSRFNYRAELRHISLLFCLDIPTLETCCAADFSRDAWLGRWTRLAKNDNCEDIDAVARYIREIHLRRIPNPHPHNRLKAPPRASPAPAPPPPLHDATPSPRPERRRATALWAPRSRSTRACLTYAPLHRSPLPSAQIHDRCLPASRPQSPQHRDPVAPPPLMAVWTPRGLCL

SEQ ID NO: 62219 - protein, 68 aa, Zea mays
  Coding DNA Sequence Number=SeqID_18844
MRLHILRGMKAEVILAFADICTHEEYMKCDITMLLLWFLPARYLIHVGNEGSSSTSTFTLTNAAQAQP

SEQ ID NO: 62220 - protein, 219 aa, Zea mays
  Coding DNA Sequence Number=SeqID_18845
  Gene Ontology: Mol. function=endonuclease activity; Cellular component=cytoplasm
  Homolog annotation: Hit_ID=Q2HUP4; Match level="QueryCoverage=75%, HitCoverage=58%, E-value=3e-46, Identity=50%"; Hit description =Endonuclease/exonuclease/phosphatase
MGVLGDSPRHADGVCRLATWEFGELWCRTVSGGNGFVVGAQRCRRISACVGGNHMDRPTWCKLQEIVDVAVRRWVNILCVQETKWKGQKAKEVEGIGFKLWYTGNAANKNGVGVLIDKSLKDGVVDVKRLGDRIILVKLVIGDLVLNVISVYAPQVGLNENSKREFWEGLEDMVSSVPVGEKLFIGGDLNGHVGTSSTSFKGVHGGFDFGLGFKKERKS

SEQ ID NO: 62221 - protein, 46 aa, Zea mays
  Coding DNA Sequence Number=SeqID_18846
MAVMGSTSEKMYLCQVRKQQTLVVSVPWWFQKMKSKNDAAGGRVPP

SEQ ID NO: 62222 - protein, 133 aa, Zea mays
  Coding DNA Sequence Number=SeqID_18847
  Subcellular localization annotation: CTP_CleavageSite=49; ConfidenceScore=5.18e-01
MKLIVPFDCTTSPWFRRNTRRRRDHPPMHVDRTISATSTVEPYTAVTARASRRTSLAAGRVCHLFHLVLKVKENRKDCNLADGEYVLVPEQGVAQEVAPDPAPEPAPEDLPAPALEGKPWFMHNLLSILFYYA

SEQ ID NO: 62223 - protein, 248 aa, Zea mays
  Coding DNA Sequence Number=SeqID_18848
MTSHGSTDEGNAQSHTDGLAREGFPRILWEVLQGAGYMTPPQYAVQLFEKNRVPRCRVRMTLEPHPLQPGWRSLNSESFGYRAEDTIEAIALHGLTTFCGFHPLELSTHAIGLFPAEKEDDPMWKDRVEHAKDIWAIYPGQTAHLTVRCMNALYRLQVMRGEAMSHLMALLEATKITLDNREEHVVDLSTEMVEKDLQVEQLLDEIHELEELVGTRENTIEVLEDQLINTQQQLAEANQHLDMHHQEI

SEQ ID NO: 62224 - protein, 115 aa, Zea mays
  Coding DNA Sequence Number=SeqID_18849
MGKPIPSLIMLLLSRGRVPLDCPTWWQGGRPSHSSNHVLQRTCKIMPQARLSILILSLTYPQHGSSSLISCEKQTIRIEFLNLASDRTCTHHNRNGRTRLKSREEGNLRASSLRY

SEQ ID NO: 62225 - protein, 203 aa, Zea mays
  Coding DNA Sequence Number=SeqID_18850
MQPGCTPPPAVTQDGDLQFDGGGKRAGLRPLPLPQPQGFSSLVLGRGVCRVGVGPCVGGGPLLPSVIGGKGVRRSWHGQLQRARLSEPSGFGAAPGAAFHHGSWKRFRHRRGCRHHPRTDLQLYGLLPVLASRVGGMGEGLLAAASALRSSLPLFGPLEQKSSSSPLLGRATTSRSSVFCCSAGLPSRVGLFVPAEVEPEFRL

SEQ ID NO: 62226 - protein, 94 aa, Zea mays
  Coding DNA Sequence Number=SeqID_18851
MSKNTRDTRFIPRFGHTTKVPYLLVEAPTKSRVSFNPNPPFADHKGQAHTIIFAQTSGRENPSSTARRQVQLVYGQRGSQLKLRNLNSAEVQLS

SEQ ID NO: 62227 - protein, 927 aa, Zea mays
  Coding DNA Sequence Number=SeqID_18852
  Gene Ontology: Mol. function=hydrolase activity, hydrolyzing O -glycosyl compounds; Cellular component=cellulose and pectin -containing cell wall; Biological process=carbohydrate metabolic process
  Homolog annotation: Hit_ID=A7P375; Match level="QueryCoverage=98%, HitCoverage=99%, E-value=0.0, Identity=68%"; Hit description =Chromosome chr1 scaffold_5, whole genome shotgun sequence
  Pfam annotation: Domain name=Glyco_hydro_31; Domain location=269-761; Score=886.4; E_value=1.4e-263; Accession=PF01055.17; Description =Glycosyl hydrolases family 31
MLSFSRSAILSYLLWCLLFLTLASSNGAVATAKPKAGCGYKLVSLVQLPNGGGLVGYLQVKQRTSTYGPDIPRLRLFVKHETRERVRVQITDADKQRWEVPYNLLPREPAPPVTGGKVTGAPFTGAEYPGEELVFTYGRDPFWFAVHRRSTRQPLFNTSAGALVFKDQYLEVSTALPKNAALYGLGENTQPGGIRLRPNDPYTIYTTDISAINLNTDLYGSHPVYMDLRSLGGRGVAHAVLLLNSNGMDVFYRGTSLTYKVIGGLLDFYFFSGPTPLAIVDQYTSMIGRPAPMPYWAFGFHQCRWGYKNLSVVEGVVEGYRNAQIPLDVIWNDDDHMDAAKDFTLDPVNYPRPKLLAFLDKIHAQGMKYIVLIDPGIAVNSSYGVYQRGMERDIFIKLDGQPYLAQVWPGPVYFPDFLNPNGVSWWIDEVRRFHDLVPVDGLWIDMNEASNFCTGKCTIPKTHQCPIPDTKTPWLCCLDCKNLTNTRWDEPPYKINASGQTARLGFNTIATSATHYNGILEYNAHSLYGFSQAIATHTALQGLQGKRPFILTRSTFVGSGAYAAHWTGDNKGTWENLRYSISTMLNFGIFGMPMVGSDICGFYPSPTEELCNRWIELGAFYPFSRDHANFASPRQELYVWDSVAKSARNALGMRYKLLPYLYTLNYQAHLTGAPVARPVFFSFPDFTPCYGLSTQFLLGPGVMVSPVLEQGATSVSAMFPPGTWYNLFDMSKVVVSRSGAPVKLDAPLNEINVHVYQNTILPMQRGGFVSKDARATPFTLVVAFPFGATQADAEGAVYVDDDERPEMVLAEGQASYVRFHASVRGKAVTVRSEVLMGSYSLHKGLVVEKLSVLGLEGTGKDLAIQVDGTDATAVATSSPYFAAGGNAKLQGEEGVEDSKNGVMVEIGGLALPLGKSFTMTWNMRIEA

SEQ ID NO: 62228 - protein, 669 aa, Zea mays
  Coding DNA Sequence Number=SeqID_18853
MGGPAEQQKTDGRLAVACSSSSDNDPLYGWPNCSDDGLRADAATTLPSPTPTLEGRGQGPSARRQIPTRILPDEQGTNLPAEAPYRRLPAGRGTGGQADEPDALGQTTPAVDRPRVVEVRPAHRAGERPLPRTSRERVTHEPAREVELRLIPASTPARMMNILEAEGGTKIAARLASPHPGAGGHRLGKTRCIREREDMVAFQGGHPPFKGGSPYLRPQPSRAESSPTHSKVLPCGAGAGSHTSCKPTQSRRSQTAARGAYNRPAVTSDPPLWPRPAGERVGSRAGGMQPRQVGALLQLPTRPAEAQAHASCNRRTECFVHAAAPPLAPPPRLLDCGTNAATRGDPARDPAAPAWRDGQCGQKWAGSNGGGRRAGAAATSRSERRFAFAIMTVSKEGPRKGDTPKRILPREGTRLRAPLLIRGSKAGPPEGFDSRLRSRGPYTHYWSEVRRPAPQKGSTAALGYSGSAPITDQGFEGFTAASDTERGMTMESHQREASSPRTPSPGDRVWQITRSSSETPCSAPIEGNMALFPPSSLRKGDAGAVNIPARELGTRPYTRAMASSHEGTTRPAKALRETLRPRRSETTPPRPRGLHPAGALARTPRNKTQPRKAGPLAKKCDESLQASANTPFKARGLLSGTIIRGTLKAPNSQLVTPISTKLQRPDGCD

SEQ ID NO: 62229 - protein, 47 aa, Zea mays
  Coding DNA Sequence Number=SeqID_18854
MSKNTRDTKFIPRFGHTTKERKPQLNCPEASSAGVWSKRFTAEVEFS

SEQ ID NO: 62230 - protein, 133 aa, Zea mays
  Coding DNA Sequence Number=SeqID_18855
MVDKVQIKDKGKIQLEMPWLEQPRVCSVWSTGLSGGAPDSVRCARLARAKWLLSGLRRRCTAIIHRTVRWCIGLSGGPFTGELVALGNSSSTYGYNSPDCPCVANPSLALCFFVNFKCKGERLQFVEIPRKRD

SEQ ID NO: 62231 - protein, 266 aa, Zea mays
  Coding DNA Sequence Number=SeqID_18856
  Homolog annotation: Hit_ID=A2WKA1; Match level="QueryCoverage=18%, HitCoverage=28%, E-value=2e-12, Identity=69%"; Hit description =Putative uncharacterized protein
MHMKPEKRKRGRRAAAAAAAASAAHSLGHWGRSSHQQSPLTMQRHSPLASPRRASAEPKPGADRRPHPHSTTTKGRTPKRLGAPPLPVPVSHRPTKHTQLCPEAENRQPDMKRTRAQQPKVEEPQDLAANLKPQRRDKQPRQPKSGAKAKPAAGPRVAAATTLAAAAAAAAAAANAASAASSPGPETAPTVPDVCVGGDKDGDADADASAVDWDLDAGLSAAAWWTWGVDEEKLLGWFPFVEEDFRCAGGGAAEVAAFDHDIWSIW

SEQ ID NO: 62232 - protein, 111 aa, Zea mays
  Coding DNA Sequence Number=SeqID_18857
MERNPGAVSELRRLCVRADHTATRRGPSGSSSRNPILCARSRIVHASTAAAASVRIACCILHLRPLHCHVRHHWPGSSYTDLTADIDGRSICLAVVDCAVLMDKLDDSSVI

SEQ ID NO: 62233 - protein, 180 aa, Zea mays
  Coding DNA Sequence Number=SeqID_18858
MALSLAPPEGHRRHEDEPEPGNGRASAGRGGACSRCLLLATRKFLRRSAPPGPLNWNPYLYCDPYAAAAVPGSRLGAAAASVPLASHGGGTAAAEAEPPGSVSVVKLKLERPDGGAALFTDDDALLLAEPAAADRPFTRLPDGTVDMLNWRRTSRVSAPPDTNAAPSGAGEELLDLELRL

SEQ ID NO: 62234 - protein, 123 aa, Zea mays
  Coding DNA Sequence Number=SeqID_18859
MAPSLMPPTLWGGKRAVLWLHLFGFDGFGAASNAASRRRAERGYPSTAWATVTPCAGQQAGFMRVDLTGLAYTTYRDAPGVRKRYSFSCSEVVTLGSAYFRRLEGSFPAGGEFAKPFLVQYSP

SEQ ID NO: 62235 - protein, 70 aa, Zea mays
  Coding DNA Sequence Number=SeqID_18860
METRLRGEKSSEHEPREKERLGAKQRVPHAAGEEVELIGAMDARPEPHFRPDTLELDAAPACSLDQGTPN

SEQ ID NO: 62236 - protein, 31 aa, Zea mays
  Coding DNA Sequence Number=SeqID_18861
MSSKHGLWTALENKSPTPDSLDEVRTPLSEV

SEQ ID NO: 62237 - protein, 170 aa, Zea mays
  Coding DNA Sequence Number=SeqID_18862
MASFGTAHVLGSSVVHRAVRDSRTGTVSSYCSKGGKEAHYRRRWRTPHAADWFAAFGKGEETHHHRRWRAPHAAVHLLRTRRPTPKEHDSWARAPVPEAGSLLSAEVKRRTTASGGMLLTWRFAFSAQGGRRPRSMTRGPGPPCQRLGHLGTRRARSSAALQGVSGGILL

SEQ ID NO: 62238 - protein, 101 aa, Zea mays
  Coding DNA Sequence Number=SeqID_18863
MATTSGCSWPAAVCRGPALPCRVHGSGCWPRKEATYCGDPSVEVFAKKYCLHWQKKVIGSKIAQFGTCTFTPRTGKTSGEVVELVSCTKNKWGTGEIFGFM

SEQ ID NO: 62239 - protein, 75 aa, Zea mays
  Coding DNA Sequence Number=SeqID_18864
MARVARTLLAKDRLKRVVCSRVAQTCSCSGGSVGMVDMQGSNLVLLLMVLSAGGLGLLISLSTSSILLIEDGHLS

SEQ ID NO: 62240 - protein, 102 aa, Zea mays
  Coding DNA Sequence Number=SeqID_18865
  Subcellular localization annotation: CTP_CleavageSite=45; ConfidenceScore=5.22e-01
MPWKWDRVSLNPAIPYMKRQSRTGSGEMARVARTLLAKDRLKRVVCSRVARTCSCSGGSVGMVDMQGSNLVLLLMVLSAGGLGVLISLSTSSILLIEDGHLS

SEQ ID NO: 62241 - protein, 178 aa, Zea mays
  Coding DNA Sequence Number=SeqID_18866
MPFLNNQMVLSSAFTIELHGQDAAAFIREVEAEAVKIVGKCLTMIELTRSWDIRGLNVRLNHVFKLNSLRYGPYPEQGSADVGDAEECKKGGVKHGRVDALDKFVEELAETCVKLGEVMALPVLREVSDRMLKGCLLDDEGSFPLWFEFAFGFYSCCPNEDECVEGLDPVSIKEVFCC

SEQ ID NO: 62242 - protein, 164 aa, Zea mays
  Coding DNA Sequence Number=SeqID_18867
  Subcellular localization annotation: CTP_CleavageSite=37; ConfidenceScore=5.12e-01
MSGAPEDSSANSSPSGKSRGNSTIIHRTIRCTPDSVRCSKEERPQELASFGKLQRLLRYNSPDMSGVHRTVRCNCGATATSRQRSPATAINARQSAQKSGTRVVAHRTLYSTCPVRHRTSRRAQKSELQRSEPNGFGDVAGAPDMSGVHRTVRCTMRQTTPPNG

SEQ ID NO: 62243 - protein, 279 aa, Zea mays
  Coding DNA Sequence Number=SeqID_18868
MNTLSREGCRHYEVFDQADEDLERDIYKVEDPIVKESAGALYDRMWGPHGREVVRERAETARSQAARGERVDDFGALNSALPDPEPNPAAAESEAAPEPPPEIAEGVPDAPAATAAGGDPSSTAAPRAEDHVAVAAEATAEAPATAGSSQVQDFGPVHATATANFLAASIVDGGNKSDEYASKFSEFGDSGSSVEWTEESSDEDLDYFAALDVAVAEASSQATDADVSGPSTRRRRRRAVAKRRTCCAVPAAPWGDFCRDSVRGKLEFFALIVLVRLHP

SEQ ID NO: 62244 - protein, 114 aa, Zea mays
  Coding DNA Sequence Number=SeqID_18869
MNPSGVMQSCEGGGVRPGTPYDRDCEPGAGERTARIEPPRRNGGGRTVRRCRGGSRQIHGGLEVGAVSRKLGYDLSHDPGGLGPIFAPEFKLQRSTTDVALTWRVQGATIPITV

SEQ ID NO: 62245 - protein, 92 aa, Zea mays
  Coding DNA Sequence Number=SeqID_18870
  Subcellular localization annotation: CTP_CleavageSite=14; ConfidenceScore=5.03e-01
MGSFTGAESRFTFMARLVGSTSRFPSLPDGRVEPSSARYCIMSQCFREGCVQQHVLYAEDNAADVSGFNIVQKVTVALCMLAYGGAVDRLDE

SEQ ID NO: 62246 - protein, 452 aa, Zea mays
  Coding DNA Sequence Number=SeqID_18871
  Gene Ontology: Mol. function=protein binding; Cellular component =integral to membrane; Biological process=vesicle-mediated transport
  Homolog annotation: Hit_ID=A9NUX7; Match level="QueryCoverage=58%, HitCoverage=93%, E-value=1e-102, Identity=62%"; Hit description =Putative uncharacterized protein
  Pfam annotation: Domain name=YIF1; Domain location=219-448; Score =345.7; E_value=8.1e-101; Accession=PF03878.6; Description=YIF1
  Pfam annotation: Domain name=Yip1; Domain location=254-416; Score= -23.7; E_value=0.0063; Accession=PF04893.8; Description=Yip1 domain
  Pfam module annotation: Pfam domain module=YIF1::Yip1; Domain location=219-448::254-416
MNLESYTCENCIWQKEETLYHLFLKCNFAKACWTSIGLTSPRIANPEAAALGSGFLAFPTSLPFLPHHFFRPKQEKTKNNPDPPITWAHPPPHHQRPGRRKGKEEPRNPPHRRHRQAGQQIASSDFRRVSDQAAAISLSPHSGIPPPLAASPLVHRPPNARDRPVSVHPRGSWNINLWEVKTGGAMYNNYRNPPGTHMPPQNSQPVQFDNPLYGASSGLIRSGIGVYGEKFLGSSSEFMQSNINRYFSNPQYYFHVNDQYVRNKLKVILFPFFHRGHWTRISEPVGGRLSYKPPIYDINAPDLYIPFMAFGSFIILSGFTLGFMGKFTPEAINLQFTRALIGWGFQLTVLKGLLYSMGGGEVPLLDLVAYGGYLFAGLSLAVVARLMWAYSYYVMMPWMSLCMGVFLVRTMKRVLFTEMRSSERHSSRQHYFLLFMAIVQFPLFFWLGSIGV

SEQ ID NO: 62247 - protein, 396 aa, Zea mays
  Coding DNA Sequence Number=SeqID_18872
  Gene Ontology: Mol. function=translation initiation factor activity; Cellular component=cytoplasm; Biological process=biosynthetic process
  Homolog annotation: Hit_ID=A2YSQ4; Match level="QueryCoverage=91%, HitCoverage=100%, E-value=0.0, Identity=95%"; Hit description =Putative uncharacterized protein
  Pfam annotation: Domain name=Hexapep; Domain location=283-300; Score =7.7; E_value=17; Accession=PF00132.15; Description=Bacterial transferase hexapeptide (th
  Pfam annotation: Domain name=Hexapep; Domain location=301-318; Score =20.7; E_value=0.0056; Accession=PF00132.15; Description=Bacterial transferase hexapeptide (th
  Pfam annotation: Domain name=Hexapep; Domain location=341-358; Score =11.5; E_value=3.1; Accession=PF00132.15; Description=Bacterial transferase hexapeptide (th
  Pfam annotation: Domain name=NTP_transferase; Domain location=37-271; Score=255.9; E_value=8.4e-74; Accession=PF00483.14; Description =Nucleotidyl transferase
  Pfam module annotation: Pfam domain module=Hexapep::Hexapep::Hexapep:: NTP_transferase; Domain location=283-300::301-318::341-358::37-271
MSPRRPSSDVTFLISGLPCVAAGIERGRKERRCFNMKALILVGGFGTRLRPLTLSFPKPLVDFANKPMILHQIEALKEVGVTEVVLAINYRPEVMINFLKDFEDKLGITITCSQETEPLGTAGPLALARDKLADGSGEPFFVLNSDVISEYPFAELIKFHKSHGGEATIMVTKVDEPSKYGVVVMEEATGRVERFVEKPKIFVGNKINAGIYLLNPSVLDRIELRPTSIEKEVFPQIAADQQLYAMVLPGFWMDVGQPRDYITGLRLYLDSLRKKSAARLAAGAHVVGNVLVHESAKIGEGCLIGPDVAIGPGCVVEDGVRLSRCTVMRGVRIKKHACISNSIIGWHSTVGQWARIENMTILGEDVHVCDEVYSNGGVVLPHKEIKSSILKPEIVM

SEQ ID NO: 62248 - protein, 379 aa, Zea mays
  Coding DNA Sequence Number=SeqID_18873
  Gene Ontology: Mol. function=transferase activity; Cellular component= chloroplast; Biological process=biosynthetic process
  Homolog annotation: Hit_ID=Q6EI12; Match level="QueryCoverage=100%, HitCoverage=100%, E-value=0.0, Identity=81%"; Hit description =Phytoene synthase 2
  Pfam annotation: Domain name=SQS_PSY; Domain location=126-377; Score =351.2; E_value=1.7e-102; Accession=PF00494.10; Description =Squalenephytoene synthase
  Subcellular localization annotation: CTP_CleavageSite=54; ConfidenceScore=5.71e-01
MAAGSSAVWAAQHPACSGGKFHHLSPSHSHCRPRRALQTPPALPARRSGASPPRASLAAAAPAVAVRTASEEAVYEVVLRQAALVEAATPQRRRTRQPRWAEEEEEERVLGWGLLGDAYDRCGEVCAEYAKTFYLGTQLMTPERRKAVWAIYVWCRRTDELVDGPNASYITPTALDRWEKRLEDLFEGRPYDMYDAALSDTVSKFPVDIQPFKDMVQGMRLDLWKSRYMTFDELYLYCYYVAGTVGLMTVPVMGIAPDSKASTESVARRGRIYLPLDELAQAGLTEEDIFRGKVTGKWRRFMKGQIQRARLFFDEAEKGVTHLDSASRWPVLASLWLYRQILDAIEANDYNNFTKRAYVGKAKKLLSLPLAYARAAVAP

SEQ ID NO: 62249 - protein, 46 aa, Zea mays
  Coding DNA Sequence Number=SeqID_18874
MGNQEKEVERDGDRETMCRVPDEHGSIRDFELDRPVRVRACPPGQP

SEQ ID NO: 62250 - protein, 676 aa, Zea mays
  Coding DNA Sequence Number=SeqID_18875
  Homolog annotation: Hit_ID=A3B4R2; Match level="QueryCoverage=39%, HitCoverage=61%, E-value=2e-61, Identity=60%"; Hit description =Putative uncharacterized protein
  Pfam annotation: Domain name=RCC1; Domain location=475-533; Score =7.1; E_value=0.12; Accession=PF00415.9; Description=Regulator of chromosome condensation (RCC1)
  Pfam annotation: Domain name=RCC1; Domain location=534-590; Score =6.3; E_value=0.15; Accession=PF00415.9; Description=Regulator of chromosome condensation (RCC1)
  Pfam module annotation: Pfam domain module=RCC1::RCC1; Domain location=475-533::534-590
MAPPKLHDGGSSQLSYGSSHDITPAGCQDLSGCHIGMAFLEKVGRAGPRTGQALSWGRSLPSPAWTLVTPLLQAHPTWARDEHEGRGTSTSLTPVSGHLATPPFALAHALDPSGLGHAAHSLVGLGTPRSRNADSAGGCTSSVPAFAEIFEEGFFSGGSAIRCRIPSSSATDEMVPKQNTDPERRAILCWKMMAIELAWISDTPPTWRASCRCLGPDRAPRVTPQGEPPGLGGSDFQNLPAASWPRMAVPIQRPSARHVSEIGHVGVRCGAPAPEETDTAPTLASQPHARKSKWPPQARNQHQRFARLLRCPLPSASDRNQRWIRRPRLPEEMNGRGTGGGGGGEDEMEEDSGPSCAQGEGAGNKERVVLMWGYLPGVSPQRSPLLGPVPVRLPPTAATAAGDGWRDVCGGGCGFAMAISESGKLLTWGSADDMGQSYVTAGKHEETPEAFPLPSSVVIVRADAGWAHCVAITDEYDVYTWGWKECVPTGRVIGDQSSVGTMEKDERQMAMATDQGGVKIVAVAAGGRHTLALSGQVWGWGYGGEGQLGLGSRIRTVSSPHPVPCIESALYTKDRPSAMKDSGALLTFGWGLYGQEGPSDDVLISPLVCSHSRLETAVVQQAAGLQEKGQGRRVLYRRPPVSRTARAVQERRGRGGAREERRGQRRRAKSQCWRLG

SEQ ID NO: 62251 - protein, 90 aa, Zea mays
  Coding DNA Sequence Number=SeqID_18876
METVSVWDPTAHPGLPLEAVERSGLEGLDESEVSSDEENSSDSSEEESGGDGNDEGDGGDGGDDGDDGKGDGDGKGTGGSSKASGKAPLV

SEQ ID NO: 62252 - protein, 73 aa, Zea mays
  Coding DNA Sequence Number=SeqID_18877
MAEGTNSHGVVFLQRGGGKTTGSEQKPNRRAWCAQPPSGYKRPPTFAQTNGREGRVAMQAACNRARWTHFSDF

SEQ ID NO: 62253 - protein, 135 aa, Zea mays
  Coding DNA Sequence Number=SeqID_18878
MEAQAHASCKPARRSLRAKKPHRHSRHYCGSSTAEPVPRLEATLRMTQQCQPGTSVTGQSAGPGKGTPRKGSFPAKETGPEPPTDQRFEGWPLRGVQQPPQSARAPRPLLVRGSKAGPSEGFNDRLRPLGLRAHY

SEQ ID NO: 62254 - protein, 857 aa, Zea mays
  Coding DNA Sequence Number=SeqID_18879
MPSSSSSAATTPPAAASSEETLSSLMVEELRAGDSVDFGVSWMTSARVEDMQRLGYFGGGVARAPGTEEVPEPEGELVVFEAFFAAVAEEDADEGALRCAAGQSSGRDLVEEFVAYGVWPLAYGWALGEVCPRQMPFHGGRVMRSPAFALNLRNHDPAAFVRDAEDGAVRLVGHYVPRTEGQRSFDIRGSNDRLNRVFELNQLPYDGYPGQDEADRRGKKPAVETGGDPALAAAPSSKKRKLGTAMGGLGVSDSFARELMRTCAAPGERMSSPELRESSARMLRVTGGCWPRNVPIPCAAGEDCFTSRMVRRLRVFPYGRNIGAVVWAVMDKDRQGAAQKRQAIVRLHEARPKRQRGAAKAAASGGGKPPLAAKAGASAPSKAPEATAGAGGSKSTKVVPPSSGVAEASKAARALPLSGKRVADFGTDITVDDYLGGSDEGQLAMVAPGAETATAAIAPRARGEALGAGGEVSALAVVRDEASAATRRLKGVTEALSQATEALSQVADFASRTASGALTAAVSAEVERLRTQHADAVREKSASDSKCRKLTDRVAALEREKADLRRQLAAERREANEAVAKGQAAQAEAKLARAEGNLAKELAEHLQERLTALESRAKEAEAAMHAEAERTRTQLMDTYRELGARTGDFEVPDREPGLRCLQWVQEELLELPAVAGGLMSYASLVTCEGAMNALSREGCRHFEAFDQTDEEFERDIYKVEDPVVKESAGALYDRMWGLYGREVVRERAETARAQAERGERVDDFGALNSALPDPEPIPAEAVIGVALEPTPETAEIATAAPTSAVAGEDLPPKVAEGAPDAPAAAVPSAEDPAAVAAETTAEPTAEAPAASGPSQVA

SEQ ID NO: 62255 - protein, 220 aa, Zea mays
  Coding DNA Sequence Number=SeqID_18880
MGKSNKRKREPTPPSEDFGDSEYSEEEFSSESEGSPALVSPPASSDDSDDSQGIAAEVWTYIRAVERSGLEGSNESEFSSDEEDSDGGEGEDDDDDDGDDDDGGDGDGDGSGNGEAAAAATGARAAPEAAAARAAPEAAAARAAPGAAAVAAAARPVAKRHWARYNGPDHTWASELNEAALRDDFVAAKASSEGWRLCLRPNIFPPRDQFDKVTWCRRRR

SEQ ID NO: 62256 - protein, 76 aa, Zea mays
  Coding DNA Sequence Number=SeqID_18881
MELLSKSYPTKEKTLKGMLVIWESRVSRREIKIKEGNAGMVLSSNSYHLMQQSSEKDFKNIKEGGKCTEACLRSQV

SEQ ID NO: 62257 - protein, 154 aa, Zea mays
  Coding DNA Sequence Number=SeqID_18882
  Homolog annotation: Hit_ID=Q5N7Y3; Match level="QueryCoverage=86%, HitCoverage=33%, E-value=1e-60, Identity=81%"; Hit description =Putative lysine ketoglutarate reductase trans-splicing related 1
  Pfam annotation: Domain name=DUF707; Domain location=1-154; Score =94.6; E_value=3.1e-25; Accession=PF05212.3; Description=Protein of unknown function (DUF707)
MNLSGQKGPSMWYAKQSLHPDIVARYDYIFIWDEDLGVEHFNAEAYIKLVRKHGLEISQPGLEPDKGLTWQMTKRRGDQEVHKFVEIMATVFSRDAWRCVWHMIQNDLVHGWGLDFALRKCVEIANVREWLLDFFMNEVIDVGGSCRVEVASHN

SEQ ID NO: 62258 - protein, 175 aa, Zea mays
  Coding DNA Sequence Number=SeqID_18883
  Gene Ontology: Mol. function=peptidyl-prolyl cis-trans isomerase activity; Cellular component=spliceosome; Biological process=protein folding
  Homolog annotation: Hit_ID=A2Y8V7; Match level="QueryCoverage=94%, HitCoverage=98%, E-value=5e-76, Identity=84%"; Hit description =Peptidyl-prolyl cis-trans isomerase
  Pfam annotation: Domain name=Pro_isomerase; Domain location=10-168; Score=195.1; E_value=1.7e-55; Accession=PF00160.12; Description =Cyclophilin type peptidyl-prolyl cis-tr
LDFDVAACQSVTLHTNLGDIKCEVFCDQVPRTAENFLALCGSGYYDGTVFHRNIKGFMVQGGDPTGTGKGGSSIWGAKFADELRESLKVALLACLHNARGIMSMANSGPNTNGSQFFITYAKQPHLNGHYTVFAKVIHGFEVLDLMEKAQTGPGDRPLAEIRLNRVTIHANPLAV

SEQ ID NO: 62259 - protein, 283 aa, Zea mays
  Coding DNA Sequence Number=SeqID_18884
VDEDFGRDIFEVEDPVVKESAGALYDRMWGSYGREVVRARAEAARAQAERGERVDDFGALNSELPEPETTPAEASTGVAPGPTPETAEDAPGAPAFAAAGEDLPPKVAEGAPDAPAAAVPSAEDPAEVQDFGPAHATATTGFLAASTAEDGNECGGSVSEFFDVTDSGSSVEWTEESSEEDLDYFAALDVAAAEAAPHAADAPGVPGPSTGHRRRRAVAKRRISAEEGARLRVSRAGRQELLSLPAASGVGEGELRSLFAGEELRIMLFNYREMGIIPKVEPM

SEQ ID NO: 62260 - protein, 54 aa, Zea mays
  Coding DNA Sequence Number=SeqID_18885
MAGLFQEKAGSLLESGHGEGVSRVSGRTIRFGRCRLDGINTEPINSKIWTYLKV

SEQ ID NO: 62261 - protein, 67 aa, Zea mays
  Coding DNA Sequence Number=SeqID_18886
MWKDRVEHAKDIWAIYPGQTAHLTEIQDMEANEDVDIEGGEEPASSVDTAGSGRPPSPESSVASFAH

SEQ ID NO: 62262 - protein, 212 aa, Zea mays
  Coding DNA Sequence Number=SeqID_18887
  Subcellular localization annotation: CTP_CleavageSite=34; ConfidenceScore=5.34e-01
MARARAYKAYSGVDYILPRTLKPHRSSVSPLFARARRVRGHPSHCRRRPASPALPNPVQPSEASVHAPVKLPEQGIEACFAGEASPRSLEFTTPPECVDRNLPEPTPSLVGPLSSPVSRAALFFPADCNLTGGEYVLVPEQGAAQEVAPDPAPEPALEDLSATALEGKPRNPVEMNTSSLEDMVAGVTWSSILPPGWTIEWDPTSAEEEHEE

SEQ ID NO: 62263 - protein, 96 aa, Zea mays
  Coding DNA Sequence Number=SeqID_18888
  Subcellular localization annotation: CTP_CleavageSite=67; ConfidenceScore=5.22e-01
MSGVVLVGLPQLASLGFFSGRWLKITSSLVCTGDVRYVPFWRLLGVPSVRRTFTRLWPKDGFEGGPGAAIEPTVCNRKVPGSSSGLCIFAYYTGKA

SEQ ID NO: 62264 - protein, 244 aa, Zea mays
  Coding DNA Sequence Number=SeqID_18889
  Subcellular localization annotation: CTP_CleavageSite=31; ConfidenceScore=5.12e-01
MNSTPVLFTLTCHFAFGVTLTCHFAFGVTLVLSTFSQDRRSDRIAVPSTFTDYDDACPEITATAPPRRLLSSNNSGWDARMIEYGLTLGRTLRLAPKSALASKQAPPHPSSASNNSPPRIPQKATPSIVPCTTASPRAGLAMASGRLPPRPSMASALIVSTKGCLTSPEVAELTSHTLRIAKSFCHTYHCSNHYDSDNSSIGQARVRVQAPYLGLDSLLDQRCEYRNRTSPSQLKSTASTGTYC

SEQ ID NO: 62265 - protein, 237 aa, Zea mays
  Coding DNA Sequence Number=SeqID_18890
MPRKANCCCPARMQHSVLCPRFRGEDGSEDLPVRFGAAGARWCGVDGQVDAAVGAEVVAAGESFSAVETVSATYGPTSGSLALISGSCPLSGDANESLPVAASVLGPSLLLQRSLAGRLEFIVPQALRCGGCSYPREWNRSSVCNGTLSVEPEAAVSAWTKAELARKEDFVGRILAGPSTGGTSAGVGRGADRFLRGGGLPTVSSSEAGSDSDEGGVDAEGVAAPLLMSDPAGTVYL

SEQ ID NO: 62266 - protein, 250 aa, Zea mays
  Coding DNA Sequence Number=SeqID_18891
MTSHGSSDDGNALSHTDGLAREGFPRILWEVLQGAGYTTPPQYAVQQFEKHRVPRCRVRMTLEPHPLQPGWRSLDSESFGYRAEDTIEAIALHGLTTFCGFHPLELATHPIGLFPAEREDDPMWKDRVEHAKDIWAIYPGQTAHLTVRCMNALYRLRVMRGEAMSHLMALLEATKITLDNREELVVDLSTEMVEKDLQVEQLSTDIQELEELVESIEASINQVSVGPKGLKGEDNSGQGIEIKYPIDLLY

SEQ ID NO: 62267 - protein, 158 aa, Zea mays
  Coding DNA Sequence Number=SeqID_18892
  Homolog annotation: Hit_ID=Q10MT4; Match level="QueryCoverage=84%, HitCoverage=78%, E-value=1e-12, Identity=33%"; Hit description =Expressed protein
METEEEVKDRDVAGGEQAGILSAMATKIGMAMPGANGDDSHGGSGDDAKSSNGEATRGGSNGGEKQGDESNGGGILSAVASRIGVAMSGANGDRSGSAEDGAKTSAGDAGHGSKGEEKGRGVNGGRIVEQIISNLPSDGQSPDADEASSTPGSFCIED

SEQ ID NO: 62268 - protein, 590 aa, Zea mays
  Coding DNA Sequence Number=SeqID_18893
  Gene Ontology: Mol. function=calcium ion binding; Cellular component =flagellin-based flagellum; Biological process=ciliary or flagellar motility
  Homolog annotation: Hit_ID=Q9AYE7; Match level="QueryCoverage=32%, HitCoverage=21%, E-value=2e-61, Identity=69%"; Hit description =Centrin
  Pfam annotation: Domain name=efhand; Domain location=447-475; Score =37.8; E_value=3.9e-08; Accession=PF00036.23; Description=EF hand
  Pfam annotation: Domain name=efhand; Domain location=483-511; Score =40.3; E_value=6.9e-09; Accession=PF00036.23; Description=EF hand
  Pfam annotation: Domain name=efhand; Domain location=520-548; Score =20.4; E_value=0.0069; Accession=PF00036.23; Description=EF hand
  Pfam annotation: Domain name=efhand; Domain location=556-584; Score =39.8; E_value=9.4e-09; Accession=PF00036.23; Description=EF hand
  Pfam module annotation: Pfam domain module=efhand::efhand::efhand::efh and; Domain location=447-475::483-511::520-548::556-584
MRERSDRPRRHEKHSDLRGVKPLLRGLRGYTRRENSAARPAPTAVSTTQAKTDNKSRSTTEFGLGRNRKLRLARPQAPASGGGLRLARPSDSASTSVSGGIASSPDPGLGLKRSLRLARPWARTDRANRGYIITLSLACSGYKEQDRRSIWLTPATGLRRSSDGHAITCTGLKLSPDGHVGMDPPGSEPPTLLIMAAGAPSALPKPGSGRLRCEATLARPPHQPTASQAHSMQGTPDVENSAARPAPTTVPTTQAKTNNKSRSTTEFGLGRNRKLRLARPQAPASGGGLCLARPQAPASGGGLRLARPPDSASTSVSGGITSSPDPGLGLKRSLRLAQPWARTDHANRGYIITLFLACSGYKEQDRRSIWLTPVTGLRRSSDGHAITCTGPKLSPDSHVGMYAGLRHSSAGHTGTYEASDRPPPPNSAGYRTDKVRRKRLTAQKRKEIKEAFDLFDIDGSGTIDARELNVAMRALGFEMTPEQIGQMIAEVDKDGSGTIDFDEFVHMMTDKMGERDARDELHKAFRIIDQDANGKISDMDIQRLAIETGEHFTLDEVREMIEAADEDGDGEIDLEEFMKMMKRTDFGSGF

SEQ ID NO: 62269 - protein, 462 aa, Zea mays
  Coding DNA Sequence Number=SeqID_18894
  Gene Ontology: Mol. function=cysteine-type peptidase activity; Biological process=proteolysis
  Homolog annotation: Hit_ID=Q109R5; Match level="QueryCoverage=63%, HitCoverage=27%, E-value=1e-36, Identity=31%"; Hit description=Ulp1 protease family, C-terminal catalytic domain containing protein
  Pfam annotation: Domain name=Peptidase_C48; Domain location=71-278; Score=40.9; E_value=4.6e-09; Accession=PF02902.10; Description=Ulp1 protease family, C-terminal catalytic domain
MESLSVGLCHNKPKKSAATAIVPKDYICTQGDLALINFIKEIPCEPRVEVMLIDDAFVERKSMECLFQPNAYIGDEVIDCYINLIKAQKHLKCRSGGRVHIENAFQFNFLKRDGDVEIKTEELYPIEDMTQICSVERRVLLYLDHDMVFIPINIRETHWYLAVIHAINMEIQVLDSLGTSQDRKDLTDSIKGLQRQIDMISQRKELKDHRWPDLQVASWPLREIDIGYAKQTDSSSCGLFLLNYIEYWTGDELSDSFTQDDMSHFRKKMAAILLFLDLNKRRGCLLYKNDKEVDSGSPSDVEILENPTDSKKRKLLHVLHDSEVVYEDEEGPITQADLQKWFVDDSDKRAPVKVSNDGCTNDFLMVGLSTKDMPVTKADSIDVLYDYIMAIEDDTALEFNTSYLVLQAMAMWGNDRRMKFVGDAKIVRRNFVIDLLSYEDNSCRYVIPANIQQRLIDIAKKD

SEQ ID NO: 62270 - protein, 125 aa, Zea mays
  Coding DNA Sequence Number=SeqID_18895
  Homolog annotation: Hit_ID=A2XC03; Match level="QueryCoverage=76%, HitCoverage=11%, E-value=9e-25, Identity=63%"; Hit description =Putative uncharacterized protein
MHAAVETAPSVNGENESPRSLGDATERDEGSVAADVLLTLVNSEGQTAGSQNNVEQASSKITDDRRVLSAMIGIVDPEFRKQMSRSGAGNEEPMSDAEKDEGVEEVDSDSGSDGSDSEEAHALCP

SEQ ID NO: 62271 - protein, 16 aa, Zea mays
  Coding DNA Sequence Number=SeqID_18896
MSLSLWSGKGQTLGLD

SEQ ID NO: 62272 - protein, 403 aa, Zea mays
  Coding DNA Sequence Number=SeqID_18897
  Gene Ontology: Mol. function=oxidoreductase activity; Cellular component=phagocytic vesicle
  Homolog annotation: Hit_ID=A7PBA3; Match level="QueryCoverage=58%, HitCoverage=86%, E-value=2e-75, Identity=61%"; Hit description =Chromosome chr16 scaffold_10, whole genome shotgun sequence
  Pfam annotation: Domain name=RRM_1; Domain location=7-74; Score=24.9; E_value=0.0003; Accession=PF00076.13; Description=RNA recognition motif. (a.k.a. RRM, RBD,
MAGTGTVKIHNVSLKASEQDISEFFSFSGEIVHVELKSCDERSQSAYITFRDNQGAERAMLLTGATIEDMAVIITPATDYKLPAFVLADLESKNTGGMESALQKAEDIAVSMLAKGFVLGMDTVEKAKAFDEKHQLTSTATAKVASLDRTMGLSQKFSTGTLVVNEKMKEMDEKYQVAEKTKSALAAAEQTISTASSVIMSNRYVLTGAAWVTDAYNKVATTTTDASKSIKERMMAEQEGANQSGETTKVDLLEISEADEKEWKRHKDDSTKNVVQESPEMTCQESEHQAGERQMTNVAGNSKTGIEEQKNHEGEIAVVSHMQENIDTAEKDPSCHESEVSKANVHDSVLMTKQSEREHNQPEGEFANTHVPGSPVTILVTVSTIDRNSSNGPKKPDSAEGFL

SEQ ID NO: 62273 - protein, 138 aa, Zea mays
  Coding DNA Sequence Number=SeqID_18898
MALGGRTWRRGPQALARLGARHDIALGAGAAGTRSSGGWAGPDVSTARPGRRGRTCPDASALGRQAPARRAGQRAPPLGRGRTSRPRARLRSGALGAASMAELDDSLEEPWLTAPGAVRSRTQEQGSSTAPWRSNGGG

SEQ ID NO: 62274 - protein, 392 aa, Zea mays
  Coding DNA Sequence Number=SeqID_18899
  Gene Ontology: Mol. function=oxidoreductase activity
  Homolog annotation: Hit_ID=A7PBA3; Match level="QueryCoverage=54%, HitCoverage=86%, E-value=9e-62, Identity=54%"; Hit description =Chromosome chr16 scaffold_10, whole genome shotgun sequence
  Pfam annotation: Domain name=RRM_1; Domain location=7-74; Score=24.9; E_value=0.0003; Accession=PF00076.13; Description=RNA recognition motif. (a.k.a. RRM, RBD,
MAGTGTVKIHNVSLKASEQDISEFFSFSGEIVHVELKSCDERSQSAYITFRDNQGAERAMLLTGATIEDMAVIITPATDYKLPAFVLADLEPKGLFSAWTVEKAKAFDEKHQLTSTATAKVASLDRTMGLSQKFSTGTLVVNEKMKEMDEKYQVAEKTKSALAAAEQTVSTASSVIMSNRYVLTGAAWVTDAYNKVATTTTDASKSIKERMMAEQEGANQSGETTKVDLLEISEADEKEWKRHKDDSTKNVVQESPEMTCQESEHQAGERQMTNVAGNSKTGIEEQKNHEGEIAVVSHMQENIDTAEKDPSCHESEVSKANVHDSVLMTKQSEREHNQPEGEFANTHVPGSPVTILVTVSTIDRNSSNGPKKPDSAEALQLNFSPFSVAFGQ

SEQ ID NO: 62275 - protein, 246 aa, Zea mays
  Coding DNA Sequence Number=SeqID_18900
  Homolog annotation: Hit_ID=Q5QMM3; Match level="QueryCoverage=14%, HitCoverage=13%, E-value=2e-08, Identity=83%"; Hit description =WUSCHEL-related homeobox 8
MEVLRKQISIYATICEQLVEMHRILTEHQDTIAALRPRPWLARLHPRPRPPVPCATAVCQAPPPHLLSRWTACNAPKHLPPMASPPHSVEVRTPGDSPRPTAALLSPSVAAPQPSTASRLLLLLTAVVAAATAFVLLCPPITVVTAASATARPLSKLSKPVVLLTPCHPRRFKGFTLLSKEGQGLALPRDSLPHRAAFLSRSRTPVRDPRCSPWKAGDLLYPDVEISSSAIQGVLLTPLSFSLFTL

SEQ ID NO: 62276 - protein, 374 aa, Zea mays
  Coding DNA Sequence Number=SeqID_18901
  Gene Ontology: Mol. function=sulfate adenylyltransferase (ATP) activity; Cellular component=ribonucleoprotein complex; Biological process=sulfate assimilation
  Homolog annotation: Hit_ID=O48888; Match level="QueryCoverage=28%, HitCoverage=21%, E-value=6e-55, Identity=99%"; Hit description=ATP sulfurylase
  Pfam annotation: Domain name=ATP-sulfurylase; Domain location=122 -350; Score=29.2; E_value=8.7e-16; Accession=PF01747.8; Description =ATP-sulfurylase
  Pfam annotation: Domain name=RRM_1; Domain location=101-170; Score =13.8; E_value=0.0078; Accession=PF00076.13; Description=RNA recognition motif. (a.k.a. RRM, RBD,
  Pfam module annotation: Pfam domain module=ATP-sulfurylase::RRM_1; Domain location=122-350::101-170
MAEQYKMHVMNEIQWDYFSVELLDIQHVHIKLVSIDTCFIDLNLAKRLSRKLRGYVKVMIDEQMEVLRKQISIYATICEQLVEMHRILTEHQDTIAVVYHFMSSLSLHVKLEEVESFFAQCGKVNSVRLPRHVSDKRHFCGTALVEFSEEDEAKGVFEKNLIFAGELSKTIAKLAEDGKKVIDDYMKKIESIQKQKEQCLLVIRYNLRRGTDENLNLKLTVWLVLEEGVLNPESTVVAIFPSPMHYAGPTEVQWHAKARINAGANFYIVGRDPAGMSHPTEKRDLYDADHGKKVLSMAPGLERLNILPFKVTAYDTKQKKMDFFDPSRNSSSSLAQSVAHQMFGVNKDRLCILCQIVVHIHSGDINMKLSSAVL

SEQ ID NO: 62277 - protein, 136 aa, Zea mays
  Coding DNA Sequence Number=SeqID_18902
  Subcellular localization annotation: CTP_CleavageSite=47; ConfidenceScore=5.34e-01
MASPPHSVEVRTPGDSPWPTAALLSPSVAAPQPSTASRLLILLTAVVAATAFVLLCPPITVVTAAGFWDFPPVSPKKGKGDFAPPPGFSLPPSKRVFPIGGRKPPGEKPPAAPQGKAGETWRSPEWGKSPPPREFK

SEQ ID NO: 62278 - protein, 277 aa, Zea mays
  Coding DNA Sequence Number=SeqID_18903
  Homolog annotation: Hit_ID=A2ZTG3; Match level="QueryCoverage=79%, HitCoverage=12%, E-value=1e-113, Identity=88%"; Hit description =Putative uncharacterized protein
MDALLFDMVGLGLVTGLISGAGVVAGLQEIYSSGNPTNIANPIVDVSVKIDIKALGGRLNLFKTTACEKIPWKYLKAYDDVDPLDYLGAYNVDDIQLICCQPDASTMWLIPPPVQNRFIQSLEEREMLFGKMELILNWDFLRARPKGKELVRYESPIEHCPSVDDVKRVLNGTANSFSIIDAYPRYFRVTGSGEVRRLEAAIDSVSGELLLNNGTPWWSFYDTNPSDLAGCQGLNGPMAIVVSEETPRISDICENGQKLEFSQASCAITIRSNYQKS

SEQ ID NO: 62279 - protein, 707 aa, Zea mays
  Coding DNA Sequence Number=SeqID_18904
  Gene Ontology: Mol. function=RNA-directed DNA polymerase activity; Cellular component=ER-Golgi intermediate compartment membrane; Biological process=RNA-dependent DNA replication
  Homolog annotation: Hit_ID=A2ZTG3; Match level="QueryCoverage=58%, HitCoverage=26%, E-value=0.0, Identity=75%"; Hit description =Putative uncharacterized protein
MAYLGALFLYALCVNYGPSYLFWVIILIYTESSITAKDGEWVPVTEFSFLSARNNIEEKHCVAYSWREKLKSLPLPVFDLIRMIVRGLSRYWMSLTHGAESPPYFVQVTMEVSHWPEDGIQPERIESAINRVLAIAHEERCQANLPSSCHCCSKVRIQSIEKSKENCNMALAVLEVVYAAPVECQSKGWHKSLTPAADVEREIHESQKAGFFEEINFPYPIVSVIGGGKREIDLYAYYFGADLAVFFLVAMFYQSILKNKSEFLEVYQLEDQFPKEFVFILMVLFFLIVVDRIIYLWSFATGKVVFYLFNLVLFTYSVTEYAWGTELAHRDIGGLVLRAIYLTKSISLALQALQIRYGIPNKSNLYRQFLTSKVTQVNYLGFRLYRALPFLYELRCVLDWSCTTTSLTMYDWLKDVNRAKGCFFFQAFWVKLEGFHDTVAQAWSLVAPGPCPFVTLSRKLQGTARVLQSWSAKTVGCLKMQLEMARCRSVNSWWKKAGRKEAAPRREGWASRGQRWEAVAGWWRAAGGCSGKGGRAARVLVRGGRDAGDEGSGCCQPGRWSSGGCEPSVEHQGLRKDAWALRSLADVQTREEASGSKGGVGEEQRTVGDEVQELGMTSCARAGRSSGDGVAGCGTGGAEATDPAAAPVAAAPAKGGPVARPCASGEGRGGAGEGGPGRGWRCGRPPGGKDEPPGGGGGCCGREQKLT

SEQ ID NO: 62280 - protein, 101 aa, Zea mays
  Coding DNA Sequence Number=SeqID_18905
MELRMTQVKEKDPRMAWKRSMGRVWERESVGTRELQLNTVGEKERTGGVVKLAAIVALECTNRAMELGGDPSEEVQEGVKCIGLQSQWKSPKKMREIIENH

SEQ ID NO: 62281 - protein, 131 aa, Zea mays
  Coding DNA Sequence Number=SeqID_18906
MTGTDAYAAADLLGGAPRRLDDRRTKKVGLLVLFCRVVLLTVDARTSTPPEEQATAACLPTMTTSTLATLTSRGYRLLGVHTGLYSSRNIRTLMTLEALGEDVGELRSSRDMKNSHIPDDDTLADEACFMR

SEQ ID NO: 62282 - protein, 363 aa, Zea mays
  Coding DNA Sequence Number=SeqID_18907
MTRGCTGKDVAQGRDGQHNQEVGERCRARVKRGASSAAMRSAKSEGESWWRWSLQLGHRAPWRSRSRGLGARRPSPARELAGVGLPLSGGSEDALKSDGSIRVTSRGGRGGLPIRRRRVRAPDLGHGRTVEDGGRVMGYVVEPRKGGGSQGIPRRARASSLPRRPEQEGDDGAAPEDGASGAASRPGRGEGHAPAPRRTGAGRGGQRWGWGWPPIGLEGRGEAGTRRGEDGAAPASTASGLAHAEGEEVGAELKNSVGHGCSGGASRRSGRRASCAGLGKANEGEDDGIWAGLEVDGVFAEARHGGHTVEEGPPRRQGAGEGRRVEELSGVEGGAGDLLETLCACSGVKRVADGLGSKGWRQM

SEQ ID NO: 62283 - protein, 114 aa, Zea mays
  Coding DNA Sequence Number=SeqID_18908
MYLYAALLHDARGHVACALCDSTAFASATRGPVAIPYATCNPTVSTFTHAIDCATRDPVDPARTTHGPVALVCPALDTRDPVDPARTTLIEKVHCTQSVGFVDPAHPNIVYKLN

SEQ ID NO: 62284 - protein, 177 aa, Zea mays
  Coding DNA Sequence Number=SeqID_18909
MTRRTGGCAGGFLLPLLLLAGCWAAAAERPCLKQLQLQEIWWSWWSRSLGALENRGAGVQREYGAFFRLQALKNVMPDGKKREHGRKWLVCLKVTGSEALKNVMPDASLLDWSLVSLINMVIFFAIRFAVPRRGSKRERKFLAPAETHNLISSLNPSSKESWLKPFSTIQQKLNLFS

SEQ ID NO: 62285 - protein, 145 aa, Zea mays
  Coding DNA Sequence Number=SeqID_18910
MGKNNKRKREPTPPSEDFGDSEYSEEEFSSESEGSPSPVSPPASSDDSDDSQGIAAEVWMYIRAVERSGLEGSDESEYSSDEEDSDGGGEDEDDDDDDNDGGDDGDGDSDGGSRGGNGGSRSGNGGSSRGSGGGGSSKGSNKASG

SEQ ID NO: 62286 - protein, 147 aa, Zea mays
  Coding DNA Sequence Number=SeqID_18911
  Gene Ontology: Mol. function=carboxyl- or carbamoyltransferase activity; Cellular component=ornithine carbamoyltransferase complex; Biological process=amino acid metabolic process
  Homolog annotation: Hit_ID=Q8SA97; Match level="QueryCoverage=100%, HitCoverage=24%, E-value=1e-23, Identity=45%"; Hit description =Ornithine carbamoyltransferase
  Subcellular localization annotation: CTP_CleavageSite=46; ConfidenceScore=5.07e-01
MAPPVDVAGLRPRLGDVKAPPKPRSSLSFVAEVESEPLVRARRRPSAEARAESEPWVGRSGVRRLPGLSPSPSPGSGGAEFAVFRGLARVRALGRAERNRSVEWRSDGGHFGTVGWGARVRIKLYADGGYQLRIRSLEGTPNYGPRQ

SEQ ID NO: 62287 - protein, 48 aa, Zea mays
  Coding DNA Sequence Number=SeqID_18912
MAQGRNRRRCRSFAARELLRVFNSNSIQVSNSNQIKYVQQFKEYLGLI

SEQ ID NO: 62288 - protein, 178 aa, Zea mays
  Coding DNA Sequence Number=SeqID_18913
MDVEESRRRQTPTCARKRLSADQTDQRCWGRTEGCPELLTARQNSPRQRARRGLNGDCRTGGGRASSGEAPWACAERERRRGCLGEGANEQGRVGKRGAGTKRSRGVRRWPENARCGFVHDGSECHTRFCKRLHTLPTSRDSHFVWGSSLPIDHYKVLTERYSGNSLSPLKNHKNPTG

SEQ ID NO: 62289 - protein, 87 aa, Zea mays
  Coding DNA Sequence Number=SeqID_18914
MATSDDIVLYDSKQKWGGEGAPSRLVERRAGWWLNNGSEWVRRGEQALATGAPNSGVIYKKPDEWEKLAWGKKKGQREKCPGGAYLP

SEQ ID NO: 62290 - protein, 105 aa, Zea mays
  Coding DNA Sequence Number=SeqID_18915
  Gene Ontology: Mol. function=carboxyl- or carbamoyltransferase activity; Cellular component=ornithine carbamoyltransferase complex; Biological process=amino acid metabolic process
  Homolog annotation: Hit_ID=Q8SA97; Match level="QueryCoverage=100%, HitCoverage=12%, E-value=5e-13, Identity=46%"; Hit description =Ornithine carbamoyltransferase
MAPPVDVAGLRPRLGDVEALPKPRSSLSFMAEVESEPLVRARRRLSAEARAESEPWVGRSGVRRLPGPSPSSSPGSGGAEFVVFWGLALVRALGRAERSSPSSGA

SEQ ID NO: 62291 - protein, 122 aa, Zea mays
  Coding DNA Sequence Number=SeqID_18916
MCDDVQLCNRCVREFLILAHTWFAFNLPSKTSSTRGVIVSPVGEGNPRLSSMVNLVAVLNTELDHALDELGKTRAEIAKLRAKRVECRHHEDSSPDPIRTQHPYCSPPRGHHAYDTPATGPR

SEQ ID NO: 62292 - protein, 46 aa, Zea mays
  Coding DNA Sequence Number=SeqID_18917
MAMMGSASEKMYLCQVKKQQTFVASVPRWCPKKKIKTKAAGGRVLH

SEQ ID NO: 62293 - protein, 241 aa, Zea mays
  Coding DNA Sequence Number=SeqID_18918
MNALVGSLVSQDFVGEVGVNERESVRGYIKDLPKAGSRLEKRSKNRLNRFSDRLNRFLPGGSRSTDLLSRRLDRFQNRLSKGKFRLNRFSKKICSDFSDSSDCQTGGSTQTNRKIKVRVQKKGAKETEESPGLAHRTVRCTRVDRLQTLHLRVSLGALRYNSPNCPVCHRTIRCTKRSNGYQRNGRLHSALTELQFAIEVRTAPEGAPDSEQCLSGATLDCPVHQDVRAPTVETVRTLTVG

SEQ ID NO: 62294 - protein, 71 aa, Zea mays
  Coding DNA Sequence Number=SeqID_18919
MAQLFEFYKAEDSEHLFGEGKDVRITGGDEEDGYDYDYGNAPPAATRTERNAASVWFSATSVNGNRAKCCQ

SEQ ID NO: 62295 - protein, 502 aa, Zea mays
  Coding DNA Sequence Number=SeqID_18920
  Gene Ontology: Mol. function=binding
  Homolog annotation: Hit_ID=Q7XCR5; Match level="QueryCoverage=92%, HitCoverage=93%, E-value=0.0, Identity=79%"; Hit description =Expressed protein
MEEPTESRPAGAEDLANGAKDPEGPPPEVEEEEVEEPPRSATAKQEEAKEVLGSEGSRPFTMRELLGELREDGETAVGGSTARSAFGDGNGVGSADAEGSSYSQDSAQFSSHHDVAMDLINSVTGVDEEGRSRQRILSFAAKRYVNAIESNPDDPDAYYNWALVLQESADNVDPNSSSSKDALLEEACKKYAEATRLSPTLYDAYYNWAIAIADRAKMRGRTKEAEELWKQAILNYEKAVQLNWNSPQALNNWGLGLQELSAIVPARDKQTIIKTAISKFRAAIQLQFDFHRAIYNLGTVLFKFHDNDTRAFSFIMLQYGLAEDTMRSGKPDVSPNELYSQSAIYVAAAHALKPNYSVYRSALRLVRSMLPLPYLKVGYLTAPPANNSIAPHGDWEVSQFILNHEGLQQADASDQPPSQSPGHLDRGRKPVRINVADIVSVSACADLTLPSGAGLCIETIHGPTFLVAHSWEALDGWLDAIRLVYTIFARGKSDVLAGIITG

SEQ ID NO: 62296 - protein, 182 aa, Zea mays
  Coding DNA Sequence Number=SeqID_18921
  Gene Ontology: Mol. function=transition metal ion binding; Cellular component=endoplasmic reticulum membrane; Biological process =electron transport
  Homolog annotation: Hit_ID=Q7XCR6; Match level="QueryCoverage=100%, HitCoverage=100%, E-value=5e-52, Identity=61%"; Hit description =Cytochrome b5, putative, expressed
  Pfam annotation: Domain name=Cyt-b5; Domain location=63-129; Score =50.5; E_value=5.7e-12; Accession=PF00173.19; Description=Cytochrome b5-like HemeSteroid bindin
MASENKVFRFEEVAKHNVTKDCWIIIAGKVLFFCSSPILGSPSPLWWHRILDGWRHAFGGFVGYGFVKLFGVLVGGMVYDVTPFMDEHPGGDEVLLAVTGKDATADFEDIGHSDSARDMMEKYHIGQIDASTIPAKRTYVHPQQAPSHSDKNNDLLIKILQFLVPIMILGLAFGIRQYTKSE

SEQ ID NO: 62297 - protein, 524 aa, Zea mays
  Coding DNA Sequence Number=SeqID_18922
  Gene Ontology: Mol. function=Rab GTPase activator activity; Cellular component=intracellular; Biological process=regulation of Rab GTPase activity
  Homolog annotation: Hit_ID=Q7XCR7; Match level="QueryCoverage=82%, HitCoverage=77%, E-value=1e-167, Identity=69%"; Hit description =RabGAP/TBC domain-containing protein, putative, expressed
  Pfam annotation: Domain name=TBC; Domain location=247-451; Score= -62.8; E_value=0.0043; Accession=PF00566.9; Description=TBC domain
  Subcellular localization annotation: CTP_CleavageSite=45; ConfidenceScore=5.10e-01
MWAWGCVERVAAGFLGGPLAAGGRWNTAVAVGVTAAAGLVLVAIVVSSRRGLNRVSERKSGRSFWEFIALTVLKHKEMWSRPRTGDDTQWRISCRKGYLLLRKHCLRKLAYIMEESKQSTKTVKVNHEGSNSSEKGDESGCVSPFESEDVLENSGMGEATTEEGIPCLSTEQEVQDDTSETKPEQMNGNQSSSSSSDEEGSERSVVTQVEASHKNLASVCESSFEDGQESIPRYSNTGGNMDDVVLSKAARPVKSARATEDFETWQRIIRLDAVRANDEWISYSPSQAAVSKERAIESAKAVFLKDYDHLEPYRIHHASRLVAILEAYAIYDQEIGYCQGMSDLLAPLLAVLEDDDEAFWCFAGFMRKARHNFRLDEVGIRRQLNMVARIIKYKDFHLYRHLEMLQAEDCFFVYRMVVVMFRRELTFEQTLCLWEVMWADQAANRAEIANSSWRKLQLGAPPTDDLLLYAIAASVLQKRKLIIESYNSMDEIIRECNSMAGQLDIWKLLDDAHDLVVTLHDRIE

SEQ ID NO: 62298 - protein, 63 aa, Zea mays
  Coding DNA Sequence Number=SeqID_18923
MKDAKPIKTPMGINGHFDLATEGEDSTSRALVISFLAIHAKGGESKSPKQKDRTTTNFKNLKC

SEQ ID NO: 62299 - protein, 160 aa, Zea mays
  Coding DNA Sequence Number=SeqID_18924
MGVPDFCARWRAFNALQVAVGAEVSVASMAHRTCPVNYSGLAVVNSRSWRVPEAQFLGAPDTVRCTPDSPVNYSGAPLDFPEGDEFEWESSGALDTVRCHTGQSETIDQAKDGGKKRFEVPSAREKVKETRNPKPGVKKKTCKVKVDRVKKSYGASRITT

SEQ ID NO: 62300 - protein, 293 aa, Zea mays
  Coding DNA Sequence Number=SeqID_18925
  Subcellular localization annotation: CTP_CleavageSite=4; ConfidenceScore=5.15e-01
MSSRSLMRRVFPPSKPPDGGYPPSFRLIVGGTQLRGSWYLSAIVRLQGFSSHSPVAPLHRWSPKTVTSSSWMGRGKPGCDPALSIGGVRHPRWGGERGEPGLYLLRGSADHLFFQLLVVAIVLPRCDGDVLQPCRGRRTVAAQLGCNIPSSPSHSRRGRQRGSAGALGSGPLFGFNSWFASLERDREREPSGGRVHPGPWLLLHRSLASLPMFVAPQARGRSYPRGRNQSSVCKGTLNASVFVHYGCRGLNMDVCASESCFSRKVMSEVSVSRRRGSPSARSALPLTHTFTRP

SEQ ID NO: 62301 - protein, 328 aa, Zea mays
  Coding DNA Sequence Number=SeqID_18926
MNQHHLQAVGSRSEGPNPFLHELISAAYEQINGRGRISGRRPDQLPRTHRRRGRIATAGGDKLSSRTANGARGRFFVQEHDDCSYWTLRGSREVKKSSCCKTRVGMEASVVRHGRESRAAAQVLAAIALRSDGGSRHRGGRGAFGRGHHNAGERWVCGEERPRGTLIIPRSPGDHGIRGEADGSADHARMADSVARQRSMRGFPGGGNAHPNKGRIRVERDPALCGRLNEEVGHLGDVDPRAIDLAMRIAERMFLKMKEDEAKNKIEEENNRWRPNDESTSSQGSSFKSTSHMCFIANGSDSESESEDEEEQESDSEDEEDLQKFLLN

SEQ ID NO: 62302 - protein, 52 aa, Zea mays
  Coding DNA Sequence Number=SeqID_18927
MSKNTRDTRFIPRFGHTTKVPYFLVEAPTKSRVPPKAGGRWGNLTEIRLNRF

SEQ ID NO: 62303 - protein, 928 aa, Zea mays
  Coding DNA Sequence Number=SeqID_18928
  Gene Ontology: Mol. function=unfolded protein binding; Cellular component=mitochondrion; Biological process=response to stress
  Homolog annotation: Hit_ID=Q10SR3; Match level="QueryCoverage=71%, HitCoverage=97%, E-value=0.0, Identity=87%"; Hit description=Heat shock 70 kDa protein, mitochondrial, putative, expressed
  Pfam annotation: Domain name=FtsA; Domain location=239-422; Score= -39.1; E_value=0.05; Accession=PF02491.11; Description=Cell division protein FtsA
  Pfam annotation: Domain name=HSP70; Domain location=54-649; Score =1395.8; E_value=0; Accession=PF00012.11; Description=Hsp70 protein
  Pfam annotation: Domain name=MreB_Mbl; Domain location=52-436; Score=- 235.8; E_value=9.1e-05; Accession=PF06723.4; Description=MreBMbl protein
  Pfam module annotation: Pfam domain module=FtsA::HSP70::MreB_Mbl; Domain location=239-422::54-649::52-436
MAASLLLRAVRRRELASPLGSLGASIQSTCVANVCSKWGSFARPFSAKAAGNEVIGIDLGTTNSCVSVMEGKNPKVIENAEGARTTPSVVAFTQKGERLVGTPAKRQAVTNPQNTFFGTKRLIGRRFDDPQTQKEMKMVPYTIVKAPNGDAWVQTTDGKQYSPSQVGAFVLTKMKETAESYLGKSISKAVITVPAYFNDAQRQATKDAGRIAGLDVERIINEPTAAALSYGMNNKEGLIAVFDLGGGTFDISILEISNGVFEVKATNGDTFLGGEDFDNTLLEFLVSDFKRTEGIDLSKDRLALQRLREAAEKAKVELSSTSQTEINLPFITADASGAKHLNITLTRSKFESLVHNLIERTRDPCKNCLKDAGISTKEVDEVLLVGGMTRVPKVQEVVSEIFGKNPSKGVNPDEAVAMGAALQGGILRGDVKELLLLDVTPLSLGIETLGGIFTRLINRNTTIPTKKSQVFSTAADNQTQVGIRVLQGEREMATDNKLLGEFDLVGIPPAPRGLPQIEVTFDIDANGIVTVSAKDKATGKEQNITIRSSGGLSEADIQKMVQEAELHAQKDQERKALIDIRNNADTTIYSIEKSLGEYRDKIPAEVASEIEAAIADLRQEMASDDIEKIKAKLEAANKAVSKIGQHMSGGGSGGSQSGSGPQGGGDQAPEAEYEEVKKARTRAKPRKTANSAPPDPRARTPPWPLPNDLRLARPRGSGSAMEDRLDLGFGGTSTSPDLGHRPATSTGSAIITLPRADSSRREQDRSLTEAGGRQQGLNRSDSCPSARLRCSSDSHDITPAGCQDLSGCHIGMAFLEKVGRAGTRTGQALSWGRSLPSPAWTLVTPYCKRTRPGRGTNSKAAGFPPLSRPSPATSLSPLRARPRARPIWAGARDTLTRRLRDPPGLETPTVGAPGRGLLRADEQLPVKL

SEQ ID NO: 62304 - protein, 258 aa, Zea mays
  Coding DNA Sequence Number=SeqID_18929
MTVAGGREQRSRRRPDSRPIRGQQENPLSRREDRAPVIRSSNGSRTRNSRPANNSPRRINSAAGQAALLAGEAGTGKGGYPEKGSFPVKEPGSEPPLLIRGSKAGPPRGSTVASDRVGPTPTTGPRGSKAGPRRVHSRLRRRARDDQGYVRYITKARAALPSSPETPCSVPIEGNMALSPLLLAERRRRGVCKKAESVPDRPLALCGGSGAALANPAPAEPLTASTYQPENLGPDRAPGLRPVRMREQPDQPKHYARH

SEQ ID NO: 62305 - protein, 168 aa, Zea mays
  Coding DNA Sequence Number=SeqID_18930
DSIADKAIGRMQEIADKIFSVARETIRPGRGLTSFDATKLRVALEDIACMMEQDSLVFQEYLDKVNNVTHQPDSNYEPSDLSSPPPVEDNLSPDWDFAEHFEKFWGIEYHSDQMPLFSDNEKAPLENEDELKVMFGPIVCTSETTLVPGVEDANSSSDDHVQATFRWG

SEQ ID NO: 62306 - protein, 272 aa, Zea mays
  Coding DNA Sequence Number=SeqID_18931
  Homolog annotation: Hit_ID=Q6QP51; Match level="QueryCoverage=16%, HitCoverage=29%, E-value=2e-12, Identity=63%"; Hit description =Putative growth-regulating factor 1
MTIGEGMQLGCMMKILEAKRWLKGANPREVALLQQQQDEGNAGASHPEAQKAALPTRILKRHGQSLHRRAPGSSPYDTGAGSHTSCGLTRNERSQTTACEAGNHPAVISIPPFSPKPAGERADRHAGGVQPHHDCAPFRLHRIRWVSVKAWARMSCNRRNGYCMQETAPPLAPMTRLLDCGTGAASRGSPAHDPTVPIEHNDHGDRERGYFERDPSPRRKRAPSPPTDQGFEGWPLRRAGPSEGFDSRPRARRVRDDSGYVRYMAEARATLQ

SEQ ID NO: 62307 - protein, 89 aa, Zea mays
  Coding DNA Sequence Number=SeqID_18932
MELRRCGQNPDELNGHEPYRNDDERIRYGMEDRNLLPAGGFSAKRGAEKLPQNLGVWESLQLLAAKSRQEAEPNRDLVPFSPSSSQTQP

SEQ ID NO: 62308 - protein, 104 aa, Zea mays
  Coding DNA Sequence Number=SeqID_18933
MRVGGGKRYGRYWIADGAINSSSTQLCLRCEQVARARAQPYDLDPARKREDGTSGDGGEDDIRAGGGAGGPLGRSIDDGKDVPVHGEPWHRTWFRSTTFVVPCS

SEQ ID NO: 62309 - protein, 68 aa, Zea mays
  Coding DNA Sequence Number=SeqID_18934
  Subcellular localization annotation: CTP_CleavageSite=28; ConfidenceScore=5.14e-01
MASPPRSLPSRACPSVRPDSSPPTSSPACARGPADSDHPRRRPAHRRDPQDLPYTLDHLTGVVSPPTT

SEQ ID NO: 62310 - protein, 175 aa, Zea mays
  Coding DNA Sequence Number=SeqID_18935
  Subcellular localization annotation: CTP_CleavageSite=20; ConfidenceScore=5.13e-01
LIRGRARRSFVVFRVLARVRALGSGGAEFTVFRVLARVRALGSGGAEFAVFRVLARVRALGSGGAEFAVFRVLARVRALGSGGAEFAVFRVLARVRALGSGGAEFAVAPLARPDCLPLQLYADGGYQLRIRRLEGDQPFSVAFRSGGGITCSTFGERLWATTDLIDGARASTRIP

SEQ ID NO: 62311 - protein, 318 aa, Zea mays
  Coding DNA Sequence Number=SeqID_18936
  Gene Ontology: Mol. function=oxidoreductase activity, acting on single donors with incorporation of molecular oxygen, incorporation of two atoms of oxygen; Cellular component=chloroplast; Biological process=abscisic ...
  Gene Ontology: Biological process=acid biosynthetic process
  Homolog annotation: Hit_ID=Q285R7; Match level="QueryCoverage=31%, HitCoverage=24%, E-value=2e-26, Identity=53%"; Hit description=9-cis- epoxycarotenoid dioxygenase 1
  Pfam annotation: Domain name=Isy1; Domain location=44-200; Score= -85.3; E_value=3.3e-05; Accession=PF06246.3; Description=Isy1-like splicing family
  Subcellular localization annotation: CTP_CleavageSite=76; ConfidenceScore=5.31e-01
MKRGRKARTSTLHVTLFFMAVRSYSDVKRSAKLATHAPTVDCPARRAFSLQTHRARPANPSRKPRERLPYLASECRDLADAERWRSEILREIGAKVAEIQNEGLGEYARDASEMAWVDVSDCFCEAGTGESVLTEIRLDTRTSASMRHVVLPASAQVNLEEGMVNRNMLGRRTRYVYLVMAETWPKVSGFAKVDLVATTLARQSGHVAWSRSHAPTQSAWNRCPQHGRRRAESPSRSSRMHTTHSGAFPHSPPALLEYTYTGSADATSSSTGCGLWSLLLRRAPFSPRCSAELRRALALTWLLSINASSLHRLPCAPC

SEQ ID NO: 62312 - protein, 342 aa, Zea mays
  Coding DNA Sequence Number=SeqID_18937
  Gene Ontology: Mol. function=metal ion binding; Cellular component =integral to membrane; Biological process=ubiquitin cycle
  Homolog annotation: Hit_ID=Q5KQB3; Match level="QueryCoverage=23%, HitCoverage=31%, E-value=5e-24, Identity=65%"; Hit description =Putative uncharacterized protein OSJNOa0153K02.1
  Pfam annotation: Domain name=PHD; Domain location=109-151; Score= -3.7; E_value=0.036; Accession=PF00628.20; Description=PHD-finger
  Pfam annotation: Domain name=zf-C3HC4; Domain location=107-148; Score= 16.8; E_value=0.0011; Accession=PF00097.16; Description=Zinc finger, C3HC4 type (RING finger)
  Pfam module annotation: Pfam domain module=PHD::zf-C3HC4; Domain location=109-151::107-148
MEDNICEPSEMMSKRNSARGRAHGPHGVRPLVNDAREVEASLGKEPPRDRSGVAARGRGGGDGLGGGDVRSTRCAWEPPVDDDVASALPVYVYSSSAGGECGKAPECVVCILELRDGDSARLLPCCGHRFHADCVGAWLRLHATCPLCRASVVATRSTFANPDTLGHVSAMTRYTYRVRRPSMFRFTIPSSRFTCADAGSTTCRIDALVRVSSLISVSTLCSWRPSSASLKMESAGGHAGPDHHHLPGAGFAEAVRHVHPRHLRRVARVLAETLVLDLGDLGADLAEDLRAPALGVGEVAALGGEVGQALPGLARGACGGGRCGSGGRAAGNAGNRRDAGVR

SEQ ID NO: 62313 - protein, 218 aa, Zea mays
  Coding DNA Sequence Number=SeqID_18938
  Gene Ontology: Mol. function=catalytic activity
  Homolog annotation: Hit_ID=Q7F0N4; Match level="QueryCoverage=88%, HitCoverage=53%, E-value=5e-61, Identity=55%"; Hit description=Alpha- rhamnosidase-like protein
MVIPLLIVLFLLVLCDEHTWMRLQYAWNAIPFILLFCAISTNKIFSNNKPFSFTIASARSLLQIDPNSGLVQELGNSFLDFVANLNDSKVKVGQILEEDTQNIVNMTMNVSSGWSIVKEELILPARGAPFNSCHASTIVQDGHWHPPVVADEQDGVPMWNPVLFQLPSRELLLFYKIGQEVQKWSGAMKRSLDGGVTWSPREQLPPGILGPIKNKACK

SEQ ID NO: 62314 - protein, 75 aa, Zea mays
  Coding DNA Sequence Number=SeqID_18939
  Homolog annotation: Hit_ID=A2ZQV2; Match level="QueryCoverage=98%, HitCoverage=13%, E-value=1e-12, Identity=60%"; Hit description =Putative uncharacterized protein
MVADVIGKEYTRSTANSVVSMPNAWKGRHGESDGDGSGGRKDSVEEAEQFLCSMLGDNSELGMGVVRDVPSEPGS

SEQ ID NO: 62315 - protein, 233 aa, Zea mays
  Coding DNA Sequence Number=SeqID_18940
  Gene Ontology: Mol. function=potassium ion transmembrane transporter activity; Cellular component=integral to membrane; Biological process=potassium ion transport
  Homolog annotation: Hit_ID=A2ZWJ9; Match level="QueryCoverage=45%, HitCoverage=28%, E-value=9e-25, Identity=57%"; Hit description =Putative uncharacterized protein
  Pfam annotation: Domain name=DUF1639; Domain location=187-232; Score =34.5; E_value=3.8e-07; Accession=PF07797.5; Description=Protein of unknown function (DUF1639)
MANYSLIKNLGQIAFTCMVYRALILAYMGQVAYLCKHHIMESDYRIGFYVSVPGKLFSSVLIIRDANHSAISESVLILNAYNAPFQRKLGGPLWQLLFLQQLWEAKPSSLEHKTLEKCIRAVEDRSGGGAVGQKRSSPDKMHRSTMDAVYHHHHQESPLTGNVAATATAGKKLGVERFKLPPIYISLSRKEKDDNFLAMKGTKLPQWPKKRAKNVETLQVLNTWLEIDLILYF

SEQ ID NO: 62316 - protein, 220 aa, Zea mays
  Coding DNA Sequence Number=SeqID_18941
  Homolog annotation: Hit_ID=Q2QYW3; Match level="QueryCoverage=35%, HitCoverage=16%, E-value=3e-33, Identity=84%"; Hit description =Expressed protein
  Pfam annotation: Domain name=X8; Domain location=105-174; Score= -25.7; E_value=0.0073; Accession=PF07983.4; Description=X8 domain
MYGEDARTIAELSIDDYLYPDADLYNVSGLPPLALPPLTCDLSRSKWVFDNVSVPAYREKDCTFLTKQVSCLPNGRPTTCDSTGDGSPTSAPSPRHSVGAIRSYASRGYKGAMQAFSGAIRRSCKSICWKPGFPLTIQQGGRCFNPDTVHDHASYAFNNYPPQPAATSVVVCTFGSMVFASILLVRGIWSEVTYSRKNRYSYIHRIDNDENRWSRVQTAG

SEQ ID NO: 62317 - protein, 349 aa, Zea mays
  Coding DNA Sequence Number=SeqID_18942
  Gene Ontology: Mol. function=catalytic activity; Cellular component =plasma membrane; Biological process=protein amino acid dephosphorylation
  Homolog annotation: Hit_ID=A7P1R1; Match level="QueryCoverage=82%, HitCoverage=98%, E-value=1e-78, Identity=55%"; Hit description =Chromosome chr19 scaffold_4, whole genome shotgun sequence
  Pfam annotation: Domain name=PP2C; Domain location=61-341; Score =184.1; E_value=3.6e-52; Accession=PF00481.12; Description=Protein phosphatase 2C
MASLQQRKSRVLRVRLSPSDPAGTSLQQRKDESGGAHAVADEAVRGTGKGKSEAAPGRRKVTYGFHLVEGRMPHGMEDRHVAEFRKLDDGNEVGLFAVFDGHSGADVATYLREHLFDNILMDQNSDTSVALGCVDYVGTRVACSARQSGSDFWTDPTEAIRRAYHRTDRKLLKKTAGDDSGEGMKKGRRRGGSTAVTAILINGEDLVVANVGDSRAVLCDAGGRARQLSVDHEPLRERRAIEARGGFVTEIHGDVPRVDAQLAMARAFGDRSLKEHISSDPDVAIEDVGDGAELLVLASDGLWKVMSNQEAVDEARGIEDARKAAVRLVDEAVRRGSKDDISCIVVRLH

SEQ ID NO: 62318 - protein, 117 aa, Zea mays
  Coding DNA Sequence Number=SeqID_18943
  Subcellular localization annotation: CTP_CleavageSite=66; ConfidenceScore=5.02e-01
MAFQAWCLGRKGLLFVFVFGPVQTVSTAILSAALLRQVLSLGRNRKKKKRKEVKKDWLCTAKTQLSLAHRTVRWCTGQYPCKGERLQVVEIPRKREKIKVKKNTMVFKLIIGSLERS

SEQ ID NO: 62319 - protein, 179 aa, Zea mays
  Coding DNA Sequence Number=SeqID_18944
  Gene Ontology: Mol. function=catalytic activity
  Homolog annotation: Hit_ID=Q7F0N4; Match level="QueryCoverage=96%, HitCoverage=70%, E-value=1e-39, Identity=62%"; Hit description=Alpha- rhamnosidase-like protein
  Pfam annotation: Domain name=BNR; Domain location=144-155; Score =13.2; E_value=1; Accession=PF02012.11; Description=BNRAsp-box repeat
  Pfam annotation: Domain name=BNR; Domain location=87-98; Score=4.2; E_ value=36; Accession=PF02012.11; Description=BNRAsp-box repeat
  Pfam module annotation: Pfam domain module=BNR::BNR; Domain location =144-155::87-98
MNTSSINAASSWSIMKEEFTFQAHDRPFNNCHASTIVEDGYWHPPVVADEENATAMWNPVLFQLPSHELLLFYKIGEHPQNWSGAMKRSLNGGMSWLEREQLPPGILGPIKNKPSPTHYKSPTQLSNAENTQRTKLARGTLKVAVSTDDGLSWQEVVTLENAEGWEFSYPAVIQTQGRP

SEQ ID NO: 62320 - protein, 82 aa, Zea mays
  Coding DNA Sequence Number=SeqID_18945
IPDPVQPSEKTVHVSVKLPERGIGLCFTGEAGPRSPDFNRPPATVDRGSLEEMVAGITWPTTLPLGWTVEWDPASAEEEHEE

SEQ ID NO: 62321 - protein, 61 aa, Zea mays
  Coding DNA Sequence Number=SeqID_18946
MQYNGSSSLISCEKQTIRIEFLSLQVTALVPTITGMGDHVSGRVRGKVCGQVHSEKDPLDI

SEQ ID NO: 62322 - protein, 99 aa, Zea mays
  Coding DNA Sequence Number=SeqID_18947
  Subcellular localization annotation: CTP_CleavageSite=83; ConfidenceScore=5.59e-01
MAFPQQLNMPSILSVSVAARVRGRVHRVHRRSVAGSTVVPTACLAACSPGVVYCTPALVLALARFSARTPARYHCGALALRPSGFARAGESLRSNDLDA

SEQ ID NO: 62323 - protein, 129 aa, Zea mays
  Coding DNA Sequence Number=SeqID_18948
MWSTGVCRGEGAGVHAKVKEQETVVAGEPDDVLNWGKSSELHGELGRDGHPTRWPWPVKRRMGRRVDWASTDRRACQGAWGKESRSAQELWPGARWRLGTERHGRDRSAVRWRNKGWQPAMGSRRTWGR

SEQ ID NO: 62324 - protein, 183 aa, Zea mays
  Coding DNA Sequence Number=SeqID_18949
MVSNWAVEIRRRGWNLQSWETRLGTMMGPQLLRVEFNAGEGGIRRRSMPSTSKSLKAWTGHLVVPTLGKWVLELLALSSASCCLARFGERSHCGRSWSDTGYGAIVRTARRRNWDVGGGRRVCGRRSQDGWLGLDPGLPFRSIEAIPLDRDRVYEIPSRHFKSRTSNSDSRVVSTYRFVAAGF

SEQ ID NO: 62325 - protein, 269 aa, Zea mays
  Coding DNA Sequence Number=SeqID_18950
MARLRHTTPSSSRTVSGQSSHLERLHHRLREEQERQRQQREQQGSSSPPEQEVESVRRRSPVPQLEAPPAPPQDTPAIGGATGGGPGGDPNGDDDDGSDHSTEPSEEQEAEGWVARPITRDAAHGCHFHDALDTLLRRAFDRHTWSIEYRCVVYQHSRGRYPDRWEATCLVLPRRPTGITGSVVVLPIGEDNPRLSHTVNLVVVLNTELDHSLDELSRARAEIAELAERRHQEGGSPTPVGTQHPYRSPPRGHHTYGSPACRTKIDLDP

SEQ ID NO: 62326 - protein, 366 aa, Zea mays
  Coding DNA Sequence Number=SeqID_18951
  Pfam annotation: Domain name=SlyX; Domain location=276-343; Score= -8.4; E_value=0.06; Accession=PF04102.3; Description=SlyX
MHISYSLHSLDWDLADGEYVLIPEQGAVHEEDQEQAPETAIEDLLAAPAFEGKPRTRPLDLRQKALGIVGEIGGKMTSPTPASGGDTRFSSDFLSHDGFPSILWEVLNSAGYPTPPLYTVQLYKEHRVPHCRAWLTLEAHPLQPGWRSLDSEMIGFRTDDTTEAAAIKTLTTFCGYHPLEMVMHPLGLFPTEDKDDPMWCNRVSHVKDVWAMYPDLVGRVTVQCMSALYHLQALQSDAMAHLANLAQTTKLTLDSQEDFVVDLSFELVEKDLQVERLSQRITTLEQQVEIRDNTIDVLENQLHDVQQELEEANDHLDMHHLEMEANEAGSEGEEAPEELGPAPGANVTASAMPPSPMSSVASTTQG

SEQ ID NO: 62327 - protein, 123 aa, Zea mays
  Coding DNA Sequence Number=SeqID_18952
MEDEEESGLEDEEEATVTLSMEKDALECDICCLPFQSEVFMASFELFSTSGNPWPEERAEKGPRLWASSTGAPAMEGLSRTWPEQRDGRAAMGGRGGAGERAGMRAAGEKWRLGGLRKGKHAE

SEQ ID NO: 62328 - protein, 103 aa, Zea mays
  Coding DNA Sequence Number=SeqID_18953
MHHGSLCKGYVVYPWPFTLVGKIGSVQPRLERDHDSWMARIRCTARKSVIPFLPSRLAERPLRRTVPSQSSHLKRLHRRLREEQEHRRQEQEQEQQDSSPSPQ

SEQ ID NO: 62329 - protein, 137 aa, Zea mays
  Coding DNA Sequence Number=SeqID_18954
MHDFLLALALLGCSGWLLGQEDGLPGCFDAGIDFLLTGCSDGTAATAEETASGTTAAGSDTDAGAADSGGINQSSQKAVLPLSIRVDVFWGSLGHMVATEVVPEFFTSDGFRIGMGGKASELAPEAEVVVATAAPAA

SEQ ID NO: 62330 - protein, 56 aa, Zea mays
  Coding DNA Sequence Number=SeqID_18955
  Subcellular localization annotation: CTP_CleavageSite=33; ConfidenceScore=5.06e-01
MALTAPQAPSLQGPWMESCTSSRERLRRTEHVEAGVVTTTTAIFSTPSSEALSFVI

SEQ ID NO: 62331 - protein, 91 aa, Zea mays
  Coding DNA Sequence Number=SeqID_18956
MESHDLRAERESRLVGGNETDGFGYDYGTDKWYSFRLERPNKTLAKYVDVYSPLLYTPNPPSLGCQHCNHCSGEDEAVEGDFQEFRDYDEF

SEQ ID NO: 62332 - protein, 104 aa, Zea mays
  Coding DNA Sequence Number=SeqID_18957
  Homolog annotation: Hit_ID=Q2QTF5; Match level="QueryCoverage=87%, HitCoverage=98%, E-value=7e-09, Identity=39%"; Hit description =Retrotransposon, putative, centromere-specific
METRALLFCLGTSEKTERENNLNMLDSDCRRTPTCDGHHGHMRARIGMFKHNMERLSSLLSYGSRIIDECPSGQGVTLHKIVTTIGGGVSVAKAQRLWKAVVGP

SEQ ID NO: 62333 - protein, 187 aa, Zea mays
  Coding DNA Sequence Number=SeqID_18958
MDGADRRVRFVSRARLPPPSLYTDLWDPVDSATISCVFSLVPLLRGAHRAVPQSQRISVFPVHQPPPRMLQRCKLRSSVAGAPCSTSPTNTGPHNIAHSCSPFSATATPHQPLHRRDPHGDNLPPPLTHSFATVSESAGGLGDSLGHVERVRGGLRPREAVEVGQIPHRSWDRNRIRRSPSTGPLPP

SEQ ID NO: 62334 - protein, 213 aa, Zea mays
  Coding DNA Sequence Number=SeqID_18959
MGCLAGVAGFAAGMASSVARARRGWNGRCAAAGHAARRVPWPRPRPQGGWLGWGTWRGAQTGHGVRAGLDRAREQGAGRLGSPATTDRPLTGSGLAGCALSPQPRRTGRGSRGWGASRGAGPPGRDAVRGCRTWPRNGGNGSHAGSHREETNRSVGGQRVLLTGEGERHNAGLQGESVEGERGWGRGERGEDSPGTAGFVETAGSRCYDGYGE

SEQ ID NO: 62335 - protein, 114 aa, Zea mays
  Coding DNA Sequence Number=SeqID_18960
  Subcellular localization annotation: CTP_CleavageSite=20; ConfidenceScore=5.01e-01
MERGWRSGGWATRWPVGRPRQGASRRAGPPGRDAVRGCRTWPRNGGNGSHAGSRREETNHSVGGQRVLLTGEGERHNAGLQGESVEGERGWGRGERGEDSPGTTGFVETAGSGC

SEQ ID NO: 62336 - protein, 213 aa, Zea mays
  Coding DNA Sequence Number=SeqID_18961
MATARGMISFLKADFLARAPKHHEQGLPRCAPGFPFYDMGARPHMSYKLGPKREEGESSRRRACKPPYGYTPFHLRRNQRSRRRTAAQGACNRTTVIRPSIFTTTSGKSHRRLRQYHTFSRPSQKAKEINFQNRRSDSRHPAHGPTKTLSTEVMGQSAVGAGVAVSVTIGGSAVTAPTGVQEQRANHQSNSGPTCRLASSPEAGLGATVGTLD

SEQ ID NO: 62337 - protein, 52 aa, Zea mays
  Coding DNA Sequence Number=SeqID_18962
MPTPLLALPLSWVNKDECPSGQGVTLHKIMTAIGGGVSVAKAQRLWKAVVGP

SEQ ID NO: 62338 - protein, 267 aa, Zea mays
  Coding DNA Sequence Number=SeqID_18963
MKGSATLPQLGKDPSSLVLYPKACTLYHFMTGRGPSRGYLLGAIAKLFLRYAGLQPRQIEPTSQGASGHLCTDDLPAVATTSARAPLRRGPRPRLPTGGGNEAIKAKELEARWQVVLVVSPAEATTSAAGSLTSSGNHLSTDDSSHLRTGGLPATAAAPIVHEEVLAPTLLRSEDKTIKERGRHLCGVRHFVRPPRAASEQCAMDAADYNGSSSLISCEKQTIRIEFLSLQASTAKASSEGWRLRLRPNICPPRDQFDKVIWCRRRR

SEQ ID NO: 62339 - protein, 81 aa, Zea mays
  Coding DNA Sequence Number=SeqID_18964
MAPLDPVTLKQTVLVSEDLLPEEEDILLSYLNHNKDVFAWSALKLVGVNRTNIEHNLGIDSTVVTPTFKGKTECIAYVCQD

SEQ ID NO: 62340 - protein, 179 aa, Zea mays
  Coding DNA Sequence Number=SeqID_18965
MSTMSKVVADGHAIEGMQENDVGLTTIVDKYLVQIPSCYPTVDHHGISMGCAMKVDVSCVEGMVMLIVELVLVILLGVVGVGDNFLVIDPLVSSHSVLYDLGLRAVRDEMCRVFTLEKDNRTFAVVGLDLYLCLWCFRRSPVARVIRGDEQCLQSLADWRWCALGTGYGFAGLSLIAQA

SEQ ID NO: 62341 - protein, 116 aa, Zea mays
  Coding DNA Sequence Number=SeqID_18966
MDPTPNPGRALRDQRSGGHPKAKASSEECFLPAIGPQKRQSTALGGIGARTGLQSGHEEESDLSSGSQASVTKCVRRVDGGYDKVGPACHPQEHDSGLVLENEMEVGREGEYDPWR

SEQ ID NO: 62342 - protein, 296 aa, Zea mays
  Coding DNA Sequence Number=SeqID_18967
  Gene Ontology: Mol. function=kinase activity; Cellular component =ornithine carbamoyltransferase complex; Biological process=amino acid metabolic process
  Homolog annotation: Hit_ID=Q6QP54; Match level="QueryCoverage=34%, HitCoverage=36%, E-value=1e-14, Identity=49%"; Hit description =Putative kinase
MALPVDVAGPRPRPGDVGAPPKLGSSLSSVAEAEPEPLGRARRRSFGRGQGGVRALGRAKRSSPSSRAEPESEPWVGRSGVRRLPGLSPSPSPGSGGAEFAVFRPESEPWVGRSGVRRLLGLIPSPSPGSGGAEFAVFRVLARVRALGRAERSFLWRLWQGLTACQSHSVKWHYSRSGAGGVVLLSDRSVEQRSDGGHFGSAGGEGKASGEPEICPLLKLYADGGYQLRIRRLEENEEEAIVEEVVPQAENPPVENNFFFDICGTDPEPPATQGKPRPGAFTPFLVLNSLSLEMMH

SEQ ID NO: 62343 - protein, 104 aa, Zea mays
  Coding DNA Sequence Number=SeqID_18968
MDHDQRPWYRQVPSSKILGEESPVRPMLRAPGTTLEQKQQKFVASSPKNNKGINPKYGILSKSYPTKEKTLKDKALDFYLFSKELPDRGALKNDDPAARSGQDQ

SEQ ID NO: 62344 - protein, 137 aa, Zea mays
  Coding DNA Sequence Number=SeqID_18969
MAGKQRRPPHSDCCATHQGEADNSQAQPRAQQGAPPRPILGLGLKSPPRPTPGLSLNLGFGRRSPPRPTPGLDLDLGLGRNRILARPQPRPKEKSPPRPTLGSDRPRHGEYIITLPLASSGYGGTRPASHLARPGNK

SEQ ID NO: 62345 - protein, 110 aa, Zea mays
  Coding DNA Sequence Number=SeqID_18970
MASRPSAQGTVNAGQRSGEVPRAMEGSCSDNTERRLAQTWWRWYWTTENREESEVAARETSSGRRGDTAGGAGTAPRRAEILKTCFCEQQSNRSWQKSSVKGGARVGAGK

SEQ ID NO: 62346 - protein, 141 aa, Zea mays
  Coding DNA Sequence Number=SeqID_18971
MADVPVMTRGGSHGSALRLDLYNVAFSYRRGPFIVFLCTQILLLSMAPHTIASDILATVDNPVLRSPLTRASSSHQSMRYAYIIRMEHIVGPLSCGFLVMCPIVVDVYSWLHNLSWPQRGPGHPFYLVELLDSDLVIHSAS

SEQ ID NO: 62347 - protein, 167 aa, Zea mays
  Coding DNA Sequence Number=SeqID_18972
  Homolog annotation: Hit_ID=A2Z971; Match level="QueryCoverage=42%, HitCoverage=15%, E-value=7e-09, Identity=50%"; Hit description =Putative uncharacterized protein
  Subcellular localization annotation: CTP_CleavageSite=48; ConfidenceScore=5.64e-01
MPPSPRRLRQPRRSRRRTSTCRPPTRRSCQMRRPPRTPPLCRTSGGCRSSSGSRVPDGGWALAAHLEVQVRENQALLRSFDAVVNRLQAALDVKDAAAAALRLDLEALDDANARLAGRLDRTLAPPPGGSAIRITHATSAAPRRESAPNQRPKWWVPLKKDPLWCGT

SEQ ID NO: 62348 - protein, 129 aa, Zea mays
  Coding DNA Sequence Number=SeqID_18973
  Subcellular localization annotation: CTP_CleavageSite=50; ConfidenceScore=5.15e-01
MAWLRDVFGTASSVVIPLASPFIMHRRMPGMAYFPVPYGVWVTVETPMLRSALPFSRGVRPRVGCRLAGLLDGQHFESQHHAQENFKSPSTSKLWEMTGKVQQSIVTGNGIRKQGSVVLASPVLRSSYQ

SEQ ID NO: 62349 - protein, 439 aa, Zea mays
  Coding DNA Sequence Number=SeqID_18974
MGGGSLAVPGWDVSLADDQLARWLRDAWAWASKPACQKSEKRVHLARLHAACMAARPFRPLVWAKVGNRLMVTSGLMVGESEPGCGPFPSLSLKDFHHQGWGGESAALGCSVPGLRTRVALEPLAAPASATAAGRGSSAGATARAGHGLTSNSTTFCPSLPHEFWRGRGPPGSSTRPEVSAAAVRPPGTEVVVVAAAGAGDGAPFVGLPLLRRPSPSEWGCSSSLVKGTPWPLFDEPRPGVAISVRTEAELARKWEPGWPEPSRVARQRGSTSESISRGLGSGWRPWKRLGRGPRGNRPSRLLGPDSRRSPWTASPSEAGSDLAEGVVDAEGATAPFSVKTRACRIRSSCSVCLLRPPRPENTPSLRCKAASPFLSCRASRLSVGNRDVCVGESCFSRKVMSEKVMSEVSVSRRRRSTSARSALAAYVYSVVSRIRFSK

SEQ ID NO: 62350 - protein, 278 aa, Zea mays
  Coding DNA Sequence Number=SeqID_18975
MGIEAETSAWPSRSSNSSLLPRLILLIFLSWRRDTQHPVQLISGFNNTVTVIAIHNKDKTLCVLEPKKSNRKSKRMVALGFWKNRKLGSVRCAREAPRRGRRLHERRRRGSGLRQRHHNRRHGAQAEVEELLGAVPDDLVLDLAQRADTLVLHLLSASCGAAVPPPRTTHTHHSPPSPPLHSCNSRRRHPAPLGGGDKVCAEHAAAGVAMLHKFALTFKTKTIEFFAEEDEDEDADQLARSQAPGADGVIAWQRVVVLKPDPPNPSPAYQRRTDLCVF

SEQ ID NO: 62351 - protein, 367 aa, Zea mays
  Coding DNA Sequence Number=SeqID_18976
  Homolog annotation: Hit_ID=Q2QT64; Match level="QueryCoverage=87%, HitCoverage=87%, E-value=1e-133, Identity=75%"; Hit description =Expressed protein
  Pfam annotation: Domain name=NnrU; Domain location=137-360; Score= -117.7; E_value=0.1; Accession=PF07298.2; Description=NnrU protein
  Subcellular localization annotation: CTP_CleavageSite=45; ConfidenceScore=5.09e-01
MASQLRLHLAATPPLLPHRRPHLARPLCPTLNPIRAPLPPLSRVLSHARPARAVGGGIEPKEGVVAEGDESGGGPVLVGEDSAAFELKDQSVASWAYFAGILGAVLVALNVLWIDPSTGVGTKFLDAVASVSDSHEVVMLLLTIIFAVVHSGMASLRESGEKIVGERVYRVLFAGISLPLAVTTIVYFINHRYDGTQLWQVQGITGIHELLWFSSFISFFFLYPSTFNLLEVAAVDKPKLHMWETGIMRITRHPQFHMTTYTLLIHNYHVDGWSVAVAASVGLISHHLFGAWNGDRRLLSRYGEAFEVLKKRTSVMPFAAIIDGRQKLPKDYHKEFFRLPYVAITMLTLGAYFAHPLMQASSYQLPW

SEQ ID NO: 62352 - protein, 194 aa, Zea mays
  Coding DNA Sequence Number=SeqID_18977
MDPRVGEKARARVRGEKLSSGSAAAVRKGEWAARWVWKWAEKESRSSRSNGVCAPPNLSASDGGAARLHGEARRGKLNQTFQWPQSSIKSCYTVLRGWRTHRSSSYHGFGRVGAQSTARCGFSAPMSNPAFEGRRQAREVLATASRDHGANPYAQRRANRRRKALSSRRTEFRHRGGNGSSRSTWSEGNASTGA

SEQ ID NO: 62353 - protein, 366 aa, Zea mays
  Coding DNA Sequence Number=SeqID_18978
  Subcellular localization annotation: CTP_CleavageSite=9; ConfidenceScore=5.12e-01
MPAPPPPPSAGKVTGQTRMLLFHHAGKTSSIPPPAGGLTAAIVVVARRRKEYHVVAAVEGHELKTPETEHRPGLERLMKTTHLELDGKLFVNTQQTPTWRANYRRFDLGGADALAVGGYKRSRGRERVTVRQPVLLRGHLLADVAVGEVLLPCSCGVVAVGGALEPCGSTAVGAVCHTRISGVQSPGANIITRYQDDLQVTRVLTASRSNSNKHEPFIKIQRRLRPPPNLSASDGGTARLHGEARRGKLNQTFQWPQSSIKSCYTVLRGWRTHRSSSYHGFGRVGAQSTARCGFSAPMSNPAFEGRRQAREVLATASRDHGANPYAQRRANRRRKALSSRRTEFRHRGGNGSSRSTWSEGNASTGA

SEQ ID NO: 62354 - protein, 284 aa, Zea mays
  Coding DNA Sequence Number=SeqID_18979
MHRALPPSEPLDGERPHRFRLVVVGGTQLHGSWYLSAIARLQGFSSGSPAASPRRWSPKTVTTSSMVGRSEPGCGLCPALSFKDLHHPCWGGGRAEPELYLPHGSAGHLFFQLLGVETILQLCGGGALQPCRGRRGADRFLRGGDPPSVLPFEAGSDSAKGGVDAEGAAAPPLMSDPAGTVYLVDLFVGNRIVCPSESYFSRKVMSEDSVIDIVEKARKIVSAERFSSIKTCSVSGIAYPSVSYLSQKVMSEDPTFEVVEKHERCSGRKTFFEEDFDAEGVRPF

SEQ ID NO: 62355 - protein, 101 aa, Zea mays
  Coding DNA Sequence Number=SeqID_18980
MDSCSLFQKHEVVFTGIKHFKVFDQVTEDFDRGIFQMLDDEEVEDFGSLESSLTRTEGTGTGAEEHSVPQASPSEDPAAAAVSAGEDPAAAAAPSQVAGSR

SEQ ID NO: 62356 - protein, 341 aa, Zea mays
  Coding DNA Sequence Number=SeqID_18981
  Homolog annotation: Hit_ID=Q6J9V9; Match level="QueryCoverage=37%, HitCoverage=44%, E-value=5e-58, Identity=85%"; Hit description =Putative uncharacterized protein
  Subcellular localization annotation: CTP_CleavageSite=44; ConfidenceScore=5.26e-01
MKARAHMSCNQRDGYYVQGNCTATCANAASSRLRNRRSDSRQPCATSDTSGRRAPFRLHHDDRVIKGTGKGDNAKRILLGEGNGPRALLLIRGSKVAPSGVREPPQSTPAPSPLLIRGSKAGTSEGFDSRPRARRVKDDPGYVRYMAEARATLPRYPRTFPRPVGTICNGIPPEGGIEPSDPIEWVRVRQITCSSELRLARPQPRPREKDFASPDRRPRPQPRPQEKDSASPGLSLGLGGVVASPDLSLGLGGVAASPDLGHGSRRFFDGHVGTPTGLKAPLRRPHRRIYRAQGTSPTATLFVQGSGHFPANHGPREEGETGENARTNTRTRDTDKRRQAE

SEQ ID NO: 62357 - protein, 389 aa, Zea mays
  Coding DNA Sequence Number=SeqID_18982
  Pfam annotation: Domain name=zf-CCHC; Domain location=329-346; Score =14.7; E_value=0.009; Accession=PF00098.14; Description=Zinc knuckle
MVAPLAPTTEIRWRQGCGRTGALGAPGMAQEDSRNCGEYDHGHSTGTRALEGGGPRRGGLAAAQLYSGEQSRTNKGRQGENRGRVRLVTSREGSGTLERRPRHERVLGQRRRSCYSAEKGPLNPHLIDIIQIKREKRNLEGEKQEMNLQGHVATDPHYAHHASALWQELSTKIEQLESNAPSSATDDGLIKKNEKLKAKLASSQEAIEYLLEKMEILSIHNNELTTKLENIGSTPEVSLAETLEIINKDASTSCFVLINDSNPCNQALVENIVIETCSNEVAKGNEQLRQEVARLGKDLYDKKGKAKQIQPPQDNITTGVNKPVEEETVICRLCHKKGHKSYQCKAKTRDKQKQKLKQKPSNKISNTYINKVDKKVAIPYLIKKKRMEK

SEQ ID NO: 62358 - protein, 60 aa, Zea mays
  Coding DNA Sequence Number=SeqID_18983
MKLVSKLKPKPQKLKMETIGGNCRKLKEKCALAEANQEISEYWKNHLEKNVEELHTSKEK

SEQ ID NO: 62359 - protein, 148 aa, Zea mays
  Coding DNA Sequence Number=SeqID_18984
MLSTTATFPKISYPWPITFKRNSVLVQAISAEYGSQGLCVDLRGCAYFPDFVKPGNCNFRPYQYVIELLGTLLLRKRPAVVAGLGLRVLDRLESLPTLEEGPNVSFYTLDEHLELLRKVGAFLYPLVVVLLAITNREQMAPFTSTNRC

SEQ ID NO: 62360 - protein, 98 aa, Zea mays
  Coding DNA Sequence Number=SeqID_18985
MTGRGMDFNTVTEDRAHGVIEGHEGALDKLTIVEEDTHASVYGGAYLMTDNVRGNFYRQSIWIVRICCPRQRASGSSNYCEQLAVATPQVHINHLPLP

SEQ ID NO: 62361 - protein, 1127 aa, Zea mays
  Coding DNA Sequence Number=SeqID_18986
  Gene Ontology: Mol. function=RNA binding
  Homolog annotation: Hit_ID=A7P035; Match level="QueryCoverage=48%, HitCoverage=55%, E-value=9e-49, Identity=30%"; Hit description =Chromosome chr6 scaffold_3, whole genome shotgun sequence
  Pfam annotation: Domain name=Extensin_2; Domain location=616-1030; Score=-141.2; E_value=0.092; Accession=PF04554.4; Description =Extensin-like region
MEGSTWQCPNHVYAFGPARVRKLTGHGAVRARDRSPDSMAPEVSELADVIFTAMLLLLNYGLAYGAAFWLFLNTWSDINHRSSSDGGGGYTLSTPPPPASAGQMVPRHLPCGNPSTLWQAEGHRRPVTRTRAVQKCFFHFSAESTKRLKTKANTGNCNGHHLLIEGTGLRMQSLVRNVCRAGSRGAAARLLEAAAVHPGAAQPSSAVRHLRHPCGFARPIGVDQPKPVQRRTILRDGGRVPAAASGFGLCAKVLVATRGLSTAGNAAEVASDSDDSTSPAVEHPPRIKFKRPDKTARHIMNILNKEAVEKVRSERAIPDVQPGCIIQMRLMTTKLEQSSAEHRPAKFAAPSSLTPKISMFGAKAGFIIPKNKLAGSLVIRSTSDKNETPTASNEDSSRHVHRKTKWGPDLALDPVVCKGRALAYQTRVEQISKQLKSGALDTSEIDGSVSAGNELNSIGPDILKENELGNVELLELERRELIGEILRLNPGYKTPENYKPVLRETKIPVPGERMPNRALWIGHAGDSGQSQGPGAEAEAHPGNNIIGVLLGSESNTQKRLHEETGAVIRVYGTKKINGEKSEIRHQDINETQDAYEDLYINVSADSYDKVDAAVVLIELLLAPVSVKSTATSTAATVSSADTSKDAVSANVQLEQNTTSQPDLLHYQSHNAPWLPTPQTNAPSIPSTGPVLSTLPNNPSQPQPPAGSFSMPPYTGQPPHMNSMPANPFPVPGPQQPVPSNQQHPPQFRANSSIGPFFGQPPGIVSQQMPPSSSMPPPVRPLQIPHASGGWPPFSPVTSQSHRPLQAPPTFMAVRPPISVSPLGATPPQGPIALTPPNMPTMYRGQHPPVPNFTGSAPLVSRPPGGGAQSFPTAAPQGPSSVAFPGGPSLRPPYPPAPDQARGPPPAFSPVGSTPGMVPPPIASSGLPAPRPANTSCIQTQVVAPLRPPLPAAGDFTFRPAIPPAHAPEFAAPGSQMGAIHGRTHHPGPFSSHPGDQKNPSQGFQGPFDGSRPMYTTNQARMHAPPPPHFHGAFPRNASPLEFPAGFRGAWPSVQAPPMPAPSHPSSFPPFQLRPPPPPQQDMSGAGGTRWPGGNQIYNPFAPTAAAAAQRAEADPEYEDLMASVGMK

SEQ ID NO: 62362 - protein, 1249 aa, Zea mays
  Coding DNA Sequence Number=SeqID_18987
  Gene Ontology: Mol. function=catalytic activity; Cellular component =integral to membrane; Biological process=sphingolipid metabolic process
  Homolog annotation: Hit_ID=Q6ZC53; Match level="QueryCoverage=73%, HitCoverage=99%, E-value=0.0, Identity=63%"; Hit description =Putative Bile acid beta-glucosidase
  Pfam annotation: Domain name=DUF608; Domain location=498-861; Score =664.0; E_value=1.3e-196; Accession=PF04685.4; Description=Protein of unknown function, DUF608
MGSQESEQAKVLPGTDCPQQPPASRTWQRRFDDEGKNVAMFSMTMSDLVELMPLMVKILKLQVEENAEGRVGSIGRSYRGYFQQFQIFPVTNEEKPVLANQFSAFVSRPNGNKYSTVLSAPTADLLKGVGKAGIGSWDWRLKEDRCTYHALFPRSWTVYDGEPDPEIKITCRQISPFIPHNYRESSFPAAVFTFTVNNSGSSPADVTLLFTWANSVGGKSELTGNHVNSKMTEHDGVRGVLLHHRTAGGQPPVTFAIASRETDGVRVSVCPSFTIASGGPSSSGEPTAAAMWDEIKKHGAFGHAGAGNGNAARAAASKAGSSVGAAVAASTAVPAGATRVVSFSLAWACPEVKFPAGSTYYRRYTRFYGTDADAAAEHLAHDALLEHMNWESQIEEWQKPILHDQRLPEWYPVALFNELYYLNAGGTIWTDGQAPKRAGFASSLTATEPFSIDTLLPVAAGGSAVDGVVRAVASATERSHSAAAFGAALLRGGEDNVGQFLYLEGMEYNMYNTYDVHFYASFALLSLFPRLELSLQRDFARAVLLHDPRPRRTLDGRTVARKVLGAVPHDVGLNDPWVELNAYMLHDAARWKDLNPKFVLQVYRDAVATGDAAFAEAVWPAVYVAMAYMDQFDRDGDGMVENEGVPDQTYDMWSVSGVSAYTGGVWVAALQAAAGMARVVGDRPAEAYFRARRDRAARVYDAELWTGAYFRYDNSGGGGASESIMADQLAGQWYARACGLEPVVEDAKARSALATVLDYNVMRVKGGAIGAVNGMRPDGAVDASSTQSKEVWPGVTYAVAAAMVHEGMTEAAFRTAKGAHDAAWGNDGFGYAFQTPEAWTEDGGYRSLHYMRPLGIWAMQWALSPPELHRDLRTPEARSSEEPSPADAALGQAQFDKVASMLRLPEEQQPKGYLWAIYNLNETNARTHEDLEWFGPPEREASRIRDDEHSAPYGTGALFDIGLDRDRAALQALRLAPPARSCHGPYATWQQRVSAWARSARPRYGSDLTRRICTPSKGPSHAFLGVSGRNQGVRVVRTGVRCSFVEVRSKWYIMGCIIFSYHVVPLEPPTWWGVVMFIVRLGDVVRAPRLHTVVGGTPDSGYRQATVALGPTSGEDTSLQVGPKSDWRLARCLCAPVDSIAAVLCDGPEETRYWRERRYDFSAPRNQRTGICQEDLCWCLSSWRPLCRRVCVLKLPSGLALPIPSSPLVRLPVAEVVASDGEPLSAEVVAAVGAEVVASAGEPLAALLV

SEQ ID NO: 62363 - protein, 38 aa, Zea mays
  Coding DNA Sequence Number=SeqID_18988
MDLGRRHSTQPVRNYNYAPYEGLQQRPKHLWARGSFYF

SEQ ID NO: 62364 - protein, 149 aa, Zea mays
  Coding DNA Sequence Number=SeqID_18989
MGKNNKRKREPTPPSEEFGDSEYSEEEFSSESEGSPAPILLRESSDDSDDSQGLAAEVWTYIRAVERSGLEGSDESEYSSDEEDSDGGGEDDDDDDGDESGRGGRGGSKDGDGSGRDGDGGGSRGSNRGGSSRGSTRGGSGGGSNRASG

SEQ ID NO: 62365 - protein, 165 aa, Zea mays
  Coding DNA Sequence Number=SeqID_18990
  Homolog annotation: Hit_ID=A2XP88; Match level="QueryCoverage=42%, HitCoverage=30%, E-value=5e-12, Identity=42%"; Hit description =Putative uncharacterized protein
MDSITASLLGCHAVSYLLPLLLPVVDGEQLVVRPASLPTGCLQQHHRVGVEAAIAERLEHDGIRSHGGLSVAVEPIKREREVPHEAALEVSAVPRLQIRRCGAWISVDPIPGALVANVGDVVKVLTNGRYALMYMTIGVEDYVRLALSIKLQEKNAMGVWTSSYS

SEQ ID NO: 62366 - protein, 302 aa, Zea mays
  Coding DNA Sequence Number=SeqID_18991
  Homolog annotation: Hit_ID=A2X817; Match level="QueryCoverage=34%, HitCoverage=13%, E-value=2e-10, Identity=46%"; Hit description =Putative uncharacterized protein
MLGNAAAAAQDQTFSNWFIGAAGDLDQSGPPLPPSPPLPHGAMKRTAAEAAQQQLLDELAAAAKAAEAGNSIGVRAILARLNHQLPPLGKPFLRSASYLKEALLALAEGHHGGCHHRGELARVPLPHVLAGVDEGALRPVVGVGARARAHLEGVHTEVVGGVGTVLDVGEGGIRRPLLAPSEELGDGIPQPAQRRRRRRLRGGARWRGTTVRLRGGDHERGHRLRAARRSPSAVESLSAASSSSRAVMAAAASEFSRKNNRSPARAPSVLVPPLPVVLLRPPLARSKRVRRLRLGVPLSCPV

SEQ ID NO: 62367 - protein, 316 aa, Zea mays
  Coding DNA Sequence Number=SeqID_18992
  Gene Ontology: Mol. function=metal ion binding
  Homolog annotation: Hit_ID=A2YQJ5; Match level="QueryCoverage=96%, HitCoverage=32%, E-value=1e-152, Identity=86%"; Hit description =Putative uncharacterized protein
MAGRDERWGARGGPGDTHASTSRAPAGTAGESEGASPDSLRNTPSNIARLEDAIGHCAARRKYLAHTKSPSDGKDVRWYFCNLPLADKVLSSSVPRTEIVGKGDYFRFSERDSLALEASFLEREEVLLAYWWREYAECSAGPRGSLVESDDSAYLYKVEEERVGVPVKGGLYEVDLMRRHCFPVYWNGENRRVLRGHWFARKGGVDWIPLREDVSEQLELAYNCQVWHRRKFQPSGLFAARVDLQGSTLDLHALFTGEDDTWEAWLVFDTGPKLGSNTIKLRRGFSPSESASTKPSQDELRQTKEEEMDDYCSQLF

SEQ ID NO: 62368 - protein, 658 aa, Zea mays
  Coding DNA Sequence Number=SeqID_18993
  Gene Ontology: Mol. function=metal ion binding; Cellular component=ER- Golgi intermediate compartment; Biological process=Golgi organization and biogenesis
  Homolog annotation: Hit_ID=A2YQJ5; Match level="QueryCoverage=75%, HitCoverage=53%, E-value=0.0, Identity=68%"; Hit description =Putative uncharacterized protein
  Pfam annotation: Domain name=DDHD; Domain location=527-654; Score= -6.5; E_value=4e-07; Accession=PF02862.8; Description=DDHD domain
MDSSCHPAADNQGHLNSARNGSHLRRDSNGADLQPCPQDEVTAMVTRDSGTADTAGSDSRRICALPGRRICAEQAVRRDGGRICANLRLAQGQQVDRARQTDGGSGGRSADSRSTGRGRGRIRRTAGCAGRRRGESGSGGMRRSTARTARMCANQDGGCAGTVPVGHLVFMVHGIGQRLEKANLVDDVVDFRRVTANLAERYLTSYQRSTQRVLFIPCQWRKGLKLSGESTVEKLTLDGVKGLRVALGATVHDVLYYMSPIYCQHIIDSVSNQLNKLYMKFLKRNPGYSGKVSLYGHSLGSVLSYDILCHQESLLAPFPTEYLNMETSDRSQGAKSANEVALHDSGAKDHDTYTLGHSCTGNENSAVDEGSTRTDMSHMDSIVPSCVLEDSLNNPETGVPRGAVVAEQNEKENRIENHQTVYTEEGTTSGVSTKDAEASHISRSAEDVHEEVLDKEKMIISLEEEVKRLKAKLDQLEQHKHLVTESTSGVEYHGGKNGNHALNFGELFTAQGSINQPYSPQIKYTKLNFKVVDTFFAVGSPLGVFLSLRNVRIGIGKGRDYWKDKNIIEEMPCCRQMFNIFHPFDPVAYRVEPLVCEDYQKKRPVIVPYHRGGKRIHVGVQEFTEDISARSQAIACQLKSLKVKAVAALLALSRNDTE

SEQ ID NO: 62369 - protein, 200 aa, Zea mays
  Coding DNA Sequence Number=SeqID_18994
MAEALAAMAGGIELAGAKGKWLAGEGECGAKSRLSPSPWVGRDGDRRLRPRSSPSPGSGEAEFVVFWGRGRVRALGRARRSSSSSRAEPESEPWVGRGGVRRLPGPSPSPSPGSGEAELPMAPEAGIGRCQPHSVEWHSSRSDATFALNAPAIRSVGVAIWPRLLLGEDWASGEPKLCAVGGYQLRFRSLGGTPNYGPRQ

SEQ ID NO: 62370 - protein, 43 aa, Zea mays
  Coding DNA Sequence Number=SeqID_18995
MTTDRPLDHFHMDLFGPIAYISIGGRKITNPRNFKRILETGSK

SEQ ID NO: 62371 - protein, 181 aa, Zea mays
  Coding DNA Sequence Number=SeqID_18996
MAVQGLIFPGAEQGCWEFAAVLHDGHHWRRAMSDLARGVGGRAEKRDHGQRSRRARTDNSEELGALATANARARGEQQPEQATQGASRELGRALGLGAMNFSPSTDKPRPDPRKTRGAAAGRDLGRARASRGLAGSDDWEAGKLARGRGQGRRRGEPRSRGRAGKERRERLSWAGRTSGRG

SEQ ID NO: 62372 - protein, 181 aa, Zea mays
  Coding DNA Sequence Number=SeqID_18997
MAVQGLIFPGAEQGCWEFAAVLHDSHHWRRAMSDLARGVGGRAEKRGHGQRSRRARTDNSEELGALATANARARGEQQPEQATQGASRELGRALGLGAMNFSPSTDKPRPDPRKTRGAAAGRDLGRARASRGLAGSDDWEAGKLARGRGQGRRRGEPRSRGRAGKERRERLSWAGRTSGRG

SEQ ID NO: 62373 - protein, 236 aa, Zea mays
  Coding DNA Sequence Number=SeqID_18998
MGQRTLAFTKLLIRDFLCNFLGKHRLLVVYVNWGGGARPRGGGLAGDEGRGRLAGLWGDLSGRKGWGGHGESSGGVWVGAGAPEGGGSRRSGSAAGLLYSGEELHAAESKTKVDRGGRGPLPQGGLRGLLGGGNGATVVRVRRWGTSAAARGTAGERGQREIVRGRGNWGASRVADVGAELTGAKGAAELQRRRGIDLGTAGVMAAALCVRAARGEEGLLQRTWGGGEGEWGSGLM

SEQ ID NO: 62374 - protein, 99 aa, Zea mays
  Coding DNA Sequence Number=SeqID_18999
MGVVVQNEQVVFVAREAEDRRSPEIAVDKIKGLNSPGRGSGKRKTRVTVELTSMTEALRRASSIGYVGVAGKLGHYVKSRVPEATVPNGGGGGGSSKSM

SEQ ID NO: 62375 - protein, 392 aa, Zea mays
  Coding DNA Sequence Number=SeqID_19000
  Gene Ontology: Cellular component=intracellular; Biological process =protein localization
  Homolog annotation: Hit_ID=A3BP25; Match level="QueryCoverage=79%, HitCoverage=10%, E-value=1e-145, Identity=77%"; Hit description =Putative uncharacterized protein
MKGLANDLCYLDEPVSNRTLVLNLLHSLGGATTTYGLGSCAHLMGCLSAPYWLTLHSYPPGPRRLVLLPLLALLPAMVLGSAGVIGNPMGFARNVGFGLKDFISASRKGKLQSPVELLNGIAQGSKTLIGSTVYAVSSATSHFSKTAYKGLTGLLQSPIRGAEKHGLPGVISGLAMGTAGLVARPMASILEATGRTAQSIRNRSNPHESNYLRVRFPRPVARDRPLFPYSWEEAIGESLLAQADSGRLKEETFVMCKTLKGAGKFLVLTEKLLLLVSSPYLVDLGSPRFIGVPPDPQWSIDTEMHLKSVVHLDRSQEVVNIVGSNGQTSPRDKRGGTRNRVMSSAFVPLFHLSIELPNEEDAEGTVQVLQALIEKGKARRWDKNILHRSNIS

SEQ ID NO: 62376 - protein, 82 aa, Zea mays
  Coding DNA Sequence Number=SeqID_19001
MGSRHVTADLGVDFDTVTKDRAHDAIEGHEGALDKLAIVEEDTHGAVDGRGVGRGLRREDAARGQHPSSDDDRRWAMMPTEA

SEQ ID NO: 62377 - protein, 191 aa, Zea mays
  Coding DNA Sequence Number=SeqID_19002
MRGVPRCRCIGFENSPSLSSTAAPRRHGEKVHYRGRWHAPHAAVHLLRTQRSTSEEYDSWARAPVSETGPPLSAEVKRRTTAGGGVLLTRRLTPKEYDSWARAPMSETGSPWRASGEVFCGASGRQLGESLFKKGTPPSAVAILITRSALSLLSSPRSCAAVATMALLDPPELLQPEVALNLVRNLLGWGA

SEQ ID NO: 62378 - protein, 756 aa, Zea mays
  Coding DNA Sequence Number=SeqID_19003
  Gene Ontology: Mol. function=transferase activity
  Homolog annotation: Hit_ID=Q6QP44; Match level="QueryCoverage=7%, HitCoverage=7%, E-value=3e-15, Identity=72%"; Hit description =Putative aminoalcoholphosphotransferase
MKNKSPTILLITVALHSRPLARREPLLRWLTGQSGLSAAAVMGQIGIDWQEMFRNSPSPDRGANVCFASPSSASVATRARTLGAAKAISDDERRWGSLSSLILGLSAAVMGQIEINWQEMFRNSPSPDRGADVCFASSSASVVARAWALSTMKALSENKRRWGSLSSLISRMSVVAAMGQIGIDWKEMFQNSPSPNRRADVCFASPSLASVAMRAQALGATKALSDNDRRWGSLSSLISGLSAMAAMGQIGIDWKEMFRNSPSPDCGADVCFASPSLASVATPARALGAAKALSDDERRRGSLSLILGLSAMATMGQIEIDWKEMFRSSPSPDHEADLCFASPSSVSAATRARTLGVAMTLSGDERRWCPLFSPIRGLSKVAAMGRIEIDWVEMFHSSPSPDHEAGVGFASPSSASAAMHARVLGVAKVLSGDKRRLSPLSSPISWLSGIGGDGAQLRYNSPDCPVCHQTVRCTSGATTICAQRSTLTDEQCSTVSRQKSEQQNGSALELELATLFFAGARWSSSCPTALLSLVLGPVSFPAKVSAVAVNLEQLVVGCFPAAMEKSPRSIPIGSGPVRADTRKDVAEAANGTRLIDGSRRTGIVDMSNIDYGTSRLRPRHRLCRTHDPAQRYNRVWDGLLDAIRQMQLSADELRKLSHRNHVPEYLDMVHKNCLVNAMSDVTEIAKGLDTMSRDLEEVLIGPQPLLEDYEALGMYDDFKSDVHCDCTEQCGSDEDNSSFDSDEINDRHLSHMNEPI

SEQ ID NO: 62379 - protein, 310 aa, Zea mays
  Coding DNA Sequence Number=SeqID_19004
  Gene Ontology: Mol. function=sugar binding
  Homolog annotation: Hit_ID=A2ZNA8; Match level="QueryCoverage=55%, HitCoverage=58%, E-value=6e-70, Identity=75%"; Hit description =Putative uncharacterized protein
MEFPHHHHHHGHRRDDDEDDRRGPPPPVYGGYGQPPPPDPYGRAPVDPDPYGRPPPQSAYGGAGDAYGHSGQGYAPPPAYGAGGGYGNVVHVAHEVGDERPYYGGGGGGLGGAYGGGGSEYGHEGRPHHGGGGSQYGHETRPHHGGGGGAPPVRQQTYRIYCKAGEDQYSLASRDGKVCLVRTDRDDDAQHWIKDMKYSTRVKDEEGYPAIVLVNKATGEALKHSLGQSHPVLLTRHNPDSLDESVLWTESRDVGDGFRCIRMVNNIYLNFDALHGDKDHGGVRDGTALVLWEWNKEMCDRARTKEELLP

SEQ ID NO: 62380 - protein, 67 aa, Zea mays
  Coding DNA Sequence Number=SeqID_19005
MVILRLAAAVPQGGATGGRAPHGSSDGAPEADERRQCTLGQMAMMVAGSPSLSKVLRMEKLPISNEN

SEQ ID NO: 62381 - protein, 53 aa, Zea mays
  Coding DNA Sequence Number=SeqID_19006
GYEIDDSGYDYDAASPLQPNRILAEYVDHCNHCSIEDEAVEGDFQEFQDYDEF

SEQ ID NO: 62382 - protein, 107 aa, Zea mays
  Coding DNA Sequence Number=SeqID_19007
MATLPTTRGGLVADGELHGDPRGAGGGVASTESDAEEGTTGDALERIEPDLEALGRGKVTTSSIYGRGGGVTGESEDPNNPPKSRSPLASIFVPMGKKTSPTEGAHM

SEQ ID NO: 62383 - protein, 71 aa, Zea mays
  Coding DNA Sequence Number=SeqID_19008
MNLPISLIKLDPNFAKCTTKTFSNCNLADGEYVLIPKQGAVHEEDQEQALEPAIEDLPAAPAFEGNPRFYA

SEQ ID NO: 62384 - protein, 341 aa, Zea mays
  Coding DNA Sequence Number=SeqID_19009
  Pfam annotation: Domain name=zf-CCHC; Domain location=31-48; Score =15.7; E_value=0.0065; Accession=PF00098.14; Description=Zinc knuckle
  Pfam annotation: Domain name=zf-CCHC; Domain location=319-336; Score =17.0; E_value=0.0041; Accession=PF00098.14; Description=Zinc knuckle
  Pfam module annotation: Pfam domain module=zf-CCHC::zf-CCHC; Domain location=31-48::319-336
MGMIRKINLMGVPLQVEDLLFNIDRKKQRKRGCFACGEKGHLRDNYPTMAELKKERSKDKVLTSVKTWDDSSSEDKPPRTRSHRSSSRSSHKCLMARGKMSIPFSSDESSSYDEGEGKPSVDELAEAVKFFQDVCTKQKAQLKTLKKKFETFANLNCELSTKIEQLETSAPSTATDDGLVKRNEKLKAKLANSQEAIENLLGKMEILSIHNNELTTKLENIGSTQGASLVEIPEIIKKDASTSYFDLIDDSNPCNEVLVENIVVETCSDDVAKENEQLRQEVALLGKALYDKKDKAKQIQSPQDNTTAGVKKPVEGETVICTLCHKEGHKSFQCKAMTGDK

SEQ ID NO: 62385 - protein, 362 aa, Zea mays
  Coding DNA Sequence Number=SeqID_19010
MTLGMSVTWPRLGLRSRGTVGHFRDQQERFCNGIPSEGGIEPSDPIERVRVRQITYRVRLTTAKFSLRRNRKLHLARPWASASGGGLRLARPQGSAPTSASEGGLRLARPQGSASTSTSGGIASSPDPGLGLGRRTLPRPTPGLGLNLDLGRWSPPRPTPGLGLNLGLERNRVLARPRPRPQEKSLPRPTLGSDRPRHGGYIITLPLASSGYGRTRPASHLGSPRRSRAFMREGRAGERAHSLSLANACNPYYERIPLAQDNTSRVFPLVFHLAPTHLGWDTQRQFYSSFQGPPAVETPTSAIIHRTVWCTSGAMATRSNGRLQKCADSATVRGRVRAQSQWRTGQCPMWHRTVRYHKRQAL

SEQ ID NO: 62386 - protein, 260 aa, Zea mays
  Coding DNA Sequence Number=SeqID_19011
  Subcellular localization annotation: CTP_CleavageSite=78; ConfidenceScore=5.09e-01
MATARGIDPFLKAALPTRILRHHGQSLHRRAPGSSPYDTGAGSHASCKLTQNGRSQTAARGACNRPAVTSTPPSSPKPAVERADRHAGGVQPHRGGRTPSTLSHPAWRPRPTRHVTDAPVTTCKQPHRHLCQCRASSTVEPVLRPEATPRMAQQCQSSTTITGQSAAGGGVTVDIAKSGPAIMATADERKRRSNRLQAHVPSWSSRGALSHGTGKGDISKGILLREGSGPRALLLIRGSKAGPSGGFDSRPRALGLQAHY

SEQ ID NO: 62387 - protein, 149 aa, Zea mays
  Coding DNA Sequence Number=SeqID_19012
  Subcellular localization annotation: CTP_CleavageSite=48; ConfidenceScore=5.05e-01
MSPAGVPASSTRSTADEVPPPAWPRLPRLHHGGKTSSSSLPPGEQSAVAVALRGKEYHVVAAIEGHELEAPKEEQRPGLKRLLEATHLELNRKLFVNTQQAPTWRANCRRFDPRGSLDRRVKLSLRVPAQMGWREMEHKGENAARVILR

SEQ ID NO: 62388 - protein, 664 aa, Zea mays
  Coding DNA Sequence Number=SeqID_19013
  Gene Ontology: Mol. function=DNA binding; Cellular component=nucleus
  Homolog annotation: Hit_ID=A3B7E6; Match level="QueryCoverage=85%, HitCoverage=32%, E-value=1e-134, Identity=49%"; Hit description =Putative uncharacterized protein
MASRAPHDRIEDSREKHIGHPTSRQVIVLLLMFSPLRSGGGKPIIKYRRIERKGLIAGLVYLGNRQELKPIMQPHSSHVITLSQACPNNISGCTLTPLDLCDVTNEITLPNHQGSVGPSTPSNLNSRLPGSPAMVLGNNSPFPSTLSSPRDAQKYGVPRPISLQGDEQPKIQYNQMVNDRNLHEPGVSAPGTTPSGVDCGPGALMMPSAPAMGTVAGLNRGMPGAKPGFPRISSPVMLNAVPSGNLFPNSGQGVLNTVNVHPGAISGPGNSILRPHDPMQTFRPGQGMEEHRQMSEFDMPVSQGSGQATIQFSSMNSSFSSPPVQQPQRPHQMSQSLHMFGNPHHSQIQGTSSSSQQQAYAVHLAKERQMQQHMAPQQHSDLSGASAVPNVQSNTQTLQQGQTSSANSAPCSKSQHQRQQAAQNLPDSSSSPNQPATFTQQKQKKQQEQQQSRQNEPQRNRGSQQAKLMKSLGRGNMMAQTPPIDCTPTNAASTPSKNHVSEKLVQHGQGHFPANTTPVPSMPQPRLVTSLPQSPTKVADIGNQGLKKGGSLSQAMLALQQPPHGSKSTLTTQLQQRQVNPPQNNNGRAVVQQNRQMNSDCRTDLHVGQVRHNQMVPTSMPQSADSCSPVLSSVNQQKREPSLNQTSVTSPSNLLRSPKDTSFG

SEQ ID NO: 62389 - protein, 263 aa, Zea mays
  Coding DNA Sequence Number=SeqID_19014
  Gene Ontology: Mol. function=DNA binding; Cellular component=nucleus
  Homolog annotation: Hit_ID=Q6ZBS5; Match level="QueryCoverage=65%, HitCoverage=9%, E-value=1e-25, Identity=39%"; Hit description =Putative uncharacterized protein P0583B06.21
MMTSGGWSNFEDQALVVLVHDMGQNWELVSDAINNIVQFKCVHRQPKECKERHKVLLDRSSGDGADSAEDSGSSQHYHNTLPGIPKACSSAILFCGYSLLPAMYVGCNSNRYNIEPLIFSSCHAFLKIESAFINTIIMSEIYLEGSARQLFERLQGPFDEENLKAHFEKIILLMQQVHARRRQQRQMLILDRNSKNTKYRRPLVKILANYKGPGYHIDLDMLHALVLERVDGEMDVADVIAVDKRAPGEEGYGVPGEARLRHA

SEQ ID NO: 62390 - protein, 28 aa, Zea mays
  Coding DNA Sequence Number=SeqID_19015
MAGEKWLVTKLGATLSQMMKLKNDKLKP

SEQ ID NO: 62391 - protein, 1211 aa, Zea mays
  Coding DNA Sequence Number=SeqID_19016
  Gene Ontology: Mol. function=nucleotide binding; Cellular component =cytosol; Biological process=translation
  Homolog annotation: Hit_ID=A7QN07; Match level="QueryCoverage=48%, HitCoverage=74%, E-value=0.0, Identity=72%"; Hit description =Chromosome undetermined scaffold_129, whole genome shotgun sequence
  Pfam annotation: Domain name=GTP_EFTU; Domain location=701-914; Score= 151.2; E_value=2.9e-42; Accession=PF00009.18; Description=Elongation factor Tu GTP binding domain
  Pfam annotation: Domain name=GTP_EFTU_D2; Domain location=940-1018; Score=26.8; E_value=7.9e-05; Accession=PF03144.16; Description =Elongation factor Tu domain 2
  Pfam annotation: Domain name=MAP7; Domain location=397-557; Score= -84.2; E_value=0.098; Accession=PF05672.2; Description=MAP7 (E-MAP -115) family
  Pfam annotation: Domain name=MMR_HSR1; Domain location=704-829; Score= 12.7; E_value=7.3e-05; Accession=PF01926.14; Description=GTPase of unknown function
  Pfam module annotation: Pfam domain module=GTP_EFTU::GTP_EFTU _D2::MAP7::MMR_HSR1; Domain location=701-914::940-1018::397-557::704 -829
MGRKKNVAIDDDEYFFPQDDAADPAPPPPAPAAADKEKSKKGGKKGKKGGKAAAPDDDDYEPPPPPPPAADEDDDGEPINLVFTGKKKKKKGATPAAPFSAFSALGEEGEDQDEEDPAPSAAAEPEAINDPAEDDDDVVDFDFSKAKKKKKKDKGPRSAPAKDEDVEPAPPPPPVAEEEDEEPPVIAAAAAKKPQKKKKKKGAFMMDGENVDQILAGMEDPQLMDEPEPEEVKAQDSVAAPDADDATGKKSKKKKKKGGFTMDVDGEEFDQILAVIDDLPPPEEEPEPKDPKDEGTAATAALVDDAEGKKSKKKKKKSGRTAKEEEELDKILAELDGVPPVEEDKPTQAPQSAALAKEDVGAAEDGNVEDKAEEGGEVESAAAKKKKKKKEKEKEKKAAAKGAESKKGEEQEAPKGKVDMKKLPKHVREMQEALARRKEAEERQKREEEERLRKEEEERLRREEEERKAEEAKRRRKEREKEKLLKKKQEGKLLTGKQKEEAKRLEAMRRQFLEQSELQKAEDAAPETKKRPIYDSKKKKAQSKATETAKVVEEQQEELNEVNNDEEEYVLVDQESQSQVEESDEKTEPDQETEEPKPEEDEEDEDEWDAKSWDDIDVNLPKISAFDEEEAKPIVKKAEPVQKQENNKAQPAIPAAKKLVPSVADSKKSETDDVGASNGNVKRHKKKGPVKEDNSKSGSDLRSPICCILGHVDTGKTKLLDCIRRTNVQEGEAGGITQQIGATYFPTENIRERTRELKADATLKVPGLLVIDTPGHESFSNLRSRGSSLCDIAILVVDIMHGLEPQTIESLNLLKSRDAVFIVALNKVDRLYGWKKCPNAPIVKALKQQNEDVKREFNMRLTDIVTQFKMQGVNTALYYKNKEMEDTFNIVPTSAVSGEGIPDLLLLLVQWTQKTMEEKLTFVDEVQCTVLEVKVVEGHGTTIDVVLVNGILHEGDQIVVCGMQGPIVTTVRALLTPHPMRELRVKGTYIHHKEIRAAQGVKISAQGLEHAIAGTALYVLGPDDDLDKLNEAVMEEMTRVRSRIDRSGEGVYVQASTLGSLEALTEFLKSPAVNIPFCDFSIGPVHKKDVMKASVMLERKKEYATILAFDVKVMPDARDLAEESGVRIFVADIIYHLFDQFTAYIKNLKEEKKKESAEEAVFPCVLKIMPNCVFNKKDPIVLGVDVLEGIAKDLSGPKGAAARSSSKDRIS

SEQ ID NO: 62392 - protein, 29 aa, Zea mays
  Coding DNA Sequence Number=SeqID_19017
  Pfam annotation: Domain name=DnaJ; Domain location=1-29; Score=-10.5; E_value=0.044; Accession=PF00226.22; Description=DnaJ domain
MKWHPDKNPNIKEVENKFKQISEAYELYY

SEQ ID NO: 62393 - protein, 135 aa, Zea mays
  Coding DNA Sequence Number=SeqID_19018
MTAATRTEKARPQSSVRVNPVDRDEVDDHPAARERQPWGEVWRATTMDRQAARRLVMLCAHAQREAEQGRASGEDDRHGGQVACCYCCRQRERHGTDWRRPNSSATVMPWPSTGSLAGSWNQSCECSRDFVAKTA

SEQ ID NO: 62394 - protein, 57 aa, Zea mays
  Coding DNA Sequence Number=SeqID_19019
MAAPLTAINASAFPLPAYAHLQMERHEPDASLCPALPAVAQQPPHLLPPLALLKLRK

SEQ ID NO: 62395 - protein, 154 aa, Zea mays
  Coding DNA Sequence Number=SeqID_19020
MALSSLTEAGGRQQRLDRSNSCPSAKLRCSSDSHDITPTGCQDLSGCHIGIGYVHKESKNGAEIYPVYVYRRSGEVRRPWTGFSGEAKSDSLLRELHRGVHSLFRGLGAAGKGSVGRSTVAGARVAAGMPCTGQTPVVSGSGEVERARRSTVYA

SEQ ID NO: 62396 - protein, 177 aa, Zea mays
  Coding DNA Sequence Number=SeqID_19021
MARHFVERAKREARRRPLAAITQKFVVGSSSNITNVGKTARTAGFSPRIYGVANGAVHTRLEPDDECDEANLAAVLLHPRKRQGQPKWCLDLRHEWDLMGAHPWGRGSPTPYCRRGEEAVGNPGTMGFHPCCWRCRAPWEKAPCLLRGEGKKWLAAVGSVGVGMKNAPNARERHLYL

SEQ ID NO: 62397 - protein, 89 aa, Zea mays
  Coding DNA Sequence Number=SeqID_19022
MLVDYTTILNRPCVSVEGPTQQGVESVVEVTATSGVTSDGSSDPSLRLWLLRELRAMARNATGVVVVSVSVKVSSSSQDALRWCRGISG

SEQ ID NO: 62398 - protein, 415 aa, Zea mays
  Coding DNA Sequence Number=SeqID_19023
  Gene Ontology: Mol. function=hydrolase activity, hydrolyzing O -glycosyl compounds; Cellular component=anchored to membrane; Biological process=carbohydrate metabolic process
  Homolog annotation: Hit_ID=A2X5N9; Match level="QueryCoverage=86%, HitCoverage=93%, E-value=1e-152, Identity=73%"; Hit description =Putative uncharacterized protein
  Pfam annotation: Domain name=Glyco_hydro_17; Domain location=89-399; Score=349.4; E_value=6.3e-102; Accession=PF00332.9; Description =Glycosyl hydrolases family 17
  Subcellular localization annotation: CTP_CleavageSite=59; ConfidenceScore=5.34e-01
MEGGRCHSAGSAKSVVVLYEPMTPGPGPGPGPPSFGWSGSSASSQSRESRLPVPDTPSSCKLAAACCFVLIVPILLTDEHVAVAESLSIGVNYGQIANNLPSPAQVSWLLRSMRVSKVKLYDADPNVLRAFLGTGVEFVVGIGNEYVPAMVSPAAAQAWLQQHVVPYLRSGARITCVTVGNEVFKGNDTALQAAVLPAMQSVHRALGALGLQGRINVTTAHSLDVMGVSFPPSAGAFAPAALAHLQPFLSFLSATRSPFLINCYPYFAYKDDPARVPLDYVLFRPNAGVADARTGLRYDNMLYAQGLGYTDVEVKVSETGWPSRGDADEPGATPEYAGTYIRNLLQRIEMKQGTPLRPATPVDVYVFALFNENLKPGPASERNYGLFYPDGTPVYNVGLHGYLPPMLVSSTAARQ

SEQ ID NO: 62399 - protein, 181 aa, Zea mays
  Coding DNA Sequence Number=SeqID_19024
  Subcellular localization annotation: CTP_CleavageSite=69; ConfidenceScore=5.09e-01
MVKNFGSKTVQIAMNAVVISQLLVSLYSAAGPKERLLNFFAFYFSGIRVDFSRFALYFSGISVYFSLLAAGEYAGSLLAVGLGSMRVLLVVEVEAVAKMPMVGLPKQQKLQDGYPHTLQFLQGLRGFPGEVSGRRSWLKPLDHGLNDNFIGHYWCLCPQTQEPSDIRLKVFFVILRCHTRL

SEQ ID NO: 62400 - protein, 79 aa, Zea mays
  Coding DNA Sequence Number=SeqID_19025
MAGSKDHTKISTTNIIKPAMEVLLANDQQPFEDLIMRKEKEVMRQWNEQHDKEESLKPTALKSQLEPQGLVGIDIPGSS

SEQ ID NO: 62401 - protein, 67 aa, Zea mays
  Coding DNA Sequence Number=SeqID_19026
MKEKQRRQPKKLRNSKAELSPPPKPFESMADPEAEKEDEITKVAEAIMDKAVSRLLNEAAETVLKEE

SEQ ID NO: 62402 - protein, 122 aa, Zea mays
  Coding DNA Sequence Number=SeqID_19027
MVHLVARSTCGGGRPKSGDGDLAVPVRQGLDPCFEKLHGSTGILSRGSGEARGLWKWLAVMAGAQVARACGAELAGVLHARGWSLRARVSSAEGGSNTRSGCARGTPVHALAPRHGVEHEAA

SEQ ID NO: 62403 - protein, 156 aa, Zea mays
  Coding DNA Sequence Number=SeqID_19028
  Subcellular localization annotation: CTP_CleavageSite=36; ConfidenceScore=5.05e-01
MKRNLRSSHADSFSRSYFFLPDLRRRSIVPTPPVSVARSRWRRGHDQGHDEVVEYLGKARAHSRRHHGLNHRHDTGAGALEGADHSGAAQQRCELALTSNRAKDRAVNGEIRAWGLLTSSGYSGALEQQWGRWESSGRQRSFGCKVRKPVSVDQAS

SEQ ID NO: 62404 - protein, 140 aa, Zea mays
  Coding DNA Sequence Number=SeqID_19029
  Subcellular localization annotation: CTP_CleavageSite=53; ConfidenceScore=5.58e-01
MGIVSEPSASPPSRSTLAASSWSFVRFQESSFGYGKKAKRQDFYTRRTTACTRCAVDRRDQTVTLQGGTAMRWETESFLDNELREGVFWTFGFLKLRRLFSRIKLVTKNDLAPRKGLLLGLCFVAEGLVGRSSFRLKLFV

SEQ ID NO: 62405 - protein, 108 aa, Zea mays
  Coding DNA Sequence Number=SeqID_19030
MAHLANLAQTTKLTLDSREDFVVDLSSKLMAARQRRGQNEQVPPPPPPAPMVQELIAQRNEILRQLFAARAPPSAARWRPAAVTPYRDNLSGVPEHVAALVHQGRGSA

SEQ ID NO: 62406 - protein, 88 aa, Zea mays
  Coding DNA Sequence Number=SeqID_19031
MGSSLFSVGKSPSGCIPTPGDAAPYTKGCRVTGGVEHLPQDGRETLVRKEIGTEMSVSSIGGVGEVICESGSDVKVTMKEWLVDNVEC

SEQ ID NO: 62407 - protein, 125 aa, Zea mays
  Coding DNA Sequence Number=SeqID_19032
MGSRSPNEAETVPEDLVGLDVEMTKFAEDLAKTMGEATTLMFLVAGNARVAIVTREVICIEDLRGSVKTRAMKATGAKGGTTETTKAEAAGVEVQQPSPETAPTKGMVTEQALLEDERARCLPQG

SEQ ID NO: 62408 - protein, 144 aa, Zea mays
  Coding DNA Sequence Number=SeqID_19033
  Homolog annotation: Hit_ID=Q10QF0; Match level="QueryCoverage=31%, HitCoverage=14%, E-value=1e-09, Identity=71%"; Hit description =Expressed protein
  Subcellular localization annotation: CTP_CleavageSite=45; ConfidenceScore=5.26e-01
MSSPPLITTVSFIVVLESSSSPSSMSSGHGPHVLVYFSILFIRFRAGIVTREILALSKPQFMLIGLLEVLGAAGIMGKSSKKSSVKAAPAAVSVPEGKSAKKGKRNAEDEIEKAVSAKKQKTVPEKVVPVKKQPPPKKVECSSS

SEQ ID NO: 62409 - protein, 450 aa, Zea mays
  Coding DNA Sequence Number=SeqID_19034
  Gene Ontology: Mol. function=ubiquitin binding; Cellular component =cytoplasm; Biological process=protein transport
  Homolog annotation: Hit_ID=A2ZYX2; Match level="QueryCoverage=84%, HitCoverage=79%, E-value=1e-153, Identity=74%"; Hit description =Putative uncharacterized protein
  Pfam annotation: Domain name=EAP30; Domain location=233-450; Score =211.1; E_value=2.6e-60; Accession=PF04157.7; Description=EAP30
MDVGWKRAGWSDRVVQRMDGAGLVEWYRDDWASTPLRYRAQENPNKPQNPSTAAMSAAAADWLPSASVTASGRPVLSAGEVERNLVPLVDLEPEENPHLAPLRACLLALTSHRLIFLHEPSRSARGLPLATVVHAYPPHRRHNHNPLRSLFSSSSSSSSQHHRIRLQISMPSVRSEVIAIVVTCKADVDVFFGRLLEAIRARAWEVAPAAAPSSSTPVADVPAENVGIRMPVVGVSGILRMEQESWESAGQNLQDAFQDLNALMGKAKEMMQLAEKMRLKLLMNSSTESNSNDEEMGSKQDMQDLLLSVGIVSPVTKETAGALYHQQLSLQLADFVRIPLEKAGGMMALVDVYCLFNRARGTELISPEDLLQACSLWEKVDVQVMLRKFDSGVKVIQTKTHSDEEVFARISSLAQKQDALQKGISPSDAAFTLGIAPALAKEHLLNAENK

SEQ ID NO: 62410 - protein, 161 aa, Zea mays
  Coding DNA Sequence Number=SeqID_19035
MDAPVAEELVWWGLPIIHGSDCVCVRVRLMRGAHMEGNARGGLNADNRDPHASAHFRLDGADAGQGGPREVPLPGVTSDGALGFTPLNFQSTFELSFTNKSKLCSYFLLKTLVLKLTLQGSDNLRMKAWDRISPSNEGRISQSQKKIDDTIEEMLNIEPEH

SEQ ID NO: 62411 - protein, 100 aa, Zea mays
  Coding DNA Sequence Number=SeqID_19036
MGGYQETLCKGYVVKPCRLTLVVFEGCLCCNLCSGKEEEGIKADLQEFQDFDEFEDYASDLPQPTACVCDSTSHTILLGLARRGGYVMPEGTCPGQTSRY

SEQ ID NO: 62412 - protein, 84 aa, Zea mays
  Coding DNA Sequence Number=SeqID_19037
MADMRAHESCEIWRGRGTAVADARPGELLPPASGGLARLLLAQIRPWSAPLASPSSKAPSCSRARGLALGARPWAAVSGIRPEG

SEQ ID NO: 62413 - protein, 204 aa, Zea mays
  Coding DNA Sequence Number=SeqID_19038
MASVVGAEVVAAEEVLVADGITATIRALGLRLFGFDNLSSPLEWRSGRGHCCSGIRLEAIAAAVWPPGAEVVVIAAGVGGGEPPGALSPRGPSNVGGCSYPRRRNRSSVCNGTLSAGVCSLWLLGPEHDSAIDIVEKARKIVSAEEFSSVKTCSVRRIAYPSMSYLSQKVMSEVSVSRRRRSPSARSALAAYVYSVVFRIPLSK

SEQ ID NO: 62414 - protein, 290 aa, Zea mays
  Coding DNA Sequence Number=SeqID_19039
  Subcellular localization annotation: CTP_CleavageSite=60; ConfidenceScore=5.38e-01
MVAFQGGHPPFKGNSPHLRPQPLRAESSPTRSKVLPLQHGGRVPRIVQAGPGQKEPKLPRAVRATAQRLRALLHFRPDQRVKGWTAIQAACNRTKGARPFDFDASRMEAQTTTSCNRRAGYYVRETAPPLAPVPRLLDCGTGTTTRGDPARDTTVPTEHIGHGSVSRGRRRDGRYDQKWAGSNGGGRQAEAADRRHLWQAKQATLRFHHNDRVKKGTGKGDTLKGILLCEGNGPRAPLLIRGSKAGPSEGFNSRLRALGLRTHYWSEVRRLAPQKGSNGRLRPLGLRAHY

SEQ ID NO: 62415 - protein, 784 aa, Zea mays
  Coding DNA Sequence Number=SeqID_19040
  Gene Ontology: Mol. function=binding; Cellular component=nucleus; Biological process=activation of protein kinase C
  Homolog annotation: Hit_ID=Q8RZK3; Match level="QueryCoverage=61%, HitCoverage=79%, E-value=0.0, Identity=75%"; Hit description =Selenium-binding protein-like
  Pfam annotation: Domain name=PPR; Domain location=477-511; Score =50.8; E_value=4.9e-12; Accession=PF01535.11; Description=PPR repeat
  Pfam annotation: Domain name=PPR; Domain location=512-546; Score =15.4; E_value=0.12; Accession=PF01535.11; Description=PPR repeat
  Pfam annotation: Domain name=PPR; Domain location=578-612; Score =37.5; E_value=5e-08; Accession=PF01535.11; Description=PPR repeat
  Pfam annotation: Domain name=PPR; Domain location=613-647; Score =22.1; E_value=0.0021; Accession=PF01535.11; Description=PPR repeat
  Pfam annotation: Domain name=PPR; Domain location=648-682; Score=9.8; E_value=0.53; Accession=PF01535.11; Description=PPR repeat
  Pfam annotation: Domain name=PPR; Domain location=714-748; Score=3.1; E_value=3.3; Accession=PF01535.11; Description=PPR repeat
  Pfam module annotation: Pfam domain module=PPR::PPR::PPR::PPR::PPR::PP R; Domain location=477-511::512-546::578-612::613-647::648-682::714 -748
MQKLSEMKSDNENKDKDAQLRRQVVELKEVIAKQQELGFDPPELPPGYLSEIGDQCIENKNNRKTQFRDSHFGNRFNNNKRSRYERGGFQSKRSKVWNCTPHADHGMVKSREPTLLQKLLSSDIKRDRHRLLHVFRFMTLNNFFKDWPDRPLQFPSVKMNQIEIGSNISTDDLENAGMSKDSILGVNENGDWKELSSIDEEDTDSANHNDEDVDDDSVDSSIEDGAEEDGHAWSMDSGLLELECFNAVLNMSDCLRLQSLHTNRNHAAATSRAAEPRRERTPRMQLLKPKEAATLPREALEAHIVSLVRRCPGLLALRSAHAHLTRLRLPRLTAAFALSKLLASCVSAPAPAAAQAAASSYARNLFDQIPDPTAFCYNSLIRALPAAGSAPALAVYRRMLRAGSPRPNSFTLAFALKACAAVPAPGEGRQLHAQALRQGLATSAYVQTGLLNLYAKCEQVALARTVFDGMAGDKNLVAWSAMVSGYSRVGMVNEALGLFREMQAVGVEPDEVTMVSVISACAKAGALDLGKWVHAYIDRKGITVDLELSTALIDMYAKCGLIERARGVFDAMVEKDTKAWSAMIVGFAIHGLVEDALGLFSRMLELKVRPNNVTFIGVLSACAHSGLVEDGRRYWSIMQNLGIKPSMENYGCMVDLLCRSGLLDDAYSFVIGMPVSPNSVIWRTLLVACKSSNRIDIAESATKRLLELEPHNPENYVLLSNLYASNSQWDRVSYLRRKMKGKNVTAIAGRSSIEINGHLHEFVPFCMTSVKRKRKLRFVNTVKG

SEQ ID NO: 62416 - protein, 161 aa, Zea mays
  Coding DNA Sequence Number=SeqID_19041
MTLGTSVTWPRLGLRSRGTLGHFRDQRERFVMESHRREAPSPQTLSNGSGSSKSPAGKQRYSPRSDYCANHQGKTGNIKSQPPLSSASSATRSSASPDPRPRPQEKVSASPDPRPQPQPRPREESHPRPTSALASGEVSASADLGLGPTTLQGIHHYPTAS

SEQ ID NO: 62417 - protein, 89 aa, Zea mays
  Coding DNA Sequence Number=SeqID_19042
MTSMALSSLRKQGNVSRIHAALPTMLLQGSRHFSDGHLLLACFEEKSKSVAAAVKRRKQRQSTKDTGSGESKDLGKKGKHRNLTTNPKP

SEQ ID NO: 62418 - protein, 226 aa, Zea mays
  Coding DNA Sequence Number=SeqID_19043
  Gene Ontology: Mol. function=metal ion binding; Biological process =defense response to fungus
  Homolog annotation: Hit_ID=A2WQL0; Match level="QueryCoverage=72%, HitCoverage=12%, E-value=2e-53, Identity=61%"; Hit description =Putative uncharacterized protein
MVMSESDDDDDEPQLNAVESYYFVDSTNDNEPVCFSTLPFLFGDTDDLPDCKKRLVLRGTGGDPGVKVYSEVVAWSLGLEGKQPQFAVLTAEGRRWVRLVRPLNSYEEMIRTVLITAHMLHFLMRKPHEPERTLWNHLCKVFNKFDVRPSEDDFRNHISLMKQFVAKDPILAKSEGSLPHEWGLTKGKTKAQFLLSYVMPRAVLCKVVNIVLKTLQLSHNFCCLKR

SEQ ID NO: 62419 - protein, 532 aa, Zea mays
  Coding DNA Sequence Number=SeqID_19044
  Gene Ontology: Mol. function=metal ion binding; Biological process =defense response to fungus
  Homolog annotation: Hit_ID=A2YU45; Match level="QueryCoverage=74%, HitCoverage=31%, E-value=1e-103, Identity=47%"; Hit description =Putative uncharacterized protein
MLRGALGCYVADPCPLHRATLVPKYAIDDLLEVLEDWPEGAQPQEAGLLEQYRSYSVFLESLMKGKPSELVRVFLCNNATCGHFYHPKCVAQQLHPNNIDEASELEKKITDGFSFTCPIHWCFHCKGLEDRTQGPLQFAVCRRCPKSYHRKCLPREISFDEIEEKGVIIRAWELSKMILIYCLNHEIDSELETPVRDHIKFPRIEKPLQFVKKGANLLPKKKKRTYSESILEQPPKDTVKMKSKVRMQESEQNKHDTREVSVKSFTQNVVDTPVKKKGKLKENKQLPYVAKDHFVSSPKSVKEQEQELVPLPLSGIRKSSFPKVDSEIEKRVISILGNEISSLTIKDVTRNCSLPSTHVYSGRPTDKMPLGKIERSVQAVEAALKKLKNGGSVNDAKAVCEPDVLRQLARWHLFQLGCLIDGRSLLVPAPIGVPIVDRLHWYVESGDMKQPLCQINGRAHSIKNSPITREPQAPSSKDNDTIETPPLAPMDSFRDPLPPCNKGLFSSNRSEVTKPDGRQNEMPKIPRKTAVA

SEQ ID NO: 62420 - protein, 102 aa, Zea mays
  Coding DNA Sequence Number=SeqID_19045
  Homolog annotation: Hit_ID=A2ZTN8; Match level="QueryCoverage=36%, HitCoverage=2%, E-value=5e-15, Identity=97%"; Hit description =Putative uncharacterized protein
MESLMPGVRWVSWVLFQRETNSCIWAAVIVDFCCGSNDFSRLMKEKLDKVQKKCHFKNYDLIQPQASLPSACTHLSGVVIHAWQPLKQTTPYCFMAREFLHF

SEQ ID NO: 62421 - protein, 84 aa, Zea mays
  Coding DNA Sequence Number=SeqID_19046
MAELQILLEMWQLLLVRLVFQLISEPPLGTGVPDAVVAAGGAVDGAIGADFAEPAARHIISLGDLRVSLDNNKVEINLLQPGKV

SEQ ID NO: 62422 - protein, 170 aa, Zea mays
  Coding DNA Sequence Number=SeqID_19047
  Homolog annotation: Hit_ID=Q6JAD6; Match level="QueryCoverage=85%, HitCoverage=19%, E-value=5e-20, Identity=45%"; Hit description =Putative uncharacterized protein
MLSMFQTIQDRQDSLQQQLLQDRAESRAFMTLMLQHSGVSIPPVRSAPPPPIQAHVVPVIQPGPPLPTVGPSSSLLRPVTLAFTSPVLSFVCPQPPVPPASAVTTTIVAVSVTTSDPAVSAAQPQSESVPAPASTVDPGSETDSDPQLAFALLPRPRPDAPPPPPPTSDV

SEQ ID NO: 62423 - protein, 203 aa, Zea mays
  Coding DNA Sequence Number=SeqID_19048
MKGQVALCPFAFRVIVVFILPWDSGRFQGDLPLLEVESGASASFISSRRSSHYRSPLAPFLWSLPRMDLTTGSVDGSWVAGMSHYVGLEPRVTAVDQEVMSPFVGLLWSGSLSALPLPQVSQPWGELEKLSYRLCKLLDYVWAHIASLMERLDIASCCIWDIVDFGVHRGAAVALLMGEICSGAVSGTLMALPHPFQTKGWKT

SEQ ID NO: 62424 - protein, 278 aa, Zea mays
  Coding DNA Sequence Number=SeqID_19049
  Subcellular localization annotation: CTP_CleavageSite=74; ConfidenceScore=5.02e-01
MSCMWISPFPRRAPIKTTSKLDGRERSVANARFAAPNLCIAWMPSVESLYVCTIYSPSLRSATPNISLEDRSTSCGRSMESPPPQPRSVLCGDAIIADHREPAPRRLMERISGSRRRSSRGATAVDARSLRKTMRTSNLTPVIWIWSSQKGLMMTSSRLSPSPPRGLSLETIRIYELVGAAAVAAWNPSLAGLVESGVLEGAGEDDGNDLLEMQASNPEAYSDNVIRALCVVLNRGEKIELHVDKTENLCCQDDMSGWDILAYFIQTALLLQARDQVS

SEQ ID NO: 62425 - protein, 23 aa, Zea mays
  Coding DNA Sequence Number=SeqID_19050
MASSHCPAHHPPEAQPPTITNGL

SEQ ID NO: 62426 - protein, 256 aa, Zea mays
  Coding DNA Sequence Number=SeqID_19051
  Gene Ontology: Mol. function=DNA binding; Cellular component=nucleus; Biological process=DNA recombination
  Homolog annotation: Hit_ID=Q6H432; Match level="QueryCoverage=53%, HitCoverage=66%, E-value=3e-40, Identity=62%"; Hit description =Putative MND1 domain containing protein
  Pfam annotation: Domain name=Mnd1; Domain location=36-193; Score =177.7; E_value=2.9e-50; Accession=PF03962.6; Description=Mnd1 family
MDGTGDLFKDAAFRSKCSCRLSKKRGLSLEEKREQMLQIFYESQEFFLLKELEKMGPKKGVISQSVKDVVQSLVDDDLVLKDKIGTSVYFWSLPSCAGNQLRNTYNKLESDLSNSRKRYMDLVEHRDNLKRGREDSEEREAALEELKTVELHHKKLKRMLLILLIQQLTGGQTTFSLCNNGVQPHSQKQKNNWNICTGSMLPDFQLIKLGSQKILSICSDVQQPITASKMCHGMLDRSQMQVYHVGAEHSLFTVNH

SEQ ID NO: 62427 - protein, 95 aa, Zea mays
  Coding DNA Sequence Number=SeqID_19052
  Subcellular localization annotation: CTP_CleavageSite=45; ConfidenceScore=5.11e-01
MGITSAREYQMLWRHFAYQPYLSLFPPQPSSPRLPPPHPLLLRPPASTRVCTSPPSVASSCNQLSRIQDVRHHIGGEVCQIKIAKAAAYIYGLER

SEQ ID NO: 62428 - protein, 222 aa, Zea mays
  Coding DNA Sequence Number=SeqID_19053
  Subcellular localization annotation: CTP_CleavageSite=70; ConfidenceScore=5.35e-01
MKTQKISKLLSKRFTTPVWIKAIFAACVGAASPTARASTPPHSGSTRGTHARWPSTLHPRRLWLPQGPPRAAPPNRAWRCVHQDPRQEGTPNHQCSWGRGRVCFGNRTRRSRAERATRVGSTEERAAASLERDWGLAAAAVVARRTRRAEAAARAVEMYSLLEKAKEEFGSHFDDCFHSSKELEAPSRNANQMVYVELVIMYVVASISSATWFAINPPHSGV

SEQ ID NO: 62429 - protein, 65 aa, Zea mays
  Coding DNA Sequence Number=SeqID_19054
MAHRTVRCATGAPTVIPVRHRCANGALGFLRGEVSSSGQPGPTWQRVHRTVRCTPDSLVPQGQKP

SEQ ID NO: 62430 - protein, 310 aa, Zea mays
  Coding DNA Sequence Number=SeqID_19055
  Gene Ontology: Mol. function=aspartic-type endopeptidase activity; Biological process=DNA integration
  Homolog annotation: Hit_ID=Q8S474; Match level="QueryCoverage=24%, HitCoverage=9%, E-value=5e-09, Identity=48%"; Hit description =Putative pol protein
MTTAALSPLTEARGRQQGPNRSDSCPSARLRRFSDGHDITPAGCQNLSDCHIGMALLERVGRAGTRTRQALSWGHSLPSPAWTLVTPYCKRTRPGRGTNTKAAGFPPLSRRTPAASLLPPFALALALDPSGLGHAATLTRQPEGPPGAKGSYLANKKTKNWVQQKSKGITKGSPGLAHRTVRQSQRCLGAPDCSVCQAGSGELGALGNKLTAYGYNSPDCPVSQRSAGPTVGCAICARHVAEPTVGKGHRTVRCAPDSVRCANGSKAPTVGFAAEGKKSAPDSVRWCTGLSGAPSDRRQELPSRIALNGS

SEQ ID NO: 62431 - protein, 77 aa, Zea mays
  Coding DNA Sequence Number=SeqID_19056
MEFSIKIFIYKLLIKIKQGYFRIQNYEYGARPGRSLNQTKVECSRSCAQGSFGAMAEGGTDLKMKRLRGPRQIFISR

SEQ ID NO: 62432 - protein, 87 aa, Zea mays
  Coding DNA Sequence Number=SeqID_19057
  Subcellular localization annotation: CTP_CleavageSite=66; ConfidenceScore=5.04e-01
MGDDDGNPQGIGGGSGDPKGSGGGGGYDPQGMGCSGATPEACAAAASSRRMWWPREARVAPAVTVVAQGAARSTRVGGLHGGLGGLR

SEQ ID NO: 62433 - protein, 140 aa, Zea mays
  Coding DNA Sequence Number=SeqID_19058
MSGGAPDTVRWHTGQSGTRCKPNSLSVLHRELALQGSDCALEEGSTGHREHDIVEVEEVHGAVATLKDEHGRVLLGLDEAEVDQVGGEATVPSPRRLFEAIQKTAKLTHHTQTSGVNEAGGLAVVRGGNGLRSKCFFTKW

SEQ ID NO: 62434 - protein, 282 aa, Zea mays
  Coding DNA Sequence Number=SeqID_19059
  Gene Ontology: Mol. function=protein binding
  Homolog annotation: Hit_ID=Q6Z3F7; Match level="QueryCoverage=83%, HitCoverage=89%, E-value=2e-83, Identity=55%"; Hit description =Transducin / WD-40 repeat protein-like
  Pfam annotation: Domain name=WD40; Domain location=150-188; Score =10.9; E_value=1.4; Accession=PF00400.23; Description=WD domain, G -beta repeat
  Pfam annotation: Domain name=WD40; Domain location=193-232; Score =27.3; E_value=5.5e-05; Accession=PF00400.23; Description=WD domain, G-beta repeat
  Pfam module annotation: Pfam domain module=WD40::WD40; Domain location=150-188::193-232
  Subcellular localization annotation: CTP_CleavageSite=28; ConfidenceScore=5.55e-01
MRSSRCPSRHVHRTTADPSSIPSSMSPSASLFSATTLSAPKHARCIADIRADAGSTTFLAGTLSLKEENEVHLIRFSPAESELVCDGLFYHPNEIWDLKSCPFDHRVFSTVYTSGEGYGASVWKIPELNGQSNSPQLEQLFELSGHTGKIRRKSTAIEHAHIRDVDYNPKKQNIVATAEEEFGIRLWDLRMLKYPLKDLPGHSHWTWAVRHNPAYDELLLSAGTDSTVNLWLAKVSSDDPESDSPSALSNRQEVPLLNSYTDYEDSIYGILQPSYFAYQLEL

SEQ ID NO: 62435 - protein, 124 aa, Zea mays
  Coding DNA Sequence Number=SeqID_19060
  Homolog annotation: Hit_ID=Q6Z3G4; Match level="QueryCoverage=71%, HitCoverage=38%, E-value=3e-32, Identity=79%"; Hit description =Putative uncharacterized protein OSJNBb0011H15.33
  Subcellular localization annotation: CTP_CleavageSite=36; ConfidenceScore=5.17e-01
MEQPSKKKIQSYSRLVKKAKQSFKKSSKKAVSDKTDCAMVRLLTKARDIAISLLESTVQLLSKQIEVPKQSLVSKAFSKRKAVVCEEDQLQALECSIGDLESGAGHLFRILVQSRVSLLNILSS

SEQ ID NO: 62436 - protein, 237 aa, Zea mays
  Coding DNA Sequence Number=SeqID_19061
  Homolog annotation: Hit_ID=A2YXY6; Match level="QueryCoverage=100%, HitCoverage=100%, E-value=2e-77, Identity=63%"; Hit description =Putative uncharacterized protein
  Pfam annotation: Domain name=DUF241; Domain location=44-234; Score =42.7; E_value=1.3e-09; Accession=PF03087.5; Description=Arabidopsis protein of unknown function
  Subcellular localization annotation: CTP_CleavageSite=6; ConfidenceScore=5.06e-01
MACHLRSASVPSSPRSNKASIDEQLQSLKATISSPSVAIQTMVDGLNKIVSIYSCIDQLTSLLGNQRQQRKAVEEELERSLVLLDICNAMQENFAELKVSVQEMQLVLKRGDNAALQAKVQSYVRLAKKTQKQFKKINSKAASDIEGCKVVMLLAEAREIAVSMLESASHLLSKKIALPSASKWSLVSKAFEKKKFVCKEEQLQALELDIVDLESGVATLFRTLIQSRVSLLNTLTL

SEQ ID NO: 62437 - protein, 345 aa, Zea mays
  Coding DNA Sequence Number=SeqID_19062
  Homolog annotation: Hit_ID=A2YXY6; Match level="QueryCoverage=68%, HitCoverage=98%, E-value=6e-61, Identity=54%"; Hit description =Putative uncharacterized protein
  Pfam annotation: Domain name=DUF241; Domain location=44-237; Score =2.0; E_value=5.8e-06; Accession=PF03087.5; Description=Arabidopsis protein of unknown function
  Subcellular localization annotation: CTP_CleavageSite=76; ConfidenceScore=5.37e-01
MACHLRSASVPSSPCSNKTSVEEQLQSLKATISSPSATVQTITNGLSRLGSIYSCIDELACLPSTSSQRQQRKAVEEELERSLVLLDLCSAMQERLADLRVIAQEMLLGLKRGNNVSVQAKAQAYARLAKKAQKQFKKTSSNIALDDTESCRVVKLLSEAREVALSMLESTLYLLSREIVMPSASKWSLVSKTFQKKRVEYREEQLQALELEIADLESQVQVVFRRLIQCRILRLDRNSENTVERSSLGEDVSELRNGRYEDAYIADGDTLADEVEVYIHMICALVLHRVDGEVDHVDIVAVDECDGMREGACGDPGEADETKTPQPCRWPQCILSLSAGDERKR

SEQ ID NO: 62438 - protein, 237 aa, Zea mays
  Coding DNA Sequence Number=SeqID_19063
  Homolog annotation: Hit_ID=A2YXY6; Match level="QueryCoverage=100%, HitCoverage=100%, E-value=1e-76, Identity=63%"; Hit description =Putative uncharacterized protein
  Pfam annotation: Domain name=DUF241; Domain location=44-234; Score =45.1; E_value=2.4e-10; Accession=PF03087.5; Description=Arabidopsis protein of unknown function
  Subcellular localization annotation: CTP_CleavageSite=6; ConfidenceScore=5.02e-01
MACHLRSASVPSSPRSNKASIDEQLQSLKATISSPSVAIQTMVDGLNKIVSIYSCIDELTSLPGNQRQQRKAVEEELERSLVLLDLCNAVQENFAELKVSVQEMQLVLKRGDNAALQAKVQSYVRLAKKTQKQFKKINSKAASDIEGFKVVMLLAEAREIAVSMLESASHLLSKKIALPSASKWSLVSKAFEKKKFVCKEEQLQALELDIVDLESGVATLFRTLIQSRVSLLNTLTL

SEQ ID NO: 62439 - protein, 52 aa, Zea mays
  Coding DNA Sequence Number=SeqID_19064
MTRGCAVEDADAGERRAGQPRGGRRLERLKTSANWPLSGFLTAIPLKFIGLS

SEQ ID NO: 62440 - protein, 108 aa, Zea mays
  Coding DNA Sequence Number=SeqID_19065
MRHDYGLTIYIRTMSNAVGTMSNAVVQGDRGMEARYPGDPRGRPSRAFCIVSATGSFRRHRDELIDKAVVCSFDGNSHEVDTLAAGDMLREKFNLHHDQYQLVKHFPE

SEQ ID NO: 62441 - protein, 146 aa, Zea mays
  Coding DNA Sequence Number=SeqID_19066
  Subcellular localization annotation: CTP_CleavageSite=27; ConfidenceScore=5.26e-01
MANGAAASLGPPFQTPGDPPSAAGWARASLLGGRGSAPRATDSPLGDPVSTMKELPHSQAQIRDDFCKQTQDSQGKGDPISQSKLQWSVAAGDGSVSTTRVDPRSKSKADSRPVQAVLGDPLQQTSMSRILATGKAKEVADRSPDF

SEQ ID NO: 62442 - protein, 657 aa, Zea mays
  Coding DNA Sequence Number=SeqID_19067
  Homolog annotation: Hit_ID=Q6J9V9; Match level="QueryCoverage=15%, HitCoverage=27%, E-value=5e-11, Identity=45%"; Hit description =Putative uncharacterized protein
  Subcellular localization annotation: CTP_CleavageSite=65; ConfidenceScore=5.38e-01
MNKHRHSRCHYKRNSGSASAGSNNPPRWRACGATEDRRMARRRPKSSSDNDFCSERPNSSSDDLRADAAAARPSPTSPLEGRGQAESRRVGGQSAGGTDYLVGGETSSGYLGGRWHRKRHRSRSGRRAGHAAAARATNGERPSPRSLREGASRCPRRDRPQLGALPSPALMMNILEAEGGAKAAAQLASPHPGTGGHRFGAEEAKPPRTVRATAQRLRAFLHFRPGQRVKGRTTMQAACNRTQGAHPFDFDASSMEAQAHTSCNRRAGYYMQETAPPLAPVPRLLDCGTSAATRGDPAHDPTVPTEHIGHRTGDTFGRRSRRRFTSAIMTASKKVCHVVRFRILFLFLFLSLTKGTGKGDTPKGILLREGSGPQAPLLIRGSKAWPLGRVQQPPQSTRGSAPTTGQRFEGRPPRKGSTAASGHSGSAPTTDQGFVGWPPKGFDNRLRRRARDDPGYVRYITEARATLRRLGGCSRKPGSGQTVDSVNIPARELGTRLCTQATGSDSASAPEDDELRLARPQGSDSSSAPEDDELRLARPQGSDSGSAPEDDELCLARPQGSDSGSAPEDDELCLARPQGSDPALASDDSLRLARPGARTRPRPRKTDSTSTLEELHLARPRARTDHVTRGAIITLPLASSGYGEQDQRPIWLAPINK

SEQ ID NO: 62443 - protein, 189 aa, Zea mays
  Coding DNA Sequence Number=SeqID_19068
MVFEVAAVGHRSSVLDPHGDNTGWGPTFDIARIDRSATYILPVSGKVSPGEPLCMEDASTEPLHATCDQHAWSKAQLCPTCGFATSPEVSLAASVGTPKLGYPFLLGQGGTLVVIHSHIVTGSLPRLKVRPRPTGPPDTKSMSLQPRAGSSWGSPGPLRMSSGPLLRGGLVLLCVRDITDGKRTSTSAL

SEQ ID NO: 62444 - protein, 169 aa, Zea mays
  Coding DNA Sequence Number=SeqID_19069
  Gene Ontology: Mol. function=RNA-directed DNA polymerase activity; Biological process=RNA-dependent DNA replication
  Homolog annotation: Hit_ID=Q7G757; Match level="QueryCoverage=87%, HitCoverage=20%, E-value=1e-09, Identity=29%"; Hit description =Putative reverse transcriptase
  Subcellular localization annotation: CTP_CleavageSite=34; ConfidenceScore=5.09e-01
MVTKKKDGLLPPPVPLRRRNKQLPPDFIPRRSSRLAKRRTPNDATRQIQIDLLRTMDIVDADEAFSDEALEKYGRLFNSPLSESHIKALAALFGWSVPVDIHLQDVQVLPADLGPEDIIGLNRKVRRDVVRAMVNSTCPDVGDFNLIYKAEDKNNGNLNRAMMGRFRRL

SEQ ID NO: 62445 - protein, 171 aa, Zea mays
  Coding DNA Sequence Number=SeqID_19070
MEDFEEFQDYDEFKFTLVANPQWPVSGALHVSPVTWRDCIERRRQEQEQEQEQQDSSPSPQREVESERPPSPAPLLEMPPAPPQGIPASGGDPNGDGDDDDVGGSSSHDTERSEEPEPEGWIARPITHDAARGCHFHDTLDTLLRRAFDRLTWSIEYRCVVYQHHRGLYPD

SEQ ID NO: 62446 - protein, 41 aa, Zea mays
  Coding DNA Sequence Number=SeqID_19071
MVGISAVTARRKPGSVEHCMPRRYLLDLVDGVTWPPSLPSG

SEQ ID NO: 62447 - protein, 111 aa, Zea mays
  Coding DNA Sequence Number=SeqID_19072
MEEVRILKRGEEPPTPAPSPAPMLVIAAPPVAQTAAVDQRAICSTGRIGPQTPAVVPTKKMVSPPAASPAEVEAGGGICGIRVRVDGGGGRLTGWRERLSWRRFWRVLKGN

SEQ ID NO: 62448 - protein, 47 aa, Zea mays
  Coding DNA Sequence Number=SeqID_19073
MDDELDVGKKAGSTTFIKGQTSYLEYKLKFHFGQGSIIIKLQMIFLR

SEQ ID NO: 62449 - protein, 26 aa, Zea mays
  Coding DNA Sequence Number=SeqID_19074
MGDELDVGKKADFYPIVMALFEILRD

SEQ ID NO: 62450 - protein, 69 aa, Zea mays
  Coding DNA Sequence Number=SeqID_19075
MGQSCQRPGAQVADEWDLGAGGALEPVSRDPGHWIESGRLRSGATGTPHTGCLLDLVDGVTWPPSLSPG

SEQ ID NO: 62451 - protein, 441 aa, Zea mays
  Coding DNA Sequence Number=SeqID_19076
  Gene Ontology: Mol. function=nucleoside-triphosphatase activity
  Homolog annotation: Hit_ID=A3ADF6; Match level="QueryCoverage=15%, HitCoverage=17%, E-value=2e-22, Identity=64%"; Hit description =Putative uncharacterized protein
MGSFVKLARRAVETDAPGAMDVMSLAQGVVYWQPPASAMAKVEKIIKEPTLSKYGSDDGLPELREALLEKLRLQERDTKIISCIIQHLALVMITLANNYSYLFVYNSNQRGIQKYAFNHSLQPSDRKHMESVGEEMEQRRRELRLFANTAASCPSSTCVASCCGEERIMFMLCDFEAFKALTSNYLGLKDHKLYSQVEEGFHAAGARLSPAELGEIMLANRASPSRASPQLDHQAPAHLELMPAIINASEVQMSNSDGLTLVRQFNTYRQIRTLRKKLQQIEILEAKQLASHHLDNQQKRHHGASVRPNTRTSSFSIPPHGGALEVNGDAKDNVPNRWFRPEIDAPCPHSPPTLSRIPDLGAGYERLHALLQQREQLVSIPSSSLEIVPVPPVNELVPSVECAAELVSTLSPPRKLRRAVKKITPKEKIQAMYNCNLVPEI

SEQ ID NO: 62452 - protein, 52 aa, Zea mays
  Coding DNA Sequence Number=SeqID_19077
MGADKRAKALGRAGTKRVNGAERDCESGMRTERLRPVDFLERNGSRFEENIT

SEQ ID NO: 62453 - protein, 127 aa, Zea mays
  Coding DNA Sequence Number=SeqID_19078
  Subcellular localization annotation: CTP_CleavageSite=31; ConfidenceScore=5.08e-01
MALDGQCSPLMDYWHPHHSPGLGCPRGRVPRQPGGSGAPPRRVVPPVLLEGPLRQRVLPSDEGHGAMENSLHDLSEPIVNRTLVLNLLCGLSPRYSSLKALIERTVPFPTFHNVRNELVLEELTLET

SEQ ID NO: 62454 - protein, 63 aa, Zea mays
  Coding DNA Sequence Number=SeqID_19079
MAHRSYFGPIEAFSQPFSPLCPWIHGIFPAIEFTVAPSPSLPVTPSFGSGKVLSYIKMSETST

SEQ ID NO: 62455 - protein, 74 aa, Zea mays
  Coding DNA Sequence Number=SeqID_19080
  Gene Ontology: Mol. function=ubiquinol-cytochrome-c reductase activity; Cellular component=mitochondrial respiratory chain; Biological process=mitochondrial electron transport, ubiquinol to cytochrome c
  Homolog annotation: Hit_ID=Q53PN7; Match level="QueryCoverage=93%, HitCoverage=71%, E-value=3e-32, Identity=88%"; Hit description =Ubiquinol--cytochrome-c reductase, putative
  Pfam annotation: Domain name=UCR_hinge; Domain location=12-74; Score =109.7; E_value=9e-30; Accession=PF02320.7; Description=Ubiquinol -cytochrome C reductase hinge protein
MSTRQWEDEELVDQKKYLEERCKPQCVKSLYEYEKCVKRVENDDTGHKHCTGQYFDYWSCIDKCVASKLFKKLK

SEQ ID NO: 62456 - protein, 84 aa, Zea mays
  Coding DNA Sequence Number=SeqID_19081
MAASSRNRPVGDRPGAVHRQECVNSKGILFTIYRHRTQPVRNYNHAPHKSYNIDSDLYGLKGHSIIKSVRPFTFGYVVLSKLNE

SEQ ID NO: 62457 - protein, 197 aa, Zea mays
  Coding DNA Sequence Number=SeqID_19082
MVETLTSALITFPTRAFPLSCGRVWLTLESHPLQPGWRSLDSETVRFRADDTTKAAALKALTTFCGYYLLEMMVHPLGLFPVEKREDPMWCNRVEQMNQRILTLEQQVEIRDNTIDILEIQLHDVQEELAEANHHLEMHHQDMEANEMATRHRRLQNEQVPPPPPLAPMMQELMAQQNEILRQLVQRQPHPQQYGGG

SEQ ID NO: 62458 - protein, 131 aa, Zea mays
  Coding DNA Sequence Number=SeqID_19083
MPGLCRCLGHGELRRSPMHWEPAVVFPPTDPPTCSMLNPFLVLVGVRRRHDFSSSGQPEPPRAVPSSPERRLYYYLSLSVSVFGTRPHTQGYPPGAFGFSVFAYELSFWLEVFTILLGAPKVHSMGVAPEL

SEQ ID NO: 62459 - protein, 55 aa, Zea mays
  Coding DNA Sequence Number=SeqID_19084
MDGGMAEQQWGRRCGLSEREGREKVNERQRQNEGVQGGDAGNMEDFEEFQDYDEF

SEQ ID NO: 62460 - protein, 39 aa, Zea mays
  Coding DNA Sequence Number=SeqID_19085
MRRPRHRSSSGDVWDEGEVGKGWRLRLRPNICPPRDQFD

SEQ ID NO: 62461 - protein, 1019 aa, Zea mays
  Coding DNA Sequence Number=SeqID_19086
MPSSSSSAADTPPPAGASFEETLSNVAAEELRAGDTVEFGVSRMSSVRVQDMQQLGYFGGGVARVPGTEEIPELEGELVVFEAFFAAGLRLPAHRFVGEVLRRFNVQKRKIGDKIAQFGSCTFTPKTGKTSMEVVELVPCARNKWGNWWEFWFYVAEDTVEDHPGLPVAEMCSHYYSAYPQFEVAEEDANEGALLCAAGMSSGRDLVEEFVAYGVWPLARGWALGEVCPRQMPSRGGMQVRSPAFALDLHGRDPAAFVREVEDGAVRIVGRYVPKTEAQRSWDIRGSNDRLNRVFELNRLPYGGYPGQDIVDRRRKKPAAETEDDSAAAAAPSTKKRKLGTAKGGLGVSDSFAMELMGTCAAPGGRMSSPELRESSARMLKVTGGWWPKNVPIPRATGEDFFTSRMVRDLRVFPYEQNIAAIVSAVMDKDRQEAAQKRRAVIRLPEARPNRARGTAKAAAPGDSQPTLAAKLAAPGSSKVPEVVKAAGAGGTKSASAGAAKGRGSGEGQLVVVSPAVATAVSAAMPGAKGSALSAGGEIPALAAVKDEACTMSRRLREASQRLSQHADAVREKSAVDSKCRKLAEKVAALEGERTDLRRQLVEERRETNQALAKAQSAQAEANLARVEGSLASQRAEEWEEGFNAMQARMERVEASTRSEVERTRKQLMDSYHELGARTADFEVPDRESGLRCLEWLQEELLALPTIVEGFMSFASLVTCEGAMNALSHEGCSHYEVFDRSNEDFEREIYKVEDPVVKESAGALFDRMWGPHGREVVRERSDLARDQAARAETVEDFGSLNSARPEAEANPVAAEAEVVPAPPPKTGEGSLAAPTATASGGGSSPTAVLRVEETPKASTGLAAEDLPKAATEPAAEDPKAAAGSSQVQDFGPAQATATANFVAASTVDAGNESDESASKFSDFSDSGSSVEWTEESSNEDLDYFAALDVAAVETSPRAVDAEVVPGPSAGRRRRRVVAKRRVSEVDGGRLRVGRAGRHELLSSPAGASVGEGELRSLFE

SEQ ID NO: 62462 - protein, 302 aa, Zea mays
  Coding DNA Sequence Number=SeqID_19087
  Homolog annotation: Hit_ID=Q6JAD6; Match level="QueryCoverage=74%, HitCoverage=57%, E-value=5e-22, Identity=48%"; Hit description =Putative uncharacterized protein
MPLILAPPLPPLLLLPLHHPLRLPPSLLRHPPPQPYPPPPLLQLPLLLPLPFPLHLSHLLASGSVMRLRCDHLLRIPGRLTFSVLQRHGYVGSDTYPWSLWLPAQRDPAAVDLFSTCIQESFFRAQMSAQIASTSAPASGPRAFLLAAGADSELIRPPQFQGTLEASRLIFGSYHPAPEDPVPASAPVIDTQPEVSAFHQFETQGGAAHDDDDDDDVFGVPPPPPPPMPPRSHDHEDGSSSATPAAPLAIDPALAAILQTLTQQQTHLAAEQARQTAVQQQLSERMLSMFQTIQDRQDSLQQ

SEQ ID NO: 62463 - protein, 272 aa, Zea mays
  Coding DNA Sequence Number=SeqID_19088
RQFEPLDQRIEDFGRIFFEAERGERVDDFGALNSAPPEPETTPAEAATGVAPGLTMVTAEDAPGALVPAAAGEGLLPRVAEGVSDAPAAAVPGAEDPAEATAEAAAEAPAAAGPSQVQDFGPAHATATTGFLAASTAEGGNECDGSVSEFFDFTDSGSSVEWTEESSEEDLDYFAALDVAAAEAALHAADAPSVPGPSTGHRRRRAVAKRRISAEEGARLRVSRVGRQELLSLPAVSGVGEGELRSLFAGEELRIMLFNYREMGIIPKVEPM

SEQ ID NO: 62464 - protein, 629 aa, Zea mays
  Coding DNA Sequence Number=SeqID_19089
MPVVELVPVRPATSGAVGMSFGFMLLRLLSKAIKGSPCPKCALTIYSAYPPFEVAEEDTDEGALRCAAGQSSGRDLVEEFAAYGVWPLAHGWALGEVCPRQMPFHGGREVRSPAFALSLRNRDPAAFVRDAEDLAVRLVGRYVPKTEGQRSFDIRGSNDRLNRVFKLNQLPYDGYPGQDEADRRGKKPAVEAGGDPALAAATSSKKRKLGTAMGGLGVSDSFARELMRTCAAPGERMSSPELRESSARMLRVTGGCWPKSIPIPWDAEDCFTSRMARRWKVFPYGRNIGHVVWAVMDKDRQVAARKRQATVRVSRSPAEEAAGSIGGRRPPAGSKPPIPGEGGRLRDLARRRRRRWGAGRPQAVEGLDEGPLALVVPGAAVATAAPAPKAGVETLGAGGEVTALALVRDEADAATRRLKGAMEALSQVADFTSRTASGALTAALSAEVERLRTQHADAVREKSASDSKCRKLAEKVAALEKEKADLRRQLMEERREANEAIVKEQSAQAEARLARAEGNIAKELAGELQRRLAAFESRAEGAEAAARAEAERTRTQLMTSYRELGVRTGDFEVPEQEAGLRCLEWVQEELQELPTVLAGLMSFTSLVTCEAAMNALCREGCRHFEALDQ

SEQ ID NO: 62465 - protein, 70 aa, Zea mays
  Coding DNA Sequence Number=SeqID_19090
MEGLLPGILELGCGLLLNVEDNGVRAPNANSGVALADGLESVLHLEEVSVGGEDSYGAVIAGHRAGIAGG

SEQ ID NO: 62466 - protein, 134 aa, Zea mays
  Coding DNA Sequence Number=SeqID_19091
MAENEEESKVTEEKTPPPLESQARTWLYFDICGSEPDSPIDEAIRYLQDQLVKRDLALDWAINSRPFARAKEAKARARVEELSSAMDNLQREKHLMVNWTFSKPPPSMKLVDEWSSTPDSKATKREKKWLTKCP

SEQ ID NO: 62467 - protein, 108 aa, Zea mays
  Coding DNA Sequence Number=SeqID_19092
  Subcellular localization annotation: CTP_CleavageSite=89; ConfidenceScore=5.51e-01
MTLGQNQCKNPSLHYGPSGGKAWTVRDLARTVRPQARTVRGGLSGPGGRTVRSRQNGATARKWLVAINTTPTTSIHFNQVFQPSTFNTRASNPFQDTFKASNLSKFQS

SEQ ID NO: 62468 - protein, 117 aa, Zea mays
  Coding DNA Sequence Number=SeqID_19093
  Subcellular localization annotation: CTP_CleavageSite=67; ConfidenceScore=5.34e-01
MARARAYKAHSGVDHTPPHALNLTGAQTHRRLPVHGMSAATRAPAAVDRPTQPFLAPSDPRRRLSTPCLYVTPWSSPRHWIELGRRDLAGTPAADEDTRLHMWTERFYGGTARIIPT

SEQ ID NO: 62469 - protein, 310 aa, Zea mays
  Coding DNA Sequence Number=SeqID_19094
  Gene Ontology: Mol. function=P-P-bond-hydrolysis-driven protein transmembrane transporter activity; Cellular component=mitochondrial inner membrane presequence translocase complex; Biological process =intracellular protein transport
  Homolog annotation: Hit_ID=A2YKH8; Match level="QueryCoverage=23%, HitCoverage=15%, E-value=1e-08, Identity=50%"; Hit description =Putative uncharacterized protein
MARFCRALRHVFAQRSAGDEHPKGLGGINLVLFLHWYLDLRIQQKQLESLVNQLAGASRYSGVPNCYGCQMFAADVLQNSRGRSYHRQIRAILHKCEDNIRGGAEQLFSMITEYNLKVAIPKRGDGAKPYFFGYTPKVEAEMFQLKANKAGGGAATPFDLLKQRSTLFSSFLFHLLCSSVAACYFTISHPLLETKCFKEFSEQLKVEAKSNPEFQKSMEQFSEKLCVLKEDLKVQHLQVELENEKQEKVELRQVLDNLKMESETSRVKHYEETDGLKKISQKNACLPSLAAELQPGLAYSRAIKFLSPQQ

SEQ ID NO: 62470 - protein, 66 aa, Zea mays
  Coding DNA Sequence Number=SeqID_19095
  Subcellular localization annotation: CTP_CleavageSite=55; ConfidenceScore=5.10e-01
MEPGGGTAVGAVESLLTSSCFRKGAESRRHHRVGRRGSSSEAKVESVFRGRGRVRAPGSGEAETVG

SEQ ID NO: 62471 - protein, 395 aa, Zea mays
  Coding DNA Sequence Number=SeqID_19096
  Homolog annotation: Hit_ID=Q6J9V9; Match level="QueryCoverage=16%, HitCoverage=33%, E-value=5e-07, Identity=44%"; Hit description =Putative uncharacterized protein
  Subcellular localization annotation: CTP_CleavageSite=45; ConfidenceScore=5.60e-01
MQAACNRAKWAHFSDSQHARHGGLGPRVMQPARRMLRACNSTATCATTVPPRLRNQYCDSRRPSARPSSANLARRSMRPKMGRRSGRRFAFAIMTASEKGPGKGDTPKRILPREGTRLRASLLIRGSKAGPSEGFDSRLRSRGLYTHYWSEVRRPAPRKGSTAASGYSGSAPITDQGFKGWPPKGIGPYEGLDHASPEPSLGQGQPTPEDLRLARGSPPAANVFPARPRPCLRQEATLTKSPHRPNKSQERLMQRWPDTFILTRAPQPTEPKARTWAKPRKTANSAPPDPGLGLGLSPRRRRTPLRSTQGSDLGSAPEDDELRSARPQGSDYALTSADGLRLARPGGSDSTSATEDRLDLGFGGASTSPNLGRRPTTSTGGTIITLPRADSGHGG

SEQ ID NO: 62472 - protein, 248 aa, Zea mays
  Coding DNA Sequence Number=SeqID_19097
MGVIRRLSASSLEERNSVGVASPAAPPRWGSPKTVTTSPWVGRSKPGYDLGPTLNFKDVHHPRWGGGRAEPELYLPRGFVGHPLLRCSRERALAGPAGGSDFDNAGLADGGRRQPQRVGLVGLAPGAPSCRKAATAPCAWEDRPRCRALLGRRSCSGAVLPLYRYGAFARGSVPCSSERIRVGICRRADGPCRRCRGGGGSRSPRRRRDHRHHPRFGPPALCTCPCPSSVGVGEGRVAATLALRPSPL

SEQ ID NO: 62473 - protein, 216 aa, Zea mays
  Coding DNA Sequence Number=SeqID_19098
  Subcellular localization annotation: CTP_CleavageSite=48; ConfidenceScore=5.24e-01
MDCTVISGARSTPDMSPTGGVGVVDSLDSRQGAASHLATVALPPPAVRKAAGQARMLLFRHVGKTSSSSAPPGELTVVVVAVALRGKEYHVVATVEGHELETPEMEQRLGLKRLLETTHLELNGKLLVNTQQAPTWRANCRRFDLGGSLDRRVKLSLRAPAQMCWREMEHKGGKSRGSCYPAPKKGGVLAVGVTSFREGERESVCWPVLPCDHPLA

SEQ ID NO: 62474 - protein, 151 aa, Zea mays
  Coding DNA Sequence Number=SeqID_19099
  Homolog annotation: Hit_ID=Q6QP51; Match level="QueryCoverage=62%, HitCoverage=47%, E-value=5e-12, Identity=47%"; Hit description =Putative growth-regulating factor 1
MMTASKKAGPSEGFDSRLRTRRARDDSGYVCYMAEARATLPSLRRNRKLRLARPWASASGGSLCLARPQGSAPASASKGGLRLARPQGSASTSTSKGGLCLARPQGSASTSTSGGIASSPDPGLGLRRSLRLTRPWARTDHAAGGTSLPNP

SEQ ID NO: 62475 - protein, 179 aa, Zea mays
  Coding DNA Sequence Number=SeqID_19100
MGNGHEPVQGRSANDGVEGEVNLRDVEHDVLRAEVLLGLECNRECDAPKGIHRLWAHSEEWARGSQPGPWDLQLLECSMTDDIEADPSVNQNMVQPHVGDDRSVECPEGDSGAPPPLMWSSLRDPWDCREDLSTQELTFLREVSSQLPPYITYSFLGRSLSSPESESLVKTSLRSPSGD

SEQ ID NO: 62476 - protein, 79 aa, Zea mays
  Coding DNA Sequence Number=SeqID_19101
MRKVLHNLANMVKTSGYLPRIEERPGEPPTAQQQSAVPLSFVEKFECPEVPRAPNTAVYDPETPANPPDHRPNLEQPHK

SEQ ID NO: 62477 - protein, 95 aa, Zea mays
  Coding DNA Sequence Number=SeqID_19102
MCIDFALNKIQAVLKSLNDTELEESCTQLPDTFSQDGSSDVEEHILSNQEKSDWKSWAEASQTCTNPAVHRTVSGAQAGAPANKTLSEKLSVSWL

SEQ ID NO: 62478 - protein, 173 aa, Zea mays
  Coding DNA Sequence Number=SeqID_19103
MSAPDPRLTLIKAWVFFVPESRDLAVSGPDPAQGGLGPVPGVWARPWRCIRFNINQERNSVGDTIKFGAKDFGCAGKWCTRHYPVHQDRIDSNHPLSRIQQACSAIIHRTVQRGTRLFGEPAEQRLPARQRLTAKVHSSKQCHAGVRAQKSEVTGLSGAAKRQRAPTANSSKP

SEQ ID NO: 62479 - protein, 104 aa, Zea mays
  Coding DNA Sequence Number=SeqID_19104
MEVLTGEEDPRRSREEIRRLPEIQGSNRRTERAATKPSTRRTQRYPRIRQTMHGLGVIARRSWNRSELRRAIPGARDWIWGKRFVLWNGLDEMKPDMYIYLGFG

SEQ ID NO: 62480 - protein, 64 aa, Zea mays
  Coding DNA Sequence Number=SeqID_19105
MATPLPLRFPSPAAPLSPSLAAAAVAGGGDEDDGFDYAYGNGKEREEGIEVDLQEFQDVDEFED

SEQ ID NO: 62481 - protein, 223 aa, Zea mays
  Coding DNA Sequence Number=SeqID_19106
MQAACNRTKGAHPLNFDASSMEAQAHTSSAGEGAKVDMARNGPAVMAVAGGRKQWDRERGYPERDPSPRRKRAPSPRLIRGSKASPSEGFDSRLRALGLRAHYWSEVRRPAPRKGSTAASGHSGSAPTTDQGGIPPEGGIEPSDPIKRGPAKSDLGRHRKLRLARPQGSDSGSALEDDELRLARPEGSDSGSAPEDDELRLARPQGSDSGSAPKDDELRLTRP

SEQ ID NO: 62482 - protein, 237 aa, Zea mays
  Coding DNA Sequence Number=SeqID_19107
MDQAVSLAARSRRFESSFYPCKIRAHRLGVQCLTDPDWPSCSDRTCTHHNRNGRPHLRSREGLGCWIWGYLLSSSLLRHEDVLSVSEITVYRNAMNIPSPYANSNRGKEKGGAAYRRRGRSGEGWGWLGETLVVTSRYGSTSEMAGIARSTRTGGCARRRRVYRPNHGELVQSEGMVSFTGSRSDYMHKESKDGGVVYPVHSSPRAGRGWEWLYWPVYGGSGSGGREHVAHGQTAAS

SEQ ID NO: 62483 - protein, 187 aa, Zea mays
  Coding DNA Sequence Number=SeqID_19108
  Subcellular localization annotation: CTP_CleavageSite=43; ConfidenceScore=5.09e-01
MAAQEAVPIVAIGSQVEISLVGLEAWSTRSFSPTTSTSPDGPSSSKKSRISNEIEVVVAVVIPQLLRDNVDPTGARLLRRYAWSICHAARKVDGAPRIPGVSVSVRGPFWSLAADAAKPLLRYSTYVFSANRSKAWYEANVTKLAPAITVLLDYVVNIPYSFTVDGADDDDDSDDDDGGDDDDEHLE

SEQ ID NO: 62484 - protein, 442 aa, Zea mays
  Coding DNA Sequence Number=SeqID_19109
  Subcellular localization annotation: CTP_CleavageSite=31; ConfidenceScore=5.58e-01
MSTTPSAKSDRASNDNAVGGSPLRRTTSAPRPGHRRQGLLQESGPSRQLNRQPRSLSQLSPEDISPARGLGNSTPASVPPADGPARLWPTKSSFRANSASVHTDTAAFGFSSSKSGRGFPLTEQEKPRAARPTESRNSYASGIRTPHSSPSHEATHTWLSGPDSHNEQTPALKVPLQTELRFCLRRYEQPPTIGGPAEQQKADGWLAAARSSSGDDDFCSERPNSSSDDLRADAAAIKPSPTSPLEGRGRAEGRRVGGQSAGGTDYLVGEETSSGCRGGRWHREQRRSCSDRRAGHAAAASTTNGERPSPRSLREGAGRCPRGDRPQLGALPSPALMMNILEAEGGAEAAAWLASPHPGAGGHRLGAEELRVSPIRGLTRWKDGMHEGSAKTWLPFKGVTLLLKATLPTCVLSHRGLSLLQHAPRSSPYDTGAGSHASCKLA

SEQ ID NO: 62485 - protein, 321 aa, Zea mays
  Coding DNA Sequence Number=SeqID_19110
  Subcellular localization annotation: CTP_CleavageSite=67; ConfidenceScore=5.02e-01
MQAACNRAKWARPFDSNTPSTEVQAHASCNRHASCYVRATAPPLAPLPRLLDCGVNTAGRSSGHVVSQAYVPSRGSEGALSHGVKMDRRRLKREKQATLRLRHNNHVKKLRASLLIRGSKAGPSEGFNGRLRSIGFCAHYWSEAGPRRVRSRLRHRARDDPGYVRYITKARAVLPSAACVAPTAEPPDRVRLTAAKAGLGRHRKLRLARPRARTQAQPRKTANSAPPDPGLGLGLSPGRRRTPLRPTQGSDSGSALEDGELRLARPQGSDMGSTPEDGELCLARPQGSDMGSTPEDDELRLARPGGSTSTSTSEEPPPRPA

SEQ ID NO: 62486 - protein, 29 aa, Zea mays
  Coding DNA Sequence Number=SeqID_19111
MGEAALGVLTDIRDRSWPNNATLSCLRKK

SEQ ID NO: 62487 - protein, 187 aa, Zea mays
  Coding DNA Sequence Number=SeqID_19112
MAAALQRARARAVPRERGRDGRSRPRRRGMRVLGRLGARVGWGEGGALVRREGGTIGPAGKGTEGMGLHGWELGRGRLGRAAWVAGCTDGPREGGVTDLTPSTGISPPRFKKKLARRQERLAVANRTGARGKGIYRKGATITSTLITKKQITHNTKANSTSIQQQTSRCYTLMLTRWWSFLSMGKLL

SEQ ID NO: 62488 - protein, 58 aa, Zea mays
  Coding DNA Sequence Number=SeqID_19113
MRTKPPTVDQLQALTTGSRGGTLDCPVAFGAIYAQVKKKEKDVEADLQEFQDFDELKD

SEQ ID NO: 62489 - protein, 52 aa, Zea mays
  Coding DNA Sequence Number=SeqID_19114
MGKVCDLCRGNETDISAVLMVGFGAIYAQVKKKEKDVKADLQEFQDSDEFED

SEQ ID NO: 62490 - protein, 221 aa, Zea mays
  Coding DNA Sequence Number=SeqID_19115
  Homolog annotation: Hit_ID=Q6F372; Match level="QueryCoverage=81%, HitCoverage=41%, E-value=3e-08, Identity=25%"; Hit description =Putative uncharacterized protein OJ1268_B08.17
MAAQEAVPIDAIGSQLEISLVGLEHAVLLTNNLDLAGQTFVVEKVQVRQAPALLEVIQRAVCHPKRKWVVRIPNTLKLRHIARISNEIEVVVAVVIPQLLRDNVDPTGARLLRRYAWSICHAARKVDGAPRIPGVSVSVRGPLWSLAADAAKPLLRYSAYVFSANRSKAWYEANVTKLAPAITVLLDYVVNIPYSFTVDAADDDDDSDNDDGGDDDDEHME

SEQ ID NO: 62491 - protein, 157 aa, Zea mays
  Coding DNA Sequence Number=SeqID_19116
MAEGPEFVDGGCRWVHGGALRVGCLNTDHGAPMGWARGSRGFRFIEGRVDAETDWGPVIPGGGSQQPSSYPDRVEQTCTCYGEVEEDPDRHAPHVCETQVHQMLAKRLPSRANAPVIEARDGGEKWVAREIKVDMGQRGNGPAGGFRLSAFKHQNKF

SEQ ID NO: 62492 - protein, 126 aa, Zea mays
  Coding DNA Sequence Number=SeqID_19117
  Pfam annotation: Domain name=zf-CCHC; Domain location=45-62; Score =21.2; E_value=0.00094; Accession=PF00098.14; Description=Zinc knuckle
MNDKNDSNCHLPPPPAPPRDKHREFMSHKPPTFSNSSDPLQADDWSCFKCGQPRHYANYCPNRAAYTTPAPMKQGQASRGKSQPLSVNQGQVNHVEVEVEPGEPENPKEVPVEGEEASEEGKEQRD

SEQ ID NO: 62493 - protein, 74 aa, Zea mays
  Coding DNA Sequence Number=SeqID_19118
MARLTKMVEGPDSDSGGLYREQGSPTQDGHSGSQQVSAKSAMSVVQLRSLRDEGKTVLEPWVHKSVSQVNGKRP

SEQ ID NO: 62494 - protein, 258 aa, Zea mays
  Coding DNA Sequence Number=SeqID_19119
  Homolog annotation: Hit_ID=A2YGC2; Match level="QueryCoverage=60%, HitCoverage=70%, E-value=7e-10, Identity=31%"; Hit description =Putative uncharacterized protein
MPPAPPQGIPTAGGDPDGDGDDDDAGGSSSHHTELSEEPELEGWIARPITRDAARGCHFHDTLDTLLRRAFDRHTWSIEYRCVVYQHRRGLYPDQWEATCLVRRPDDDLRGTEAFLEHYSITERDTAEVAMQDAARRALSQYCSLFSGVADGLDLKYYPRRSTGSAGGVIASPVGEGNPRLNSMVNLVVVLNTELDHALDELGKDWAEVAELRAECAACHYLDGGSPAPVGIQHPYCSPPRGRFDYGTDCRTQIDLDP

SEQ ID NO: 62495 - protein, 127 aa, Zea mays
  Coding DNA Sequence Number=SeqID_19120
MAHRSFSGPPEAFSPLSSPLCPWIHGPFPAIEFAVAPSSSLPNYGDPGTHLARASLNSDDFTTAERSGAARSHLFPRFDPLRPIQIERLGPRDTASRTRALTPWPACQRPNPLALGPLGQRTLPLCR

SEQ ID NO: 62496 - protein, 64 aa, Zea mays
  Coding DNA Sequence Number=SeqID_19121
MARVARTLLATDRLKGVHTLESLFLSRVRKRQIFVAFAPRWYQMQENRSEDAGGLGPPYRIFLF

SEQ ID NO: 62497 - protein, 208 aa, Zea mays
  Coding DNA Sequence Number=SeqID_19122
MAPRGLNLILTKGQVSEIMFGKDKAKNKRMLRMWGERHFRDNCPNMAKPKKRRSKETCSDDIALENELLKHEVARLGKDWGDKKKLPTNKVSNTYIYKVNRKAATPYLIKKKKHREVIAIKANNQANKVKRGQMHLGAKGDYLNHEKHQESLGPEREVISPKDFEEFLDLANSDVCHGMHHIGSRILPNGLVNTLDPNSPPMTKLGKR

SEQ ID NO: 62498 - protein, 167 aa, Zea mays
  Coding DNA Sequence Number=SeqID_19123
MLVVDLRWCLKTRANTIRQKTVESSSMMLEDTIVGPAPGPVMPEVIGIDPRWSVVVFEVRTIIRSPRARSKASGVHCSGLCPGPTVNMVTIVAIWDGRPTRMFSRVHMSEDKVRTKDSCWSVGTLYDPRDIPGTRKFSRVRMSEDKMRKKTRVGLWGQYMILESYQE

SEQ ID NO: 62499 - protein, 64 aa, Zea mays
  Coding DNA Sequence Number=SeqID_19124
MARVARTLLATDRLKGVHTLESLFLSRVRKRRIFVAFAPRWYQMQENRSEDVGGLGPPYRIFLF

SEQ ID NO: 62500 - protein, 253 aa, Zea mays
  Coding DNA Sequence Number=SeqID_19125
MGKWSCEGTAAGRKMNRALGKIWASRLGAGGSASMGKKAPALAVWGGSRHGEEGRAAAIHGRRRGAGEEELLLLCGKGHRKKADVELLDMGSLERRLHSLSRASAIGAAGNGSRWLLEVEDDGENCSHGEAPAGKMEARASSGWLLPAPRSIGGDSKGADPHHGELLRIEEERIPALNAMEKRGAGRGDGSRKLGRHGWERDGEGSSLVAVAAVMQGGRSWRLEIFEGWEWKIAKGKGRGVHIYRGALGLWFP

SEQ ID NO: 62501 - protein, 93 aa, Zea mays
  Coding DNA Sequence Number=SeqID_19126
MVKNFGRKTVQIAMNAVVTSHLLVCLYSAAGEQYSRTVHVDLAFCFCVTLVFSSPSKPKVLLELVDGVTWPPSLPLGQTVEWVTASAGEDQEE

SEQ ID NO: 62502 - protein, 260 aa, Zea mays
  Coding DNA Sequence Number=SeqID_19127
MGGGLMAMGKWSCAWTAAGRKMNRALGKIWASRLGAGGSASMGKKAPALAVWGGLRHGEEGRAAAIHGRRRGAGEEELLLLCGKGHRKKAGIELLDMGSLERRLHSLSRASAIGAAGNGSRWLLEVEDDGENCSQGEAPARKMEARASSGWLLPAPRSIGGDSKGADPHHGELLRTEEERIPALNAMEKRGTGRGDGSRKLGRHGWERDGEGSSLVAVAAVKQGGRSWRLEIFEGWELKIAKGKGRGLHIYRGALGLWFP

SEQ ID NO: 62503 - protein, 56 aa, Zea mays
  Coding DNA Sequence Number=SeqID_19128
MASPRLGLCATALVIVVWGRMLLFTVHDKIIMLIGTWSDHPGKQCYHKGLWMPLAD

SEQ ID NO: 62504 - protein, 70 aa, Zea mays
  Coding DNA Sequence Number=SeqID_19129
NDPVEEPEELAGEVPEQQSVGGETFWFTGGNETDGFGYDYGAGCQHCNHCSREDEAVEGDFQEFQDYDEF

SEQ ID NO: 62505 - protein, 82 aa, Zea mays
  Coding DNA Sequence Number=SeqID_19130
MAHAQAKPRTAAPGTQPTVDRHYALKNENLKGRKDAIVDITPQPIILNQRSKSDKYHKNKHSSIQLFSNIVLILFLRVGLLF

SEQ ID NO: 62506 - protein, 126 aa, Zea mays
  Coding DNA Sequence Number=SeqID_19131
MAHAQAKPRTAAPGTQPTVDRHYALKNENLKGRKENDPVEEPEELAGEVPEQQSVGGGGNETDGFGYDYGAELETQLKEQSEAHRAKMPLLRKKLEEMKENFELQNYKHEIAESERDRLQKNVDEL

SEQ ID NO: 62507 - protein, 131 aa, Zea mays
  Coding DNA Sequence Number=SeqID_19132
MTSNYKCTFGLKEAPLRIALALRQPSYSFCFSHYGSDSSLKLRKRRRRGEPQLAANPTRLRNPEEGAGNRGGVVENLGVRGDLSLGDYSSGSTRTTVQPSFVVSYFRGPSSPCHCFDMKVVLKLISWLILY

SEQ ID NO: 62508 - protein, 412 aa, Zea mays
  Coding DNA Sequence Number=SeqID_19133
MPSSSSSADTTPPAAASSEETLSSLVVEELRAGDSVDFGVSRMTSARVEDMQRLGYFGGGVARAPGTEEVPEPEGELVVFEAFFAAGLRLPAHRIAKGRRKNARRRSGYMKARPKRQRGAAKAAAPGGGKPPLAAKAGAAAPSKASEATAGAGGSKSTKVVPPASGVAEASKAARALPLSGKRVADFGTDITVDDYLGGSDEGQLAMVAPGAEIATAAIVPKARGEALDAGGEVSALAVVRDEAGAATRRLKGVTEALSQATEALSQVADFASRTASGALTAAVSAEVERLRTQHADAVREKSASDSKCRKLTDRVAALEREKADLRRQLAAERREANEAVAKGQAAQAEAKLARAEGNLAKELAEHLQERLTALESRAKEAEAAMHAEAGWTRTQLMDTYRELCCCDYSRS

SEQ ID NO: 62509 - protein, 124 aa, Zea mays
  Coding DNA Sequence Number=SeqID_19134
MESTKITLDNMEDLVVDLSTELVEKDLQVEQMANHIQELEDQVEARENTIEVLEDQLQNTQQQLEEANQHLDLHHQEIEDMEAEGVDEDVDIEGGEEPEPASSLDIAGSGGPPSPESSVASFAR

SEQ ID NO: 62510 - protein, 200 aa, Zea mays
  Coding DNA Sequence Number=SeqID_19135
MASPTPTGGGDTPFCIDSLAREGFPLILWEPGWHSLDIETLGFWADDTTEVAAMHALTIFYGFHPLEMTTHPIGLFSTERENDPVWKDWVDHAKDVWAIYPRPTTRLTVQCMSMLYHLQALQHEVMSHLTDLAQIAKVTLNDREGFVVYFSSKLVEKDLQAEKMGTQIREIEEQVEDWDHTIEVLENQLQTTQQQLLSHY

SEQ ID NO: 62511 - protein, 103 aa, Zea mays
  Coding DNA Sequence Number=SeqID_19136
MDHMGLSHKSIKGRWDQLDGNRIAASRGMAGRLQLLGSLVAAGRAGEADARLGKAGRQHQSDVHGWGGCGNAAAMGMVGPQGLRAGLAGGSPEKERAGRTDAL

SEQ ID NO: 62512 - protein, 63 aa, Zea mays
  Coding DNA Sequence Number=SeqID_19137
MASSSPEQWLQCGQPGVLWLKQLLLVGQLRASHFTLMVALLSRVVSQRIGPYGEVLEKQPESP

SEQ ID NO: 62513 - protein, 123 aa, Zea mays
  Coding DNA Sequence Number=SeqID_19138
  Subcellular localization annotation: CTP_CleavageSite=52; ConfidenceScore=5.37e-01
QLHQYPSSFGSLTFGFVILYITKRYKVNRNLKRSYNFVKRLYFALNMFEGTVAMTSSAEAAVSSTAKSNSTLSIADNVLSRLVASAEAATSAAGVIFDAEVGGSSFFCKSFVSCGPNGLSSLI

SEQ ID NO: 62514 - protein, 324 aa, Zea mays
  Coding DNA Sequence Number=SeqID_19139
MRLMVLVMIMVLMARLRHTARKSVIPFLPSRLAERPLRRPVAGQSSHLERLHHRLREEQERRRQEQQSSSFSLHQEIESLLEETQTTKGGDDSSSHDTDFSANPEPEGWVARPITHDAARGCHFHDALDTLLRRAFDRHTWSVEYRCVVYQHSRGVYPDRWEATCLVRCPENSLQGAEACSEHYSISERDSAEAAMQDAARRALSHYCSVFGGAADGLDLKYYPRRSSGSTGGVIVSPVGEGNPRLSSTVNLAAVLNTELDHALYELSRARAEIALLRAERAERRHLDGGSPAPVGTQHPYRSPQRGHQSYGNPDCKTKINLEP

SEQ ID NO: 62515 - protein, 71 aa, Zea mays
  Coding DNA Sequence Number=SeqID_19140
MNLPISLIKLDPKFAKCTTKIFSNCNLADGEYMLIPEQGAVHEEDQEQAPETAIEDLPAAPAFEGKPRFYV

SEQ ID NO: 62516 - protein, 74 aa, Zea mays
  Coding DNA Sequence Number=SeqID_19141
MALGDDAVGSDRKDISDDFASKVSHSVDDFTAEIGELNVALASHDKLLRFDARERKEFESKHDKTWIEEENTYL

SEQ ID NO: 62517 - protein, 103 aa, Zea mays
  Coding DNA Sequence Number=SeqID_19142
MDHMGLSHKSIKGRWDQLDGNRIAASRGMAGRLQLLGSLVAAGRAGEADARLGKAGRQHQSDVHGWGGCGNAAAMGMVGPQGLRAGLAGGSPEKERAGSTDAL

SEQ ID NO: 62518 - protein, 157 aa, Zea mays
  Coding DNA Sequence Number=SeqID_19143
MSRMFDDYYSKDCGVVSALEVTQRRIDNNDQFLILATVGVAFVPPPPPSPTISTTNPTAQANPTSANAATPTTPAAPASPASATASLAISALHASATTVGSSPPRAARLSPPLPNRLRPSSPANPTLLRPPLRGLPRRCGSACTAIRRHCTDPPQPR

SEQ ID NO: 62519 - protein, 150 aa, Zea mays
  Coding DNA Sequence Number=SeqID_19144
MLSEHGARSFRCQQTEKWLGHEESAHISDANPFTNEVEIELNLLRALTLDGVGREVYDTDVVTIDKGASCQQTVQLLEYLTKPCHLGDYVGHNAVLGLGARAGDDGLPFRRLEDKVVAKEDGETGSGPTGVGTTTPIFYALLRDRRFENR

SEQ ID NO: 62520 - protein, 431 aa, Zea mays
  Coding DNA Sequence Number=SeqID_19145
MTASKKVRHVVQFRILFLFPFLSLATRTGKGDTPKGILPCEGSEPRALLLIRGSKAGPSEGFDSRLRALGLRAHYWSGVRRLAPRKGSTAASGHSGSAPTTDQGFVGWPPKGSTAASEHGERGTTLGTSDTWPRLGLRSRGSGAVLANPAPAKLLTASTYQPENSEPDYAPRQQPLVTPISTKLQRPDGRNSGQGYVHSMDTISPRPSPASGKDSRPRRIHVSPEGPLKRQAHFRLARGPAMAGFTEKQPWPDRLASRPDRRSIQCKDRLTPYLDARSSVDKAEENSAACPAPTAVPPDRVRLTAAKSSLGRHRKLRLARPQGSDSTSTPEDGLRLARPRARTQPRPRTTDSASPYLGLGLSLDLGRWSPPRPTPGLGLSLDLGRRSPSRPTLGLGLSLDLGGVTASPDLGLGLTTPQEGLKRSSDGHDIT

SEQ ID NO: 62521 - protein, 48 aa, Zea mays
  Coding DNA Sequence Number=SeqID_19146
MRCIHIMQAAGHQVCVVSVKSDFSFLGGSNSRAKVDEVIRGAEEPNRL

SEQ ID NO: 62522 - protein, 47 aa, Zea mays
  Coding DNA Sequence Number=SeqID_19147
MLSFNHYLLISLTLYMSPHHMGTTKGDTVANCEKLAKYYAHIVWDNG

SEQ ID NO: 62523 - protein, 153 aa, Zea mays
  Coding DNA Sequence Number=SeqID_19148
MGKKRKREPTPPSEDFGDSEYSEEEFSSESEGSPAPIPLRESSDDSDDSQGLAAEVWTYIRAIERSGLAGSDESEDSSDEEDSSEEDGGDGGEGDNDDDDGGGGGDDDGDCGGGGDSSGRGSNSGGGGSSGGRGSGGSGRGGNKAQWLDATSF

SEQ ID NO: 62524 - protein, 412 aa, Zea mays
  Coding DNA Sequence Number=SeqID_19149
MDEGAPLGGLESEDNAEPSHGLHTVFSSLWGRGHLAHRLRIRFPEDEGVRRPKQSNQPRRLTGPAGRGSGHGLTTLGAVLAAPTTLPRPRGSVPRPPSGRLGALAATRRPRAAQAHASLGRVVRHRQGSEARDIQAGQQARRGLQQRLEYPTATSLLPLRCFQVVRTTRSHTKSNHQGRVSLASAKLDPPSGARRGEPPLRQNFPRKRSFCQNVFRAFRLLQKWDPENDEVHVRTTPHVGGPAEQQNADGWLADARSGSSDNDFRSGRPNSSSDDLRADAAAIRPSPASPPKGRGHAEGRRVGGQSAGGADYLVGGETSSGCLGGRWHRKQRRSRSGQRARHAAAASATNGERPSPRSLREGAGRCPRGDRPQLGALPSPALMMNILEAEGEAEAAARLASPHPGAGGHRLG

SEQ ID NO: 62525 - protein, 96 aa, Zea mays
  Coding DNA Sequence Number=SeqID_19150
MGAKNWGRRKGRRRGETNRGGARGTRAGLCVTKPPQCERRRVGEVDGGVGRSEPLPARMKPAVDEEGTKRGAERGAVAIEGWRRLEGEATRRTVMI

SEQ ID NO: 62526 - protein, 209 aa, Zea mays
  Coding DNA Sequence Number=SeqID_19151
  Gene Ontology: Cellular component=nucleus; Biological process=cell division
  Homolog annotation: Hit_ID=P93646; Match level="QueryCoverage=24%, HitCoverage=10%, E-value=2e-18, Identity=88%"; Hit description =Cyclin type B-like
  Pfam annotation: Domain name=Cyclin_N; Domain location=47-173; Score=- 24.1; E_value=0.016; Accession=PF00134.14; Description=Cyclin, N -terminal domain
MKILMYQLCNSVAFVHDPKVLHRELKLHILLKDHKTMVLKIVEYVEDIYRFYKSTEGTCLPLSSYMSSQAEISERMRAILIDWIIKEEGRRLRVYAGPDSSGQIRCSLWTMSAKFLKVLRCLHKQLITMDLPFDVLDEPSPLGLRLRKGPSLLDLIQMKLSQEKSVREQFDVHNDVSDTPMEKKVRSRAPTAGERLKASNVLANVLRIG

SEQ ID NO: 62527 - protein, 92 aa, Zea mays
  Coding DNA Sequence Number=SeqID_19152
  Homolog annotation: Hit_ID=Q53P77; Match level="QueryCoverage=77%, HitCoverage=4%, E-value=2e-07, Identity=44%"; Hit description =Retrotransposon protein, putative, unclassified
MGVEREAVQQPARTRFSIDHGKRLAIVKHILCYIVSTIDYDLVYPKRCSTDSMLTCYMLTGYTNNGLRGDIDERSISGIFFFLGDMLVSWQS

SEQ ID NO: 62528 - protein, 175 aa, Zea mays
  Coding DNA Sequence Number=SeqID_19153
MKSRFGDIVQPPQWTATSRAVQGVRGCIGRLIVGFSEVEMDTDSLHGPRERPLMGHPWDASWALTGGGREFCEENQCDTEGSSGIVAGSEKYSHERSDLYKEDNLNWLYKAEGEPLRKREVFHFRYLSCIIDQRGALHLVLDTGKSALGSRTTDLMKKGPSPRPETSSVTVVVKP

SEQ ID NO: 62529 - protein, 43 aa, Zea mays
  Coding DNA Sequence Number=SeqID_19154
MAVCAGPGRGRCLALTGPGSNLRPAVDAQSEATRREANEELNH

SEQ ID NO: 62530 - protein, 120 aa, Zea mays
  Coding DNA Sequence Number=SeqID_19155
MESWKKLPWGTPGSCWGKGGMLPRPVGTVRETTAANVSGTGTDGLARYFAVDSRHGLGLAHKLKAIGPVLFSDQRERGMLSAQGRPGKLKWPRSLLYNRKSPSAFDASIKHKTTCVLLAR

SEQ ID NO: 62531 - protein, 792 aa, Zea mays
  Coding DNA Sequence Number=SeqID_19156
  Gene Ontology: Mol. function=DNA binding; Biological process =regulation of transcription, DNA-dependent
  Homolog annotation: Hit_ID=A2WY33; Match level="QueryCoverage=55%, HitCoverage=65%, E-value=1e-78, Identity=40%"; Hit description =Putative uncharacterized protein
  Pfam annotation: Domain name=B3; Domain location=358-451; Score=46.1; E_value=1.2e-10; Accession=PF02362.12; Description=B3 DNA binding domain
MENLCNHIKSIEHISNKQVLAPLIKGLPSDRHTSNKREPGSGRQSGTDYEAVREERKSSITATWESRPHNTTSGAGSSADHRSPEKRPLSFVPRVPRHGPRRPSVTAADAKCEPREHWNWNIDMLSSGPLTQWKAVAYVDTQAIKGGKSQKPNQTEALALVSLIDDEKKLGDCQFDLWKQYYVYYLADESGVHFVWQPSQESSVLAISCAFDDYYIKDYDVILALEVTQRRTDNNDHSSSSGSFCAANVYDGAYLMIDNVRGNFYRQPATDTEVVGGAVKKEPEEIVVEVDGDGDEEAEKVVKRRRRRRKKTTAWDPHKKRACVDCTKRCARIHGQPASPSALASSSSNARPVPAVPSFFKVMLGYFSEDMDIPPPFAKTIWDLAGSNVFLEDAFGLRWRVRLCLRDGVLSFGHGWKNFVLDHAVSCGEFLVFRQIARSVFTVQMFAPSAVERLHLCERNKRQSRKRKPRPQRQRTSSPSIQTVKATKNRVKNSNKKRQRTDDHQNGVRPRGHKSKTAAQVCVDDSDVPDPASEPKCPDTSERLPEAEVTEPQEISEPPAGRHEREAQKVLDGEAEVADDSAMLEETETIYNARLTEHQVPAANETEHGECLANFDASIPLAMMDLNEVSIDDIFLSADTYEFGSDMCNPEPFSVGLNMEGTTTGQNSGFSCLEELDTPQNHLSSMGDGHCSLVPEAGPCTENNKEKADALETGASYFCDSSFHDIDINALPAKEPPSFGEDSPSPRAGAEMHPNECGLSSCSQDRGNSSLLIINKQAAHKECQYYFPNLCF

SEQ ID NO: 62532 - protein, 179 aa, Zea mays
  Coding DNA Sequence Number=SeqID_19157
MEVRCQTSFCQKEDGFPKLLRACTVFLGIRSQPEYDGREFVEHGAEKFKDTCQVIARKALRALCQIYEEEVADTPLRFFPPFQRDRPAWMARMRALEEQLLLEDDPTVVYLTAYLLTLDTQYDFLARHHRQMIARAEDAEKLNRKLHVDLTTAQARATALESREVIAVEALKQAKDEHV

SEQ ID NO: 62533 - protein, 134 aa, Zea mays
  Coding DNA Sequence Number=SeqID_19158
  Subcellular localization annotation: CTP_CleavageSite=64; ConfidenceScore=5.41e-01
MGRITRGPPCWTRPHGGMTSSQVFVRCRMERRVFLPVVLSPLDQRPRQRPRAKGGVFAFAPTISVGSKGHTTFICGLFSFDLGSDYLYKFPLRPLCKGEALKLFSVEKQLISSQNGDWFSLLLKCKSLFIRFLI

SEQ ID NO: 62534 - protein, 117 aa, Zea mays
  Coding DNA Sequence Number=SeqID_19159
  Subcellular localization annotation: CTP_CleavageSite=11; ConfidenceScore=5.18e-01
MAALPGARPSRARHGPGQRPCFAFPKQPRGWPCSRCRSYKYRVDLTLILTNHVMYRQTSMRNLVGCRAPAHRQPARTSPRRATTIIAWGFSCVVSFSERKSLDGEDSGVLGRCSPNV

SEQ ID NO: 62535 - protein, 389 aa, Zea mays
  Coding DNA Sequence Number=SeqID_19160
MEVVELVPCARNKWGNWHEFWFYVTEGTVEDHQGLPVSEMCSHLYSAYPPFEVAEDDADEGALRCATGLSSGRDLVEEFVAYGVWPLAHGWALGEVCPRQMPSHGGKLVRSPAFALDLHSRDPAAFVREAEDGAVRIVGRYVPRTEGQRSWDIRGSNDRLNRVFELNRLPYGGYPGQDDVDRRGKKPVVESGDDPAPAAAPSSKKRKLGTAMGGLGDSDGFARELMRTCAALGGRMSSPELRESSARMLRVTGGWWPKNVPIPRAAGEDFFTSRMVREWKVFPYGRNIAAVVSAVMDKDRQGAAQKRQHGSDEGQLVVVPPAAATTTAAVVPRAKGGALSAGGEMPALIAIRDEAGAVSRRLKEMKEALSQVADFADRAASGALTAVVR

SEQ ID NO: 62536 - protein, 138 aa, Zea mays
  Coding DNA Sequence Number=SeqID_19161
MGDVSPKSPNMKFRRVLADTLARLAIAFVVPPFPIESGFTVERRRPFIGEVHRRRGPEKVQFPTKGFTRYSRRSGSHSDGIRSKLVLQVVDVSSQLVYSLTILDPYIVPVTELRSKLFYLNFQISDRIIATTTTVLMP

SEQ ID NO: 62537 - protein, 36 aa, Zea mays
  Coding DNA Sequence Number=SeqID_19162
MAMMGSTSEKMYLCQDLVDVGLLIEDPLTGHMPRHR

SEQ ID NO: 62538 - protein, 62 aa, Zea mays
  Coding DNA Sequence Number=SeqID_19163
MAASVSRRACSMSEEKKMTKEKLTEKQKLTEEKKLYEEKKVADPFIAGFYESMAKMNIEKIT

SEQ ID NO: 62539 - protein, 828 aa, Zea mays
  Coding DNA Sequence Number=SeqID_19164
MEVVELVPCARNKWGNWHEFWFYVTEGTVEDHQGLPVSEMCSHLYSAYPPFEVAEDDADEGALRCAADLSSGRDLVEEFVAYGVWPLAHGWALGEVCPRQMPSHGGKLVRSPAFALDLHSRDPAAFVREAEDGAMRIVGRYVPRTEGQRSWDIRGSNDRLNRVFELNRLPYGGYPGQDDVDRRGKKPVVESGDDPAPAAAPSSKKRKLGTAMGGLGVSDGFARELMRTCAAPGGRMPKRQRGAAKAAAPGGGKPPLAAKSAVPASDKAPKAAAAAGGSKSAKAAPASSGVPEAAKAARELPPSGKRVADFATDISVDDYLVGSDEGQLVVVPPAAATTTAAVVPRAKGGALSAGGEMPALIAVRDEAGAAADFADRAVSGALTAVVSAEVERLRTQHADAVREKSAADSKCRKLADKVAALEGEKTDLRRQLAEERKEANEALVKAQAAQAEANLARVEGSLARERAEQLEERLRALQSRVERAEAATSTEAERTRKQLMDSYHELGARTADFEVPDREPGLRYLEWVQEELQALPTIVEGFMSYASLVTCEGAMNKLSREGCRHYEVFDQADEDFERDIYKVEDPIVKESAGALYDQMWGPYGREVVRERAETARGQAARGERVDDFGALNRVLSDPEPNPTEAVPEAALQPPPETAEGAPDAPAATAAGGGPSPTAARRAEDPVKVAAESTAEEPATAGSSQVQDFGPAHATATTNFLAASTVDDGNKSDGSPSKLSDFGDSGSSVEWTEESSDEDLDYFAALDVAAAEASPHAADAEVVPGPSTGRRRRRAVAKRRVSGADSGEELRIMLFNYMEMGIIPKVEPM

SEQ ID NO: 62540 - protein, 120 aa, Zea mays
  Coding DNA Sequence Number=SeqID_19165
MDNGWIDDDLMFELFAEHQTCNTSRLHSLLSQIHTDIDQGLGCRFNSVAPCMMRGRTASRAGRTPSVAGEQEKDSARELDALWRAEGHGRTRSREKLEGGDHGEHREGAGTAGLGDFMGG

SEQ ID NO: 62541 - protein, 100 aa, Zea mays
  Coding DNA Sequence Number=SeqID_19166
MERPRLGRAPGRAAMAGFLQKGRWRGDGWRGELGHQQDKEPNAIQFSFYRLALEDPGPVLDPVSYIRAEDEAIRQFKTQGAIADSSSDDPATASYATSLT

SEQ ID NO: 62542 - protein, 46 aa, Zea mays
  Coding DNA Sequence Number=SeqID_19167
MAMMGSTSEKMYLCQVRKRQIFASFVQRWCPKKRIKTEDSGGSVLH

SEQ ID NO: 62543 - protein, 93 aa, Zea mays
  Coding DNA Sequence Number=SeqID_19168
MAGEFERDARRPEKEEGYWRSRLVAFTVAALQRSPGMHDVIHSDMVKCFSTWRTTGRQTRLGATISPQPDHIYSWNSHELGSSRCREEISHRR

SEQ ID NO: 62544 - protein, 69 aa, Zea mays
  Coding DNA Sequence Number=SeqID_19169
MEQARLETEARKSSKSCHRDLRPQNEVVHDMKSMVWKKVEPVPKLRIEKLRLSGGKWNRLKEEKLSSPR

SEQ ID NO: 62545 - protein, 46 aa, Zea mays
  Coding DNA Sequence Number=SeqID_19170
MAMMGSTSEKMYLCQVRKRQIFADFVQRWCPKKRIKTEDSGGSVLH

SEQ ID NO: 62546 - protein, 256 aa, Zea mays
  Coding DNA Sequence Number=SeqID_19171
MGRTGGAPNGCSPRPSNGFFKDNPFEGLPFERICMKLFALCFGGQHCVIKILLQRSAYILSLAAEFAIRPYLARYLLHALHGCDRFEKYTDNSWASPPMGVGKGRLAASAMGKSNKRKREPTPPSEDFGDSEYSEEEFSSESEGSPAPVSPPASSDDSDDSQGIAAEVWTYIRAVERSGLEGSDESEFSSDEEDSDGGEDEDDDDDDGDDDDGGDDDGDGSNGGGGSGGKGGTRGGSSTGSTRGGGGKGSSSKASG

SEQ ID NO: 62547 - protein, 143 aa, Zea mays
  Coding DNA Sequence Number=SeqID_19172
  Gene Ontology: Mol. function=transporter activity; Cellular component= membrane; Biological process=oligopeptide transport
  Homolog annotation: Hit_ID=A2Z1M7; Match level="QueryCoverage=83%, HitCoverage=55%, E-value=6e-51, Identity=86%"; Hit description =Putative uncharacterized protein
MVGLLPETNAAAETDVLLDAWDFKGRPAPRATTGRWGAAAMILVAELNERLTTLGIAVNLVTYLTGTMHLGNAESANVVTNFMGTSFMLCLLGGFVADSFLGRYLTIAIFTAVQASKMLNPEKNRARAPNESKQFPIQSIIAQ

SEQ ID NO: 62548 - protein, 251 aa, Zea mays
  Coding DNA Sequence Number=SeqID_19173
MEEGAGVALGRGGGLRIAPDDDLERTSSGRVRPWLQHGRALRAGSEVGHTRSGEDKEARGPRPGEVEGDGHSRGRPGGFLGPASVAGAVASERRRWANAHARAGLGQRLGNARVAWGTQGRGCLGAPAAWAGQGRSRLRQEESEGEELGRGKGRGKGAGWAYAREWSGGVCSGRDPGGDPGCDGPSAVLTSSFDVEIFPPVSPSEAGPDSAEGGNNAEGSRYRSSRKSAKDILAERLFPEENFDAEGVPPF

SEQ ID NO: 62549 - protein, 457 aa, Zea mays
  Coding DNA Sequence Number=SeqID_19174
  Homolog annotation: Hit_ID=UPI0000D9EBCD; Match level="QueryCoverage =37%, HitCoverage=5%, E-value=1e-07, Identity=28%"; Hit description =PREDICTED: similar to SMC1 structural maintenance of chromosomes 1 -like 1
MDPLLGIFLEIRALPRSVRKQLVGLRSPNLESRTNRGARALHRHHLQIRYHHRRLCQADRRHRRGSGNNSSRGGSSSNNSNVCLASKATGRFTVPRFACHHRGNTFGFPSSSSVPQPTREAAVPPSAVADPLTAIPPDAPPEVGTGGASSSVPQPTLEGLEVILGRPLRSGAEPGAIQTPLPQVLIRAHQALQETEAAIRQEWKGLETEHQRLGDWCSQLERHTKAASCQFTSERAELEQEREDFKEDIRKVSDREEEVTRKERSLARNKKHLDQKEEAVTALHDRLKAYNAVLEKQRDKQATAEAKLQQELSDKASDIARVEGNLKAREASLAKRTTDLAWQEEDLAFREEMWARRNKLLDELELEAEEKVKRLEGKLRALEGQVLGTRLEAEGGRLCRSAIEYVLTCFRSHDPTVSLGPVIAGSVADTEDAAWEGVYDAVDVVVGRFQRDPVDDE

SEQ ID NO: 62550 - protein, 80 aa, Zea mays
  Coding DNA Sequence Number=SeqID_19175
  Gene Ontology: Mol. function=U6 snRNA binding; Cellular component =ribonucleoprotein complex; Biological process=mRNA metabolic process
  Homolog annotation: Hit_ID=A2YRB8; Match level="QueryCoverage=66%, HitCoverage=56%, E-value=3e-23, Identity=100%"; Hit description =Putative uncharacterized protein
  Pfam annotation: Domain name=LSM; Domain location=5-57; Score=44.7; E_ value=3.3e-10; Accession=PF01423.13; Description=LSM domain
MLFFSYFKELVGKEVTVELKNDLAIRGTLHSVDQYLNIKLENTRVVDQDKYPHMVCLLLCLIVMPAQNDRIHALQLNPIG

SEQ ID NO: 62551 - protein, 146 aa, Zea mays
  Coding DNA Sequence Number=SeqID_19176
  Gene Ontology: Cellular component=ribonucleoprotein complex; Biological process=mRNA metabolic process
  Homolog annotation: Hit_ID=A9PAF4; Match level="QueryCoverage=26%, HitCoverage=72%, E-value=1e-12, Identity=89%"; Hit description =Putative uncharacterized protein
MAYPAEAAPNPSTRDPARGREGGRVEMAYPAETTANPSTRDPARGRARETLARGAARANAPASELPRVGSLATERRPKWPYEPGLVERWVLQQARQAPTPTQVTKQVLSVRNCFIRGSVVRYVLLPQDGVDVDILHDATRREARGG

SEQ ID NO: 62552 - protein, 412 aa, Zea mays
  Coding DNA Sequence Number=SeqID_19177
  Gene Ontology: Mol. function=protein tyrosine/serine/threonine phosphatase activity; Cellular component=intracellular; Biological process=protein amino acid dephosphorylation
  Homolog annotation: Hit_ID=A2V7M8; Match level="QueryCoverage=87%, HitCoverage=47%, E-value=1e-166, Identity=81%"; Hit description=MAP kinase phosphatase
  Pfam annotation: Domain name=DSPc; Domain location=140-279; Score =124.4; E_value=3.4e-34; Accession=PF00782.11; Description=Dual specificity phosphatase, catalytic domain
  Subcellular localization annotation: CTP_CleavageSite=57; ConfidenceScore=5.11e-01
MATPDDGPAPAGPGVRKFWRSASWSEPREPLPDAAAGPGAAGGRSRRVPPPPPLTPRSMSSKARSCLPPLQPLAITRRSLDEWPRAGSDDVGEWPNPTTPGASKAGGGPSSARPGEGLRLDLSSLRSQGRKDQIAFFDKECSKVADHVYLGGDAVAKNRDILRKNGITHVLNCVGFVCPEYFKSDLVYRTLWLQDSPTEDITSILYDVFDYFEDVREQGGRVFVHCCQGVSRSTSLVIAYLMWREGQSFDDAFQFVKAARGIANPNMGFACQLLQCQKRVHAIPLSPNSVLRMYRMAPHSQYAPLHLVPKMLNDPSPAALDSRGAFIVHVLLSIYVWVGMKCDPVMEKDAKAAAFQVVRYEKVQGHIKVVREGGEIESSKSVNAVDWQQVTGDFLHRKGLSDALPIKDNGSY

SEQ ID NO: 62553 - protein, 282 aa, Zea mays
  Coding DNA Sequence Number=SeqID_19178
  Homolog annotation: Hit_ID=Q65XA8; Match level="QueryCoverage=47%, HitCoverage=48%, E-value=5e-12, Identity=45%"; Hit description =Putative uncharacterized protein OJ1654_B10.11-1
  Pfam annotation: Domain name=DUF1635; Domain location=36-233; Score= -65.3; E_value=0.00016; Accession=PF07795.2; Description=Protein of unknown function (DUF1635)
MAMELPLFLGDGPDAALFSSLWPSFLDDLQQPPQEQSVAELKQALLATTLELEAAREELRRKEQSIAKLAGLVREVARERDDARDQLQSLRLLAAQAAAAAPPLVTSSVTDSDGSLASSPADPFFDPVTSADRRCKLSPATPPRAAAQAGAAAPLPARSLRPRVGAGGRRRARDARQQAAPSAEGPPAGRRHGGGAPAAESARRRAATAVAQPAHGSRPGHDAAARRRHAGLHRLHEAAGGGGGHVRAARRQLPAGFHSQAAEAAALTAPGPLGSDGGIDRR

SEQ ID NO: 62554 - protein, 153 aa, Zea mays
  Coding DNA Sequence Number=SeqID_19179
  Homolog annotation: Hit_ID=A3BIK8; Match level="QueryCoverage=20%, HitCoverage=12%, E-value=4e-08, Identity=83%"; Hit description =Putative uncharacterized protein
MEAAHFEVQQRAKPGTRPIRLGFCLTHLAPPPRRDLAVEAMPLDDGAEAADFVLLDELLAALPRDPYEQLASTKRSSPLTMRRFMLMEIAQCRHMKGGQALGNSMQLESSLIESDLKGKGRCKDIVSRRRMEDWKKNSTHATRNTSYDSVGNG

SEQ ID NO: 62555 - protein, 53 aa, Zea mays
  Coding DNA Sequence Number=SeqID_19180
MRILLWPARGGALASCVGAPPTGCKGPWLGGGASASPRLKINIDRDLINMEHI

SEQ ID NO: 62556 - protein, 299 aa, Zea mays
  Coding DNA Sequence Number=SeqID_19181
MVRAPKDRPLPPGDLDTITEALGGLCLAASPRRGFICASTHLFPRLCLSLWRCLCLSLWLHVSGGAEVYKWIDYLLSSAQAFGLNWSTLSRGFLKTFREVLQLPFAIPQCGCLPVSASCVSSAFPPTLHRDQPHGRRRALLITVIGDNQMVDIPEISNVLAARFNLEVGALNLRRASSDAYILILPNESMALRVYNGGRSFITSTLRLHLRRWTRQSCVARGASLPILVDIEQLGVPEHVWSKELVELLLHDSCMIQRLHSDTKSSPDFSSFKLSVCLSNVWISSADGSSFLTTGFPFS

SEQ ID NO: 62557 - protein, 765 aa, Zea mays
  Coding DNA Sequence Number=SeqID_19182
  Gene Ontology: Mol. function=protein tyrosine/serine/threonine phosphatase activity; Cellular component=intracellular; Biological process=protein amino acid dephosphorylation
  Homolog annotation: Hit_ID=Q9ATY4; Match level="QueryCoverage=91%, HitCoverage=97%, E-value=0.0, Identity=82%"; Hit description=MAP kinase phosphatase
  Pfam annotation: Domain name=DSPc; Domain location=144-283; Score =121.4; E_value=2.7e-33; Accession=PF00782.11; Description=Dual specificity phosphatase, catalytic domain
MSSKARSCLQSLQLLAITRRSLDEWPKAGSDNVGEWPNPTTLDASKAGGGPSSARPGEGLRLDLSSLRSQGRKDQIAFFDKECSKVLCGDAVVKNRDILRKNDITHGAGWPRVCALLPGEGLRLDLSSLRSQGRKDQIAFFDKECSKVADHVYLGGDAVAKNRDILRKNGITHVLNCVGFVCPEYFKSDLVYRTLWLQDSPTEDITSILYDVFDYFEDVREQRGRVFVHCCQGVSRSTSLVIAYLMWREGQSFDDAFQFVKAARGIANPNMGFACQLLQCQKRVHVIPLSPNSVLRMYRMAPHSQYAPLHLVPKMLNDPSPAALDSRGAFIVHVLLSIYVWVGMKCDPVMEKDAKAAAFQVVRYEKVQGHIKVVREGLEPQEFWDAFSSTLPNSDTNTKISKDQIDSASKSNPGSRIIESYDADFELVYKAITGGVVPAFSTSGAGDETHLPARESSWSLLRHKFISRSLARVYSYSALIRDFDPRVDRVQHLAAEASTSPPFLSPSSFSSDSSASSKYNSDSPSLSPTTSSPPSFGLSPASSNLPQALVPSSRSPLSQSSNAGASKPSGLESIRHPSKTSSIAERRGGFTLLKLPSLQKDLVLPPRVPSSIRRTDEALDKSCTNGVKRPTGDFRSEKCTDNSSSLHSETRLTERTDSNSEACSNVQLLVYQWPSMEKLTTFARKDLDSNSVLIFVTSNAIRREAVKMVYVWVGGEIESSKSVNAVDWQQVTGDFLHRKGLSDALPIKVFKEHETENLLELLNFS

SEQ ID NO: 62558 - protein, 343 aa, Zea mays
  Coding DNA Sequence Number=SeqID_19183
  Gene Ontology: Mol. function=nutrient reservoir activity; Cellular component=protein body; Biological process=protein oligomerization
  Homolog annotation: Hit_ID=Q6Y4Q3; Match level="QueryCoverage=97%, HitCoverage=95%, E-value=1e-124, Identity=67%"; Hit description =Legumin-like protein
  Pfam annotation: Domain name=Cupin_1; Domain location=195-324; Score =63.1; E_value=9.5e-16; Accession=PF00190.13; Description=Cupin
  Pfam annotation: Domain name=Cupin_1; Domain location=6-161; Score =74.5; E_value=3.6e-19; Accession=PF00190.13; Description=Cupin
  Pfam module annotation: Pfam domain module=Cupin_1::Cupin_1; Domain location=195-324::6-161
MAAVDLTPRTPKKAYGGDGGAYYEWSPADLPMLAVASIGAAKLSLAAGGLSLPSYSDSAKVAYVLQGVGTCGLVLPEATKEKVVAVKEGDALALPFGAVTWWHNGPAAQADLTVLFLGDTSKGHKRGQFTNFQLTGSAGIFTGLSTEFVSRAWDLPEPDAARLVSSQPASGIVKLPASAAALPAPSPQDRAGVALNCLEAPLDVDIPGGGRVVVLNTANLPLVREVGLGADLVTYIVRGSGRVQVVGPDGRRVLETRIEGGSLFIVPRFHVVSKIADASGMEWFSIITTPNPVFSHLAGKTSVWKAISPEVLQASFNTTPEMEKLFRSKRLDSEIFFAPPSSN

SEQ ID NO: 62559 - protein, 185 aa, Zea mays
  Coding DNA Sequence Number=SeqID_19184
  Homolog annotation: Hit_ID=A2XAC7; Match level="QueryCoverage=63%, HitCoverage=15%, E-value=3e-31, Identity=81%"; Hit description =Putative uncharacterized protein
  Pfam annotation: Domain name=WD40; Domain location=129-167; Score =16.8; E_value=0.082; Accession=PF00400.23; Description=WD domain, G -beta repeat
  Pfam annotation: Domain name=WD40; Domain location=32-127; Score=1.0; E_value=24; Accession=PF00400.23; Description=WD domain, G-beta repeat
  Pfam module annotation: Pfam domain module=WD40::WD40; Domain location=129-167::32-127
MAEEQIEEASMAAAAVTPFQLQFDKPIPFQNGKMLRTTKSHDVAIVSLNWAEDSPLSKSDKDEFLSYEDRTTRFFSPPVMPRIGGLRSGDTGLADENEEAIPEFSNASCQRFNIVCSGGKDGCVCFSIFGIFPVGKIARKCITSICWSPDGKIIALGTEDGLILLHDVEILKTSLFHDKLLILFS

SEQ ID NO: 62560 - protein, 28 aa, Zea mays
  Coding DNA Sequence Number=SeqID_19185
MARRRRLPLSMAQIALVLAELGHDYTGA

SEQ ID NO: 62561 - protein, 182 aa, Zea mays
  Coding DNA Sequence Number=SeqID_19186
MHVVGDFLKRRIAPLQQRRRPGTDLSWEELEVLVKGITGESIVPESLILPEGIPALCDDVGLRTVILAMLPTLDERGLAAVPGCRRRRGDVGCAAPTDRLFRIPPVETEEAGSQKLQRTTGGAEETGSQTQGAQRRVSPPPPQPSGPPPPQPPPLSGSPPPPPPGGDLPQGHQQQQQQQQQQ

SEQ ID NO: 62562 - protein, 246 aa, Zea mays
  Coding DNA Sequence Number=SeqID_19187
MLEEQRVHQTEAVESLQRLQRGLDDRASSLALAEENLKAKDASLDKRVADLAWQEKDLAFREEMFERREKLLADHELEAKERALEEQVRQLEAAQAAQAASGPQAVEAMKKTLEDLQAEQRAGVQRIAAWAGEASMTLVPLGVSPIPVSQPPTSISDALSVLDSAADRLRRLDQILGSRLEAKSDRLCRAVVEYNLTCFRSHDPAISLEPVIAGPVADTEDAAQEGIKDAMELVAEHFQRDPADDE

SEQ ID NO: 62563 - protein, 93 aa, Zea mays
  Coding DNA Sequence Number=SeqID_19188
MQSLQRKVNADSAKSKGEEAPKSFLRECRAYSEKSTLIPPKVKGEEAPKSFLRECRAKPAFRKAAAVPREATQAQKSPCPAITSSSSSISPSI

SEQ ID NO: 62564 - protein, 121 aa, Zea mays
  Coding DNA Sequence Number=SeqID_19189
MTCDVFEKRTFFSLGFLLALRMVNVSLLFMILMFQMGSLMLGAGRGRPERGHLASAYSTGSGRLDTGIVPKALPCGPDYKLVTKFADEDMMLSSMDASLVIPPVIFLWMDVHVRCTLMNKG

SEQ ID NO: 62565 - protein, 109 aa, Zea mays
  Coding DNA Sequence Number=SeqID_19190
MASVLDVVKETIRALTPTPVMKVAETATAQGETEAGPSAPAEAKPAATEQRAKQEFPDTSVALEKDVAEKAKSPAPEAPSEDLDFIIRHALEKNYLKKKLQKPNTMPGN

SEQ ID NO: 62566 - protein, 133 aa, Zea mays
  Coding DNA Sequence Number=SeqID_19191
MSRLATAGHQGLGGWFRRVQGDLADSAEGTTPAREHQRALHMGEEEVVGNNEGEHVSQCDNEEHVPDGSRNIDAEHQSELQMTLVGNVDSEGVLDGDVRKRLEFVVDGISSMEENRVKLASLADRKRGRPPGS

SEQ ID NO: 62567 - protein, 174 aa, Zea mays
  Coding DNA Sequence Number=SeqID_19192
  Gene Ontology: Mol. function=cysteine-type peptidase activity; Biological process=proteolysis
  Homolog annotation: Hit_ID=Q5NKQ2; Match level="QueryCoverage=93%, HitCoverage=19%, E-value=4e-52, Identity=59%"; Hit description =Putative uncharacterized protein 9C20.3a
MPSVDDNDDFEPPKKCNIKMDTPNKTRRLNIRCNPGDVLASIQIMNERQHQAIVRKGFSSILDMTIDAIGCRTHLCWLMQKLDPRDMTLRIGPDKELKITKETIHLILGLPNSGGGKPLNIDEANVAANLRSSMGISKDEFVISKLQDRLRLGNDDELSIRYFYPLQSAAFPNG

SEQ ID NO: 62568 - protein, 277 aa, Zea mays
  Coding DNA Sequence Number=SeqID_19193
MGDSDFCARRGRIKCAAESRWRGDDRCFGVAPDSPVYTGQSAGEFLSPTSLGAPDTVRCTPDSPVNYSRVALEIPEGGEFESESPGAPDRKQYKLADTFGELIDKVLRAESYSSDIEDNVTQPCNAIVPDVHNPCTMVLPRNPLHPFLIARPPHHSRSRLPPPRCQSRNPCLPHRALPSIAVAAISKSARRKMGVWEGYLARWGQRDESETGSNGERRKGRGGPVEAGQGELIGDGVRGILHGLMGQWLHGDGLGQPHGGRDAARRWLLAADLRWKS

SEQ ID NO: 62569 - protein, 135 aa, Zea mays
  Coding DNA Sequence Number=SeqID_19194
MEARVEVEATEPAAEEPDLAVGQHGDHEAPCGEQGDLRQDPRDGERLGAVREEGLRKMRSMQEPSHSAHARNVITGSDGSSVSGTTSATSSTAHRSPFPSPVPARSSAATSDFRDAIVPVPSLLPPTEWTIPATR

SEQ ID NO: 62570 - protein, 109 aa, Zea mays
  Coding DNA Sequence Number=SeqID_19195
  Homolog annotation: Hit_ID=Q8LK06; Match level="QueryCoverage=38%, HitCoverage=11%, E-value=3e-08, Identity=72%"; Hit description =Methyl binding domain protein MBD109
MKAYYKQTLSFAGALLIVLTTQMRMGPPTSAVHPQHAMEDATVDIGGSATTADYEIELSCPHAQASGMATGEEHVAASAIEDTSEKKQASTTELPAPSGVTKKVPVCSG

SEQ ID NO: 62571 - protein, 104 aa, Zea mays
  Coding DNA Sequence Number=SeqID_19196
MEHLRFNHDHSSPDQRPGPFLTRTILFTLERGCGILPVMVGPPASGGCCEADEAEVPDLSASRDNSDLAEDDPCDPTTTSKPEAPMQSLNQLPVVTDLAVARLA

SEQ ID NO: 62572 - protein, 361 aa, Zea mays
  Coding DNA Sequence Number=SeqID_19197
  Subcellular localization annotation: CTP_CleavageSite=9; ConfidenceScore=5.53e-01
MSSRSLMHRAFPPSKPPDGGYPPSFRLVVGGTQLRGSWYLSAIVRLQGFSSVSPAAPLRRWSPETVTTSPWVGRSKPGYDLGPTLSFKDVHHPRWGGGRAEPELYLPRGFVGRPLLRHSRERALTGPAGGSDFDNAGLVDGGRRQPQRVELVGLAPGAPSCRKAVAAPCAREDRPRYRALSGRRSCSGAVLPLHRYGASTRRSESLGSVSLVVRGFSCLVKGTPRPLFDEPKPGVEVSARTEAELARKENQVGRSLAGSSVSGTDAGVDLPRPWAGLMSSGDSWPRPRGDQPSRLLEPDFWRKPRRRWPGLGDDVVLWSGDPQTASPFEARSDLAEGVADAEGAAAPFNRQDPSLQDRIIL

SEQ ID NO: 62573 - protein, 188 aa, Zea mays
  Coding DNA Sequence Number=SeqID_19198
MKGNDDAVAHSAKANDNDMDSAGRGRIRAELQIDGHQIDIRTRRQRNTTTKQRRTDNDGLGRVRRLTAGNSVMGSEARRLGKRLSKLNHQGARVHGSSMARESGTAAMATAVGSTARAPAPAASQTPPVRGRSKSAADCATAARPSGHGGARGMGERAREQEERPSWATATMGMSLRKRGRAARLLLS

SEQ ID NO: 62574 - protein, 141 aa, Zea mays
  Coding DNA Sequence Number=SeqID_19199
MTSHGSSDDGNALTHTDGLAREGFPRILWEVLQGAGYATPPQYAVQQFEKHRVPRCRLATHPIGLFPAEREDDPMWKDRVEHAKDNWAIYPGQTAHLTVWCMNALYRLQVMRGEAMSHLMALLEATKITLDNREELVVDLS

SEQ ID NO: 62575 - protein, 77 aa, Zea mays
  Coding DNA Sequence Number=SeqID_19200
MCALGLNVKTQATTTKTRKHTNHNADYERKCEAQKGAGIRSNLNFMRFCGLSILLHGPESLAQVEGVAPGLEKVLLV

SEQ ID NO: 62576 - protein, 188 aa, Zea mays
  Coding DNA Sequence Number=SeqID_19201
  Subcellular localization annotation: CTP_CleavageSite=79; ConfidenceScore=5.49e-01
MTRARAYKTLPVFDCTLPRTLKPHRSPARRHLPVRSVSAAAQSLCHRRPASRAIPNSVQPSEKTVHTSVKLPERGIGVCFAGEASPRSLELSTPPEYVDRVNHSTILRFLVHTVATLPREAHRVLGLNQFAVVWPDKKNRKYCNLADGEYILVPEQGAAQEVAPDPAPEPAPEDLPATALEGKPRFYA

SEQ ID NO: 62577 - protein, 576 aa, Zea mays
  Coding DNA Sequence Number=SeqID_19202
  Gene Ontology: Mol. function=asparagine-tRNA ligase activity; Cellular component=cytoplasm; Biological process=tRNA aminoacylation for protein translation
  Homolog annotation: Hit_ID=A2ZT90; Match level="QueryCoverage=97%, HitCoverage=97%, E-value=0.0, Identity=79%"; Hit description =Putative uncharacterized protein
  Pfam annotation: Domain name=WHEP-TRS; Domain location=245-299; Score= -2.9; E_value=0.032; Accession=PF00458.11; Description=WHEP-TRS domain
  Pfam annotation: Domain name=tRNA-synt_2; Domain location=157-572; Score=191.5; E_value=2e-54; Accession=PF00152.11; Description=tRNA synthetases class II (D, K and N)
  Pfam annotation: Domain name=tRNA_anti; Domain location=43-122; Score= 55.0; E_value=2.6e-13; Accession=PF01336.16; Description=OB-fold nucleic acid binding domain
  Pfam module annotation: Pfam domain module=WHEP-TRS::tRNA-synt _2::tRNA_anti; Domain location=245-299::157-572::43-122
MAADAAAAAMSATSLCDDLEPATVRTRIRDVLAAGAARAGDRVVVGGWVRTGREQGKGSFAFLELSDGSCAATLQAIVDAAVHPLARLTATGTSVLVEGVIKEPPEGTKQNVELKVSRVLEVGEVDAAVYPLPKGKVKLTLEKLRDVVHLRSRTNTLNHNDFELKILYIIRIGAVARIRHQLAYASHRFFDENGFLYVHTPIITTSDCEGAGEMFQVTTLFSQAEKTEKELRENPKPSDSEIEAAKVLVKEKGDVVAQLKAAKASKQEISTAVDELNRAKEIVSKLEERFKLKPGIPRKDDGSIAFENDFFKRQAFLTVSGQLQVETYACALSSVYTFGPTFRAENSHTSRHLAEFWMVEPEIAFANLQDDMNCAEKYVQYLCKWLLDHCQEDMEFMVKNYDKSAIERLELVSSTPFVRISYTKAVELLKNVTDKKFDNKVEWGIDLASEHERYLTEDIFKKPVIVYNYPKGIKAFYMRLNDDDKTVAAMDVLVPKVGELIGGSQREERLDVLKQRILDAGLPLEPYEWYLDLRRFGSVKHSGFGLGFERMILFATGMENIRDVIPFPRYPGRADL

SEQ ID NO: 62578 - protein, 161 aa, Zea mays
  Coding DNA Sequence Number=SeqID_19203
MERTNIEKITDEMLVRRKKTLDKLTDQPGNLIPLDIAEVPDLSASRDNSDLAEDDPCDLTTTSKPEAPMQSLNQLPVVTLLMRDRPDHEDRFLPESLAQVEGVAPGLEKMVPRLEKDSRVSMLGPLDGIQIPPSKVRAAMRSWDRGNPGMSKGLVLTRVRV

SEQ ID NO: 62579 - protein, 307 aa, Zea mays
  Coding DNA Sequence Number=SeqID_19204
MGVRTRPSKNTTAPSTAYDVLYDPPGGVGAVRPAAQGTPWMRQTYARRDRRPYGGWTAASHLAAGGSIGGDTKTIKAKEMEPQHGSLPTLKIGGLIGWSRTTARCPPSRGWLKQDTSGRGWGPSPSNSCAKRDGIGRANPLGSLETSNTNSSAESLGVLDMKLQGHGKLWRHKAETLKAKGHRELRGERTPQVGKKQDMAATRRVDPFLKADFPARAPKHHEQGLPQCAPGFPSYDMGARPHMSYKLARSTKKANRRTRSVQLPCGYTPFHLRRNQRSRRQTAAQGVCNRPAVVRPLGFSANQWSNL

SEQ ID NO: 62580 - protein, 190 aa, Zea mays
  Coding DNA Sequence Number=SeqID_19205
  Gene Ontology: Mol. function=cysteine-type peptidase activity; Biological process=proteolysis
  Homolog annotation: Hit_ID=Q5NKP7; Match level="QueryCoverage=54%, HitCoverage=12%, E-value=1e-21, Identity=46%"; Hit description =Putative uncharacterized protein 9C20.3c
MDLKGSHNCYNDKKKVEEKEQISVVILQMKHTNKKLGHTVPGGIVHPHSGPVFDKTPIGNVSASGIFLSKIEYAHTLRTYLCSKVMDMDRHIIDFGEHRGNCRDIQQSFADGACIDNVFMQCFIECLYDDASNHIPPMNAHQLILDVNVGIMHYDYKDGAINAVIDPDNSEDIRSLVLHYMIFHHLNKNS

SEQ ID NO: 62581 - protein, 72 aa, Zea mays
  Coding DNA Sequence Number=SeqID_19206
MTQLLERGVAGCFHLQIPDEHQLFEVEILLADQPFVIPYPDPVSHAYPVCDRNKIASEIMRVCRPTNINRNS

SEQ ID NO: 62582 - protein, 71 aa, Zea mays
  Coding DNA Sequence Number=SeqID_19207
  Gene Ontology: Mol. function=aminoacyl-tRNA ligase activity; Cellular component=cytoplasm; Biological process=tRNA aminoacylation for protein translation
  Homolog annotation: Hit_ID=A2ZT90; Match level="QueryCoverage=74%, HitCoverage=9%, E-value=2e-23, Identity=96%"; Hit description =Putative uncharacterized protein
MTNLLGRILDAGLPLEPYEWYLDLRRFGSVKHSGFGLGFERMILFATGMENIRDVIPFPSSKKFYAQIMGK

SEQ ID NO: 62583 - protein, 110 aa, Zea mays
  Coding DNA Sequence Number=SeqID_19208
MTCDVFEKRTFFSLGFLLALRMVNVSLLFMILMFQMGSLMLGAGRGRPERGHLASAYSTGSGRLDTGIVPKALPCGPDYKLVTHLRNEDSREKPRSETLAIHLGSEYGSS

SEQ ID NO: 62584 - protein, 65 aa, Zea mays
  Coding DNA Sequence Number=SeqID_19209
MRLSMDMNEHEHDEQGGEYGRYGGVKSRTEDFGWRRKEQDIPGCEGGAQDGERRRPTAAELPPKS

SEQ ID NO: 62585 - protein, 77 aa, Zea mays
  Coding DNA Sequence Number=SeqID_19210
MGKPVPSLLMLLLSRGGVPLDSPTRWQDGWPSHSSNHFLQRTCSLEEMVAGVTWPSILPPGWTVEWDPASAEEEHEE

SEQ ID NO: 62586 - protein, 82 aa, Zea mays
  Coding DNA Sequence Number=SeqID_19211
TRAHRLGIQCLTDPDCRRAVTALVPTITGMGDHVSGRVREPNSCMSRGSLEEMVAGVTWPSILPPGWTVEWDPASAEEEHEE

SEQ ID NO: 62587 - protein, 250 aa, Zea mays
  Coding DNA Sequence Number=SeqID_19212
  Subcellular localization annotation: CTP_CleavageSite=35; ConfidenceScore=5.53e-01
MARARAYKALPGFDCTLPRTLKPHRSSVRRRLPVRSASAAAQSLCHRRPANRAIPNPIQPSEKTVHTSVKLPKRGIEACFAGEASPRSPELSTPPEYVDRVIHSTIFRFLVHTVTTLPREAHRAIGLNQIAVVWPVHSPPTRTPACARGPSDSGHPRRQAAPRCDRQNLPEPTLPFAGPSSPPVSRATLFFPAGTVYIGGRTADCNLADGEYILVPEQGAAQEVAPDPAPEPAPEDLPATALEGKPRFYA

SEQ ID NO: 62588 - protein, 124 aa, Zea mays
  Coding DNA Sequence Number=SeqID_19213
  Subcellular localization annotation: CTP_CleavageSite=78; ConfidenceScore=5.58e-01
MPTHYRPRACPWSRRQTLTPDPTLGLARPMSRLLVPVQTPMGGSRTSMYFVRTPAQESRTSSFDIRTPTCVTQVFRPACALGSHSSLEQGSDATTWHVGVWRKPSARRKLAARVQCERPRHTLL

SEQ ID NO: 62589 - protein, 304 aa, Zea mays
  Coding DNA Sequence Number=SeqID_19214
  Gene Ontology: Mol. function=ARF GTPase activator activity; Biological process=regulation of ARF GTPase activity
  Homolog annotation: Hit_ID=Q10N88; Match level="QueryCoverage=43%, HitCoverage=29%, E-value=2e-50, Identity=77%"; Hit description=ARF GAP-like zinc finger-containing protein ZIGA2, putative, expressed
MDTYPEQPQIGSKSADLHMRPHSVVFCLRSPHPRHRRRDSRDPHPRAWKSSCAPPAQPARNSAPSPSNPTPSPPSAPPSRGSPYNNGHHQRTRISAPPSSPRRRWKGTRVRRGLGLRAGPRVHLRHPLALLPAVRSLEPDGSGAPAPARKPPLHASGGGGGWDDWDDDFWPDMRRNQSVGSFAATGAQSGRQPPRSKSTQDIYTRQQLEASVANKDDFFARRMAENESNPEGIPPSQGGKYVGFGSSPAPSANRNGGAAQGDVLQVVSQIFKVCLRKSPVAKDVDLNALAKYTQGFNGADISTW

SEQ ID NO: 62590 - protein, 325 aa, Zea mays
  Coding DNA Sequence Number=SeqID_19215
MAFTSLVTCEAAMNALSREGCRHFEALDQVDEDFGRDIFEVEDPVVKESGGALYDRMWGSYGREVVRARAEAARAQAERGERVDDFGALNSAPPEPETTRAEAATGVASVTAEDAPGALVPAAAGEGLLPRVAEGASDAPAAAVPGAEDPAETTAEAAAEAPAAAGPSQVQDFGPAHATATTGFLAASTAEGGNECGGSVSEFFDFTDSGSSAEWTEESSEEDLDYFAALDEAAAEAALHAADAPGVPGPSTGHRRRRAVAKRRISAEEGARLRVSRVGRQELLSLPAVSGVGEGELRSLFAGEELRIMLFNYREMGIIPKVEPM

SEQ ID NO: 62591 - protein, 126 aa, Zea mays
  Coding DNA Sequence Number=SeqID_19216
MDPGPHMLCIRFCPQNRMVRTIQTTRINTNYIPPPRQVPVYPVVIEEISVDLPRIRVENGVILEDISEEFLPTHTPLADSLAFAAGSSTSAPPAPAVPALAPGGNDPDDSGDDDEDEEEEEEEEEE

SEQ ID NO: 62592 - protein, 234 aa, Zea mays
  Coding DNA Sequence Number=SeqID_19217
MFIIRAGEEGTPSWVPPPRGQRPAPSLSVRGEKGVRRPWHCQLPCVWLPSLSGAGAASGAASYRWGRAWLPVRRAGVGCDVRGPARSRSFSCRWLHREVAQHSVRHEGGVRVLGQSRPCSCGEEGSEDLPVRTGAATVRRCGVGGQVVAVVGAEVVVAIGEASPAEAVASADETVSATYAPDLRLFGFNGWFSSLPPEAEVVVTAGAVVAGEPPGVCYPACLLVWRLFFVAAEA

SEQ ID NO: 62593 - protein, 166 aa, Zea mays
  Coding DNA Sequence Number=SeqID_19218
MALFSQSQLCLGAPDCPVRHTGSGELAALGKKLTAYGYNSPDCPGPWYFLLAFFTNRSLGYYFTESLRMQKTPWGNPKSISRSFPYWNSTRGGGKGGGAYRRWDSSDEASREVGEVTAVTSRYGSASEVVEVGRSTCVGGGVRRRRVLRPAHGKIIQLVGSGGLTK

SEQ ID NO: 62594 - protein, 272 aa, Zea mays
  Coding DNA Sequence Number=SeqID_19219
  Gene Ontology: Mol. function=carboxyl- or carbamoyltransferase activity; Cellular component=ornithine carbamoyltransferase complex; Biological process=amino acid metabolic process
  Homolog annotation: Hit_ID=Q8SA97; Match level="QueryCoverage=69%, HitCoverage=23%, E-value=8e-21, Identity=40%"; Hit description =Ornithine carbamoyltransferase
MALPFDVAGLRPRSGDVEAPPKPRSSLSSMAEAEPEPLGRARRRSFGRGQGGVRALGSGEADLSPSPGSGGAEFAVFRGLARVRALGRAERSSPSSGAYPESEPWVGRSGVRRLPGLSPSPSPGSGGAEFHMAPLAGPDCLSVSFCQVALQSEWRRRRCPSVRPVIGAAKPLQLYADGGYELRIRRLEGSRAVAVSASGWTATSAADSTNSSEQGVDGEAPAEGEVPGCSDNDTDFLPTGCSDGTTAATAEKTVSGIAGAGSGDDAGAGDLG

SEQ ID NO: 62595 - protein, 97 aa, Zea mays
  Coding DNA Sequence Number=SeqID_19220
MAGARLRCGPVGKARRIRLGTARRTASKTHDTVAARDRGRGEKMAGEKKRWPAINGFNVGDDFLHERREELGSEKRKRAFISVFPYCREAEQHGRGR

SEQ ID NO: 62596 - protein, 59 aa, Zea mays
  Coding DNA Sequence Number=SeqID_19221
MEGESRPKIRPKGVVDGQQLRWKAKKAPFRGVMPSVIYHSGRARILTLCQTLGPRDSLR

SEQ ID NO: 62597 - protein, 42 aa, Zea mays
  Coding DNA Sequence Number=SeqID_19222
MAEALVAMAGEKELAGAKERCLAGGGFELGIKVNTLDLWLKV

SEQ ID NO: 62598 - protein, 32 aa, Zea mays
  Coding DNA Sequence Number=SeqID_19223
MTKIRTILNYKGTFGLEDKKVQVWCKSEYQSA

SEQ ID NO: 62599 - protein, 256 aa, Zea mays
  Coding DNA Sequence Number=SeqID_19224
MAGIFLKIAGSLLQNGPAEGVRFTLGRPIKYRMSGLDLGFIEPINGHSPSCPLAIPSSTAVAAAPPNTAWHADEEKHQPPQCPNPYESGSKSEWRRRTIDEADPHMGCAVVLVGRDKGVLAQAQSTLARVPACPTPRPSQTRAVARARAYKALLGFDYTLPRTLHTSPELARRRLPVRSESTAAQPLCHHRPASRAIPNPVLPSEKLVHTSVRLPEQGIGVSFAGEASPRSPELSTPPEYVDRSQRDPVMLTVPLD

SEQ ID NO: 62600 - protein, 236 aa, Zea mays
  Coding DNA Sequence Number=SeqID_19225
  Homolog annotation: Hit_ID=Q8LN48; Match level="QueryCoverage=97%, HitCoverage=95%, E-value=8e-13, Identity=32%"; Hit description =Putative uncharacterized protein P0031G09.3
MVKNVSRAAWNTVYEKGLVDVLLEYKDNPKFKSQNGWTVEGWNNITNKFNERRYFYSSSLFLGSVATGDLNFTSTQQMPPPSFIPVRPLAAPPSGPLAAPPGGPLATASASATTHSNRSTSKQSHSPLHPHTNPFSMEWQEISIEAQSKHVEGGNGRKRKQSQIGAAIESFVDFKRSATSKTLEGIEEVSMEKCLDKLDRIDGFTDEDRSYAMEVFESAINREVFMKSKNHNARLL

SEQ ID NO: 62601 - protein, 177 aa, Zea mays
  Coding DNA Sequence Number=SeqID_19226
  Gene Ontology: Mol. function=dihydroneopterin aldolase activity; Biological process=folic acid and derivative metabolic process
  Homolog annotation: Hit_ID=Q653D9; Match level="QueryCoverage=46%, HitCoverage=35%, E-value=3e-20, Identity=63%"; Hit description =Putative dihydroneopterin aldolase
  Pfam annotation: Domain name=FolB; Domain location=16-139; Score =24.5; E_value=7.7e-05; Accession=PF02152.9; Description =Dihydroneopterin aldolase
MAEKEAAATWGGGDKLILRGLQFHGFHGVLQEEKTLGQKFVVDIDAWMDLAAAGESDCIADTVSYMATPISTDIKTLERQLMQSMETCTAKKKKIILSQMEMERIQGSDEFYLEDIKNLEVGVHALEELSKQLFLEIYELRQTKDSGSHQVTPPPHNDFADKCLNYSGGATNNNPMS

SEQ ID NO: 62602 - protein, 115 aa, Zea mays
  Coding DNA Sequence Number=SeqID_19227
MSMAGMDPPIGTSSVAATPPDAGADAAGPRLGHEKPLALSRLQLEADRRYHSQQIPTAESRTHRSPLDGGGGGGTDGGGGGGGPDGGGGGRTTGLTRLCAPWAWEPASSAPPAVL

SEQ ID NO: 62603 - protein, 149 aa, Zea mays
  Coding DNA Sequence Number=SeqID_19228
MEVVFGRRLRSGAEEEAAPIPLPLMLSRAHQVLSDNGVAILREWEALEAEHPRLSDWHTQLEERTRTASRQFISERSQLEWDRKEYNKDLHKVYARELEAHRREKKVARREEAVSQLEALATEFRAKLSALDQTLEEQLVEQTKAVERL

SEQ ID NO: 62604 - protein, 249 aa, Zea mays
  Coding DNA Sequence Number=SeqID_19229
MTSHGSSDEGNAQSHTDGLAREGFPRILWEVLQGAGYTTPPQAEDTIEVIALHGLTTFCGFHPLELSTHPIGLFPAEKEDDPMWKDRVEHAKDIWAIYPGQTAHLTVRCMNAMYRLQVMRGEAMSHLMALLEATKITLDNRKELVVDLSTEMVEKDLQVEQMSNEIQELEELVGTRENTIEVLGDQLINTQQQLVEANQHLDMHHQEIQDMEDNEDVDIEGGEEPASSLDTAGSGRPPSPESSIASFAH

SEQ ID NO: 62605 - protein, 53 aa, Zea mays
  Coding DNA Sequence Number=SeqID_19230
MGTVDMCEDGVPRHVVCLGSLEDMVAGVTWPSILPPGWTVEWDPTSAEEEHEE

SEQ ID NO: 62606 - protein, 126 aa, Zea mays
  Coding DNA Sequence Number=SeqID_19231
MFWGEDQGLRDEGFPGNPSHQDHQLVPGQEVVGPDVVLGLPRLDQHKEVVKEGSAGSHPYEHLAEVDEDGRLEDGVGREMLKLKPKLLQQQQEEGRDWQRQPAGDVGGEQHKLPNVGSGTSEDSSG

SEQ ID NO: 62607 - protein, 171 aa, Zea mays
  Coding DNA Sequence Number=SeqID_19232
MAYWIARSRRGDGRPKSGEVDLGPPVKFCWVCELGKLHGLLAELTEWLAQPGSDRGRLATVAEARKAWRAVVLRTRGEVRRSLARAGLVSMRGGMSEARGCFIGTARCTSDRGLASARGRALGSTGARTGMNRGCQPRSNTWNRCFCPSPNADWAQIFVNLGKIAVKDLFP

SEQ ID NO: 62608 - protein, 205 aa, Zea mays
  Coding DNA Sequence Number=SeqID_19233
  Subcellular localization annotation: CTP_CleavageSite=30; ConfidenceScore=5.13e-01
MVGTSAVTARRQPGSVEHYTASAFGKPNPSAKQLHSLEVRFRIWLMMNSPTPASGGDTRFSSDFLSHDGFPSILWEVLNSTGYPTPPLYTVLLYEEHQVPHCRVWLTLEAHPLQPGWRSLDSETIGFRTDDTTEVVAMKTLTTFCGYHPLEMVMHPLGLFPAEKKDDPMWCNRVSHVKDVWAMYPDLVGRVTVQCMSALYRLQAL

SEQ ID NO: 62609 - protein, 166 aa, Zea mays
  Coding DNA Sequence Number=SeqID_19234
MTLEPHPLQPGWRSLDSESFGFRAEDTIESTALHVLTTYCGFHPLELSTHPIGLLLAEKEDDPMWKDRVEHATDVWALYPGYTAQLMVRCMNALYRMQALRGEAMSQLMGLVESTKITLDNMEDLVVDLSTELVEKDLQVEQMATQIQELEDQVDARENTIEVLED

SEQ ID NO: 62610 - protein, 164 aa, Zea mays
  Coding DNA Sequence Number=SeqID_19235
  Homolog annotation: Hit_ID=Q8S474; Match level="QueryCoverage=60%, HitCoverage=10%, E-value=8e-07, Identity=36%"; Hit description =Putative pol protein
MKAKSHQQPIILRSTCKNGATSKAEYTNTQLDLLGQHGSSSLISCEKQTIRIEFLNLARCQGSHLANKKTKYGVQQREQGTTEGTSRLGHQTVRCTRGLQLKLATFRNFQGHSAIIHQTVWCTPDSVRCSKEERPQKLASFGKLQRLLRYNSQDMSGVHRTVQV

SEQ ID NO: 62611 - protein, 85 aa, Zea mays
  Coding DNA Sequence Number=SeqID_19236
MESRDMAQSTRDRGAGRSDGRWEELRRAGEERCRAAAVGRKGSQPWSREGRRLPAGRGVGDAGQRRAAGSVEAPWEKELSSLLQP

SEQ ID NO: 62612 - protein, 352 aa, Zea mays
  Coding DNA Sequence Number=SeqID_19237
MGRVWRSLPAETAAAAPARTAGDDGARQAMHGHGESRMRRIGHGEWHSGEGIAGATVRGSGDTAGHALAQVDRDAAGKPRWLATPASHGPPRRVSHCRGRATPREGEGEEMGMERGMIGDHHGHTETNGMGSTRPPADDGFGREEDDVGEVAATRVVGKKGRQRWASGQQRRATAGTRTGWRGRAGQAGHERGCGRGIRACVHAHMQRRGGGARWLGARSGLGQRGRAGLPRGWAAKVGRGGLENANRTGARGKGSEKRCHMISIRYDIEAMNIRVITKQSTTKDAIRIIQDLRSGKEHETTKGVIGKTTPLNLKWEREGSKMQVQDKHQGKDRRMTRMKVITEKHTTMDVF

SEQ ID NO: 62613 - protein, 206 aa, Zea mays
  Coding DNA Sequence Number=SeqID_19238
MTLEPHPLQPGWRSLDSKSFGYRVEDTIEAIALHGLTTFCGFHPLELSTHPVGLFPTEKEDDPMWKDRVEHAKDIWALYPWQTAHLMATKITLDNRDELVVDLSTEMVEKDLQVEHMSNEIQELEELVGTRENTIEVLEDQLINTQQQLAEANQHLDMHHQEIQDMQANEDVDIEGGEEPEPASSLDTAGSGRPPSPESSVASFAH

SEQ ID NO: 62614 - protein, 220 aa, Zea mays
  Coding DNA Sequence Number=SeqID_19239
  Subcellular localization annotation: CTP_CleavageSite=46; ConfidenceScore=5.47e-01
MIKAARLTGGSRAPVGWSVTSGRSQRSRRVMNSGERDLTVPVGLVLGSSLGKLHGLPRKLSAGLDRVEVGGNGLATAGALERLWRLRGELTLGAMDVLMIRYLGEDQQGLGKGQGVEQEQQGRPQQEGDQVRVGWISLRGEVIRVSLVITNGAVGRWSCMRAGFIATRGHDTGVGTGAAEGARGRACKRALGAFPSAYPHRTRGGLLLSVFTGLFGRLSV

SEQ ID NO: 62615 - protein, 63 aa, Zea mays
  Coding DNA Sequence Number=SeqID_19240
MGDPVSGQVRGKVRARLHSGLAFKCWGYGEILCGRLESWLLVFFVDSSLLGNEHVLSVSEVAI

SEQ ID NO: 62616 - protein, 145 aa, Zea mays
  Coding DNA Sequence Number=SeqID_19241
MGKSNKRKREPTPPSEDFGDSEYSEEEFSSESEGSPAPGIAAEVWTYIRAVERSGLEGSDESEFSSEEEDSDGGKGEDDDDDDDDDDDDGGGGDGDGNGSGGGSGGGDGSKGSTRGGSSTGSTRGGSSKGSTRGGGGGSSSKASG

SEQ ID NO: 62617 - protein, 27 aa, Zea mays
  Coding DNA Sequence Number=SeqID_19242
MTQDALSIVEITVGYFISLSNMDMKSD

SEQ ID NO: 62618 - protein, 380 aa, Zea mays
  Coding DNA Sequence Number=SeqID_19243
  Homolog annotation: Hit_ID=A2ZPV4; Match level="QueryCoverage=43%, HitCoverage=29%, E-value=1e-70, Identity=76%"; Hit description =Putative uncharacterized protein
  Pfam annotation: Domain name=zf-CCHC; Domain location=116-133; Score =15.3; E_value=0.0073; Accession=PF00098.14; Description=Zinc knuckle
MEILSIHNEELSTKLENIGSTPEVSLVEIPEIIKKDASTSCFDLIDNSNPCNQVLVKNVVIETCSNEIAMENEQLKQEVAHLGKALYDKKGKAKQIQPPQDNTTAGLNKLVEGETVICRLCHKEDHKSFQCKAKTRDKQKPTSKISNTYINKVDKKAATPYLIKKKNNGKVIAIKVNKQANKGKGTKHIWVSKKIISTMKSTKKALRGKDLNDMFPVTDAEAPPTANPRGFANLLWKQLDHLGNAGFDLALFRVDAYGGGKTVPSNQRIMQWQVCRKKQNKLEFLMPWWDLQLGVSVNQFLSIFASKNSDFRNRALAFLFTHGASEELSSLQVVEAHAFPQHFSEMKTKVGLAPAAIVSSRGSDNSVLTIYFRCNARAPI

SEQ ID NO: 62619 - protein, 156 aa, Zea mays
  Coding DNA Sequence Number=SeqID_19244
  Subcellular localization annotation: CTP_CleavageSite=36; ConfidenceScore=5.11e-01
MMVPASVATTSFVILLLSLPSCLHLRATPFLVEGVGADTSSPYSSDTSPDTDSNSGYCTSTRTFHVMRASSFSPLSDVPFVFPAFAPFSLPILLPPSVSMTDRAFHYVELGYNKAAAAYNLLDSTQAERLGVPFIAPKGLGAVGASFGSSQPSLVA

SEQ ID NO: 62620 - protein, 72 aa, Zea mays
  Coding DNA Sequence Number=SeqID_19245
MAHWTVRCAIGAPTMRHRDTDQAKDGGKKSYEVLSAREKGQGDQDPKPGLKKKTCKSRLIELRRSYGAIRNT

SEQ ID NO: 62621 - protein, 505 aa, Zea mays
  Coding DNA Sequence Number=SeqID_19246
  Homolog annotation: Hit_ID=Q6JAD6; Match level="QueryCoverage=81%, HitCoverage=64%, E-value=1e-171, Identity=69%"; Hit description =Putative uncharacterized protein
  Pfam annotation: Domain name=Extensin_2; Domain location=221-504; Score=-141.4; E_value=0.094; Accession=PF04554.4; Description =Extensin-like region
CYCSHGYVGFRYVPVKSWLPAQRDPAAAGAESEAHLTYLPGLLTLLTISGRYVEEWVRVFYASVWIDPDHHWMRFRFEREDVTITASQIRQLFGFPESTTRLHSLCYGSSDPPRRPHSGVAPGTAHVAALFRPPFTDGSRRSPADFTTAVKYLYELIRRTLLPRMGYREATTHIQLWLLGALVSHSQFDVVDFLICEIEDTVLDGIRARWQLPYAHYLCHIFAQLIQPPRFQSTLEASRLVFGSYRPAPEIPVPASASVFDSQAEDAALRQFDTQGTTADDDDDDDFGVPPPPPPPMPPRSHDHEAGSSRATPAPPPAMDPALAVILANLAAEQARLSETMLSMFQSMQDRQDALQQQLIQDRAENRAFMALMLQHSGISAPPVQSAPPPPLHASVVPSILSGPPVGTSPLRPVTLAFTSPVLSSVCPQPPVPPASAVPTTAVAVSVTASVPVAPAARPPSESVPAPASTADPGSETDSDPPPAFALLPRPRPDAPPSPPPASDV

SEQ ID NO: 62622 - protein, 91 aa, Zea mays
  Coding DNA Sequence Number=SeqID_19247
MVKGETDLKGKDCLVLNNLPYASENKDQQGGCGLLGAFFAAEGPVSKNTFGKTMCKQIRHEDICQSYNRKSFGMLACKNEGWHRLKEEKTT

SEQ ID NO: 62623 - protein, 101 aa, Zea mays
  Coding DNA Sequence Number=SeqID_19248
MGCTGGAPNGCSPRPSNGFFKDNPFEEIGMKLFALRFGGQHYVINILLQRYSLRALHRCDRFEKYTDNSWASPPMGVGKGRLDGWKCLLNALRLFSDHGWR

SEQ ID NO: 62624 - protein, 191 aa, Zea mays
  Coding DNA Sequence Number=SeqID_19249
MPPCIRKTARKSTGPIGVPWHQLAPRHENSSSGSNDPIGDLEARVSRLQAELQHRTNAWVADGDRINELRRDIRHLRDQLADRDLALDWAVQSRCAKEARAQARIKELSSAVDDLQVCCNTLHEEVHVLYSQLHPSAPAHPVEAEAVPSHVAGHALGGELDLFEPPPSMRLVDVWTPTPDDEAAKSNGKQD

SEQ ID NO: 62625 - protein, 194 aa, Zea mays
  Coding DNA Sequence Number=SeqID_19250
MGVGKGRLVTVVGDRWLPSSSINRVLASLASSHISLPLVVYSPLFSSLLHHHGQEQERRKSSHHSGDKRKRETTPPSEDFGDSEYSEQEFSSESEGSPVYTSPPASFDDSDDSQGIAAEVWTYIRAIERSGLEGSDESEVSSDENSSDSSEEGSGGDGDDEGDDDDDDGDGDGGKGNGKGDSGSSKASGKALLS

SEQ ID NO: 62626 - protein, 255 aa, Zea mays
  Coding DNA Sequence Number=SeqID_19251
  Gene Ontology: Mol. function=helicase activity; Cellular component =cytoplasm; Biological process=ATP metabolic process
  Homolog annotation: Hit_ID=Q7X9L0; Match level="QueryCoverage=45%, HitCoverage=99%, E-value=2e-52, Identity=82%"; Hit description =Mosaic virus helicase domain binding protein
  Pfam annotation: Domain name=AAA; Domain location=82-203; Score=-5.2; E_value=5.3e-05; Accession=PF00004.20; Description=ATPase family associated with various cellular activities (AAA)
  Pfam annotation: Domain name=MIT; Domain location=25-85; Score=2.6; E_ value=0.068; Accession=PF04212.9; Description=MIT domain
  Pfam module annotation: Pfam domain module=AAA::MIT; Domain location =82-203::25-85
MDAAGSAPSPAAVVRERVAVKLRGYFDLAKEEMDKAVRAEEWGLPDDATAHYRNAMRVMLEAQAARVPDAVSSSGWCPAELERLAARGGRSGCTRRRSPSGRRRSRSGSECLVREVLKGATAAVVPKKIVLSAIKTGATNKPQELDDAVLRRLVKRIYVPLPDPNVRRLLLKNQLKGQAFKLSRYSGSDLRAVCEEAAMMPIRELGPQSILAIKANQLRPLKYEDFKNAMAVIRPSLQKSKWDELEKWNEEFGSS

SEQ ID NO: 62627 - protein, 244 aa, Zea mays
  Coding DNA Sequence Number=SeqID_19252
MRRSIAPLRQRGTDAESRRVVRRVPMERAWATAKISANRCSRLRSTCRQERNPDWDGEEGRDPTSGGPPASKEFSPAQARAQESGDRLMGPSGHRQSERSGRWLTVGPARFLKPKRLFSRIKLVTKNDLAPGRGYCWDHASSRTSAGRNSFAEAASTVARSGSLPLFSLPSQQEAIIGVYEANRIKDPVQSFLPSASEGCGQSIIFGLGVYFGRTRPPSLESVVVSFGISQLSTSGHTLKDICS

SEQ ID NO: 62628 - protein, 48 aa, Zea mays
  Coding DNA Sequence Number=SeqID_19253
MRVKWDALSCRRAVNGGRGIVLTLLRVGAEVVPTVFSAHEEMQIYWRL

SEQ ID NO: 62629 - protein, 84 aa, Zea mays
  Coding DNA Sequence Number=SeqID_19254
MVGVGRSTCAGGRARRRRGLWPIQGGIVQLNGSESFTRDSLVHARWRVTEVRRGQFCFSGEAVPRLKLGEASQGLGEAICHTRI

SEQ ID NO: 62630 - protein, 160 aa, Zea mays
  Coding DNA Sequence Number=SeqID_19255
MASFGITYRQLQPKLFLPAGPSATKHGPNRTYSAAKAKETVLIMQSAEEPTIVPKAAADLPKMHRAPVATPKRRRMASVLDAIIETTKALSPAPSKKIPETAKAQAEAETGQAEAKARPSAPIAAKPAAPEEKWQGRMHLKLLLPKLQSRLLTTSFHMLR

SEQ ID NO: 62631 - protein, 308 aa, Zea mays
  Coding DNA Sequence Number=SeqID_19256
  Subcellular localization annotation: CTP_CleavageSite=57; ConfidenceScore=5.75e-01
MHGLQVVTRMMVMIMTMVMVVRVATTAQVKMKSWRRTSRSSKSMMSSRRGLAMARLRHAARKSVIPFLPSRLAERPLRHRVTVGDKVCEELFPCAPAGGAPAPPPSAPAAGVDAGGDPDDGGGDSSSSHNTDLLEEQELEGWVARPITHDAARGCHFHDALDTLLRQALDQRTWSIEYHCVVFQHSHGVYPNRWEATCLVRCPENSLRGAEVCSEHYSISERDSAEAAMQDAARRALLHYCSVLGGVADGLNLKYYPRRPSGSTGGVVVSLVGEDNPRLSSTVNLAAVLNAKLDHALDELSRAHAEIA

SEQ ID NO: 62632 - protein, 262 aa, Zea mays
  Coding DNA Sequence Number=SeqID_19257
MDWLLRRGKVRFLARGASPRHARSTPRVGRGWERLCWPVYGGGCSGGRGHAVHGAMPGYLVHVSSKGRCGQVREIWGWEVGSVRAVHTETKLVPSRVKRLRVGFKLFQGILEPYVKTLSKTWGVTYFHTYIQANAVSSNSTADSHSQFGWGLTWVAERGCLLQAETHSALLGQWGLTAAGLPSSDIASPNGHALHNGNMLCFRLELGRLDCSIGSLGREHEVPADSASGTDLLLTDCSSDFATGVEGTTFETAAAKVDAGSA

SEQ ID NO: 62633 - protein, 214 aa, Zea mays
  Coding DNA Sequence Number=SeqID_19258
MDGLAREGFPRILWEVLQGAGWCSLDSKSFGYRAEDTIEVIALHGLTTFCGFHPLELSTHPIGLFSAEKEDDPMWKDRVEHAKDIWAIYPGQTAHLTATKITLDNREELVVDLSTEMVEKDLQLEQLSNEIQELDELVGTRENSIEVLEDQLINTQQQLAEANQHLDMHHQEIQDKEANENVNIEGGEEPASSLDTAGSRRPPSPMSSVASFAH

SEQ ID NO: 62634 - protein, 152 aa, Zea mays
  Coding DNA Sequence Number=SeqID_19259
  Gene Ontology: Mol. function=metal ion binding
  Homolog annotation: Hit_ID=Q84TV4; Match level="QueryCoverage=91%, HitCoverage=55%, E-value=5e-23, Identity=43%"; Hit description =Putative PHD-finger domain containing protein
MSVPHDRHQDLKLAIDEFDEELIDPELRFSFQRNSKVCGVDLTDKVVDIIFHVFDANCDGNLSSEEFLRKCLFSMMSDLPSVLEAFVDRKHDKDRSGVDSSGKSRHSSNRGKDGHAKSSRAAPPATKEYDKDEEEHTETFCGSCGDLYIGSN

SEQ ID NO: 62635 - protein, 282 aa, Zea mays
  Coding DNA Sequence Number=SeqID_19260
MHRVLPPSEPPDREHSCRFRLAVDGGMQLRGSWYLSAIVRLQGFSSGSLAASPLRWSPKTVTTSSMVGGSEPGCDLGPALSFKDLHHPGWGGGRAESELYLPRGFVGHLLPQHSRERALTRLAGGSDFDNAGLVGGERRQLQHVGLAGSAGSGSAPGAPSRRESGCRVARTGGPPKTSRAARAAFVFWGCPAFAPVRRLCAEVGASLVREDPSGDLPVGRWLPSSALRWWRLKKSSSPTGSLPPSALRASGSLALIACPRPSSGDVSEGIVAAASALRPSLL

SEQ ID NO: 62636 - protein, 220 aa, Zea mays
  Coding DNA Sequence Number=SeqID_19261
MRAQAHTSCNRRAGYYVQETAPPLAPLSRLLDCGTGAATRGNPAHDPTVPTKHIGHGTGDTFDRRSRRRFTSAIMTASKKGPGKGMLRKGSFSAKEAGPEPPTDQRARTQPRLRKTTNSASLDPRARPRLQKTTNSASPDPGLGLGLGSGRRRTLPRPTTGLGLSPGLRRRSPPRPARGSDSTSTSEDRLDLDLGGASASLDPGLGPTTSQGGHHYPTPS

SEQ ID NO: 62637 - protein, 125 aa, Zea mays
  Coding DNA Sequence Number=SeqID_19262
MPLIKVYNNDSDPYGLKGHSIFKSVRPFIFGYADLRRRSMVPNNGEVCPITPHAPPQPRQGPTRLSNPVYNGSSSLISCEKQTIRIEFLNLARLWCWIRGYLLSNSLLRHEDVLSVSEVAIYRMQ

SEQ ID NO: 62638 - protein, 249 aa, Zea mays
  Coding DNA Sequence Number=SeqID_19263
MKGTYIIESLLACFGIILERNSRPSEAEARPNGALNNALYIFPFNQIIFDIKPFLHPGPRPPFLKYWNRITYIGTRNKAIATEVVVILLFTSGLRPLAFRGPNKNTHSDYSFGSDLMKEDFKCLQNFNKKSAQWESKTSLHKASVNNNFIFFGCGGGAVSPNPHNRHVTKVSPLHGINLTLFNGRLSKDGMTWSPGPVLGIFIPTFHIKVITIVAELPELFQLKCLSPALEARPHLNGNNTSIPRIKSD

SEQ ID NO: 62639 - protein, 289 aa, Zea mays
  Coding DNA Sequence Number=SeqID_19264
MTSHRSSDEGNAQSHTDGLAREGFPRILWEVLQGAGYMTPPQYAMQLFEKHRVPRCRVRMTLEPHPLQPGWRSLDSESFGYRAEDTMEAIALHGLTTFCRFHPLELSTHPIGLFPAEKEDDPMWKDRVEHAKDIWAIYPGQTAHFTVWCMNALYRLQVMRGEAMSHLMALLEATKTTLDNREELVVDLSNEMVEKDLQVEQLSNEIQELEELVGTRENTIEVLEDQVINTQQQLVEANQHLDMHHQEIQDMEANEDVDIEGGEEPASSLDTAGSGRPPSPESSIASFAH

SEQ ID NO: 62640 - protein, 100 aa, Zea mays
  Coding DNA Sequence Number=SeqID_19265
MAKQFPRHGDGPHGGWVLCAVKPQGRSRHTTAASYARPQFIPGSEVRAWALHIITILHNIEDLSTMTPTIVIGKIAAFEMSRKNVSTRGANFLEDIFFCM

SEQ ID NO: 62641 - protein, 40 aa, Zea mays
  Coding DNA Sequence Number=SeqID_19266
MRSVYLGRSARRWSGQVETEFPWWSMLCVARHAAAPGFAW

SEQ ID NO: 62642 - protein, 22 aa, Zea mays
  Coding DNA Sequence Number=SeqID_19267
MGMCGLRDEIGIRIKVFLRMIG

SEQ ID NO: 62643 - protein, 582 aa, Zea mays
  Coding DNA Sequence Number=SeqID_19268
  Subcellular localization annotation: CTP_CleavageSite=25; ConfidenceScore=5.15e-01
MPQVLGERTEQGSSSFIRIASRYAVAPRRGASSLLQFGLQVASTTALCFFHGSCTSLLPKLLSRDMPPSPGQLACPWFPRLLPALAERLSTSRNFPKIPGAFSSPVPSSSLKLSPHGAPKPSPSSASTRRDSELGSPIRCSLFPDLARPWSPAPQLLALLAARTPPCTPLILVVALCTFFSAMAAPCSLRKRRHRTPYVLAPSSCSVSAVWQIRIRCATRKARGGLAGHPASFYALRLPSSSMRRMARLRHTARKSVIPFLPSRLAERPLRRPVAGQSSHLERLHHRLREEQERRRQEQQSSSFSLHQEIESVRSCSPVLPLEPPPAPPLGAPASGVAAGGDPDDGDGDDSSSHDTDFSANPEPEGWVARPITRDAARGCHFHDALDTLLRRAFDRHTWSVEYRCVVYQHSRGVYPDRWEATCLVRCPEDSLQGAEACSEHYSISERDSAGAAMQDAARRALSHYCSVFGGAADGLDLKYYPRRPSGSTGGVIVSPVGEGNPRLSSTVNLAAVLNTELDHALDELSRARAEIALLRAERAERRHLDGGSPAPVGTQHPYRSPQRGHQSYGNPDCKTKITLEP

SEQ ID NO: 62644 - protein, 114 aa, Zea mays
  Coding DNA Sequence Number=SeqID_19269
MALLCFGKKRRSSSCPYGSGSFSEALAVLVEAVYTGFGGNPSEIEPASSTQEHFLLFNRGRVFVRANERSQRDSYFYKSFYTSYRHIGIRLPHHCVKEKVQEACDARDGLTPYA

SEQ ID NO: 62645 - protein, 140 aa, Zea mays
  Coding DNA Sequence Number=SeqID_19270
MKVFKEKHSEDGTKVLRRLSNTKLWPLKRRAAYHYIKRKKGEDMKPHTSQTNPHTHTHSRIARSTMILCVVRITRCLLSKVWRIFAIRDCSLIRGVLGVPCVLSVSDWGAAGRTITLTSTKARDPDLNQGMESNATRKRF

SEQ ID NO: 62646 - protein, 76 aa, Zea mays
  Coding DNA Sequence Number=SeqID_19271
  Homolog annotation: Hit_ID=P69445; Match level="QueryCoverage=63%, HitCoverage=35%, E-value=9e-07, Identity=62%"; Hit description=ATP synthase epsilon chain
  Pfam annotation: Domain name=ATP-synt_DE; Domain location=31-60; Score=14.3; E_value=0.086; Accession=PF00401.11; Description=ATP synthase, DeltaEpsilon chain, long alpha-helix domain
MVNGGSVEWFCKTRIVNNEIIILGNDAELGSDIDPEEAQQALEIAEANLSKAEVNGSKGYPLALENIHLDKKLSIC

SEQ ID NO: 62647 - protein, 96 aa, Zea mays
  Coding DNA Sequence Number=SeqID_19272
MSEVREFLLIGSLRGETEELCQRVPTLFDLPVPAAPEPATAASTPPTSCADFASLAGYQFPPALSVNPGNAYRLANEHGDELPEPWNDMYLKKYYA

SEQ ID NO: 62648 - protein, 191 aa, Zea mays
  Coding DNA Sequence Number=SeqID_19273
  Gene Ontology: Mol. function=structural constituent of ribosome; Cellular component=small ribosomal subunit; Biological process =translation
  Homolog annotation: Hit_ID=Q0GR84; Match level="QueryCoverage=100%, HitCoverage=35%, E-value=4e-95, Identity=90%"; Hit description =Ribosomal protein S2
  Pfam annotation: Domain name=Stathmin; Domain location=15-175; Score =5.1; E_value=0.012; Accession=PF00836.10; Description=Stathmin family
MEVRSAPDIIDPLLSPTEGERLSPTTGPSPEGGDHPHDNTPPVAVEPAPLPETNPTRGEGSLKRHPHPYVEDMDKKLEDCRKKRKAQEWGDLISGIETKEKKRGIESQIIEENHRFYSMCCEHFRQRMPLMILQNESDREDNKREKLFSTILRSQGKEHYLENLLQLREDLRDPAAYEALRPIFRELSNKL

SEQ ID NO: 62649 - protein, 162 aa, Zea mays
  Coding DNA Sequence Number=SeqID_19274
MAGRYAHLSRDLYSNQKTKGPPLRKMKKARTEMRKEGQDDFGSHVKVLRKVSAGIDWLSSFGQMIVDWSKGMRKLKHKGKQVILQVQDVTAELKVCQGTVDLHKEKKKRSQVIIAHLFTSQGAPRCLRGDRFLVARRRQSKRWVLRNKGCWTKYSQVLPVFG

SEQ ID NO: 62650 - protein, 75 aa, Zea mays
  Coding DNA Sequence Number=SeqID_19275
MSTHHILGLKKVPRVRLFADESGTLAKMFQFRSLKIEFPWKNQGQLRSVSFNKRAERKGKNFFVNDHDFLKPSSL

SEQ ID NO: 62651 - protein, 140 aa, Zea mays
  Coding DNA Sequence Number=SeqID_19276
PPPDCPVRQWSNDQLHQWSTAEKSDRQKSEESLRCQIAPDCLVPQEDRRLQRSIAPTPNGRLMWNSPDREQCSVRCTIRLSGVPNDSNVWNSSWGYKYPQPPPFKLSKLLTLLIQYKSKGYTPKTQSKHSILSKLQNQVK

SEQ ID NO: 62652 - protein, 68 aa, Zea mays
  Coding DNA Sequence Number=SeqID_19277
MWVHLRPLTLILLTFGSTEQGMYNGENLWLANNFVGLLCLIGGDLKVDITNGVGKRFFDDDLNAVAKE

SEQ ID NO: 62653 - protein, 192 aa, Zea mays
  Coding DNA Sequence Number=SeqID_19278
MPSCHQWGSVYAARSAEGGLPLGEECDDDEDNVGFYCDYDYYYYYGFRYSFSLERELEQQGSSSSPQQEVESVRRCSPMPPLEAPPAPPLGDSAAGVAIGGEPDDGGDDNSSSHIIDLSEEQEPEGWVSRTFARDATRGCQFHDALDTLLRQALDRRAWSIEYCCVVFQHSHGAYPDRWEATCLVRHPEDSL

SEQ ID NO: 62654 - protein, 642 aa, Zea mays
  Coding DNA Sequence Number=SeqID_19279
  Pfam annotation: Domain name=MAP7; Domain location=345-500; Score= -82.6; E_value=0.079; Accession=PF05672.2; Description=MAP7 (E-MAP -115) family
MPSLGGQRVRSLAFALDLHGRDPATFVREVEDSAARIVGRYVPRTAGLWSWDIRGSNVRLNRVFELNCLPYGGYPRDDTADRCGKRPVGVTEEGPSQGTAPATKKRKLGTAVGRVGVSDSFVVDLMGTCAALRGRMFSPELWESSARMLEVTEGRWPKNVPIPRAAGEVFFTSRMARDLKVFPYGWNIVAVVSAVMERDRQDAAQKHRAIVRIADPMREAKKARGSRKAAASGSSKPVPDAKPAAPGHSKASACAKVAASGGSKPPPDGLVKGRRPPSPARRIADFGMDISVDDYFVGSGEGQLVVVPPPVATTSATVVVGAKGATRDPWATFCTSGEILSAAAAKDVAVDFADLVVSGALTTDVAAEVERLWAQHADAVREKSATKSKNRRLSEKVAAMEAEKTDLCRQLAEERREANKAIADAQAAQAEAKVAWAEGSLARQRAEELEARFNALRSRVDKAEASTRAEVERTHAQFVDAYRELGARTADFEVPVQEAGLHFLEWLQEELLVLPTIVTGFMSFASLVTCEGAMAHAKDVEDLGGLDGALPEAAEVDLVPPSDAGEGPSATPAPTAVGEDPRISPCADGRRRLEEESSDEDLDYFAALDVAAAEPSPRTEGSEELPGASTGYRQRMAVAKWR

SEQ ID NO: 62655 - protein, 158 aa, Zea mays
  Coding DNA Sequence Number=SeqID_19280
MRRPPSGRRGRRKPGRRLRHAGGDDARRRSAPRYRSPRRPQGQRTPPPPNAAGKGDPRTRAEGTGKGGYPERDPSPRRNRAPSPPLLIRGSKAGPPRVQQSPQIAWARHPLLVRGSKASPPKGSMAASGYSGSAPITDQGFEGWPPKGSQSPQTPSEG

SEQ ID NO: 62656 - protein, 95 aa, Zea mays
  Coding DNA Sequence Number=SeqID_19281
MAMVFPRAPGKRSSPEAGPRFDSDGGAGREEEAPQRIPQIAPGSSFTERRGSRGILFWRSAKRKELTGWSHRSVAKGSHVHASSEPKAAAEAERR

SEQ ID NO: 62657 - protein, 284 aa, Zea mays
  Coding DNA Sequence Number=SeqID_19282
MTVVVAVALRGEEYHVVAAIEGHELETEEVAGDYPSGAQQEGVRQHAAGPYLAHQLSAFRTPGVPGPTSKFVAACPYPDGLAQDGTQGESAARVISHQGGNDVSPGALLVRARGRARRRFLLRSRPGLGEDAIPPEAEVEAEPWGRARRRPPFEAEVEAEPWGRARRIPPSEAEAIPALNVPAIRSVGEAIWPRLLLDEACPSWASSEPRVWTYNRVVERSGLEGSDESESSSDSSEESSGGDDGDDGGDSGRGGDGGRGGDGGRGSDGGSKGSNGSGSKKASG

SEQ ID NO: 62658 - protein, 421 aa, Zea mays
  Coding DNA Sequence Number=SeqID_19283
  Homolog annotation: Hit_ID=Q6QP51; Match level="QueryCoverage=28%, HitCoverage=56%, E-value=2e-16, Identity=42%"; Hit description =Putative growth-regulating factor 1
  Subcellular localization annotation: CTP_CleavageSite=28; ConfidenceScore=5.58e-01
MDGGNNPAAVSPSSLNFCKASRRGWSFSCFSRVAPLRQLVVGGGHHSLRKRQEPPVIVPEIKPPALPPLVRSHEGKELRGKEMGPQIPVRVNPQETLANRREDGRLRDGVGVEVMQLHLIVVQERPHEAARWHSKPPLMEGDKADHVPPQWSWIGLARDHPLRLSPTGEGTEQTIGDKGLQIPHDDGGGRPRVARRDNGHLVSHRRKKVVEAKGMRDREMGYIERDPSPRRKRALSPHTDQGGSKAGPSEGFDSRPRARRARDDSGYVRYMAEAQATLPSRFALSLTDQTEKQRRSPRSDCCATHQGETDNSQVRPRAQQEAPPLPTLGLGLGRRSLPQGSASTSTSERGLHPARPQGSASTSASEGGIRLARPQGSASTSASGGIASSPNPGLGLRRNLCLARLWARTNRATGDTSLPYP

SEQ ID NO: 62659 - protein, 80 aa, Zea mays
  Coding DNA Sequence Number=SeqID_19284
MYPSTYRTHQHPKSLTSKHEFRILSNPVLKHRELNPAVVSPTQNAKKKWKSPKKGHHHPRILRHATASTLIFVDPSQTHL

SEQ ID NO: 62660 - protein, 65 aa, Zea mays
  Coding DNA Sequence Number=SeqID_19285
MAPTSRSGWSGFVQGLSEGVMGLLLCRMPTARATGYSDRGLATNPFNRSVDTHLMKMLPTLILTN

SEQ ID NO: 62661 - protein, 314 aa, Zea mays
  Coding DNA Sequence Number=SeqID_19286
MVHNYTPSALQLGGPRLSLTVAILAKRRNLRTRSEAVHNMKSLVGTKRYEWCYMVIHVISHVLYASTSINIYCDDEAFDNKSLTTSEDTTPTSRSGWSGFVQGLSKCVTGLLLCEMPTARATGYADRGRTFGGGDSATVATADQATGARGGRAGVAGPHPRPGRKGRGVAGLARPSPGHGKWSSHQAQMRGEEEGMERGRGGAHMGGWRRTAWATWPPTDGGLSATRRQWQEEGVEGRREVVALRVRDVGAEGGGLAVVPVGKRNSGLGATDRRARWLGGGWAQRLWFEGGVCLRRVGQVLVYKLRNSNELREF

SEQ ID NO: 62662 - protein, 52 aa, Zea mays
  Coding DNA Sequence Number=SeqID_19287
MARVACTLRGKRLDGGVSMLSVMKQQTFVASVPRWYLKKKIKTEAVGGRVLH

SEQ ID NO: 62663 - protein, 52 aa, Zea mays
  Coding DNA Sequence Number=SeqID_19288
MARVACTLRGKRLDGGISVLSVMKQQTFVAFVPRWYLKKKIKTEATGGRVLC

SEQ ID NO: 62664 - protein, 59 aa, Zea mays
  Coding DNA Sequence Number=SeqID_19289
MGKPVPSLLMLLLSRDQAHRLGVQCLTDPDCRRAVTALVPTITGMGDHVSGRVRGKVYV

SEQ ID NO: 62665 - protein, 61 aa, Zea mays
  Coding DNA Sequence Number=SeqID_19290
MERQRLSLRTRVTTSMHCLGVGWAHALAFWRWCQRPHPCCGGSEVAVKSMSVFQVPTASCR

SEQ ID NO: 62666 - protein, 122 aa, Zea mays
  Coding DNA Sequence Number=SeqID_19291
MDKQDERKKPHGKTDPKRGDIMKRIIKDLTGGGNDGGGGASDGGGRLHAIQAQICSHRCLGGSRWASSGCPVSLLACNEYWKRPKVSGSCFDAKLSTHLGPARHACPPTLARWKWNRSDAYP

SEQ ID NO: 62667 - protein, 203 aa, Zea mays
  Coding DNA Sequence Number=SeqID_19292
  Gene Ontology: Mol. function=structural molecule activity; Cellular component=endoplasmic reticulum; Biological process=lipid transport
  Homolog annotation: Hit_ID=Q94LV0; Match level="QueryCoverage=67%, HitCoverage=53%, E-value=2e-47, Identity=71%"; Hit description =Putative membrane protein
  Pfam annotation: Domain name=Motile_Sperm; Domain location=37-140; Score=59.3; E_value=1.3e-14; Accession=PF00635.17; Description=MSP (Major sperm protein) domain
  Subcellular localization annotation: CTP_CleavageSite=46; ConfidenceScore=5.19e-01
MAAFDAVPRLSAHQYNQLHLAAVDRSSFHSPPPPPAARRIFAHMLQAAAPPSEAPMMQISPVPIFAAFQVKTTSPRKYFVRPNASIVQPWDSCTITITLQAQKDYPPDMQCKDKFLIQSTKVATGTEMDEIPLIRHTLYTVTLHVRSSTRKADKVIEEMKLKVVYTLPSYGGSNDSSVSFLGSRSFKAASDDLMMLKNASLEE

SEQ ID NO: 62668 - protein, 138 aa, Zea mays
  Coding DNA Sequence Number=SeqID_19293
MGQRTLACTKLLIRDFFCNFLGKHRLPVVYVNGGSKKRRERAEEVPYLKANSGDSSVAAKTRRQPESTVADLGDCAENGGGAPTATEKRARAMALWRVRSVGEVEGRSAEEIALTFVVGLWRIRVGKDPALCGFLNEE

SEQ ID NO: 62669 - protein, 279 aa, Zea mays
  Coding DNA Sequence Number=SeqID_19294
MVMSSSTPSAAAKEVPTVPTPAIEGDAGGASSSILSPTLEETEVVFWRRLRSGAEPEAAPVPLPWVLSRVHQALHDTEVVILREWEALEAEHQCLGDWRTQLEERTKAASHRFASEWSELKRDRKDYKRDLQKVFAKELEASRWEKRLAKREEALREREALTTEIRAKLKALDQTLEAQRVQQVEAIEKIKKWEWELEDKASNIALAEENLKEKDASLDRRETDLARWEKDLAFREEMLERQEMLLAEHELEAEEKERKLEEWVRQFEAAQATLGPQAA

SEQ ID NO: 62670 - protein, 193 aa, Zea mays
  Coding DNA Sequence Number=SeqID_19295
MARRRRNLTLVSNCAHLRAVKGKLGAVEEAELTEATGTARPQRRRQNRHANTTDGDGASLARARCEIGCRRVLVINDNVRLHVTNMCFPEQMLSDGALTMVQCPTGSDQPPQKNPTADDLRRDSRHRCWIRALGEWITSCGRSPSPTHTLESLFLSRVRKQQIFVAFAPRWYQMKKNKTEVREDLVLHIGSFA

SEQ ID NO: 62671 - protein, 105 aa, Zea mays
  Coding DNA Sequence Number=SeqID_19296
MVLQSVDMLRQILPDLHSFPPSHLENNELQFPCTGVTQGVTDGFSRTARATHTLRPPRQFWEILGATDSPHARPSLLSRLPGQKRQRQSGLLDQCRCQPGIVIEA

SEQ ID NO: 62672 - protein, 190 aa, Zea mays
  Coding DNA Sequence Number=SeqID_19297
MAVITVPVFLFKIQPQHPSAQPNTYSFRDLPAHQVVSLAPHEVPPSTLGDITKALSEVIQQLTDLKVQQHSLIGSPVSPLEALLAPAHDTLVPRVFVDPKASVLALGCSSPHGTSCANYWRTGPHGTSCAGPGASAPGASVLFPEALLALVLGISVPALETTLLAPKAPWLWGLLSVAWTNNHPTGRRHG

SEQ ID NO: 62673 - protein, 174 aa, Zea mays
  Coding DNA Sequence Number=SeqID_19298
MDLDDTRPPDDAIPNVPSPPEAPAFSVAPSPADAIALLPRRPGSGRPCCRKLSPARISPDIASSAYGGPKGKGRPPLPLGPSSGASCHHSSQFTAKEKDLSRLDATVRHGRPGLQFGVRRCLPVTVQASSRRWTVDWWWRRRLSTKHMFIAHACGSGSAYPPKIRVVWCGTVAV

SEQ ID NO: 62674 - protein, 54 aa, Zea mays
  Coding DNA Sequence Number=SeqID_19299
MAAATAASPPVADAVRRSQVLTHEATVHVDGVLCFFHLNKDFTLPVKVKAMTSV

SEQ ID NO: 62675 - protein, 64 aa, Zea mays
  Coding DNA Sequence Number=SeqID_19300
MKDAKPIKTPMGTNGHLDLDTGVYFKPSQRYIERELESSVKTKASTPLYYSSFAVAPHHSSSLA

SEQ ID NO: 62676 - protein, 240 aa, Zea mays
  Coding DNA Sequence Number=SeqID_19301
  Gene Ontology: Mol. function=endonuclease activity; Cellular component=nucleus; Biological process=tRNA processing
  Homolog annotation: Hit_ID=P60193; Match level="QueryCoverage=51%, HitCoverage=96%, E-value=1e-47, Identity=61%"; Hit description =Nuclear ribonuclease Z
MAKSCGEYTVEVASSSSSPIPASASATRSKAKHHIEIKGYPVDGVSIGGQETCVIFPTLSLAFDIGRCPQLRPPTIFVPACLRDLVERLFEVHHAMDQSDLNHNLVPLEVREEYELRRDLKGYVIYSVKQKLKQEFIGLPGSEIKRLKLSGVEEVSDNNCVYPNEVHHTARERTKYLRLLVNECAAKMVEPTGLIVCGNLRQIQWSRAQVFLSLRFDEDIGKDEIEEKKVDADLFSIHSL

SEQ ID NO: 62677 - protein, 438 aa, Zea mays
  Coding DNA Sequence Number=SeqID_19302
MQAACNRTEGAHPFDFDASSMEAQAHTSCNRRAGRYVQETAPPLAPLSRLLDCGTSTATRGNPAHDPTEPTRHIGHGPVSRGRRRDGRCGQKWAGSNGGGRRAKAAVKSSAKLTDWERGYPERDPSPRRKRAPSPPTDQRFEGWPLGGVQQPPQSARAPRPLLVRGSKAGPSEGFNDRLDHVRRPPRATWRFSPLLLAERRRRGVCKKVESVLDRPLALCGGSGAALANPAPAKPLTASTYQPENLGPDPNPGGFTSRPRTPSSNGHTFGSPEAQSSPRSNLGQVATLTDRIAGAFNAKGSDSGSAPEDDELRFARPQGSDSGSAPEDDELRIARPQGSDSALASADGLRLARPRGSDSTSASEDRLDLDLGGASISPNPGLGPTTSQEAPSLPYPKLTQATGNKTGVPSGSPRLQRSSDGHDTTRTGCQNLSGCHDG

SEQ ID NO: 62678 - protein, 104 aa, Zea mays
  Coding DNA Sequence Number=SeqID_19303
MRNRLKMMRMKIKKMSTLKRRRIIKGEMKRIKTRKMVKKFRVKDRHIQESTKQFNEITPSTPSLVTFIRGVEDALRDPDWVLAMQEELNNFMRNEVPSGYLKGN

SEQ ID NO: 62679 - protein, 39 aa, Zea mays
  Coding DNA Sequence Number=SeqID_19304
MDLSKALMDSTSEKMYLCQDLVDVGLMIEDPLTGHMPRH

SEQ ID NO: 62680 - protein, 895 aa, Zea mays
  Coding DNA Sequence Number=SeqID_19305
  Gene Ontology: Mol. function=ATPase activity, coupled to transmembrane movement of substances; Cellular component=integral to membrane; Biological process=transport
  Homolog annotation: Hit_ID=A3BPQ2; Match level="QueryCoverage=93%, HitCoverage=99%, E-value=1e-169, Identity=60%"; Hit description =Putative uncharacterized protein
  Pfam annotation: Domain name=ABC_membrane; Domain location=51-260; Score=-28.0; E_value=0.023; Accession=PF00664.14; Description=ABC transporter transmembrane region
  Pfam annotation: Domain name=ABC_tran; Domain location=625-817; Score= 206.2; E_value=8.1e-59; Accession=PF00005.18; Description=ABC transporter
  Pfam annotation: Domain name=SMC_N; Domain location=611-821; Score= -115.9; E_value=0.004; Accession=PF02463.10; Description=RecFRecNSMC N terminal domain
  Pfam module annotation: Pfam domain module=ABC_membrane::ABC _tran::SMC_N; Domain location=51-260::625-817::611-821
MPAIQGKKDDKPSEEPSSIVADGKQSAAAAAAEDGGSFPFFGLLRYADALDWLLMVSGTVGSFVHGMGPSMSYYILGKTLDVVGSNMGDNEATVHELTKLIPYMWMLAVVTLPGGMIVLSQDIGAFDTDLTTASIMAGATNHMSVIQDAIGEKMGHFMSNFSTFLVAIIVAFACCWEVGLLSLLVVPMLLMVGASYSKAMISMSLARTSFVSEATAIVEQIATFCSYSLVIWVGAVAVTEGKAKPGETIAAVINVLSGAIYISNAAPDLQAFSQAKVAGKEVFKVIKRTPAISYESKGKFLEKVTGDIEIREVHFTYPSREDKPVLQGFSLAIQAGNILALVGSSGCGKSTVISLVQRFYDPMSGVVLIDGQDIKTLDLKFLRTNIGSVSQEPSLFSDKIVLVENGTVAQSGTHEELLEKSAFYSSVCSMQNLEKDSGKSKTSHSVEHSSELEDGSCCMDFDAIPFLCWPCTSQEDEILKKADLSLQEPMRTSKVESIKYGLVQGTSLCLWHMTHAIALSFTIMLLDKNLSSFKDCVRSYQAFAMTISSITELWSLIPLVLSAITVLDPALDILDRETQIVPDVPEVHSEERLAGDIVFQDVSFSYPSRPEVIILDGFNLDIEPGQQVALVGPSGSGKTTVLALLLRFYDPCEGRVLVNDKDIRDYNLRYLRKHIGLVQQEPMLFNLSIRENISYGNEGASESEIVAAAMEANIHEFISGLSNGYDTVVGDKGSQLSGGQKQRIAIARAILKRPTIMLLDEATSALDGQSEMVVMSSLVAKEWRNNGELSSKITSITIAHRLSTITSAEVIVVMDKGQVVELGSHEALISAKDGVYSRLYIELLQFYRVDNITIRRRRKCVINDLRVVDATIKLAGGNIVKITNPNNHKGSKYMR

SEQ ID NO: 62681 - protein, 64 aa, Zea mays
  Coding DNA Sequence Number=SeqID_19306
MALIHLNEFIAFYMRIFWFLIYRVGDMGHYDWRLKDTNIYIWTTNNRCCDYTRYQEEQFKNHRS

SEQ ID NO: 62682 - protein, 67 aa, Zea mays
  Coding DNA Sequence Number=SeqID_19307
MAPLHGGFSAGPRKNDLTIYWALGPFVRSFTSLVDPGDIYPPQAPDLWVDLENSERHWVHQRCTQWV

SEQ ID NO: 62683 - protein, 147 aa, Zea mays
  Coding DNA Sequence Number=SeqID_19308
  Gene Ontology: Mol. function=4-(cytidine 5'-diphospho)-2-C-methyl-D -erythritol kinase activity; Cellular component=chloroplast; Biological process=isoprenoid biosynthetic process
  Homolog annotation: Hit_ID=A2WW27; Match level="QueryCoverage=36%, HitCoverage=13%, E-value=3e-17, Identity=74%"; Hit description =Putative uncharacterized protein
MAAAASSRASKAATVTLLRLPLARLSYHLRSVEEEFAAEAEAPRSFVLPQLSRPKLSVKEDVCPHGSTIVGIGSPDPLAFVYDDEDYKDVFVSEACLLSPDENDWYREPIPAKCTSGKEDTEFDQRLDMVGKNTTVLAGIVHKTIWF

SEQ ID NO: 62684 - protein, 47 aa, Zea mays
  Coding DNA Sequence Number=SeqID_19309
MAPQRRSHGSPSTPRACDILRSDALRASSDEWWQIPKARWQFHVVGD

SEQ ID NO: 62685 - protein, 437 aa, Zea mays
  Coding DNA Sequence Number=SeqID_19310
  Homolog annotation: Hit_ID=Q5Z9G5; Match level="QueryCoverage=35%, HitCoverage=63%, E-value=2e-24, Identity=40%"; Hit description =Putative uncharacterized protein P0655A07.24
  Pfam annotation: Domain name=Hin1; Domain location=116-254; Score =53.4; E_value=7.8e-13; Accession=PF07320.4; Description=Harpin -induced protein 1 (Hin1)
  Pfam annotation: Domain name=PepSY_TM; Domain location=350-385; Score= 8.2; E_value=8.6; Accession=PF03929.7; Description=PepSY-associated TM helix
  Pfam annotation: Domain name=PepSY_TM; Domain location=81-116; Score =8.2; E_value=8.6; Accession=PF03929.7; Description=PepSY-associated TM helix
  Pfam annotation: Domain name=YSIRK_signal; Domain location=343-367; Score=2.7; E_value=0.25; Accession=PF04650.8; Description=YSIRK type signal peptide
  Pfam annotation: Domain name=YSIRK_signal; Domain location=74-98; Score=2.7; E_value=0.25; Accession=PF04650.8; Description=YSIRK type signal peptide
  Pfam module annotation: Pfam domain module=Hin1::PepSY_TM::PepSY _TM::YSIRK_signal::YSIRK_signal; Domain location=116-254::350-385::81- 116::343-367::74-98
MAPDLGSVVSRVTDGRCHLVLSWNRLRRTRLELWALFNYRKPRPGAREQESPGRRGALQPVDWRTWRGREEEEPQRPRRYSFRRHQSGAAELAAVVLVKVLAVVVLLGAVTVLVVVLLLQPRASYMAVRVASLYALVYGQTGALDDVQVTVRVEARNGNTRSAAYFSRLECRFAFAGATLSVLHAYPFRVPARGVLPLAYVARAQGAPLGDAGSAAMETALRDGVVPFRVEGEARTRWKVAGIVGVDQWTRLACQLHFFWPNATVLPFRCSSKSNGPTTTWLASWLGLPPLTEAQGFHYLFPWALFNYRKPRPGAREQESPGRRGALQPVDWRTWRGREEEEPQRPRRYSFRRHQSGAAELAAVVLVKVLAVVVLLGAVTVLVVVLLLQPRASYMAVRVASLYALVYGQTGALDDVQVTVRVEARNGNTHSAAYSRG

SEQ ID NO: 62686 - protein, 139 aa, Zea mays
  Coding DNA Sequence Number=SeqID_19311
  Gene Ontology: Mol. function=nucleic acid binding; Cellular component= intracellular
  Homolog annotation: Hit_ID=Q6YU06; Match level="QueryCoverage=29%, HitCoverage=23%, E-value=9e-14, Identity=80%"; Hit description =Putative uncharacterized protein P0435E12.40
  Pfam annotation: Domain name=zf-C2H2; Domain location=46-68; Score =20.0; E_value=0.0091; Accession=PF00096.17; Description=Zinc finger, C2H2 type
MADRRLLASCIPGMEAAAEREDEGLELSLSLHPSSPSSPPRFQAVFACCYCPRKFRSSQALGGHQNAHKLQRNLARRGREATSAPPAPPPPPPVADQGIGRASGSDSAPPPRSRVEPAAAELLLRPLDLAFCRFQYDSH

SEQ ID NO: 62687 - protein, 257 aa, Zea mays
  Coding DNA Sequence Number=SeqID_19312
  Gene Ontology: Mol. function=zinc ion binding; Cellular component =intracellular
  Homolog annotation: Hit_ID=A7QEQ5; Match level="QueryCoverage=60%, HitCoverage=68%, E-value=4e-36, Identity=52%"; Hit description =Chromosome chr16 scaffold_86, whole genome shotgun sequence
  Pfam annotation: Domain name=CCT; Domain location=174-218; Score =75.2; E_value=2.2e-19; Accession=PF06203.5; Description=CCT motif
MQRHLHKLTKNMSAVIIQEEALLSLDPVAAACSMMNQTIKDAGIQNDALLSEVLYECKKELMEKSAIEETISELMDVKIPMLQAEQLPAMENEKRSIPECSLQKSVSSGCLNSADRMNGAVRPNFLDFQGLDFEATFGLRRAYSEGDIQNLGANTPRPAANVCVTISDLKAEERKQKLSRYRKKKIKRNFGRKIKYACRKALADSQPRVRGRFAKIEECDLLLLNSGTYMEVQSIIQLFKIHLLYPAVLVRAEGVKS

SEQ ID NO: 62688 - protein, 323 aa, Zea mays
  Coding DNA Sequence Number=SeqID_19313
  Gene Ontology: Mol. function=nucleoside diphosphate kinase activity; Cellular component=mitochondrial intermembrane space; Biological process=CTP biosynthetic process
  Homolog annotation: Hit_ID=A2Y865; Match level="QueryCoverage=37%, HitCoverage=72%, E-value=7e-36, Identity=65%"; Hit description =Nucleoside diphosphate kinase
  Pfam annotation: Domain name=NDK; Domain location=180-299; Score =110.6; E_value=4.7e-30; Accession=PF00334.10; Description=Nucleoside diphosphate kinase
MEEMEKLVGVHHHHHSLSHRAPRTPTRPQPQPHPLLHHLPSNRFRDLHSQIHNHIHPTVPAASRVLRATPPFFLILLSSVYLLASVTIFSAPTPLLRLRLASPRPLILSKLAPPRPAPELFDLDGGSVRVHLTNVGAAVTSFLVPDKNGAGSLWYLPSVCLCSTMALTLPFHDARLVFLPGVLADVVLGFNSLDPYLRKGYKLVAIKLIVPSKGFAEKHYHDLKERPFFNKLCDFLSSGPVLAMVWEGEGVIKYGRKLIGATDPQKYEPGTIRGDLGVVVGRLVRHKERKEYTVKFVNLHESVFALVFIKAQGVQCQASRGES

SEQ ID NO: 62689 - protein, 78 aa, Zea mays
  Coding DNA Sequence Number=SeqID_19314
MQAACNYTKGMHPFDFDASRVAAQAHTSCNWRAGYYVRKTAPPLTPMLRLLNYETGTGKGDTPKGILLREGSGPRAPY

SEQ ID NO: 62690 - protein, 436 aa, Zea mays
  Coding DNA Sequence Number=SeqID_19315
  Pfam annotation: Domain name=TolA; Domain location=51-385; Score= -115.9; E_value=0.002; Accession=PF06519.2; Description=TolA protein
MAKAHHECYTGIQKLIADAIVEKRAAKERRRKVKNDPRAGAEHFASIDGESPPNSQPTRAPRIAVRKRKASSNPPGNDQPPVGPPETEEEPLSRDTGMQHPTAQDHITYSRRSDRSIQVANTQKAEAEKKKAEIEMKNAKAEEAEKRKAEAEQADKKKAEEAENKRKAEAEVAEIKRKAAAEEAEKKKEVEAENKRKAEAEVAEMKRKAAAEEAKKKKEEEAEDKRKAEAEKAEIKRKAEAEEAEIKRKAEAEEAEIKRMAAAEEVVKKKADAEKKVDAEEKRIQVAIQKQLKDNIKALKKPVPAAKLKKMFQLQMSKEYAEQCQQYEDRLNMLRQEAKAEIDSLENSIDGQAGPSSSFDDIQFPAESDDDINNLTQPIRLSQDEVSVGQADFSEFQRMIFKRLGDRVLKKPREYISPFKIPRNRPEIPLAQGCCT

SEQ ID NO: 62691 - protein, 122 aa, Zea mays
  Coding DNA Sequence Number=SeqID_19316
  Gene Ontology: Mol. function=aspartic-type endopeptidase activity; Biological process=DNA integration
  Homolog annotation: Hit_ID=Q2R291; Match level="QueryCoverage=100%, HitCoverage=10%, E-value=2e-11, Identity=33%"; Hit description =Transposon protein, putative, unclassified
MEKAARPPVSCTIAACSLTGEHTLAMGPTGGSSTLCHDLSVSLKMMRKAEEGTKALRTGAGVERMTNFANNLKYFDMELNNDFIVYLILVSLLKEFETFVVSYNMSVEKWIMERLIAMCVLE

SEQ ID NO: 62692 - protein, 121 aa, Zea mays
  Coding DNA Sequence Number=SeqID_19317
MNKNPGNRNAITNGTPVPPPQVRTTPLHGGRPAEQQKTDERLAAARSNYDDNNPRSGSPSRSSAGLRTGSEQKKPNRRAWCAQPPSGYKRPPTFAQTNGREGRAAMQAACNRARWTHFSDF

SEQ ID NO: 62693 - protein, 70 aa, Zea mays
  Coding DNA Sequence Number=SeqID_19318
  Gene Ontology: Mol. function=DNA ligase (ATP) activity; Cellular component=intracellular; Biological process=DNA recombination
  Homolog annotation: Hit_ID=Q9LL84; Match level="QueryCoverage=67%, HitCoverage=3%, E-value=2e-12, Identity=65%"; Hit description=DNA ligase 4
MGGSFSMNLNDSVAHYIAAEKKGIKYQVALQQRRIIHYEWILDCCKENIFICIVGSWPKIDSDDPSKRME

SEQ ID NO: 62694 - protein, 159 aa, Zea mays
  Coding DNA Sequence Number=SeqID_19319
  Gene Ontology: Mol. function=transcription factor activity; Cellular component=nucleus; Biological process=regulation of transcription, DNA-dependent
  Homolog annotation: Hit_ID=A2WTE5; Match level="QueryCoverage=50%, HitCoverage=30%, E-value=2e-11, Identity=47%"; Hit description =Putative uncharacterized protein
  Pfam annotation: Domain name=AP2; Domain location=51-103; Score=46.6; E_value=8.6e-11; Accession=PF00847.11; Description=AP2 domain
MAAAGGGARAEAGLRKFLVEHQPCCNATVPKGSVVDGGKRKVAAAGVPTEPRYRDAQRRRPRGRYSAEIRDQHKGVWLWLGTFDTAEEAARRYDSEACRLRGPSENTNFLATLDYRVPLPALSLHALLPCVRTLVWIGVERYSQHSKGIVVLHDESTAS

SEQ ID NO: 62695 - protein, 183 aa, Zea mays
  Coding DNA Sequence Number=SeqID_19320
  Gene Ontology: Mol. function=aspartic-type endopeptidase activity; Cellular component=chromatin; Biological process=chromatin assembly or disassembly
  Homolog annotation: Hit_ID=Q53KY4; Match level="QueryCoverage=60%, HitCoverage=7%, E-value=2e-09, Identity=30%"; Hit description =Retrotransposon protein, putative, Ty3-gypsy sub-class
MARVACTLRGKRLDGGVSVLLVGVNLIWCTAIHYMRKFMNCIRYCTLTYLPTLSEWELDLLEQQMPSRTHAHDGAQTSHGQEDKPNPPPVPPTLAEAIAALVTVTADNTRFLREMAGHQLQQQGGRAYLQGPREASYLDFSETHPPLYVKAEDPLKADEWVQVIEQKFGLIRCTETQKPLFAV

SEQ ID NO: 62696 - protein, 148 aa, Zea mays
  Coding DNA Sequence Number=SeqID_19321
MGKSKKGGSSSHHSDDKWKRELSPPSEDFGDSEYSEKEFSSESEGSPAYASPPVSSDDSDDSQGIAAEVWTYIRAVERSGLEGSDESEVFSDEEDSSDSSEEGSSDDGEDEGNGGDKGNDDSGSSKGDDVSSKDDGGNGTTSGKAPLV

SEQ ID NO: 62697 - protein, 226 aa, Zea mays
  Coding DNA Sequence Number=SeqID_19322
MGKEKQICAEVPGFSSPFSLTNQPSVYYSHESLTLRITPGLILYLTHDPCLARTVTGAKITAARLTGGSIAPVGWSVTSGRSRRSRRCAGRRWRWPELLWPRAQATEVVSGTCSGQTTAVGFNQSAREAPLGDVEAMRARNREMVQWITRSTCSGGVTNSGERDLTALVGLVLGSSLGKLHGLKRKLFEGSDRAEVGGIGLVMVVALGWLWRSRGGRRSCGLAQEG

SEQ ID NO: 62698 - protein, 165 aa, Zea mays
  Coding DNA Sequence Number=SeqID_19323
MAQRLTRSTCVGGAPNSGEHDCANPVAGVHGSSSSKLHGLPGKLPRGLDREEEGGKWFDHGGCPRAALAGRGEVAGAMGELRGVWRGTEDATGKIAGHWGGLYSCGAGVVMGRLRARRDCNLADGEYVLVPEQGVAQEVAQDPAPEPAIKDLPAPTLEGKPRFYA

SEQ ID NO: 62699 - protein, 266 aa, Zea mays
  Coding DNA Sequence Number=SeqID_19324
  Subcellular localization annotation: CTP_CleavageSite=59; ConfidenceScore=5.28e-01
MARRWCPAQRAALDPATAQPRPVALARPRSWPLPAQRSRPLPVRRGLDVAPCRLGAAVRHAPARGAPLPVRRGQPGARAPPLLGVVVVPPAHAVPAPVCPALARSPPTRPPRHGCPRCGLARRVAPLRSAPPHAVAPRCGVARPLLPAACPPRHGSRRALPARCSLSERSVAPAQRGPSSRGRGAPAWHGPLHATSPDVTNWGVVRFAVMPLMGLGLHSDTPLGHLGSDQWRVMISEQKENHDLWVKDVWITGGDENGGFGIDYGN

SEQ ID NO: 62700 - protein, 122 aa, Zea mays
  Coding DNA Sequence Number=SeqID_19325
MASEGGGVGHTAGRGSPSQGRKGRRREEEEESGLTVGGEKAMQADGVEGGSDRCGRGGGGKGKERAAAATVNACASRVGNAGRCGRAGAAGPCHEAGPGQGWAARGGGGDSAGPRHDTELGR

SEQ ID NO: 62701 - protein, 69 aa, Zea mays
  Coding DNA Sequence Number=SeqID_19326
  Subcellular localization annotation: CTP_CleavageSite=48; ConfidenceScore=5.07e-01
MAGPRRRFRGRCAARFLTASTNWRSLDPAARALFPQHSPPRSRARHCRPAAADGETSSVLAPRLRFVVK

SEQ ID NO: 62702 - protein, 191 aa, Zea mays
  Coding DNA Sequence Number=SeqID_19327
MAHARKTASKSTIPIGVPRHQLASRHEGSSSGSNDPIGDLEAKVEELKTELHHRSRVRAQDGQRIAELAADVRRLQDELSERDLVIDWAVNSRSIAWDHEAKARARVNDLSAALDSLQVYYNTLHEEVHVLYARLHQDVPADPVAMGAGPSGTTGEGPDGDLDLFRPPPSMNLADDLSPAAGNEETKDDED

SEQ ID NO: 62703 - protein, 118 aa, Zea mays
  Coding DNA Sequence Number=SeqID_19328
  Subcellular localization annotation: CTP_CleavageSite=66; ConfidenceScore=5.13e-01
MGARHARKARRVGCAPWATSRTRAGHDGRALATPRCRLAGSMPGRGYQAAQRARWATQRARQAVLRARRAARLTQRKGGEGRRRRRAHHGNEPQHDDDSDTSVLVYNFEIQMSFENFE

SEQ ID NO: 62704 - protein, 100 aa, Zea mays
  Coding DNA Sequence Number=SeqID_19329
MAKPGHATPRGPLLRKQKPSRPYIPVAGMKAKSHQQPDQGELTLGAMDVLMIRNLGEDQQGLGKGLGVEEEQQGRPRQEGISLRGEVTRVSRVITNGAVV

SEQ ID NO: 62705 - protein, 229 aa, Zea mays
  Coding DNA Sequence Number=SeqID_19330
MHPDSNCNGLDMVGKIKRLSNQPNWDKPSWRGQSCVTGDNQQSRAVVIARNRWLVALDHQRRDLHSIKLSHLTEDRAVSSITCEHLTLAYVNSPSGFLRPDQVHANREHRYTTIQPLATKGTRYSRHLSTPIVCYLIMVLVCSRQSLPMMRHVTSYKVLDHQAYIDMVLNRLRRRHYTETPFSCKPTAQSQLYYFQPKVWYLAESKAKHKKNLFYKTGDQGKEYRFWLF

SEQ ID NO: 62706 - protein, 125 aa, Zea mays
  Coding DNA Sequence Number=SeqID_19331
MAHGYVAQAFGWKCQKFIYNYAKSTVRNTVDYSGQEKPFGKTGQARTVRALAADRPRHKDDPRTEPMQKHKFPLQTVRRKSKDRPSPRADRPASGADRPVAVDLQGRTVRTRRADRPRSAERPNG

SEQ ID NO: 62707 - protein, 309 aa, Zea mays
  Coding DNA Sequence Number=SeqID_19332
  Gene Ontology: Mol. function=protein binding; Biological process=iron- sulfur cluster assembly
  Homolog annotation: Hit_ID=A2XPJ3; Match level="QueryCoverage=36%, HitCoverage=62%, E-value=8e-49, Identity=63%"; Hit description =Putative uncharacterized protein
  Pfam annotation: Domain name=DUF1751; Domain location=172-256; Score =99.8; E_value=8.4e-27; Accession=PF08551.1; Description=Eukaryotic integral membrane protein
MVDGPEKIKGGVRVDAGTDASPPSLSGTERASAELTVTGDRIREGSLALAEIVGSSRVDRRGSGDPTTSLIPSPSFLLPPLHVSTKQGNKGEVDLHLREEAAGVVMMESQPLQAPTATAPPPGSAEPAGAPPAVTPGKEFTRTCKGLVVVLIGGYVLLQLLPSSLNYLAIIPSKTIPYVWTVFTAGYIEQVLPGAIGSSLGLLFCGKDIEPAWGRKEFLKFIILINSICGILAFCFAIGLYYVTGKESFLIMAFIVPDSINFLPTLVSGMYVSWLYLRYFQRNPLTGLKGDPSDDFSFPSLFPAAMSYF

SEQ ID NO: 62708 - protein, 46 aa, Zea mays
  Coding DNA Sequence Number=SeqID_19333
MAERIRDEVAGMFRDKLGVSVSGAARLHVRLDPIAYVMGHKQRVST

SEQ ID NO: 62709 - protein, 320 aa, Zea mays
  Coding DNA Sequence Number=SeqID_19334
  Homolog annotation: Hit_ID=Q5GAU8; Match level="QueryCoverage=10%, HitCoverage=23%, E-value=1e-09, Identity=90%"; Hit description =Putative uncharacterized protein
MTDAEKEVATERRMDSPPRCDCGDRAVIDEDYDRQFCCPNIDYPYGWRKCRFREWLYGPLSHWPEPEVKEKRYMGWAAEEVKFDPVLCKCGIEAKYGLVPSELGVGYFCGHMVDYDEETRKCSWESYDDKGEVMRTIESKRIMGQKMRCGSRLVDSYINDRIRDMRREAKSAFYDSPKRAEYRRLKAADEKRAQDVREWEAAQAEKQMLDNLADRLKGKIGSGVNYLADEAHARYVQDKMAMMEEEDDDTSRLSELIALAEAGLHEEEEDDTSRLSELIALAEAGLRAHRTSHRTSSPLETGHGSGPAERATPSNQKNFH

SEQ ID NO: 62710 - protein, 115 aa, Zea mays
  Coding DNA Sequence Number=SeqID_19335
MDGGEHEAEESSYKRRERLLALRSAANASPAGAPPPTAAGSILPDPDLPGDEAASVCPTPPQRFDYYTNPAAAFTSSSGGATNPTWSHKRKSPPACYAPPPPPPAYGPYYPTSTY

SEQ ID NO: 62711 - protein, 442 aa, Zea mays
  Coding DNA Sequence Number=SeqID_19336
MAERYQLPRSCVPPTTRRKDCGHPPSGGSEGGKTRCIREREDMVAFQGGHPPFKGDSPYLRPQPSWAESSPTRSKVLPLRRGGWIPHIMQAGPEQKKPNRRARCMQPPSGYKQFSTFSQTSGRKGGQPCRRHATAPSGRTSPTAHLSDFQRAQHGSPRPRVMQPARRSLRASNCTATRTTTAPPRLRNQYRDSRRPSARPAAPAWRDGQYDQKWAGSNGGGRRAGAAVTSSAKLTSHPGAAGPLEAFNSRLRARGLHTHYWSEVRRPAPRKGSTAASGHSGSTPTTDQGGNDLVTESHQREASSPRTPSTGDRVRQITRRYFWACLWASSRPLANGARTSARITRQQLTGDTMFGAHRGQHGASPLLAERRRRGVCKKVESVPDRPLALCRGSGAALANPAPAKPLTASTNQPENLEPDRAPGLRPARMRERPDQPKHYARH

SEQ ID NO: 62712 - protein, 167 aa, Zea mays
  Coding DNA Sequence Number=SeqID_19337
MSPYSTTDDAARGACWGELASARELGDRALGPRPWQAGCSANRSAPTPPHLAAPGRAGLAGHAMATPPGAMAVLGARCRPSRTERAGRDGRAPAAGRAAGRRDATGHAKGRRALDEGRLPGPRLGRGRTPAQGRCPAEQTSRRAACLNCAMAARWGAEAARPRPAPP

SEQ ID NO: 62713 - protein, 27 aa, Zea mays
  Coding DNA Sequence Number=SeqID_19338
MTKICVSILLASTLHFTPSCNTLNLGV

SEQ ID NO: 62714 - protein, 107 aa, Zea mays
  Coding DNA Sequence Number=SeqID_19339
MACYLEAVDLGVWRVTRDGMKPPKNPEKPTTNNELVRDMYSRLNLIINELNSIGINKLGDADIVRMIISLLPQQRYGSIITILHNMEDLGTMTPTIVIGKIAAFEMS

SEQ ID NO: 62715 - protein, 249 aa, Zea mays
  Coding DNA Sequence Number=SeqID_19340
  Gene Ontology: Biological process=intracellular signaling cascade
  Homolog annotation: Hit_ID=Q69RQ8; Match level="QueryCoverage=73%, HitCoverage=44%, E-value=3e-86, Identity=80%"; Hit description=Leaf senescence related protein-like
  Subcellular localization annotation: CTP_CleavageSite=65; ConfidenceScore=5.21e-01
MPLLARSTTAGPRRRAFVLALLLLPPLFLILLHRTSSPSLRPLPAPRKPSSRSQSCDYSAGEWVRDPLAGSSLRYDNTCKEIFKGWNCIANGKPNARDLLSWRWRPVGPGCELPRLDPRRFLEHLRDTSIGFVGDSLNRNMFASLVCMLRGVSGEVRKWRPAEADRGFTFLRYNLTVAYHRTNLLVHYGRWSANPNGGTLESLGYKHGYRVDVDIPDQTWVEACSFHDVLIFNTGHWYVNATIHVLPCH

SEQ ID NO: 62716 - protein, 67 aa, Zea mays
  Coding DNA Sequence Number=SeqID_19341
MYVAKHQISYCKCSGTYRLVVVASLGLLDTLGAPKARFAGNIASDPYTMKKGMLLLGQELTGFTSLD

SEQ ID NO: 62717 - protein, 229 aa, Zea mays
  Coding DNA Sequence Number=SeqID_19342
  Gene Ontology: Mol. function=methyltransferase activity; Biological process=metabolic process
  Homolog annotation: Hit_ID=A2XPJ7; Match level="QueryCoverage=74%, HitCoverage=22%, E-value=1e-75, Identity=84%"; Hit description =Putative uncharacterized protein
MQYLLVCYLEHWCNGAEQTEQNTGAVMVAFLASLKAFWSPQLLMDTVTSVREGRCPAEAVVSQNAESQISEVMLIVQVCSTSVDEALMKEEFDKLSAALVQGAATCSPPLPLTTIVVQDHKGISNAAPTDCPLIPLLVPKGDKLDGTSEDKTRIHDHISNLKFSISPTAFFQVNTLAAERLYALAGDWANLNSDTLLFDVCCGTGTIGLTLAQRVGMVISFTPRLDHCN

SEQ ID NO: 62718 - protein, 110 aa, Zea mays
  Coding DNA Sequence Number=SeqID_19343
  Homolog annotation: Hit_ID=Q6QP51; Match level="QueryCoverage=77%, HitCoverage=55%, E-value=4e-16, Identity=45%"; Hit description =Putative growth-regulating factor 1
MAPRKGSTTASEHSGSAPTTDQGFEGWPLGRVRQPPQSTQSEDSGYVRYMAEARATLPRSDFVTESHQREASSPRTLSNGSGSGKSPAEARGLLSQPGYDQTVDSVNKPA

SEQ ID NO: 62719 - protein, 85 aa, Zea mays
  Coding DNA Sequence Number=SeqID_19344
MKPGVDLEGSRMSSASLSADDLRRRVAGTIGRLDAGALTQPMMRLERGYVSLRSAFRIVGPWTSLGAPEVHPMGVAPELRVDFGK

SEQ ID NO: 62720 - protein, 150 aa, Zea mays
  Coding DNA Sequence Number=SeqID_19345
MGKNNKRKREPTPPSEDFGDSEYSEEEFSSESEGSPAPIPLRESSDDSDDSQGLAVEVWTYIRAVKRSGLEGSDELEYSSDEEDSSEGGGGDGDDDDDDDGGGGGNDGDDGDDDDGGGRGGSGGSKDGDVGSGRGNSRGGSSRGSNRASG

SEQ ID NO: 62721 - protein, 164 aa, Zea mays
  Coding DNA Sequence Number=SeqID_19346
  Homolog annotation: Hit_ID=Q69MX1; Match level="QueryCoverage=71%, HitCoverage=26%, E-value=8e-12, Identity=38%"; Hit description =Putative UBX domain containing 1
  Subcellular localization annotation: CTP_CleavageSite=74; ConfidenceScore=5.10e-01
FWAASGRQKQKLEPNGVVAHATLLRRREPIAPAALQLSTSAGSSPALHQRRSDFAPFTPLVSSSRCPDANGTAAAAAVACPSCGDAFPSEVAVSEHLDGCLASAGGARACASAYLAADLAPPAASVEVVKRLLGNLLREPENDKFRYFFTSSDDCWSYVKRGKQ

SEQ ID NO: 62722 - protein, 41 aa, Zea mays
  Coding DNA Sequence Number=SeqID_19347
  Gene Ontology: Mol. function=hydrolase activity, hydrolyzing O -glycosyl compounds; Biological process=carbohydrate metabolic process
  Homolog annotation: Hit_ID=Q7XIV4; Match level="QueryCoverage=78%, HitCoverage=7%, E-value=5e-09, Identity=93%"; Hit description =Putative alpha-galactosidase
MTSETMEILSNKEVIQVNQDPLGVQGRKILGQELMCFMMYL

SEQ ID NO: 62723 - protein, 150 aa, Zea mays
  Coding DNA Sequence Number=SeqID_19348
  Homolog annotation: Hit_ID=O48967; Match level="QueryCoverage=37%, HitCoverage=12%, E-value=6e-21, Identity=83%"; Hit description =Putative uncharacterized protein
MMLQIIEHRTETSIDFAMEGEAASSTPQRPGNCCDTLWWSTALVVAVATGGQGDRNKRLRPQKGSSGSCPMHPNGRHSAAECREIIDLAKRVSERRGQSSKDGSPPRRRPSKEKVDDGEVATAERDLGYQSPEGDLKDIFAGGSYSGEDN

SEQ ID NO: 62724 - protein, 158 aa, Zea mays
  Coding DNA Sequence Number=SeqID_19349
  Subcellular localization annotation: CTP_CleavageSite=30; ConfidenceScore=5.16e-01
MAEPRFPASADPASNARVLKCQLGALSQPNANSPEPRPCVGGESVTRQPDKPRRREPSSPSTPKACDRVQNLHQVREKPPVESSGGFGDRISLNRSPICYSIPLGLDWRNRPILYGWLGLEAKYRFDQGDWRPLIRNPVVEIRCSVLARRGSIWSTVV

SEQ ID NO: 62725 - protein, 561 aa, Zea mays
  Coding DNA Sequence Number=SeqID_19350
  Gene Ontology: Mol. function=anion channel activity; Cellular component=membrane of vacuole with cell cycle-independent morphology; Biological process=malate transport
  Homolog annotation: Hit_ID=Q8S7M8; Match level="QueryCoverage=98%, HitCoverage=98%, E-value=0.0, Identity=70%"; Hit description =Putative uncharacterized protein OSJNBa0095C07.34
  Pfam annotation: Domain name=UPF0005; Domain location=40-520; Score =525.9; E_value=4.6e-155; Accession=PF01027.11; Description =Uncharacterised protein family UPF0005
  Subcellular localization annotation: CTP_CleavageSite=24; ConfidenceScore=5.09e-01
MGMLASALSSFNKKSTLLQMLTSLAKTVGRIPASWGRHAWSIGSEDPRRAVHALKAGTALTLVSLLYILEPFFQGIGKNAMWAVMTVVVVLEFTAGATICKGLNRGLGTVLAGCLALLIELVAAGTGKVLRAFIVGASVFIVGFAATYTRFFPAIKKSYDYGVLIFLLTFNLITVSSYRQQDVVSLTRDRLSTIAIGCAICLFMSLLVLPNWSGEDLHSSTVGKFQGLATSIEARRDCYQNLPQINSYRRKVAACVNEYFRDQDEGDDVLGKQEARASIQIGYRAVLDSKSSDETLAHYASWEPRHSMHCYSYPWQKYVKLGSVLRHFAYTVAALHGCLESEVQTPPSVRSLFRGPCTRVAREVAKVLQELAASIKHHRRCAPDVLSDHLHEALQDLNSAIRSQPRLFLGSKHACAANKRVLLMELNSGSGKLSASRAALRSFKTDATALSETRNARSDQPPPPSDRSERSGGLLRPTLSKIAITSLEFSEALPFAAFASLLVEMVVRLELVIEEVKNLERVANFRELATGHNHLIVDLGSKEKTRNSNAAALHPVSAAAE

SEQ ID NO: 62726 - protein, 86 aa, Zea mays
  Coding DNA Sequence Number=SeqID_19351
MGRGDVLELGRDDRRGGAGAELEAGRCAGWLGTAVGGSSGAPGGCGWAGWRCWRRGRKKQKNGVGGRRKKKRGCSGGLSQVSSGSR

SEQ ID NO: 62727 - protein, 107 aa, Zea mays
  Coding DNA Sequence Number=SeqID_19352
MAAYRWDQVEEPFARHQRAYVEYSNELDALTPSMVTWQLYLDPYFASIQLSSMCSIDEDIYLMRFDRQRQKKVTGFETHHRDYIDEWEQQGDLNYVSNRRTQTTTSE

SEQ ID NO: 62728 - protein, 202 aa, Zea mays
  Coding DNA Sequence Number=SeqID_19353
  Gene Ontology: Mol. function=phospholipase D activity; Cellular component=membrane; Biological process=phosphatidylcholine metabolic process
  Homolog annotation: Hit_ID=A2Y0V0; Match level="QueryCoverage=100%, HitCoverage=24%, E-value=5e-84, Identity=74%"; Hit description =Putative uncharacterized protein
  Pfam annotation: Domain name=PLDc; Domain location=48-75; Score=39.5; E_value=1.2e-08; Accession=PF00614.13; Description=Phospholipase D. Active site motif
  Subcellular localization annotation: CTP_CleavageSite=14; ConfidenceScore=5.27e-01
QGIDANPRDYLTSSASATGRRRSQESTCPRRKAELTLATSRPSKNRRFMIYVHTKMMMVDDEYIIVGSANINQRSMDGARDSEIAMGAYQPHHLAAASRPARGQVHGFRMSLWYEHLGAVDDAFTRPDSVECIRKVNAMADRYWDLYAGDGPERDLPGHLLTYPVAVGTDGSVNQLPGMEFFPDTQARVLGAKSDYLPPILT

SEQ ID NO: 62729 - protein, 544 aa, Zea mays
  Coding DNA Sequence Number=SeqID_19354
  Gene Ontology: Mol. function=phospholipase D activity; Cellular component=membrane; Biological process=phosphatidylcholine metabolic process
  Homolog annotation: Hit_ID=A2Y0V0; Match level="QueryCoverage=97%, HitCoverage=64%, E-value=0.0, Identity=83%"; Hit description =Putative uncharacterized protein
  Pfam annotation: Domain name=C2; Domain location=25-129; Score=30.4; E_value=6.6e-06; Accession=PF00168.21; Description=C2 domain
  Pfam annotation: Domain name=PLDc; Domain location=352-391; Score =43.0; E_value=1.1e-09; Accession=PF00614.13; Description =Phospholipase D. Active site motif
  Pfam module annotation: Pfam domain module=C2::PLDc; Domain location =25-129::352-391
MSGLRTLGDLISTGGMARILLHGSLHVTIFEAEELSNSSRPSSQAPGFLRKLVEGIEDTVGVGKGTSKIYATIGLGKTRVGRTRKLTDETASPRWYESFHVYCAHLASDVVFTIRAKNPIGASTVGVAYLPVRDIFEGHEVDRWLHLCDGGGDDKDRTPLESGGKVHVRLQYFDISKDHSWGKGVRSGKYPGVPYTFFSQRQGCRVTLYQDAHVPDGFVPRIPLDGGRCYEAHRCWEDIFDAISGAKHLIYITGWSVYTEITLLRDGARPPRPGSGVTLGELLKKKAGEGVRVLMLVWDDRTSVGALKKDGLMATHDEETMNYFEGTDVHCVLCPRNPDDSGSIVQDLQISTMFTHHQKIVVVDHDMPVQRSQRQRRILSFVGGLDLCDGRYDTPCHSLFRTLDGAHHDDFHQPNFATAAIAKGGPREPWHDIHCRLEGPVAWDVLYNFEQRWRKQGGKDLLIQLRDLADEIIAPSPVTFPNDPETWNVQLFRSIDGGAAFGFPDTPDDATRAGLVSGKDQIIDRSIQDAYIHAIRRARSFIYI

SEQ ID NO: 62730 - protein, 143 aa, Zea mays
  Coding DNA Sequence Number=SeqID_19355
  Homolog annotation: Hit_ID=Q5GAU8; Match level="QueryCoverage=73%, HitCoverage=82%, E-value=1e-39, Identity=68%"; Hit description =Putative uncharacterized protein
MYREALWQKRGHPRELYPDVSSKDAHVPPELPVPNCDCGRLAWGHLRCFFFQWIDGPDKFDPRYLLFANWLCGRTSHEHFKRWLPPPPNPPPMTDVEKEPYGRRKCRFREWLYGPLSYWPEPEETRKCSWESYDDKGERLDVA

SEQ ID NO: 62731 - protein, 156 aa, Zea mays
  Coding DNA Sequence Number=SeqID_19356
MPSVLSDYFEKRILKTTEYTGRRRHTLQDNLILQARVFTLEGGCSTLGIDDTFSEVRPSLGRRRGPGTSPGIRPEQAARPVTPGASANHLPRAPARSEASAANSASVRADIATPGLGSSKSGQGVSLTKLEEPQTIRPIEPRDSYASGIRIPHSSP

SEQ ID NO: 62732 - protein, 248 aa, Zea mays
  Coding DNA Sequence Number=SeqID_19357
MSPGVGAGPWYGGIGVDPRCSNAGVSLDADSKLPRQQATSPKQGSFELRKKLQGCDRGSATSSTNPTGILKSRLVPPSHLSSSQISPSTRVIRLRIQDQLQASSQGTGHVTTPNFCRYSPCLMDSADSIADKAIGRMQEISDKIFSVARETIRPGRGLTSFDATKLRVALEEIACMLEQDSLVLQEHLDIVNNVNIPVDSSYEPSTLSSPPPSDDDLTPHWDFAEHFQNFWGVEYDSDQMPSFSDNDV

SEQ ID NO: 62733 - protein, 411 aa, Zea mays
  Coding DNA Sequence Number=SeqID_19358
  Gene Ontology: Mol. function=protein binding; Cellular component =nucleus; Biological process=regulation of transcription, DNA -dependent
  Homolog annotation: Hit_ID=Q655Y0; Match level="QueryCoverage=99%, HitCoverage=94%, E-value=1e-143, Identity=68%"; Hit description =Putative stamina pistilloidia
  Pfam annotation: Domain name=F-box; Domain location=4-51; Score=34.3; E_value=4.3e-07; Accession=PF00646.24; Description=F-box domain
MDPRVWSRLPQPLVDRVLACLPTPSFLRLRAACRRFGNLIYSSPFLHSHLLLSPHLPFFAFAVPSAGYPYLLLLDPTTQAPAPSWSRLPLPLPAAPGAVQAAFSPAAASAGLLAFLSDASGHKTLLLANPITRLLAPLPLCPTARLSPTVGLAAGPTSFIAVVAGDDLVSPFAVKNISADTFVADAASVPPSGFWASSSILPRLSSLDPRAGMAFASGRFYCMSSSPFAVLVFDVATNVWSKVQPPMRRFLRSPALVELGGGREREAVVALVSAVEKSRLSVPRSVRVWTLRGEHGAAAGGSNGGGAWTEVARMPPDVHAQFAAAEGGRGFECAAHGDFVVLAPRGPASPVLVFDSRHDEWRWAPPCPYPYPYAAGGAGFRVFAYEPRLATPAIGLLDATAPAAFLHGMQG

SEQ ID NO: 62734 - protein, 273 aa, Zea mays
  Coding DNA Sequence Number=SeqID_19359
  Gene Ontology: Mol. function=tRNA-pseudouridine synthase activity; Biological process=pseudouridine synthesis
  Homolog annotation: Hit_ID=Q654A2; Match level="QueryCoverage=89%, HitCoverage=78%, E-value=8e-74, Identity=68%"; Hit description =Pseudouridylate synthase
  Pfam annotation: Domain name=PseudoU_synth_1; Domain location=123 -262; Score=23.4; E_value=5.8e-05; Accession=PF01416.11; Description =tRNA pseudouridine synthase
MATAAKARAPPAVTASKAAAAAVELEEHVHYKHTDACHQLRWTAKESYEYMYARPWSRVVDFYAELVRAGAGAAGLAKLFGNDEKDYTLYTAGENYLTPSEKPTTTTFSKGRGGRWERVTFKVVISYHGGSFDGWQKQPGLNTVQGLVEKHLGQFVDERKAKQLEARSLPIEGCAIVAGRTDKGVTALQQDHKGGMVVMCVELVANRFLRKMVRVLVATAIREAAAGAGADALLNLMEATDRRATAPPAPPEGLCLVDVGYEDFDKQRCFIVD

SEQ ID NO: 62735 - protein, 197 aa, Zea mays
  Coding DNA Sequence Number=SeqID_19360
  Homolog annotation: Hit_ID=Q6QP51; Match level="QueryCoverage=65%, HitCoverage=66%, E-value=9e-13, Identity=39%"; Hit description =Putative growth-regulating factor 1
  Subcellular localization annotation: CTP_CleavageSite=66; ConfidenceScore=5.37e-01
MAAQGAGRAVSSSLAKSLGLRKPKREAGSGAKNRHQTLSQGPGKGDTPKRILPREGTRLRASLLIRGSKAGPPEGFDSRLRSRGPYTHYWSEVRRPAPRKGTTAASGYSGSAPITDQGFEGWPPKEDDELRSARPRARTRAKSQKMTNSASPDPRARTPPWPQPTTSASPDPEARTQPRSRKTDSTSVSEEPPHRPT

SEQ ID NO: 62736 - protein, 73 aa, Zea mays
  Coding DNA Sequence Number=SeqID_19361
  Subcellular localization annotation: CTP_CleavageSite=39; ConfidenceScore=5.19e-01
MAFVASVKSSSLAFGTSDEGAKSTSRIDCSPVISNEKVCASKLANTSSEALKAFEASLKVEQAIHQMGTSSKC

SEQ ID NO: 62737 - protein, 72 aa, Zea mays
  Coding DNA Sequence Number=SeqID_19362
  Homolog annotation: Hit_ID=A3BVN4; Match level="QueryCoverage=100%, HitCoverage=10%, E-value=2e-12, Identity=54%"; Hit description =Putative uncharacterized protein
MDKQEPVANVEQKIGLSRKPKELPIANKDENATVPLISVGSNAIDLPSEGQIQVGTLNMDGGHNSAHNLYSS

SEQ ID NO: 62738 - protein, 120 aa, Zea mays
  Coding DNA Sequence Number=SeqID_19363
  Homolog annotation: Hit_ID=Q8H897; Match level="QueryCoverage=35%, HitCoverage=3%, E-value=5e-07, Identity=60%"; Hit description =Putative retroelement
MHEEQWTMFTGSGRFEMRNTLRPGEYVLCNGLQGSSRKELREFYVPWLMTNIVNIVQLDKSSYKVDIDVRMMQIREPNRHMLVKVAIKHIHEQAKGEFWGKLKVFHTNCEGDFTSIELVE

SEQ ID NO: 62739 - protein, 90 aa, Zea mays
  Coding DNA Sequence Number=SeqID_19364
MSSEDFSDCLAYKHLKGLFLSKALKNKRNVEGEAARKEIVKPRSEGGGPGMKEANGDYALITGLLEAFEAEDCDMDEGLKPKVRKTPSLC

SEQ ID NO: 62740 - protein, 101 aa, Zea mays
  Coding DNA Sequence Number=SeqID_19365
  Subcellular localization annotation: CTP_CleavageSite=70; ConfidenceScore=5.27e-01
MAARFLHGGAPPEQCPSEAPGPNPSSSVHKKKANAIANTSKGDSPRCSSLASKASSQSQSLHKLCFNVPRTQMSTSRHLAEDFFIFEPRHQQSRTTLSSRT

SEQ ID NO: 62741 - protein, 108 aa, Zea mays
  Coding DNA Sequence Number=SeqID_19366
MSQDKKVAAETKLSEEEKLLEEKTADEDITIIDTTIPVTTSPFVANQGPMTRARARKLNYQVNSFLAIEANSSLNEVLKPYDDFIMLNCLGGSRLFLARQEQQQQESV

SEQ ID NO: 62742 - protein, 80 aa, Zea mays
  Coding DNA Sequence Number=SeqID_19367
MAGEQPGADVPLAPSSSVQETTVEKLVTIIEATASQAKAGVVNLFEDSDNIDIEEDSTTIYPTKPSHVDFGKSKIKGGHL

SEQ ID NO: 62743 - protein, 33 aa, Zea mays
  Coding DNA Sequence Number=SeqID_19368
MAAATTVAPGTSAPVGPTSRAHDYMVQRNLFNS

SEQ ID NO: 62744 - protein, 706 aa, Zea mays
  Coding DNA Sequence Number=SeqID_19369
  Gene Ontology: Mol. function=protein transporter activity; Cellular component=clathrin adaptor complex; Biological process=intracellular protein transport
  Homolog annotation: Hit_ID=A2Y9S0; Match level="QueryCoverage=97%, HitCoverage=79%, E-value=0.0, Identity=74%"; Hit description =Putative uncharacterized protein
  Pfam annotation: Domain name=Adaptin_N; Domain location=1-445; Score =264.8; E_value=1.8e-76; Accession=PF01602.11; Description=Adaptin N terminal region
  Pfam annotation: Domain name=Alpha_adaptinC2; Domain location=598 -701; Score=75.0; E_value=2.5e-19; Accession=PF02883.11; Description =Adaptin C-terminal domain
  Pfam module annotation: Pfam domain module=Adaptin_N::Alpha _adaptinC2; Domain location=1-445::598-701
MARDLAPEVERLLQNRDPNTKKKAALCSIRIVRKVPDLAENFMSAAASLLKEKHHGVLISAVQLCMELCKASHEALEYLRKNCLEGLVRILRDVSNSSYAPEYDIGGITDPFLHIRVLKLMRILGQGDADCSEYINDILAQVVSTKTESNKNAGNAILYECVETIMGIEATSGLRVLAINILGRFLSNRDNNIRYVALNMLMKAIAVDTQAVQRHRATILECVKDADVSIRKRALELVYLLVNDTNVKPLTKELVDYLEVSDQDFKEDLTAKICSIVEKFSLDKLWYLDQMFRVLSLAGNYVKDDVWHALIVLMSNASELQGYSIRSLYKALQASGEQESLVRVAIWCIGEYGEMLVNNLSMLDMEEPITVTESDAVDAVEIALQRYSADVTTRAMCLVSLLKLSSRFPPTSERIKEIVAQNKGNTVLELQQRSIEFSSIIQRHQSIKSSLLERMPALDEANYLVKRAASTQAAVSSVNSAPAVTSGGPLKLPNGVAKPPPAPLADLLDLGSDDAPVTTSAPTTSPNDFLQDLLGIGGAPSTSTDILMDLLSIGSSPVQNGPPTSNFSLPGIETKPPPVTPQVVDLLDGLSSSTSLPDENAAYPTITAFQSATLRITFSFKKQPGKPQETTINASFTNLATTALTDFVFQAAVPKFIQLRLDPASSSTLPASGNVSVTQSLSVTNNQHGQVQTYLEYQTPPILAKK

SEQ ID NO: 62745 - protein, 176 aa, Zea mays
  Coding DNA Sequence Number=SeqID_19370
MWGAHGRDAVRERSDRAREQVKMERAEDIEDLRGLVGASPEAAEGFGPAHATATDNANFVAALTMVAENDSDDSVSMFFESDDSGSSVVWTEESSDEDLDYFVALDVAAAEASPREMDAEVLPGSSAGRRRRRAVAKRRVSEVESGRLRVDGAGKRELLSSPVGASVGEGEFAKSF

SEQ ID NO: 62746 - protein, 46 aa, Zea mays
  Coding DNA Sequence Number=SeqID_19371
MYLSACEKKVDKVWRFEYQAADYLGNDRGPSDVSGSRKSETVEQTV

SEQ ID NO: 62747 - protein, 115 aa, Zea mays
  Coding DNA Sequence Number=SeqID_19372
MARTIRSLTETYTSFLYVVTSSTINQWIFLIYIVVVWVVLRRSLQFFHTQLQFDVFWGTLMDTNFHKHQVIDWQFMLGQSVMEGLIPKFEACGLYDFMGQKTDFSDGCETVPGNC

SEQ ID NO: 62748 - protein, 184 aa, Zea mays
  Coding DNA Sequence Number=SeqID_19373
MDKNQNLTYAPYIMALIMAKIRFEGRCEIAHTPFRPFKNDIGFLTRPLTPFPNDEEEARDDEEVAPEAYAAEQMPPPPPPPQPEQFWQPGPGYFDPYFQHMQQGLQTHMDGRFQGMLTHMNQRMDRDDNMGALSSQFDSLSTNESIQDIRQRQQQLQHDFGQFSSVFDTFSTHYYNMYSPPSDQ

SEQ ID NO: 62749 - protein, 421 aa, Zea mays
  Coding DNA Sequence Number=SeqID_19374
  Gene Ontology: Mol. function=metal ion binding; Cellular component =integral to membrane; Biological process=ubiquitin cycle
  Homolog annotation: Hit_ID=A2Y9S1; Match level="QueryCoverage=61%, HitCoverage=79%, E-value=4e-89, Identity=63%"; Hit description =Putative uncharacterized protein
  Pfam annotation: Domain name=PHD; Domain location=213-255; Score= -3.9; E_value=0.038; Accession=PF00628.20; Description=PHD-finger
  Pfam annotation: Domain name=zf-C3HC4; Domain location=211-252; Score= 42.3; E_value=1.7e-09; Accession=PF00097.16; Description=Zinc finger, C3HC4 type (RING finger)
  Pfam module annotation: Pfam domain module=PHD::zf-C3HC4; Domain location=213-255::211-252
MSQADMYSTKDLDLVLVLVLVLVLIGGTQKSRLCPAQKAFRFSARNEQRAARGRSGDREKEEGEMLLLGLATGCCVLAVAGEAEKQDGGGASSGGGHGLGSKISPAVLFAVVIAAVVLFVSCLLHLLVRLLLRRGRARARARAPAEAGAGAGGGADAAGGGGEESALQRQLQQLFHLHDAGLDQDVIDALPVFLYREVVGAGAGAKEPFDCAVCLCEFAGEDRLRLLPLCGHAFHIGCIDTWLLSNSTCPLCRCALGADAAALFDEEGMWEHEDAVLPVRLGKFKNLARAAPGPVRAGAGIVTREAGETSSSSLDARRCYSMGSYQYVLAEASLQVSVHRRHGDGHGRGGAGLRGVGVGSNRAGATEGKRIGAGSKGDSFSVSKIWQWPRNGKEKLPVLASDDSPAMNGRLPWQRPSPGDS

SEQ ID NO: 62750 - protein, 255 aa, Zea mays
  Coding DNA Sequence Number=SeqID_19375
MSLSWRMATRPSRRRRACPFLWQAARPYYRMRHDHHHSYVAREASSARQCYADRGYQGTRRLHWRLALLAPSITSVMFLSPHVGDQHPCTLLGRRRRRHPSLDAFADLTEPTEAKRPAVSTLRPTRCKTKAYDEVAPSRILVQHEGPHATEDGKVIGISTEEQLQLRALRIKNHNLQKQKEILEAKRQRVSAQAKVRQMIRNEEQKAQELEQEIALMQREGQLGLQHSPPIQQRAQIEDMFIPQRGHAIPHAVAF

SEQ ID NO: 62751 - protein, 400 aa, Zea mays
  Coding DNA Sequence Number=SeqID_19376
  Gene Ontology: Mol. function=DNA-directed RNA polymerase activity; Cellular component=chloroplast; Biological process=transcription, DNA-dependent
  Homolog annotation: Hit_ID=Q9XPS7; Match level="QueryCoverage=92%, HitCoverage=34%, E-value=0.0, Identity=96%"; Hit description=DNA -directed RNA polymerase subunit beta
  Pfam annotation: Domain name=RNA_pol_Rpb2_6; Domain location=1-309; Score=287.7; E_value=2.3e-83; Accession=PF00562.19; Description=RNA polymerase Rpb2, domain 6
  Pfam annotation: Domain name=RNA_pol_Rpb2_7; Domain location=311-388; Score=132.1; E_value=1.6e-36; Accession=PF04560.11; Description=RNA polymerase Rpb2, domain 7
  Pfam module annotation: Pfam domain module=RNA_pol_Rpb2_6::RNA_pol _Rpb2_7; Domain location=1-309::311-388
MQARLDEEAGQLVQLWQNVGQEWAGRAPAGTSQGSAEKITKQIPHLEEHLLRNLDKNGVVRLGSWVETSDILVGKLTPQIASESSYITEAGLLRAIFGLEVSTSKETSLKLPIGGRGRVIDVKWIQRDPFDIMVRVYILQKREIKVGDKVAGRHGNKGIISKILPRQDMPYLQDGTPVDMVFNPLGVPSRMNVGQIFESSLGLAGDLLKKHYRIAPFDERYEQEASRKLVFSELYEASKQTKNPWVFEPEYPGKSRIFDGRTGDPFEQPILIGKSYILKLIHQVDEKIHGRSTGPYSLVTQQPVRGRAKQGGQQIGEMEVWALEGFGVAHILQEILTYKSDHLIARQEILNATIWGKRVSNHEDPPESFRVLVRELRSLALELNHFLVSEKNFQVNREDV

SEQ ID NO: 62752 - protein, 349 aa, Zea mays
  Coding DNA Sequence Number=SeqID_19377
  Gene Ontology: Mol. function=DNA-directed RNA polymerase activity; Cellular component=chloroplast; Biological process=transcription, DNA-dependent
  Homolog annotation: Hit_ID=Q6L3A5; Match level="QueryCoverage=87%, HitCoverage=20%, E-value=4e-96, Identity=62%"; Hit description=DNA -directed RNA polymerase subunit beta''
MANDQVSHRLLDTFGKKDREILDYLTPDRIMFNGHWNCFYPSILQDNSDLLVKKRRNRLVVPLQYHQEQEKERISCLGISMEIPFMGVLRRNTIFAYFDDPRYRKDKRGSGIVKFRYRTLEEEYRTQEEEYRTREEEYRTREEDSEDEYESPENKYRTREGEGEYKILEDEYRTLEDEYETLEDEYGILEDEYRTLEKDSEEEYGSLENKYRTREGEGEYEILEEESEEEYGSSEDGSEKEYGTLEEDSEEDSEEDSEDEYGSPEEDSILKKEGFIEHRGIKEFSLKYQKEVDRFFFILQELHILPRSSSLKNKSSKRVQLIHYRRISKGELRIGMNVYQEFLGFPGDS

SEQ ID NO: 62753 - protein, 412 aa, Zea mays
  Coding DNA Sequence Number=SeqID_19378
MVTQDGDHQFDGGEKQAGLRLCPALSFKDLHHPCWGGGRAEPKLYLPYGPVGHLLLQHLGERALTGLAEGRTSTTRDRLAASVVSSSMPGSLAQLALAQLPVPPPTAGQSVAICPPSVLARPGGFERGSAGGRVDTTVGAEVVAAGEGLVADEIVGTICALGLWLFGFDSLSSPLEWGHGREPCRSSVCPEVIAAAVWPPGAEVVVAIAAAVWPPGAEVVVAAAGVVGGEPPGILSSRRPSNVGGCSYLREWNWSSVCNGTLSAGVCSLWLSGPEHLGIFGAIPCFFLISSTRIAHPSENYFSQKVMSEVSVSRRRRSSSARSALPLTCTLTRPQDSVIDIVEKAQKIVSAEKFSSVKTCSVSGIAYPSVSYLSQKVMSEDPTIEVVEKRERRSDKKTFSEENFDAEGVPPF

SEQ ID NO: 62754 - protein, 280 aa, Zea mays
  Coding DNA Sequence Number=SeqID_19379
  Homolog annotation: Hit_ID=Q6J9V9; Match level="QueryCoverage=37%, HitCoverage=27%, E-value=2e-10, Identity=45%"; Hit description =Putative uncharacterized protein
MAAAGERKRRSNRLQAHVPSWDSERALSRDGRRHLWQAKRATLHLRHNDHVKKGTGKGDTPKGILQCEGSGPRALLLIRGSKAGPSEGFDSRLRALGLRTHYWSEVRRLAPRKGSTAASGHSGSAPTTDQGFEGWPPEGFDGCLRTRRARDDSGYVRYMAEARATLPRGSGAALANPAPAKPLTASTYQHENSEPDHAPGSKLHPLKGHDLAWPKPSLGQEQQTQKNSAACPAPTVVPPARVRLTAAKSSLRRHRKLCLARPQGSDSTSTSEDGLRLARP

SEQ ID NO: 62755 - protein, 669 aa, Zea mays
  Coding DNA Sequence Number=SeqID_19380
MDKDRQGAAQKRQATVRIHEARPKRQRGTAKAAASGGGKPPLPAKAGASAPSKAPEATVGAGGSKLTKVVPPVSGVAEAAKAARTLPPPGKRVADFGTEINVEDYLVGSDEGQLALVAPGAAIATAALAPKARGETLGVGGEVSALALVRDEAGVATRRLKGVTEALSQATEALSQVADFTSRTASGALTAALSAEVERLRTQHADAVREKSASDSKCRKLADKVAALEKEKADLRRQLARERREANEAIAKEQAAQAEAKLARAEGNIAKELAGQLQERLTALESRAKGAEAAMRAEAERTRTKLMATYRELGARTGDFEVPEREPGLCCLEWVQEELQELPTVLGGLMLFTSLVTCEGAMNALSREGCRHFEAFDQADEDFGRDIYEAEDPVVKESAGALYDRMWGLCGREVVRERAEAARAQAERGERVDDFGALNSALPDPEPTPTEAATGVALEPTPEPAEDLPQKVAEGTPDAPAAAAPSAEDLAVVVAEAAAEAAAEAPAAAGPSQVQDFGPAHATATTEFLAASTAEGGNEYGGSESEFSDFTDSGSSVEWTEESSEEDLDYFAALDVAVAEASPRAADAPDVPGPSTGCRRRRAVAKRRVSAEEGARLRVSRAGRLELLSLSAAAGTGEGELRSLFAGEELRIMLFNYREMGIIPKVEPM

SEQ ID NO: 62756 - protein, 196 aa, Zea mays
  Coding DNA Sequence Number=SeqID_19381
MVGTSVAVARWQPGTIGALSAKVGESSIVVAKATTPQAEDVAMDPAKGSGDDTEDIDIEEDSNIIRPMKPSRVDFRKSTIKGRHIEEAKKKKRKQKHPKVTLKRHKISASKKKPKARIAQASEEPKTNSRDDDVVELPILEKTPLESIASEPKEAPTSEFFPSTIEEDGHIALVMSALFFYGDEEDGEDVTNMKGS

SEQ ID NO: 62757 - protein, 198 aa, Zea mays
  Coding DNA Sequence Number=SeqID_19382
  Homolog annotation: Hit_ID=Q60EK4; Match level="QueryCoverage=64%, HitCoverage=30%, E-value=5e-08, Identity=26%"; Hit description =Putative uncharacterized protein OSJNBa0032D15.11
MCCVANENDSGSTNGDEEEERSFVQLYARLSQEDKAVMLKLLERAKEQSEARQRLEDILSMKMLHFDELTKEHEELKCSHVDLVQSISSFELELAGTKDDTYQKLKEEIERLKMSLTQLKGKCIAQPSQDNRDHMVKKLETGTTVACTTFLKENVKDLRIAKRKKQKMKFNTSSKSLNHASTKGNIQGNPKLQLVLER

SEQ ID NO: 62758 - protein, 378 aa, Zea mays
  Coding DNA Sequence Number=SeqID_19383
  Gene Ontology: Mol. function=hydrolase activity, hydrolyzing O -glycosyl compounds; Cellular component=anchored to membrane; Biological process=carbohydrate metabolic process
  Homolog annotation: Hit_ID=Q5NA70; Match level="QueryCoverage=24%, HitCoverage=76%, E-value=1e-33, Identity=70%"; Hit description =Putative beta-1,3-glucanase
  Pfam annotation: Domain name=X8; Domain location=38-146; Score=116.3; E_value=8.8e-32; Accession=PF07983.4; Description=X8 domain
MRGGDRPSASLQLLSLGLVLLYFFTSGSTVGLVEGQKTWCIAKPSASNEILAQNLDYACSQVSCAVIQKGGPCYYPDSPVSRAAVAMNLYYAYSGRHPWNCYFNNSALVVQSDPKKLKATPNPRGAAPPDTTAPVPGDGTMRRQPFSRHAGFFSCLQRVEDRLASESEQQHQEQKESPPPPATAKATATTRQTEASPFSDTMTASPLLFLDPAAPAPAPGSSSGPALDFLTAATQEGKHIQQEDDDNDGGGDGDEEDIARLMELLGLSSGGGGSSRRDDDGGGCDCSGADGFLAKVVGVVGPKCDREKGRLDAWIRHYHRGGGREPARLAHLLLARAAADTAAVAFPASVKDFLDHDPPRQLTDESEWSDANGDNNRD

SEQ ID NO: 62759 - protein, 188 aa, Zea mays
  Coding DNA Sequence Number=SeqID_19384
  Gene Ontology: Mol. function=oxidoreductase activity; Biological process=electron transport
  Homolog annotation: Hit_ID=Q10BT2; Match level="QueryCoverage=35%, HitCoverage=19%, E-value=1e-17, Identity=72%"; Hit description=Cell death suppressor protein Lls1, putative, expressed
  Subcellular localization annotation: CTP_CleavageSite=42; ConfidenceScore=5.27e-01
MKALEAALQVASVAVVGFLAVAKGTVLTSTVQRAAVVLAAVLCFAASRWLANFIQNFYFQDYIHAYKCQRFIYNYTKSTVRNTVDYSGQEKLFGKSGQERTVRALAADRPRHYFDFDQELQIRDSPTKPRTVQLQCADRPAIIHGQSASEDLVQPEGDKLSKRNYIAGADRPGPRADRPRGVTEADSR

SEQ ID NO: 62760 - protein, 178 aa, Zea mays
  Coding DNA Sequence Number=SeqID_19385
  Subcellular localization annotation: CTP_CleavageSite=28; ConfidenceScore=5.03e-01
MSSEPTEQRSTASTVKSAQCRSQKSELRSQNAPDSPVAHRTCPVQQEDKRLQRSTAPNHNGLLTWQAPDSEQYPVRYATGLSDAPVDSRFSQGLNWWVGAINTPQPPPFKPSKPPTLLIQYKSKGKHSKDTIKAFNPVRALKSTQLLRDLREDHLCSFVALVAWIAFPLLILILLSAL

SEQ ID NO: 62761 - protein, 182 aa, Zea mays
  Coding DNA Sequence Number=SeqID_19386
MAQEEENQDQDDEPPQEEDIDKGEMKMIKIRKMIKRFRTKDHRTQESTKQFKEITPLTPYLMTSTMGVQHKCLSVKWWTKYKSSKKEKNNWKCLGSSSQDSAQSGSTGLSGGAPDSVRCSSLPYSVLLCEHLCKGERLQVVEIPRKRDIEKQSKTPWYSSGSLDRLRGVDCNPRLSGRHNVE

SEQ ID NO: 62762 - protein, 780 aa, Zea mays
  Coding DNA Sequence Number=SeqID_19387
  Gene Ontology: Mol. function=amine oxidase activity; Cellular component=cytoplasm; Biological process=amine metabolic process
  Homolog annotation: Hit_ID=Q8L866; Match level="QueryCoverage=91%, HitCoverage=92%, E-value=0.0, Identity=80%"; Hit description =Putative copper amine oxidase
  Pfam annotation: Domain name=Cu_amine_oxid; Domain location=338-759; Score=849.0; E_value=2.5e-252; Accession=PF01179.11; Description =Copper amine oxidase, enzyme domain
  Pfam annotation: Domain name=Cu_amine_oxidN2; Domain location=89-209; Score=12.7; E_value=0.00061; Accession=PF02727.7; Description=Copper amine oxidase, N2 domain
  Pfam annotation: Domain name=Cu_amine_oxidN3; Domain location=214 -318; Score=158.4; E_value=1.9e-44; Accession=PF02728.7; Description =Copper amine oxidase, N3 domain
  Pfam module annotation: Pfam domain module=Cu_amine_oxid::Cu_amine _oxidN2::Cu_amine_oxidN3; Domain location=338-759::89-209::214-318
MAAAKEKASVCCRDAPARVAGAPVVPMRAIAASPVGKVVALAAGGGERVSASAAGSSGAVIEEIAAVQPTTAKASSKGIPIMTRAQRCHPLDPLSAAEIAVAVATVRVAGRSPEERDSMRFVEAVLLEPEKNVVALADAYFFPPFQPSLLPRSKGSAVIPSRLPPRRARLVVYNKQSNETSIWIVELSEVHAATRGGHHRGKVISSEVIPDVQPAMDAMEYAECEATVKSYPPFIEAMKRRGVDDMDLVMVDAWCAGYYSEADAPSRRLGKPLIFCRTESDSPMENGYARPVEGIHVVVDMQNNAVIEFEDRKLVPLPPPDHLRNYTPGETRGGVDRSDVKPLIINQPEGPSFRINGYFVEWQKWNFRIGFTPKEGLVIYSVAYVDGSRGRRPIAHRLSFVEMVVPYGDPSEPHYRKNAFDAGEDGLGKNAHSLKKGCDCLGYIKYFDAHFTNFTGGVETIENCVCLHEEDHGILWKHQDWRTGLAEVRRSRRLTVSFICTVANYEYGFYWHFYQDGKIEAEVKLTGILSLGALMPGESRKYGTTIAPGLYAPVHQHFFVARMDMAVDCKPNEAHNQVVEVNVKVESAGTHNVHNNAFYAEEKLLKSELQAMRDCDPSSARHWIVRNTRTVNRTGQPTGYRLVPGSNCLPLALPEAKFLRRAGFLKHNLWVTQYKRGEMFPGGEFPNQNPRIHEGLPTWVKNDRPLEETDIVLWYVFGLTHIPRLEDWPVMPVEHIGFMLMPHGFFNCSPAVDVPPSSSDADVKEAESPKAIQNSLISKL

SEQ ID NO: 62763 - protein, 555 aa, Zea mays
  Coding DNA Sequence Number=SeqID_19388
  Gene Ontology: Cellular component=nucleus
  Homolog annotation: Hit_ID=A7P552; Match level="QueryCoverage=35%, HitCoverage=86%, E-value=2e-43, Identity=41%"; Hit description =Chromosome chr4 scaffold_6, whole genome shotgun sequence
  Pfam annotation: Domain name=RNase_H2-Ydr279; Domain location=11-218; Score=79.1; E_value=1.4e-20; Accession=PF09468.1; Description=Ydr279p protein family (RNase H2 comp
MTPWHDSLAPPPRVLISHRPSDASGQGIVLSLQHPRSGDEVGYLFIDGQLQEINWFKERYGAWFLGDYVCEDGGLYYCTPVDPIFIFLPTFEAARMSNDKDPGKFRQLDEILYVEGYPGYQQLMNVANHHMELVCEVKVKEAVQMIREYLKDEPWLALLCKKLQLDINAITVDATTKTAEASVYADSCPAPALPSESKTANGGAKSSKGRPAKKAKTEAVNSASVQPSLPSRMPSRPHYIVVHGSASPRRLRPPPARPCVPKSRIRPDAPSAHASASMTLAPPAISLRDPHPHSSGSPQENLAASAGTTSSSTSPGTPRSRGPHRGPRRRLLLLPPPGRTALRREGVPPHHRHPLPQLGGAQVLLLEVQVPRRAAPHPLLFRPNNNAPLSTLETCRAADFSRDAWSGWWTRLAKNDNCEDVDAAGRYIREIHLRGIPNPIRTTESRHHPGLLPRQHHHPRRAMPPPAYLPLGHAGATELRYQDVEVDTRRCDVRNWSGRQCEALVPHDSADELQHPDGAGGVVASQDTWRYDYSDYGQSSGKVFIPEAMNADRIS

SEQ ID NO: 62764 - protein, 286 aa, Zea mays
  Coding DNA Sequence Number=SeqID_19389
LGTNSTSTNLGLNHLPPANSANGHSFNCSLHDCEPQSRLVHGIEKTSISPEHGFGLDNTDDSTPAVTRSCRANVGYPTYCQELFAILTTAPTTTTRTTPPSNRLGCTTEPLALASALCTVKDANTGTGHPLPSSSQQQVGVREHRTWVYTCTPDRRATVSAAAAGTLRCFPILPKVPAIAEIHRDPSPLDDQILRSTAAAPRRRQAACGLCGGMVVPQLLREYATPATASKGRTICAQGPDGPRPGARLGLLPDGRTVRACAVAAEDRRRRLYLAPGRDPVGEERS

SEQ ID NO: 62765 - protein, 251 aa, Zea mays
  Coding DNA Sequence Number=SeqID_19390
  Subcellular localization annotation: CTP_CleavageSite=73; ConfidenceScore=5.08e-01
MALGGIGTNSSIKAKGVKSVESTIRTKATACHPTPPKGSGHMFGTKLSLADGPRFGQSAPGGRTGCPVGLGLLSMHNGGWGRLAKNRFFFTIPLAPDAWKVRGQLGLRVVVGFQVRDFGTLVDRVERAEASARGSVVHPSLFDGGVVRVVVVGAVVSMAKSSWQYVGYPTLALQLLVTAGVLSSVLSRPKPCSGEIEVFSMPWTSLLWGSQSCREQLKEWPFAEFAGGRWLRPRLVEVEFVPRLRPASGEA

SEQ ID NO: 62766 - protein, 828 aa, Zea mays
  Coding DNA Sequence Number=SeqID_19391
  Gene Ontology: Mol. function=sequence-specific DNA binding; Cellular component=nucleus; Biological process=regulation of transcription, DNA-dependent
  Homolog annotation: Hit_ID=Q41813; Match level="QueryCoverage=100%, HitCoverage=52%, E-value=0.0, Identity=94%"; Hit description=Hox2b protein
  Pfam annotation: Domain name=Homeobox; Domain location=329-377; Score= 9.1; E_value=0.0014; Accession=PF00046.20; Description=Homeobox domain
  Pfam annotation: Domain name=Homeobox; Domain location=79-139; Score =12.3; E_value=0.00067; Accession=PF00046.20; Description=Homeobox domain
  Pfam module annotation: Pfam domain module=Homeobox::Homeobox; Domain location=329-377::79-139
EAYGKESSNSSDDKEWSGKELLEGSETDSLSERPHPVKRCSRRAQAEQQNNEHTPQRERLHGSESEQKTGILRSNGSSSTGRKFGPVATQKLKVHFEKDPYPSRETKENISEELGLTFNQVSRWFSSTRHYSRVASARKEMHPDGHTSENNDTTTVDSMQARQPNTVVMEKLTGNRNDIVSEKPMVQNNLNQGVAEKLTRDRNDIVPEKQVVQSNLNQCNNEDIPLSGTEIEMESYEQESSESSDEEWSTLSTPRKTKLQGNEKVSLTESLRSAKRCSRRAPAREQNNEHTQSEQLHGSASEQQAREQLHGSVSKQQTEVLRSNVSSGDASKCHFGPIVTQKLKEHFEKDPYPCRATKEGLAQELGLTFNQISKWFSATHHYSRDAVAKNQKYPGENTTENNSSTIFDGIQVIEPNFGLIDKPDADTNDMISEKLMVQINLNEGIEEDIPPSQYTTRCEEKLTMTQAAISREAGPPGYGPGENFLQVSSRITSCEQSVIMAPSAIARGVGPPGYTPGEHQGNGAPWNTSYERRPFTSPTTSSREVGPPGYGPEENQGSGISCNTSREQILFMSPTTISRELGPPGYLPRENQRSDTSWNTSCESGLFMSPATTSIEHGPPGYGPGENQENDSTSCELRMFTSPTIVSREVGPPGYQQGVFMSPKTISREVCPPGFGSGENQGNDTTWYKQSAFTSPTTISREVGPPGYGQEDQGNGGSWNTSCEQGVFTSPTRGISREVGPPGYGPGESQGNTTSWISTCQQRMLAGIQRTGGSRSMDLEAFPPGYGPGGASGSVISPQARSAENVEFSDEARKKAIQRELRRRQKFR

SEQ ID NO: 62767 - protein, 401 aa, Zea mays
  Coding DNA Sequence Number=SeqID_19392
  Gene Ontology: Mol. function=sequence-specific DNA binding; Cellular component=nucleus; Biological process=regulation of transcription, DNA-dependent
  Homolog annotation: Hit_ID=Q41813; Match level="QueryCoverage=83%, HitCoverage=24%, E-value=1e-133, Identity=53%"; Hit description =Hox2b protein
  Subcellular localization annotation: CTP_CleavageSite=58; ConfidenceScore=5.45e-01
GPLNDRIPDKPAANKRKRASPSQVGSSSNSVRVLRSAIKNKDEACSKSLSDRTAGEPAANKRKNVNRSKTGSLSCGVRVLLSASKAKDETSTKPLNDSAAVEPASGKRKGTSPSKVGSASNSVRVLRSTSKYKNETCTEPLNDSGAVEPAANKRKGVSRSKKRSLNSSVRVLRSASNNKIEVSIKPLGNSTAGQPAAKRRKSGSSFEAGSPVSSARVLRSTSERKNEASKPLNESTAAQPAARKKKAGVISKTDNPKIGLRVLRSASGKKNEACIGHVNDSTSAEPTVTKRNRKPSMGSQSQEGLLKNLSKIPPGDQRWLCPACVCKADSIDALNELQGSKLSIHDSWEKVFPEAASIANGSKQVDTSDLLPDHIKHSDNPALVEGLMVNEVRLSAEDDSK

SEQ ID NO: 62768 - protein, 83 aa, Zea mays
  Coding DNA Sequence Number=SeqID_19393
  Homolog annotation: Hit_ID=Q41813; Match level="QueryCoverage=34%, HitCoverage=1%, E-value=3e-08, Identity=96%"; Hit description=Hox2b protein
MHSDAEHVVTSYGLRDLDALNRQDHIKHSDNPALVEGLMVNEVRLSAEDDSKEIANPPDPQLQIPPTSSCNHCLFNRFLDIVI

SEQ ID NO: 62769 - protein, 81 aa, Zea mays
  Coding DNA Sequence Number=SeqID_19394
  Gene Ontology: Mol. function=transporter activity; Cellular component= integral to membrane; Biological process=RNA metabolic process
  Homolog annotation: Hit_ID=A2ZBI5; Match level="QueryCoverage=86%, HitCoverage=11%, E-value=2e-16, Identity=64%"; Hit description =Putative uncharacterized protein
MAQGHISLSMSPLTSYFISEEAPFDCKGFSFIVASFFLAISFCLAWMLNPGMKDKGTKAAVSDNADEEAAQGPLLAKWTRP

SEQ ID NO: 62770 - protein, 221 aa, Zea mays
  Coding DNA Sequence Number=SeqID_19395
MARVTVGNKEGEITLLLVKRSSSPRLFLHEPTWLSYRLTHEANQAVQPDDKAPSKPQPNKQCGADRSPNKMKRGEGDIAVRRDENDFGNFRYSGNRFRNFSIGFTGNGIFRKRNRFSEFSIGIGVSASLYPRGCSLGRAEHNLDDVVLVPDHLQPQRWIHGVDEAPHAHRRPAEQQAACARPVQRTTTREAEWHLTDEAETEDATLSAWMSWSRHSRSRRL

SEQ ID NO: 62771 - protein, 182 aa, Zea mays
  Coding DNA Sequence Number=SeqID_19396
  Subcellular localization annotation: CTP_CleavageSite=58; ConfidenceScore=5.66e-01
MTCSSARPAAPATVTCSFATASFTSSASSHRRQGPHPRIYPVLPRLRLTRQGTQEWSMASPKVGNRPIVWEGATRGADLLRAPRCLTRTKVVALMVMASSALVNVVTVAHHPRPSVVAGVVRVPGPEEVYAAIDLVLPVAAKSTVGGESVTESGVRKMEQLLCRDDGGFGAERDYNPLKEKQ

SEQ ID NO: 62772 - protein, 498 aa, Zea mays
  Coding DNA Sequence Number=SeqID_19397
  Gene Ontology: Mol. function=sequence-specific DNA binding; Cellular component=nucleus; Biological process=regulation of transcription, DNA-dependent
  Homolog annotation: Hit_ID=Q94J16; Match level="QueryCoverage=87%, HitCoverage=99%, E-value=0.0, Identity=73%"; Hit description =Putative heat shock factor
  Pfam annotation: Domain name=HSF_DNA-bind; Domain location=73-244; Score=181.4; E_value=2.4e-51; Accession=PF00447.8; Description=HSF -type DNA-binding
MFVGHASLGTGQSDAPQADIKSLRSDGEATSARGGNLEEVSPLAKSRGEREEPEEEEEDAVVWRGMEGASSLPPFLSKTYEMVDDPATDAVVAWTPLGTSFVVANQAEFCRDLLPKYFKHNNFSSFVRQLNTYGFKKIDPEQWEFANDDFIRGQQHRLKNIHRRKPIFSHSSHTQGSGPLPDTERRDYEEEIERLKCDNAALTSELEKNAQKKLVTEKRMQELEDKLIFLEDRQKNLMAYVRDIVQAPGSFSSFVQQPDHHGKKRRLPVPISLYQDSNAEGNQVVHGGFITNPPACRESFDKTESSLNSLENFLREASEAFNISYGDGLPGPSSAVVITELHSSGESDPHVPSPVSRMHTSSAGAGDSLSSRDLTESTSCAESPRLAQIQPCTDSRTKVSEIDVNREPAVTETGPTRDQPAEEPPHVAAGVNDGFWQQFLTEQPGPDVHQEAQSERRDGDDDKGDQTRIGDRENFWWGKKNVEQMREKLGRLTSVEKT

SEQ ID NO: 62773 - protein, 923 aa, Zea mays
  Coding DNA Sequence Number=SeqID_19398
  Gene Ontology: Mol. function=catalytic activity; Cellular component =alpha,alpha-trehalose-phosphate synthase complex (UDP-forming); Biological process=trehalose biosynthetic process
  Homolog annotation: Hit_ID=Q75II7; Match level="QueryCoverage=100%, HitCoverage=99%, E-value=0.0, Identity=72%"; Hit description =Putative trehalose-6-phosphate synthase
  Pfam annotation: Domain name=Glyco_transf_20; Domain location=79-578; Score=830.8; E_value=7.5e-247; Accession=PF00982.12; Description =Glycosyltransferase family 20
  Pfam annotation: Domain name=Trehalose_PPase; Domain location=627 -874; Score=297.9; E_value=1.9e-86; Accession=PF02358.7; Description =Trehalose-phosphatase
  Pfam module annotation: Pfam domain module=Glyco_transf_20::Trehalose_ PPase; Domain location=79-578::627-874
  Subcellular localization annotation: CTP_CleavageSite=43; ConfidenceScore=5.16e-01
MSRSYTNLLDLAEGNFAALGPAAGAGGGGRQRQGSFGLRRMSRVMTVPGTLSELDGEDESEPAATSSVASDAPSSVAADRLIVVSNQLPIVARRRPDGRGWSFVWDDDSLLLQLRDGIPEDMEVLFVGSLRADVPVAEQDEVSQALLDRFRCAPVFLPDRLNDRFYHGFCKRQLWPLFHYMLPFSSSASAAGTTSSSSAATCNGRFDRSAWEAYVLANKFFFEKVVEVINPEDDYVWVHDYHLMALPTFLRRCFNRLRIGFFLHSPFPSSEIYRTLPVREEILKALLNCDLIGFHTFDYARHFLSCCSRMLGIEYQSKRGYIELDYFGRTVGIKIMPVGVHMGQLELGLRLPDREWRLSELQRQFQGKTVLLGVDDMDIFKGINLKLLAFENMLRTHPKWQGRAVLVQIANPARGRGKDLEAIQAEIEESCQRINGDFGQSGYSPVVFIGRDVSSVEKIAYYTIAECVVVTAVRDGMNLTPYEYVVCRQGAPGSQSVSEVSGPKKSMLVVSEFIGCSPSLSGAIRVNPWNIEATAEAMNEAISMPEQEKQLRHEKHYRYVRSHDVAYWSKSFIIDLERVCKDHFKRTCWGIGLGFGFRVVALDPHFTKLNMDSIINAYELSESRAILLDYDGTLVPQTSLNKEPSPQVLSIINTLCSDSRNIVFLVSGRDKDTLGKWFSSCPRLGIAAEHGYFLSVSNCIDYILCETGKREEEWQTCTQALDFGWMQMAKPVMNLYTEATDGSYIEAKESALVWHHQDADLGFGSSQAKEMLDHLESVLANEPVSVKSGQFIVEVKPQGISKGIVAERILASVKERGKQADFLLCIGDDRSDEDMFENIADIIGRNLVAPRTALFACTVGQKPSKAKFYLDDTFEVVTMLSALADATGPELETDSADESVAYISSLDIGDEQSESSDKPVEGS

SEQ ID NO: 62774 - protein, 78 aa, Zea mays
  Coding DNA Sequence Number=SeqID_19399
MAPFPLRLLRTATLPRRREASGQASRLQCPPASPLGWEEDPVAMEGAQDLPRLVASRILPAYHYHFQPSAATFSGQKL

SEQ ID NO: 62775 - protein, 138 aa, Zea mays
  Coding DNA Sequence Number=SeqID_19400
MSRAEAERTRQLLVDTYRGLGAGTGDFEVPDRESGLRCLEWVQEELQALPTVVEGFMAYASLVTCEGAMNALSREGCRHFEAARGERVDDFGALNSMLSDPEPAPAEAVPGPVLGPTPETAGDAPGSRFWACAHNRYY

SEQ ID NO: 62776 - protein, 120 aa, Zea mays
  Coding DNA Sequence Number=SeqID_19401
MTLGTSVTWPRLGLRSRGTLGHFRDQRERFVMESHRREAPSPRSLSNGSGSNKSPVGLGRSLGLPNSNSLETPCSAPTEGNMARSPSSLLKGDEGAYNKKPRRSSIVLSLRAEARRLLSH

SEQ ID NO: 62777 - protein, 73 aa, Zea mays
  Coding DNA Sequence Number=SeqID_19402
MAVTLARPAVAWLAAWVLRQSERCPLPCPASGGHTRAQGPPLPVRYCICPEAVDLVVSVKARLSSYTRDHVKA

SEQ ID NO: 62778 - protein, 419 aa, Zea mays
  Coding DNA Sequence Number=SeqID_19403
  Gene Ontology: Mol. function=DNA binding; Cellular component=nucleus; Biological process=regulation of transcription, DNA-dependent
  Homolog annotation: Hit_ID=Q0JKI9; Match level="QueryCoverage=84%, HitCoverage=49%, E-value=1e-139, Identity=69%"; Hit description =Auxin response factor 2
  Pfam annotation: Domain name=Auxin_resp; Domain location=273-354; Score=165.3; E_value=1.6e-46; Accession=PF06507.4; Description=Auxin response factor
  Pfam annotation: Domain name=B3; Domain location=146-251; Score =109.9; E_value=7.9e-30; Accession=PF02362.12; Description=B3 DNA binding domain
  Pfam module annotation: Pfam domain module=Auxin_resp::B3; Domain location=273-354::146-251
MAGIDLNTVEEEDEEEAEALPLPGPGGRGAVCLELWHACAGPVPPLPRKGSAVVYLPQGHLEHIGGDAARGAAASAVPPHVLCRVVDVTLHADGATDEVYARVSLLPEDEDAEKRAQAQARVREDEDRRDGEDGGAMRPLARTPHMFCKTLTASDTSTHGGFSVPRRAAEDCFPPLDYSQQRPSQELVAKDLHGTEWKFRHIYRGQPRRHLLTTGWSAFVNRKKLISGDAVLFLRGEDGVLRLGVRRAAQLKIVTPIPAPHNQCSSNSNLGNVAQAVATKTVFHIYYNPRLTQSEFIVPYWKFTRSFNQPISVGMRCRMRYESDDASERRCTGIIIGSREADPIWYGSKWKCLVKNIPTNVKSVLLNVKGVRAQGCRTPTTEFVVAIRGRRQGYTPTPPLFVNRVMPPGCRLRRIERGD

SEQ ID NO: 62779 - protein, 232 aa, Zea mays
  Coding DNA Sequence Number=SeqID_19404
MSGGTPDMYCRVSGDRWREVAVAPLAHRTVRCTPDMSGEEFNVKSPGTPDTVRWHTGQSGTPNTPKHGWKTSSKQTVKTDGFTPRPRASSDSGRTPGSPEAKLGQTLSYNNLGQIALPPTGNNTIHPVSTTVPTTRVKLMTVSHDLPRVQPRAQQGAPPRPTPCLDLSLSLGRRSPPRPTPGLDINLGLGRRSPPRPTLGLGLSLGLGRSHRLARPQPRTDYATGDTSLPYP

SEQ ID NO: 62780 - protein, 279 aa, Zea mays
  Coding DNA Sequence Number=SeqID_19405
  Gene Ontology: Mol. function=metalloendopeptidase activity; Cellular component=membrane; Biological process=proteolysis
  Homolog annotation: Hit_ID=Q94DI2; Match level="QueryCoverage=44%, HitCoverage=37%, E-value=5e-61, Identity=93%"; Hit description =Peptidase M48-like
  Pfam annotation: Domain name=Peptidase_M48; Domain location=1-156; Score=21.1; E_value=1.5e-07; Accession=PF01435.9; Description =Peptidase family M48
  Pfam annotation: Domain name=Peptidase_M56; Domain location=28-119; Score=-35.5; E_value=0.051; Accession=PF05569.2; Description=BlaR1 peptidase M56
  Pfam annotation: Domain name=SPC22; Domain location=121-258; Score= -59.3; E_value=0.03; Accession=PF04573.3; Description=Signal peptidase subunit
  Pfam module annotation: Pfam domain module=Peptidase_M48::Peptidase _M56::SPC22; Domain location=1-156::28-119::121-258
MLLNTEAPDLYIRQNPVPNAYTLAINGKKPFIVVHTSLVELLTPRELQAVLAHEMGHLKCDHGVWLTFANILTMGAYTVPGFGMVAGFLEEQLYRWLQAAELTCDRAALLVVQDPKVVISVPMKLSRGYSFFRFSYSHGMVAAFARAAWLKEYHEKVSMTLNILADLSPLFTWDTKQVFVFVTAECETPHDAFIQYVICTITVVFTFKAVYASIVNVHCTFTLLAQLCLTTFVFKYGSGLIIVAIFVLKLTSVKEKSLGLLTQNFVKLFFTMKVETISL

SEQ ID NO: 62781 - protein, 58 aa, Zea mays
  Coding DNA Sequence Number=SeqID_19406
MERSLHGDGVSSSSSCEGTNGDRRALASLTVTLGGEDGITPSMPPDELIKQLDVDMPK

SEQ ID NO: 62782 - protein, 142 aa, Zea mays
  Coding DNA Sequence Number=SeqID_19407
MTQKPYVRLLPLAHVMGSRPRGSIGSPPERGAEAYAVWSRHMSAPDPRLALIKAWVFFVSESRDLAVSGPDPAQGGTGTPVEVLDLTRRSDPYVQGSDTFPWGSGPTVDILEYIVFSSHVATREPPMWWGRVLFITRLEIVA

SEQ ID NO: 62783 - protein, 267 aa, Zea mays
  Coding DNA Sequence Number=SeqID_19408
  Gene Ontology: Mol. function=RNA-directed DNA polymerase activity; Biological process=RNA-dependent DNA replication
  Homolog annotation: Hit_ID=Q2QLW7; Match level="QueryCoverage=79%, HitCoverage=14%, E-value=4e-07, Identity=23%"; Hit description =Retrotransposon protein, putative, unclassified
MAMKNRGSGSNNHTMWNIQADPVDNLNSRSINQTKSSKCSVIIEELDTNEKGVDNSEELFSGTQGSSIVNVSQEEGEDLSDQRKKTDGIIHHEDNQKFMPSPIPIRRVSERLKKDMGIRIEEKNRRMAVKRNLEASKEIIDISKKMGVNINEQNMESIELLKEMELARQCLGQKKIEILQFIGLQETMIGDCDDFITRKLDPSGDYLWLWSPAKGKSGGILVGSRIDDLDVGSFKKGNHILQVNYWDKALLCKWNLMVIYGSCSGEI

SEQ ID NO: 62784 - protein, 113 aa, Zea mays
  Coding DNA Sequence Number=SeqID_19409
  Gene Ontology: Mol. function=RNA methyltransferase activity; Biological process=RNA processing
  Homolog annotation: Hit_ID=Q6Z3R9; Match level="QueryCoverage=94%, HitCoverage=44%, E-value=2e-43, Identity=83%"; Hit description=rRNA methylase-like
  Pfam annotation: Domain name=SpoU_methylase; Domain location=1-80; Score=-47.3; E_value=0.027; Accession=PF00588.10; Description=SpoU rRNA Methylase family
MGDPVFRLHGGVKFAPGFTQDFSYRPGDWLVFGSETKGLPQQALEDCCREGLGGGTLRIPMVETYVRCLNLSVSVGVALYEAARQLNYEQLQYQPDELPEEAQELFPAEDIYA

SEQ ID NO: 62785 - protein, 270 aa, Zea mays
  Coding DNA Sequence Number=SeqID_19410
  Gene Ontology: Mol. function=RNA methyltransferase activity; Biological process=RNA processing
  Homolog annotation: Hit_ID=Q6Z3R9; Match level="QueryCoverage=14%, HitCoverage=16%, E-value=1e-12, Identity=92%"; Hit description=rRNA methylase-like
  Subcellular localization annotation: CTP_CleavageSite=10; ConfidenceScore=5.09e-01
MAPPRPSWPFASATSRLWDVDFRRKRRQRNLSLGMQDRTGAQYRGGPRWLDWTRHTRFERLFVLVPLFLIPWLLDVNRVQSSQLAHSTFSRSDEPGSPSLQHKAVRTEGPRPVSLPPYPSDRCRIIREQQMEAGLRALGHRYFGGGGGGLGGFAAARATRLRRQRQRRMAAFCSREWQGIPPLPPSTSYRSGVSVYLTSLPTLANVSAVAVNGDGNGAAGGPVGSGVEVARARRMLHVVLVSPLIPGNTGSIARTCAASAVGLHLVGVSH

SEQ ID NO: 62786 - protein, 105 aa, Zea mays
  Coding DNA Sequence Number=SeqID_19411
MATAIQVAVKMLAGRAEELCVRCDAVRCDSLSSPIMQLCLCEVLRRQRCSRFNNRVVPQLPDGTCKAGDSEACRADPRGIRYDDTARTVGPAGRLNNSQKKQFGS

SEQ ID NO: 62787 - protein, 295 aa, Zea mays
  Coding DNA Sequence Number=SeqID_19412
  Gene Ontology: Mol. function=binding; Cellular component=protein phosphatase type 2A complex; Biological process=ethylene mediated signaling pathway
  Homolog annotation: Hit_ID=Q6K4K9; Match level="QueryCoverage=84%, HitCoverage=70%, E-value=1e-107, Identity=42%"; Hit description =Phosphatase 2A regulatory A subunit
  Pfam annotation: Domain name=HEAT; Domain location=129-165; Score =13.8; E_value=0.24; Accession=PF02985.13; Description=HEAT repeat
  Pfam annotation: Domain name=HEAT; Domain location=196-232; Score =7.7; E_value=1.9; Accession=PF02985.13; Description=HEAT repeat
  Pfam annotation: Domain name=HEAT; Domain location=235-271; Score =15.6; E_value=0.13; Accession=PF02985.13; Description=HEAT repeat
  Pfam annotation: Domain name=HEAT; Domain location=51-87; Score=29.0; E_value=1.8e-05; Accession=PF02985.13; Description=HEAT repeat
  Pfam annotation: Domain name=HEAT; Domain location=90-126; Score =25.9; E_value=0.00015; Accession=PF02985.13; Description=HEAT repeat
  Pfam module annotation: Pfam domain module=HEAT::HEAT::HEAT::HEAT::HEA T; Domain location=129-165::196-232::235-271::51-87::90-126
MRRRVLIGRTQCRRLPALCGVWGRVSLSAKPYPHNMQRLGLEPGTFRLQTDATLEQLLPIFLSLLKDEFPDVRLNIISKLDQVNQVIGIDLLSQSLLPAIVELSEDRHWRVRLAIIEYIPLLASQLGVGFFDDKLGALCMQWLEDKVFSIRDAGANNLKRLTEEFGPEWAMQHIIPQVICAKPMHIISYARATMESSVKGPLAEMVLEKINNPHYLYRMTTLQAISLLAPVMGPDITCQQLLPVVIASSKDRVPNMKFNVAKVLQSLVPILDQSVVEKTVKPCLVELSEDPDVDV

SEQ ID NO: 62788 - protein, 159 aa, Zea mays
  Coding DNA Sequence Number=SeqID_19413
  Subcellular localization annotation: CTP_CleavageSite=58; ConfidenceScore=5.21e-01
MAFVPMWLLHMPVWMSSSAKGSTQTNKKIQVRVQKKGAKETKENPGLAHRTVRSHRVRAAPEGAPDSEQCLSGAPSCQSSDDRNHQNPNSWVTWLAHRTVSGGAPDSVRWRTGLSGTFGLMSKRENLKRYEGWQCRSCEAGKLRHVRRKGNRLKDEKAI

SEQ ID NO: 62789 - protein, 59 aa, Zea mays
  Coding DNA Sequence Number=SeqID_19414
MKVNMIEKQDQAKALGGPRRQKLQQSESNGIGDVAGAPDMSGVHRTVRCTIRQTVPPNG

SEQ ID NO: 62790 - protein, 160 aa, Zea mays
  Coding DNA Sequence Number=SeqID_19415
MGKNNKRKREPTPPSEDFGDSEYSEEEFSSESEGSPAPIPLRESSDDSDDSQGLAAEVWTYIRVVERSGLEGSDESEYSSGEEDSSEEDGGGDGEDDDDDDGGGDGGGRGGSGNSKDGGGGSSRSGGGSSRSGARQQQGQQQGRQRQRQQQGQWLDATGP

SEQ ID NO: 62791 - protein, 96 aa, Zea mays
  Coding DNA Sequence Number=SeqID_19416
MVIMMRLFFASAFDRSPRTGYPKVKRLRTGQLRENPGPARYNSPDCPVYTGQCPRSNGYFAPTVDSDSEQYTRQKSEQRIREAPDCPVCTGLSGAT

SEQ ID NO: 62792 - protein, 254 aa, Zea mays
  Coding DNA Sequence Number=SeqID_19417
MALSTRPQKFWYNVLASSSRMDCSIMATTAMSCLRLKNLKTVPLHVVVDFVEPAYEGVDILLLLLESFLTSEDLCLTLVLVLLFLVGGFFIPCIILVSWWHCHETSSSDCISGIIVELRCLTVAQIVFKEIEDGGWLVTNHGHGCRGFASLTLLTDGGIMPLEVSFEGDNAPLEAPLVFFVLVAMGHVGIPVLAMMAEKRVRAVGKRFDIESGGAPLSLCRDDVGDFCQSKITHVLGEGIDGTIEVEMQFDRGG

SEQ ID NO: 62793 - protein, 27 aa, Zea mays
  Coding DNA Sequence Number=SeqID_19418
MDYMVFEVAELDEAAMICQTNNKMKET

SEQ ID NO: 62794 - protein, 162 aa, Zea mays
  Coding DNA Sequence Number=SeqID_19419
  Subcellular localization annotation: CTP_CleavageSite=26; ConfidenceScore=5.06e-01
MPSTSPMPVFCTLSLARALACCTLRRAVAVPCSPLLLTGEVAGEVVEHLRSLQPLENAPQNLLCLVASSPTSSPRRRFLTLLACRAACAPAQFSTTVGAIRQRTMTSSCAVTALSYCNLAGAPYVVQLSRPRRCLVAVTLTGACTVGLRGGYASAKQKFSSP

SEQ ID NO: 62795 - protein, 110 aa, Zea mays
  Coding DNA Sequence Number=SeqID_19420
MELPLDAQSSGRRLDVDERVEQCRVVAGVLHVLARFVQVLQMQHLRGHISNMHIVGVRHRDVTRASTSSLSRRTPLSFSVRVATICFLSIIRSVSNNFHVFANKFELRLM

SEQ ID NO: 62796 - protein, 81 aa, Zea mays
  Coding DNA Sequence Number=SeqID_19421
  Subcellular localization annotation: CTP_CleavageSite=32; ConfidenceScore=5.50e-01
MTSSCAVTALSYCNLAGAPYVVQLSRPRRCLVAVTLTGACTSSEFGTATSPELLRPACRVERRYHSRRDDLFSIHNPKFSK

SEQ ID NO: 62797 - protein, 62 aa, Zea mays
  Coding DNA Sequence Number=SeqID_19422
MRKKHMLEYSEKKFRDTIPENSETQIRVNGTERDCESGIGTERLRPIDFLERNGSGSEENIP

SEQ ID NO: 62798 - protein, 157 aa, Zea mays
  Coding DNA Sequence Number=SeqID_19423
  Gene Ontology: Mol. function=binding; Cellular component=protein phosphatase type 2A complex; Biological process=ethylene mediated signaling pathway
  Homolog annotation: Hit_ID=Q38950; Match level="QueryCoverage=88%, HitCoverage=36%, E-value=3e-67, Identity=59%"; Hit description =Serine/threonine-protein phosphatase 2A 65 kDa regulatory subunit A beta isoform
  Pfam annotation: Domain name=HEAT; Domain location=118-154; Score =26.5; E_value=9.7e-05; Accession=PF02985.13; Description=HEAT repeat
  Pfam annotation: Domain name=HEAT; Domain location=40-76; Score=30.6; E_value=5.6e-06; Accession=PF02985.13; Description=HEAT repeat
  Pfam annotation: Domain name=HEAT; Domain location=79-115; Score =26.6; E_value=9.1e-05; Accession=PF02985.13; Description=HEAT repeat
  Pfam module annotation: Pfam domain module=HEAT::HEAT::HEAT; Domain location=118-154::40-76::79-115
MVKWAGRQWASTISVSADQDSVRLLAVEGCAALGKLLEPQDCAAHILPVIVNFSQDKSWRVRYMVANQLYELCEAVGTEPTRGDLVSAYVRLLCDNEAEVRIAAAGKVTKFCKILNPQIAIEHILPCIKELSSDSSQHVRSALASVIMGMAPVLGKA

SEQ ID NO: 62799 - protein, 261 aa, Zea mays
  Coding DNA Sequence Number=SeqID_19424
  Gene Ontology: Mol. function=DNA-3-methyladenine glycosylase I activity; Biological process=base-excision repair
  Homolog annotation: Hit_ID=A7PN96; Match level="QueryCoverage=22%, HitCoverage=20%, E-value=2e-11, Identity=53%"; Hit description =Chromosome chr1 scaffold_22, whole genome shotgun sequence
  Pfam annotation: Domain name=Adenine_glyco; Domain location=4-146; Score=-9.2; E_value=1.6e-09; Accession=PF03352.4; Description =Methyladenine glycosylase
MDDWRPVRSRLFELLSLSGMLTDQSWTEILKRRDMYREAFACFDPSAVARMEEDDVAEISGNRELRLAACAGSGASWQTPAASRRWPGSSGSFSGYMWRGPHVNHRWPVVGKHRYHHKYVPFRTPRSEAAAGMDVDHLVDWFRDCVRLADRSSPGASPTSPRSPPGSTGMSSDMQHTQTTMRHHDSVLTPFRRRQLLKRTSGGALCTGADGPRAGAGRSTAWCEAAVLSGQARTVRGTGPDGPRPGAGARVPCLTAGRSAP

SEQ ID NO: 62800 - protein, 69 aa, Zea mays
  Coding DNA Sequence Number=SeqID_19425
MGKGGRGWGREERGSGKLTGDGDGASERGGRTATARGGGLAQGRRLGQGAGRTSATCVRSEIMMGDRYR

SEQ ID NO: 62801 - protein, 159 aa, Zea mays
  Coding DNA Sequence Number=SeqID_19426
MARGKKGKREPRRTDGKRKRPPSPPSKDFGDSEYSEEVSSEYGRSPTPVSLVASSEDLDDSMGLSVAARAYWRSIECVGLGGSDESEKTAARATAAVAMTMASSGDDGDEGSGDGGEGDNSGDDDDDKGDDGKGDGKGGDDDVKDGGGGGKAGGIMLSA

SEQ ID NO: 62802 - protein, 127 aa, Zea mays
  Coding DNA Sequence Number=SeqID_19427
MLKKAVSDLRRLHVADEVLGPLVSDVVDVCFSKELFRGLRWFVRKGLEIYDTPVAEIGPVVDALAGKVPEPLQHVLPENDGQQEDKGLQRSTAPNSNSLLMWQAPDSEQCPCPVHHQTIRCAIDNNS

SEQ ID NO: 62803 - protein, 152 aa, Zea mays
  Coding DNA Sequence Number=SeqID_19428
  Subcellular localization annotation: CTP_CleavageSite=21; ConfidenceScore=5.13e-01
MPPLIAREGVALRKLGLKSPRRMEGQSAGASPTRRTPLSTSPTKEWTRITRRREVNVPSEEGKHSEQSSQHLRPQRRMRRGAPPYLLLSTPTFSSFKGDWSHRPSSTMNPPCRGRNLPNAVLGDGEIGTGTYDDITKPKNGTQRNPSLGTKP

SEQ ID NO: 62804 - protein, 101 aa, Zea mays
  Coding DNA Sequence Number=SeqID_19429
TEDVRLPEQLFGGGRNFLKYGPDKGRVIGSPIEVFNHSRLNDFRNMVPHRLKTFDEQSESFITLSPNGLEVPWLHRFIGERLEIHDKLAAEVTPIVDAVLR

SEQ ID NO: 62805 - protein, 206 aa, Zea mays
  Coding DNA Sequence Number=SeqID_19430
MDELSYRSNVDVVAMGWLTSLLSYCPSSILKTPVAGGKSGKGKHDKKSQSDKRNRLPTPLSDNFDDSEYQRRGSPPRVGLSTAERAYIRAIERAWLNGSDDLEEDSEEDDSTEEEDEGGVDEGGYDGGDEGGNDDMVGSGGDENNGTFERTSKDLEKAKVLRRSSKGTHNRKEIKSDSAATPSRGPGPVCTKIDAQDASRFRLRRT

SEQ ID NO: 62806 - protein, 75 aa, Zea mays
  Coding DNA Sequence Number=SeqID_19431
MGKPVPSLLMLLLGRGGVPLDSPTQWQDGRPSHSSNHVLQRTLTALVPTITGMGDHVSGRVRGMSTARFTQVSAR

SEQ ID NO: 62807 - protein, 145 aa, Zea mays
  Coding DNA Sequence Number=SeqID_19432
MAGSRDSSDISPSNIIEATWETLPADEQLQFEEHKERMIQEAKAKFLANFKVDRNNKVVRHRATDPASLQPTPDIPNVVTTSHNPFMGCRWTHTLSNRKSAANQPICTCPDRPHVSVDRPGQQQSGLFLMSYLDMRPNHHTRHRI

SEQ ID NO: 62808 - protein, 56 aa, Zea mays
  Coding DNA Sequence Number=SeqID_19433
MEPGSLAIRTLESNGWIKRMHAVALYLEIEVASRKVQYIRLPALTNWKRGCSRRLQ

SEQ ID NO: 62809 - protein, 109 aa, Zea mays
  Coding DNA Sequence Number=SeqID_19434
  Homolog annotation: Hit_ID=Q6QP51; Match level="QueryCoverage=27%, HitCoverage=13%, E-value=1e-07, Identity=86%"; Hit description =Putative growth-regulating factor 1
  Subcellular localization annotation: CTP_CleavageSite=79; ConfidenceScore=5.48e-01
ENSAIHPVPTTVPTTKVRLTTAGLDLPRVQPRAQQGAPPRPTTGLSLSLGLGRRSPPRPTPGLGLSLGLGRSHVLARPQASASGEVFALPDLGLGPTTPQGIHHYPAPS

SEQ ID NO: 62810 - protein, 65 aa, Zea mays
  Coding DNA Sequence Number=SeqID_19435
MAKCMGVAIPWQMGNMTCGYRLQPLQSVKLMVNTRKGGGIDLPPNRHTRRIFRQPQQQQPEMDPP

SEQ ID NO: 62811 - protein, 327 aa, Zea mays
  Coding DNA Sequence Number=SeqID_19436
MYCAFPPSEPPDGERPRCFRLAAIGGAQLRGDWHLSAIARLQGFSSSSLAASPHQWSPKTVTTSSMVGRSKPGCGLCPALSFKDLHHPCWGGGRGEPGLAFAWAGVPLLPPASGGGNHPPALRRRHPPAKSGKANCCCPARVHHSVLCPGDGGQPHRGVSQHVVRREGGARVLGQSHSRFRGEDGSEDLPVRFGAAGARWCGVGGQVDAAVGAEVVAAGEGFSADEIVGAPRGLTSGSLALIACPRPLSGDAGEGLVAAASALRSSLLLFSRLERRSLSLLTEWAAASLLEFVVPQALRCGGCSYPREWNRSSVCNGTLSAGRELLV

SEQ ID NO: 62812 - protein, 334 aa, Zea mays
  Coding DNA Sequence Number=SeqID_19437
  Gene Ontology: Mol. function=methyltransferase activity
  Homolog annotation: Hit_ID=Q10I28; Match level="QueryCoverage=86%, HitCoverage=87%, E-value=1e-125, Identity=79%"; Hit description =Methyltransferase, FkbM family protein, expressed
  Subcellular localization annotation: CTP_CleavageSite=85; ConfidenceScore=5.62e-01
MPAPPAAPPVPPAAPWRRHAPTAASSTPRTVLLLLPILLLLLFVLSKATDLTFSTTTTSSSSSRHVPVNLRSFDCYASPQASPMVANLVEGVPYPFFYSLADMGTLPDHPHKNIARLLKGKRFRKPDISETIQELLGGEVGKGEPSGGLVVDVGANVGMASFAAAVMGFRVLAFEPVLENLQRICDGVYLNRVQDRVVVYHAAASDRVGTTTMHKVIGRLDNSAISAIGAKLAFKSNAEVAVEVSTIPLDEVVPDTERVLLIKVDVQGWEYHVLRGASKLLSRRKGEAPYLIYEEDEHLLQASNSSAQEIRAFLTSVGYNHCTRHGNDAHCTKE

SEQ ID NO: 62813 - protein, 383 aa, Zea mays
  Coding DNA Sequence Number=SeqID_19438
MWQDAKKSLAQMNVNGNLQNRIGIQVGQVKAIKIKEAAEKGRNGKSEIAEKKRNVNHRFMGILCRDSDPMTNPPRTKLPRGKDPNGHEVEKVRLGDNRHMVTCERQLAVGVDGRNHHSGRTRGLSLGRHLNSTEDLEAGKQELGHGKQRRLKAQYMRDIPESDTVSKSAHGLVAALAAAAAAAPAAAVAAPAAVVAAVTVVIAAIASVVVVVVVVAFATAATVLLRRVLLARGVLRLIRAREPGALDGPDTQNTDRARVRALGSGGAEFPMAPRAGLGCCQPHSIEWLSSRSGAGDAVLLSDRSVKRRSDCGHFGAVDWRACVRIKVSGTFALNAPAIWSVGVAIWPRLLLGEDWASGGPKLCADGGYQLRFRSLEGTPNYGP

SEQ ID NO: 62814 - protein, 154 aa, Zea mays
  Coding DNA Sequence Number=SeqID_19439
MTWNPTTHLGYCQAARGNDQTDRSTTKSIQASEESNHSSEASGATPGGCARAHPPEQGKKPRKENSAARSAPTAVSATPATTDNRSRSATEIKPRAPQEAPPRPTSRSGLGRRSPPRPTPGLGLDPGLGRNHVLAQPRPRPQEKSPPRPTLGSD

SEQ ID NO: 62815 - protein, 1065 aa, Zea mays
  Coding DNA Sequence Number=SeqID_19440
  Gene Ontology: Mol. function=phosphoinositide phospholipase C activity; Biological process=intracellular signaling cascade
  Homolog annotation: Hit_ID=Q94I52; Match level="QueryCoverage=93%, HitCoverage=93%, E-value=1e-166, Identity=39%"; Hit description =Putative uncharacterized protein OSJNBa0084C09.20
  Pfam annotation: Domain name=DUF1723; Domain location=108-157; Score =66.4; E_value=9.5e-17; Accession=PF08330.1; Description=Protein of unknown function (DUF1723)
MAAGEHALVEESTVPVVSDVADAAAKPYVRPALFLRPRAGDGAPAPAPPGDPGPVLPRGIEAEFMGWAGVPRLWPEWVAKLRRRHEPLWREVGILGGILASTCRVRHHHHERVLLQLAAFWYGATSTFVFPWGEVTLTLEDVATLAGLPLLGDPVRAPVSDSLEKDVAAIEAVRAVMNRSKKKKSSYGAWVKRFVERTPEEEMPPPATGDGGRDGEAHQLVEHGAFLSMWLSLFVLPGPPFDVVRREIIPLAARLARGESVALAPAALATIYHDLSALKRHITSGDKNGPFVISAPIHILQLWVWEHFTQLRPETVGSSTPDDHDMPRAARWREAGKRLSSKDLHAVLMSPKGFEWRPYKNSRFFGLHPGTGGSWVRGQDIATSEALLSFARCLHPCELVGMNCIEQYNPHRVARQLGFDQDIPGTVPRASSGWEKAWETYNIEAKSSAFIFPNHKPGVTVQYAKWWKPYSSACGSAVANAAKIKEGHDLVSPVKRKMEGVLAGNSGKKVRLRVATATLGCPPNIPAGINVYPSQSSGSHAATRRAAAAPGLVLRACPPHLRFKAVSPTGMPQPLRDAAYDPLDHVSLSERLDGITKMPKQHNTECLVKDSEQERIVKRVKIVTPKPPSAGPEKAVLHKVVEQALPDAVASSAIIHDSSSVFGTERPHARCLQQSKDEDLNSANGENISRRTEHCDVVLLNVVQGAVSTVKSEAIGAGTEVDMLPTHEDLLVVSDGDRCDKSSSMGHEVHLESHMSGAKMSFIRERNEGTELVDARNDEEDSQVLKEATKQGNFGDTVKFNDDELDKLTRKEARVFVEAMSNKDAPSAMHLKCPEMEPTRTILQECNEEKQMVRETNDEHDNPVMKEGTVQNSYDRQLASVLDGTTPRQQPDVLTHAATVQTYDGLLKEPAKEMDTCIVTGDIDNTDKVLNEKFGSLNFSEKGNEDTFVSNQGLEYPMEHSAGASRKKSGNSERFSSSLLDGNTKLVSHEVCTKTLYYLSRFDRMKDAWDKDANSLPRRAVGTMEMIGKASAIRHAEIAELDKKINTLKEEILALEAAEKGKSPE

SEQ ID NO: 62816 - protein, 122 aa, Zea mays
  Coding DNA Sequence Number=SeqID_19441
MSLTQLKGKCIAQPSQDNRDHMVKKLETGTIVACTKSLEENVKDLRIAKRRKQKKKNQYLFQKPQPYLHKRQPKIATCARKEIKNYPMPKSQDLQHGGKPKDGNKYAFKCKYLKLSFLMCLV

SEQ ID NO: 62817 - protein, 290 aa, Zea mays
  Coding DNA Sequence Number=SeqID_19442
  Homolog annotation: Hit_ID=A2XNL7; Match level="QueryCoverage=17%, HitCoverage=18%, E-value=3e-09, Identity=57%"; Hit description =Putative uncharacterized protein
MTLFANGKVRGRGGVWVIASGSHSRCSGWLLFSATDDNGGRGSMEAGGRFPAERQKQNRGGSAISEFAESRWGHEGAEQGGEEGKADAAADTSGGRASRQRRKGRCETGRGSRERGHGEAVVDAHVSTGKPGLPLVPGSPNQVYLCADCPCRYPPRVKHPHARRSARSTNLARPHGPLAATAARAQRRDPGGAPVLVAGPMEWASVEYTAAALVCAAAASVVALAHMYRHLLHYAEPIYQRFIVRIIFMVPVKLSARRSHPQQILAAKGALAPDLSPAFAVAFPYWVSSR

SEQ ID NO: 62818 - protein, 211 aa, Zea mays
  Coding DNA Sequence Number=SeqID_19443
  Homolog annotation: Hit_ID=Q7XBD1; Match level="QueryCoverage=93%, HitCoverage=58%, E-value=1e-08, Identity=25%"; Hit description =Putative retrotransposon protein
  Pfam annotation: Domain name=Transposase_28; Domain location=5-158; Score=-61.1; E_value=0.044; Accession=PF04195.3; Description =Putative gypsy type transposon
MELQSGHTVEFSTSRISSVRVQEMQQLGYFGDGVGRVPGAEEIPEPKGELVVFEAFFVAGLRLLAHRFVVEYVWAVTSYGGQPSVEVFAKNYYLHWQKRKIGNKIAQFGSCTFTPRTGKTSAKVVEIVPCARNKWGNWWDYWFYVSGGEVDYLPGLPAAVMCSHCYMAFPPFEVAKDDEDEGALRYDARMSSGRDLVEEFIGYGVWPLVHG

SEQ ID NO: 62819 - protein, 610 aa, Zea mays
  Coding DNA Sequence Number=SeqID_19444
MDKDHQDATRKRRAFTRVRDPSREVKKARGIVKSTAPGSSKPPPAAKPAAPGPSKPSSGARAVAPGSSKPPSAEPTQEQGPPSPLHTAEAAAGGADLSMDICVDDYRVGSVMMFDARTGRGLVGEFFSRSLGLGQDCDAGSDPRQLAVVPAPVAAAPAAVAAEAKVAEACKLSWTSSVCCVYVIANLMDFSWQAAAFVEHVASGALTSEFTAEKQRLEGRIERLRTQHTEVVRDKSAAENKSRRLMEKLVAMEVEKEDLSCQLAAERKDANRAYTEAQAAHAEAKLACAEANLARQRAEEAETSHSSLRDRLDKAKASTRVEVNRTQAQLTDAYRQLGAGTAPFDASSKEVRLRFLGWLQDELEVLPTIVTGLMSFASLITCELAVNALSHEGCGHFEVFDRSDEDFERGIFQVEDPMARDEEVEDLEDLESTLPEASGEKEGVEGELAPPSDVSEGPMVTSALTCAGEDPVPAAAPTGEDTSVVAGEPAAKDPAASAGPSQVSTYGPAQATAADDTNFVAAATVVPANDNLSGSGSGSFSSDGEFGSPFSWTEESSDEDLDYFAVLDVAAVESSPRVEVGKVADLPSARTKCRRRRVVSKHSVGEVSQS

SEQ ID NO: 62820 - protein, 161 aa, Zea mays
  Coding DNA Sequence Number=SeqID_19445
MVAVSSAAGPTRSRRPEATPCKIRVWEASQRCESAQTRKQGTGTDRKRAGHGEAGFTVFFNRFGGSPKFAFSGGGFGMQGCYSQGLTERFQQHPYQEQGQQAFLDPLLGAIAYGAEVTQLCAIGYGAESYTMSLAEEIVHSIVVHGGHSLWIHGPQDARSQ

SEQ ID NO: 62821 - protein, 141 aa, Zea mays
  Coding DNA Sequence Number=SeqID_19446
MSERNRAETHWIARSTRGGGRPKSGEVDLGPPVKSGRVRGLGELHGLLAELAEALACPEDGWGGLATVAEALVAMAGGNKLAGAKGKWLAGEAAVEHVFPLPLPLFKRRLGANLREFGQDHCKGFVHQTKLCLLCMDDVRF

SEQ ID NO: 62822 - protein, 127 aa, Zea mays
  Coding DNA Sequence Number=SeqID_19447
MGAEHGVSGELQAEPRTASPPEARSDLAEGVVDAEGAAAPFQRQDPSLHCLVADVCASESCFSRKVMSEPKHQVAHLEVSGPDPSGVVASQGLLTNASSSAVQSPASFTSSHGSSKCSRCSTSEVAN

SEQ ID NO: 62823 - protein, 244 aa, Zea mays
  Coding DNA Sequence Number=SeqID_19448
MALSPLILAERRRRGECKKAESVPDRPLALCRGSGAALANPAPTEPLTASTYQPENLGPDRLGLGLSPGRRRTPLRPTQGSDSGSAPEDDELRSARPRARTRAQPQKTTNSAPPDPGLGLGLSPSRRRTPLRPTQGSDSSSAPEDDELRFARPQGSDSALALADGLRLARPRGSDSTSATEDRLDLGFGGASTSPNLGRRPATSTGGAIIALPRADSGRRKQDRISFVLFDYFEKWILKTTEYT

SEQ ID NO: 62824 - protein, 123 aa, Zea mays
  Coding DNA Sequence Number=SeqID_19449
  Subcellular localization annotation: CTP_CleavageSite=30; ConfidenceScore=5.06e-01
MSGAPEDSNSNSSPSGNSRGNFAIIHRTVRCSKEERPQELASFGNSFQLLRYNSPDCPVYLRGNDYFGANGYLQRIYCAPARAEVRHAHAGAPDTLQYMSGAPPDIQAGPEVRAPTELCVPSD

SEQ ID NO: 62825 - protein, 56 aa, Zea mays
  Coding DNA Sequence Number=SeqID_19450
MSRAFDDYYIKDCGVMSALEAGTKATLTVARMTNWSLLSILLCVTSGAKMTPQSSI

SEQ ID NO: 62826 - protein, 38 aa, Zea mays
  Coding DNA Sequence Number=SeqID_19451
MATASGYSRPAAVRTGPDLPCRVRGSGWWPCKDHVQLA

SEQ ID NO: 62827 - protein, 87 aa, Zea mays
  Coding DNA Sequence Number=SeqID_19452
MYVQRNPKSLHKHKINRHLPIKHLHQLKMRVRLKTMKMKIKRMSYLKRRTMIKVEMTMTKTRKMSKRFRVKDRHTQESTKRFKEITP

SEQ ID NO: 62828 - protein, 152 aa, Zea mays
  Coding DNA Sequence Number=SeqID_19453
  Gene Ontology: Mol. function=RNA-directed DNA polymerase activity; Cellular component=chromatin; Biological process=chromatin assembly or disassembly
  Homolog annotation: Hit_ID=Q2QR27; Match level="QueryCoverage=26%, HitCoverage=2%, E-value=1e-08, Identity=65%"; Hit description =Retrotransposon protein, putative, Ty3-gypsy subclass
MGTKLDFSTAYHPQSDGQTERVNKVLEDLLRAYKVCSVWEHRTVRWCTGQCPVRHTGLSELAALGNSPATYGYNSPDCPVCTGLSGDSNCRPPGHTTISSQGLHACLQPSARDSTPSAFRIEPGDLVTQIEAQFLWSLNLVTWTKAKLSPQD

SEQ ID NO: 62829 - protein, 245 aa, Zea mays
  Coding DNA Sequence Number=SeqID_19454
  Gene Ontology: Mol. function=glycolipid transporter activity; Cellular component=cytoplasm; Biological process=glycolipid transport
  Homolog annotation: Hit_ID=Q10E24; Match level="QueryCoverage=85%, HitCoverage=89%, E-value=8e-83, Identity=76%"; Hit description =Expressed protein
  Pfam annotation: Domain name=GLTP; Domain location=78-245; Score =150.3; E_value=5.4e-42; Accession=PF08718.2; Description=Glycolipid transfer protein (GLTP)
MGCVVSWSGEELLNWRWRCRVISDDQTCYLLFSVMSWSSAEAQAPSEQLCEGVAAVVAARQGMETPLTAVAEAFEELVRGMDADGGELRVAPFSDTCALVSVLFSSLGMAFRFAEMEYVTKVNDLIGAGKSYRTLSDILDKDIQNDCVKKQGSHSRNLRRVRLGLGLIKALFEQFLATEGSLYDAATIAYGQVCAPFHSWAIRKAVGAGMYTLPTREQLVVRLNETDLSVQKQMRRYIDASSPII

SEQ ID NO: 62830 - protein, 611 aa, Zea mays
  Coding DNA Sequence Number=SeqID_19455
  Gene Ontology: Mol. function=RNA polymerase II transcription factor activity; Cellular component=integral to Golgi membrane; Biological process=intra-Golgi vesicle-mediated transport
  Homolog annotation: Hit_ID=Q53RI9; Match level="QueryCoverage=94%, HitCoverage=89%, E-value=0.0, Identity=74%"; Hit description=CASP C terminal, putative
  Pfam annotation: Domain name=CASP_C; Domain location=452-611; Score =85.2; E_value=2.2e-22; Accession=PF08172.3; Description=CASP C terminal
  Subcellular localization annotation: CTP_CleavageSite=29; ConfidenceScore=5.35e-01
MEPSPAQAGASDRDRSPPPPPPPPSQSSTAATISSPLAVVCSFWKDFDLEKERSGLDEQGLKIAENQETSQKNRRKLAENTRDFKKASSDEKLSLLNSLLKSYQEEVDNLTKRAKFGENAFLNIYQKLYEAPDPYPALASMTDQDQKLSELETENRKMKLELEEYRAEAAHLKNQQATIRRLEERNRQLEQQMEEKVREMVEMKQRSMAEDSQKTLEALKDRERSLQDQLRQATESVKNMQKLHESAQSQLFELRTQSEEDRAAKEVEVSLLMDEVERAQARLVSLEREKGDLRSQLQTTNEDASKSSDYLESSDILESSLNAKEKIISELNAELRNIESTLSSEREMHVNELKKLTTLLTEQESALMELKKELQERPTQKLVDDLKKKVQILQYFFRQAVGYNSIEAEDWELATNGEEMSKLEALLLDKNRKMEHELTQLKVKISEKTSVLEEAEKRIVELTSKVEEQQKLILKLEDDILKGYSSTDRRGSLLNDWDIQEIGSSEASEGSDPRHASADQDQSSMLKVICNQRDRFRARLRETEEYAEDIESGSSDVEAKYKKMYEDDINPFAAFSKKEKDQRYKELGLRDKITLSSGRFVLGNKYDTIFV

SEQ ID NO: 62831 - protein, 106 aa, Zea mays
  Coding DNA Sequence Number=SeqID_19456
MATFGGVAMIMSVRLGTILSGGAKIAARMVIHVRYRSSGRRRGLHSNTEDCTLDWSAVQQKWDSQTDCAIADRQIRLALAMETENARREPKPSMGVLRNVLVLQRC

SEQ ID NO: 62832 - protein, 92 aa, Zea mays
  Coding DNA Sequence Number=SeqID_19457
MGFKLGSTSGINEEHCKHSKLPDACMTTEAGVVAIRQVEASGAMKVGVVVLREAGVVAGKEPDVCSTMEGVTLVLDEEGALEIKENGGFTIM

SEQ ID NO: 62833 - protein, 1153 aa, Zea mays
  Coding DNA Sequence Number=SeqID_19458
  Gene Ontology: Mol. function=phosphotransferase activity, alcohol group as acceptor; Cellular component=Golgi-associated vesicle; Biological process=phosphoinositide-mediated signaling
  Homolog annotation: Hit_ID=A7P941; Match level="QueryCoverage=77%, HitCoverage=50%, E-value=0.0, Identity=55%"; Hit description =Chromosome chr3 scaffold_8, whole genome shotgun sequence
MEALNELCDLVAAHPDLLLADKLAWLSSRCAAAPGAAAPQRASRAHLHSLLALARLLPAGGAGAGAEGDAAPPAPLLFFLASHAFLSPAFWPQSFAPAPFLARLLPLLAAAPSSPALSSALSAALLAALDVADPTSAPLARAFLSAAAAAAPLPLLPADAAPIAARLLLEFLGSEEEPIRAKGKGEDTLGEENGGAKEVVRRFEEEEVDELERKEVAFRLTVHMLGGEGGLETEQIGKVRNAAARQVRSLTDFLKIRKRDWREQGTQLRARINTKLMCCQAAVGVLVRSVSTMDTDIKSSKDMLQQTLAWFIEATKSCILSSWRKLKICEELFCTLLNGISQITVSRGGQLLPVLLIPLKPLVADMAGSSPGALFEAVVKLSCEIIEFGWTKDRALVDTFVMRLAAYVRERNDYEEEDGKGKEAVPVIRLNVIRLLAELCVCLKKWEVVDMILPLFIEHLEEGFLLVASNLTSTKLRSDYRHRLLSLCSDVGLVAESKSGRSGADLMGPLLPAVADICSDFDPVSTVEPSLLKLFRNLWFYVVLFGLAPPIQNNEAPTKPVSTSLGTAESSSAIALQAVAGPYMWNSQWSVAVQRIAQGTPPLVVSSVKWLEDELELNTLHNPGSRGGNGNENSAVGQRAALSAALGGRVEVAAMNTISGVKATYLLAVAFLEILRFSCNGGILSATSTLNRSNSAFSCVFEYLLTPNLTPAVTQCLTAVAHRAFETVLSWLGLFGSRPLRLCLARQDDRISDIGEGADVRESVLSVHACFLIKSMSQRDEHVRDVSVKLLTQLKEKFPQVLWNSSCLDLLLISVHNELTSGPVSDPAWVATENFCKPSGVQRTQHTADVVSLLSEIRICSGKNDWNGIRTANVPAVMDSAAAASGAKKEAPDFTLEVLSTAVVSATVKCNHAGEIAGMRRLFSTMGGINMGMSPPGTQSLHPHQSFDEVFVSKFVSLLQNFVVAAEKQPIDNSQFRETCSQATALLLDHMVSDSRANLEGFSQLIRLLCWCPAYISTPDAMETGIYIWTWLVSAAPSLGPLVLAELVDAWLWTIDTKRGLFASDMNYCGPDAKLRPHLIAGEPEAPPEKDPVEAIIAHRLWLGFFIDRFEGFGGFLDLCEKIFFLIQYSGAVLPPQVEFMGLRSVISEKESK

SEQ ID NO: 62834 - protein, 150 aa, Zea mays
  Coding DNA Sequence Number=SeqID_19459
MALAMEVCHARDTGLAGAGRARSRGRGQAVALAKNRGEGKNAWGGREQPERKRDKRRRRGSLTRPLTPATTRAAQGDRHGERPSDRDMEGSSPEGRGRLGAGLAAAMATASGYSRPAAVRTGPDLPCRVRGSGWWPCVDAFLEAPITQEN

SEQ ID NO: 62835 - protein, 170 aa, Zea mays
  Coding DNA Sequence Number=SeqID_19460
MGAIQAKAPLKGHDPASPEPDLGQRQPTPEDSRLARGSPQATDAPTTRPRHSSGSSTSPDPRVRPPSWPRKMDFASPDPRARTQPRLRRRRTPPRPTPGLGLNHDLEDDELRLARPQGSDSASAPEDDELCLAPTPGLRLNLDLGGIATLPKLGSRTGHVAQGGYHYPCP

SEQ ID NO: 62836 - protein, 312 aa, Zea mays
  Coding DNA Sequence Number=SeqID_19461
MSSHSMQPGCIPSLVVTQDGDHEFDGGEKRAGLRPLPLPQLQGCSSSVLGRGVCRVGACLHAGSTPLLPLVIGGKGVHRSWRWQLPRARLPGLSGFGATSDATSHRGSRKSTVCSEVIVAAVRLPGEEVVVAAAGAGVSVPPGVLSPHRPSNEALESLGSVGLAARGFTCLVKETLGRSAVSQGRGQRCLRGQRRSWLEKGSFVGRGLAGSSTGGTNAGVDLSRPRTGLVSSGDSWLRLRGGRPSRLLGPGSWRRPWRRWPGRGADVVLRSGDPSPVLPSEARSDFADGGVDVEGAAAPPPSTSEPAGSVRL

SEQ ID NO: 62837 - protein, 205 aa, Zea mays
  Coding DNA Sequence Number=SeqID_19462
MQAACNCTKVAHPFDFDASSMEAQAHTSCNRCAGYYVRETAPPLAPVPRLLDCGTGAATRGDPAHDPTVPTENIVHGAGGTFGRRSRRRFTSAIMTASKNGPGKGILRKGSFSAKEAGPRALILIRGSKAGPSEGFNSHLRALGLRAHYWSEVRRLAPRKGSTAASGHSGSAPTTDQRFVGWPPKGSTAASEHAERGMTLGTFDT

SEQ ID NO: 62838 - protein, 210 aa, Zea mays
  Coding DNA Sequence Number=SeqID_19463
  Pfam annotation: Domain name=DUF581; Domain location=56-158; Score =22.4; E_value=3.6e-05; Accession=PF04570.5; Description=Protein of unknown function (DUF581)
MDLGLSVAGRTGSGGGRGGWRGSGGGASAAAWTRLVSSGVEDELVAASGGGGGGGGGRAGARAGGLPLGHFLEACFLCRKPLPSNRDIFMYRDGFGNFCGGSRGMDVSDVFGRLLLRVNQLNSWDPKLVRLFMAMPGDIPFCTEDCRREQIEMDEEMERKESKPKNVAPRGAPSPKDVDSPPRPPKARAGLMVSRNDDDGKWKTYVYRKK

SEQ ID NO: 62839 - protein, 57 aa, Zea mays
  Coding DNA Sequence Number=SeqID_19464
MTACGAEVTQLGAIGYGAEVRVALAQTDIVAPTCTYLGAIAYGAELCYLGATGYGAE

SEQ ID NO: 62840 - protein, 71 aa, Zea mays
  Coding DNA Sequence Number=SeqID_19465
MAKVSRIDRSWRILVNEAFITISVSSAQGRHMQKKGYRFVLMSDTHRKGVKDCTIRLDENLKDVQAIRRKR

SEQ ID NO: 62841 - protein, 947 aa, Zea mays
  Coding DNA Sequence Number=SeqID_19466
  Gene Ontology: Mol. function=metabotropic glutamate, GABA-B-like receptor activity; Cellular component=integral to membrane; Biological process=G-protein coupled receptor protein signaling pathway
  Homolog annotation: Hit_ID=Q7XP59; Match level="QueryCoverage=97%, HitCoverage=96%, E-value=0.0, Identity=63%"; Hit description =Glutamate receptor 3.1 precursor
  Pfam annotation: Domain name=ANF_receptor; Domain location=45-408; Score=334.2; E_value=2.3e-97; Accession=PF01094.19; Description =Receptor family ligand binding region
  Pfam annotation: Domain name=Lig_chan; Domain location=588-868; Score= 254.3; E_value=2.6e-73; Accession=PF00060.17; Description=Ligand -gated ion channel
  Pfam annotation: Domain name=SBP_bac_3; Domain location=469-827; Score=2.2; E_value=4.1e-08; Accession=PF00497.11; Description =Bacterial extracellular solute-binding proteins, family 3
  Pfam module annotation: Pfam domain module=ANF_receptor::Lig _chan::SBP_bac_3; Domain location=45-408::588-868::469-827
  Subcellular localization annotation: CTP_CleavageSite=16; ConfidenceScore=5.09e-01
MKSMLQVWGIFCCVCSCALGQNTSARPSVVNVGALFTFHSTIGRAAKVAIAAAVNDINRDPSVLQGTKLVVQMQDTNYSGFISIVQALQFMEKDTIAIIGPQSSVVAHVISHVANELQVPLMSFAATDPTLTPLQYPFFVRTVHSDQFQMASVAAIVDYYGWKMVTAVYIDDDYGRNGVSSLDDELAKRRLKILYKAAIRPGARKSEMAAVLVKAAMMESRVFVLHARDDSGIDVFSLAYNLSMTSGGYVWIATDWLTACLDSAPRLGTGLLNTMQGVLTLRQHTENTSRKKALVSRWSEVAKEEEEEDGGSLPNTYGLYAYDTVWMLAHGLDAFFNSGGNISFSPDPRLRAVVGGALNLDALSVFDEGTLLLERIRNVSFMGATGPVKLDSDGNLIQPAYDIVNVVGSGLRTIGYWSNYSGLSVVSPETLYKKPFNVSANQELHAAIWPGETVTRPRGWVFPNNGNELRIGVPDRVSYRQFISVDNQTGTVGGFCIDVFAAAINLLQYPVTYRFVPFGNGRENPSYTELIGRILTNEFDAVVGDVAIVTNRTKVVDFTQPYVASGLVILTAVKTQSSDAWAFLQPFTIRMWSVTGVFFLVVGAVIWLLEHRINDDFRGPPAKQVITVFWFSFSTLFFAHRQNLANVLRRSWTILTGEDTRSTLGRVVVIIWLFVVLIIQSSYTASLTSILTVQQLTSPIKGIDSLIASDEPIGFQVGSFAESYLVHELGVSPSRLKALGTPDEYKNALELGPRKGGVVAIVDERPYVEVFLVQHDKFAIVGAEFTKSGWGFAFPRDSPLAVDLSTAILALSENGDLQRIHDKWLSNGPSPQSTTDLEPERLRVQSFSALFLLCGAACLAALAIHGCILARQYSLHVASQPPDAVATGADGAIRRSSRSSIRSFLSFADRREAQCPRGSCKDPAAALGGSSSSGVSSFTSSNASVSR

SEQ ID NO: 62842 - protein, 66 aa, Zea mays
  Coding DNA Sequence Number=SeqID_19467
MGTDTAVDVTEAGLTMSASVGTLKRRASHQLKGRRYNKNSYSPGVEFDLLLLDLVSHMVSSAGSCF

SEQ ID NO: 62843 - protein, 45 aa, Zea mays
  Coding DNA Sequence Number=SeqID_19468
MTGAPRAGLLDPNRPGVRAGGTHRWTDRTHAGSIFHGKMRSSVSH

SEQ ID NO: 62844 - protein, 340 aa, Zea mays
  Coding DNA Sequence Number=SeqID_19469
  Gene Ontology: Biological process=response to biotic stimulus
  Homolog annotation: Hit_ID=A9P7Y8; Match level="QueryCoverage=32%, HitCoverage=58%, E-value=4e-39, Identity=71%"; Hit description =Putative uncharacterized protein
MVGLVGGSTARAEHVVANAGGEAEYVRRMHRHAPTEHQCTSTLVKHIKAPVHLVWELVRRFDQPQRYKPFVRNCVVRGDQLEVGSLRDVNVNPGLPATTSTERLEQLDDDLHILGVKFVGGDHRLQLAGVVAVEVTGGPDVPFHPGREFKQIVMNMLDCFRLTVEYGVRSSQNLGDEQPQACEIKAQLVRTAEAARQLALMLEVERPSYQGRNSVYQSSSKMMSAISVAHLGCKDMDAVDVGVVGMVDSQSLSSALEKLYFWERKLYAEVKIVGCGVRSSQNLGYEQPQGNPLTVSCQQPHPRPVLSRTLSPTCGCPSAAKHPAPAVAMSVFFFHSKLLF

SEQ ID NO: 62845 - protein, 68 aa, Zea mays
  Coding DNA Sequence Number=SeqID_19470
MEARRASRYRVHGRRESTILSSAGGETEKLGEEQERFSGKSSQKLKSNGERTEEKALSVLLAGAQDSE

SEQ ID NO: 62846 - protein, 84 aa, Zea mays
  Coding DNA Sequence Number=SeqID_19471
MGCVSSKILAKSGSFDEKEKQSSVGGHTGGTVIPVYTVEVKLSLRPTYEVFQKEKVIKDRRPCKIKYVERFRPQGLQASRTGIY

SEQ ID NO: 62847 - protein, 782 aa, Zea mays
  Coding DNA Sequence Number=SeqID_19472
  Gene Ontology: Mol. function=zinc ion binding; Cellular component =nucleus; Biological process=chromatin modification
  Homolog annotation: Hit_ID=A3A7Y5; Match level="QueryCoverage=93%, HitCoverage=35%, E-value=0.0, Identity=55%"; Hit description =Putative uncharacterized protein
  Pfam annotation: Domain name=SET; Domain location=44-174; Score =165.2; E_value=1.7e-46; Accession=PF00856.19; Description=SET domain
MVCNCKPPQDGRMGCRDGCLNRMLNIECVKRTCPCGEQCSNQKFQRRSYAKLRWFHSGKKGYGLQLQEDVTEGRFLIEYVGEVLDITSYESRQRYYACKGQKHFYFMALNGGEVIDACTKGNLGRFINHSCSPNCCTEKWMVNGEVCIGIFALRSIKKGEELTFDYNYVRVSGAAPQKCFCGTAKCRGYLGGDISIVDTIITQDDTEADHFEQMVVDKDSKELLGPNESDSDGSHPNISEPEFSIQGEDLHDCSAAKVELDLLEGTRGTSLETSEPEHPLEAWSPPEDEDVIRTPVHVSRTFESSLQKFSVHDTQSSDLLRKTANSMEGSKAPNITNGSTLGSDFRGNLVPTFRPAERKNLKQHKNQKRQPSSPIDNEHILGVEGTLNSLLDVDGGISKRKDATKGYLKLLVVTAAEDGSAGGTSKSLRDLSLILEALLKTKSHSVLLDIINKNGLQMLHNILKQSRGIFHRRPIIRKLLKVLEFLAQKGILTSEHINGGPRFAGVESFRDLMLSLTRHSDIQVQQIARSFRDRWIPPNNARSEPTEYPHTSTFVHDIQGTNTVWSSARRKRKSRWDYQPDEHYKMPGLKIQKVCSGHGEFDVQFGFMKNKLKRNQGANNYHNDVLGMGSSTEGEDDEAPPPGFESQLDRRPAQLSIGSEVAPGLCMESTLEPLNLKEANAIKNGKLHLACLLVLFHHCLPIREGILAPPLRLPRCFSMMEYPKLNITILDNGEGSWAEMGECIGHGEMSQEQNGNTIIKEGDFRALIIDLKDPNLQDLNSD

SEQ ID NO: 62848 - protein, 460 aa, Zea mays
  Coding DNA Sequence Number=SeqID_19473
MAERYQLPQSCVPPTTRRKDCGCPPSGGSEGGKIRCIREREDMVAFQGGHPPFKDDSPYLRPQPSWAESSPTRSKEPGKGDTPKRILLREGNRLRASLLIRGSKAGPSEGFNSRLRALGFCAHYWSEVRRPAPRKGSTAASGHSGSAPTTDQGGNDLVTESHQREASSPRTPSTGDRVRQITRRYFWVRLRASSRPLTNGARASTRITRQQLTGDTMFGALRGQHGAFPPSSLRKGDVGAQPGPASGTIGNSASPDPGLGLGLSPGRRRTPLRPTQGSDSGSAPEDGELRSARPRARTRAQPRKTANSAPPDPGLGLGLSPGRRRTPLRPTQGSDSGTAPEDDELRFARPQGSDSALASAGGLRLARPRGSDSTSASEDRLDLDLGGASTSPNLGHGPTTSTGGAIITLPQADSGYGEQDRRPIWLAPLDKLQRSSDGHDTTRTGCQNLSGCHDGMYLGR

SEQ ID NO: 62849 - protein, 163 aa, Zea mays
  Coding DNA Sequence Number=SeqID_19474
MACLGLGGRRKHTLQDNPILQARISIVEGSSSTLGVDYTFGEGPLQESGPSRRFGWSPRGLGQLSPEDISPARGLGRSTPASVPLTGDPARLWPTKSSFRANSASVRADTATPGFGSSKSGRGVPLTKQEKPRTARPTEPRDSYASGIRIPHSSPLHGATHAW

SEQ ID NO: 62850 - protein, 75 aa, Zea mays
  Coding DNA Sequence Number=SeqID_19475
MKLWKETSRSSKTTTSSRCGLAATPSRLPVKAAVIYVSFPHFDLFAVVGDDGVRDPKAMDDVGEERHRLFGPDAV

SEQ ID NO: 62851 - protein, 633 aa, Zea mays
  Coding DNA Sequence Number=SeqID_19476
  Gene Ontology: Mol. function=transferase activity, transferring hexosyl groups; Cellular component=soluble fraction; Biological process=carbohydrate biosynthetic process
  Homolog annotation: Hit_ID=Q5NA53; Match level="QueryCoverage=86%, HitCoverage=84%, E-value=1e-174, Identity=53%"; Hit description =Glycogenin-like protein
  Pfam annotation: Domain name=Glyco_transf_8; Domain location=310-522; Score=154.0; E_value=4.1e-43; Accession=PF01501.11; Description =Glycosyl transferase family 8
ESSSGLSKKDCIGRYYAKDATKYRPFSALLPEGGWSGKVLYVKLVLVLLMCGSFMGLLNSPSIHLADERHHHAQTAEAWNASWTSHPDAANSGYASSLRIDWSQVQTAAKQVAPPAGGGATRVALLNFDDGEVQEWKARMPHTDASTVRLDHVGSDVTWDHLYPEWIDEEEHYGAPACPDLPEPKVAKEEEAYDVVAVKLPCGRAASWSKDVARLHLQLAAARLAAARAPRGGGGQAAHVLVVSRCFPTPNLFRCRDEVARHGDVWLYRPDVGDLTRKLELPVGSCKLAMPSKALGEHYASAAPQREAYATILHSEQLYACGAVTAARSIRMAGSGRDMVALVDETISARHRAALEAAGWKVRTIRRIRNPRASRDAYNEWNYSKFWLWTLTEYDRVIFLDADLLVQRPMEPLFAMPEVSATGNHGAYFNSGVMVVEPCNCTFRLLADHVGDIDSYNGGDQGYLNEVFSWWHRLPSHANYMKHFWEGDTEERAAAKRRVLAADPPIALAVHFVGLKPWFCFRDYDCNWNVPALRQFASDEAHARWWKVHDAMPRRLQGFCLLDERQKALLWWDVARAREANFSDAHWSVRIADPRRSICAGGDAEACREREIAGRRVEGNRITTSYAKLIDNF

SEQ ID NO: 62852 - protein, 48 aa, Zea mays
  Coding DNA Sequence Number=SeqID_19477
MEEHDGEVKQGRRLGQAAARSAGTGRTTAQPKAGVTLSTNIEYTEFLF

SEQ ID NO: 62853 - protein, 16 aa, Zea mays
  Coding DNA Sequence Number=SeqID_19478
MARADIACGLSRKFPI

SEQ ID NO: 62854 - protein, 331 aa, Zea mays
  Coding DNA Sequence Number=SeqID_19479
  Gene Ontology: Mol. function=signal transducer activity; Biological process=G-protein coupled receptor protein signaling pathway
  Homolog annotation: Hit_ID=Q6BTJ4; Match level="QueryCoverage=53%, HitCoverage=26%, E-value=3e-11, Identity=34%"; Hit description =Similar to CA1621|CaIFF6 Candida albicans CaIFF6 unknown function
MLVWVHDDAFEEARAAARDEDEQDRAFKEARVAVQRVAVAAHAAARTATLAHPAVVANPPPPPATAPAPAIAHHRVCSRLPPLQPPVPPAPAPPPQEPADSLLTPAGAHSAPTASSAPTPIRPYITHRQPSRSRHRLTKSGLRRHRKLRFARPQGSDSGSAPEDDELRFARPQGSDSGSAPEDDELRLARPQGSDSGSAPEEDELRLARPQGSDSGSAPEDDELRFARPQGSDSGSAPEDDELCFARPQGSDSGSAPEDDELRFARPQGSDSGSDSTSALEDRLDLDLGGASTSPNPGLGPTTSQEAPSLPYPKLTQATGNKIGVSSGSLR

SEQ ID NO: 62855 - protein, 102 aa, Zea mays
  Coding DNA Sequence Number=SeqID_19480
MAHRIARSTRDYGRPKSGKDDLGSPVKFYRVRGHGKLHGPLAKLTEQLAWLGSGWRELAAVAEARVAWRAVAQHAQGEVRWNFGSGRTESAREVRPRPWDAL

SEQ ID NO: 62856 - protein, 71 aa, Zea mays
  Coding DNA Sequence Number=SeqID_19481
MVSGGKRKSGDPRESAIWPSGDFWALQLQMVTSLDWLGSYYYMRTQHTIDSCPKCLHAEGHKLSTYLQVLD

SEQ ID NO: 62857 - protein, 89 aa, Zea mays
  Coding DNA Sequence Number=SeqID_19482
MAGGNELAGAKERWLAGEETLGDTGVSQPSPLKGISSRDSGQSPFEVKRRIRKAGGGVGGDYIPASLGRQSGKLDLKNSSVSQVASSSE

SEQ ID NO: 62858 - protein, 195 aa, Zea mays
  Coding DNA Sequence Number=SeqID_19483
  Homolog annotation: Hit_ID=UPI0000E2386D; Match level="QueryCoverage =53%, HitCoverage=64%, E-value=5e-07, Identity=37%"; Hit description =PREDICTED: similar to opioid growth factor receptor
  Subcellular localization annotation: CTP_CleavageSite=62; ConfidenceScore=5.06e-01
MQPRKAGPLAKKCDKSLQASINTPFEARGLLSGTIIRGTLKTPKSQLVTPISTKLQRPDGVRLTAAKSGLRHHRKLLFARPQGSDSGSAPEDDELRFARPQGSDSGSAPEDDELRLARPQGSDSGSAPEDDELRFARPEGSDSGSAPEDDELRFARPQGSDSGSAPEDDELRFARPQGSDLGLAPEDDELRFARP

SEQ ID NO: 62859 - protein, 309 aa, Zea mays
  Coding DNA Sequence Number=SeqID_19484
  Homolog annotation: Hit_ID=Q5JMX2; Match level="QueryCoverage=99%, HitCoverage=53%, E-value=1e-137, Identity=77%"; Hit description =Putative vascular plant one zinc finger protein
MTSAPSAFLKPKCALWDCLRPAVGSERWHDYCSMYHADLAVQEEGPPGTMPVIRPRGIDLKDGPLFTALSAKNIRKKMLGSLSVKELPLQSLRGMHLPFCTIAELFDLYIFEGESIREWLFFDKPRRAFVSGNRKQRSLLDYGGRGWHESRKQAMKDFGGLKRSYYMDPQPSNSYEWHLYEYEINECDAFALYRLEFKSSDAKKTVKSKLVCNPMNEIQQQMVRLSANSPVDNKRTARGRPHANPTDVDTNIYSVPNTTAQANVPNAFQPGSEVDQMTYLNGSVVYGPHLSYGYSTERSYFYWNSADGT

SEQ ID NO: 62860 - protein, 178 aa, Zea mays
  Coding DNA Sequence Number=SeqID_19485
  Gene Ontology: Mol. function=peptidyl-prolyl cis-trans isomerase activity; Cellular component=cytoplasm; Biological process=protein folding
  Homolog annotation: Hit_ID=A2Z498; Match level="QueryCoverage=52%, HitCoverage=52%, E-value=2e-37, Identity=79%"; Hit description =Peptidyl-prolyl cis-trans isomerase
  Pfam annotation: Domain name=Pro_isomerase; Domain location=67-178; Score=124.7; E_value=2.6e-34; Accession=PF00160.12; Description =Cyclophilin type peptidyl-prolyl cis-tr
MADLFQEVFNPTNMDGAMKSMRSTGAGNYGRMQQIMQMEKDWHVEFLRQYSREHNYSGIVYYSNAHSINIDKNIYHLKTGRRLHRDNDTGGESIYGARFADENFKLRHTGPSVLSMANAGPDTNGSQFLICTVQTPWLDGKHVVFGKVVDGYAVVDKMEAVGSQSCATVETIRIEDCG

SEQ ID NO: 62861 - protein, 122 aa, Zea mays
  Coding DNA Sequence Number=SeqID_19486
  Subcellular localization annotation: CTP_CleavageSite=28; ConfidenceScore=5.56e-01
MAETTCFSVSRPQISAATVSRLPTHAPVQARVGQRGRVSFGGAAREACNPPRRRSLPSVVLARGGGGGAREWATAINPIPSPSQTPTPSPCRRGLESYLHLKRRHAVDLQPMPGGVPSPASS

SEQ ID NO: 62862 - protein, 140 aa, Zea mays
  Coding DNA Sequence Number=SeqID_19487
MLPKSQSPLVEAELPKVIKAPATTPKRRRMASVLDAVMETTKALTPAPTKKVVEAATAQAEVKAGPSVPIETKPTATEDKAEQESPNAGMAAGKDVIEKAKSPALEAPSEDLYYIISTCFRRKDYPKKNIFRSQTLGLGN

SEQ ID NO: 62863 - protein, 43 aa, Zea mays
  Coding DNA Sequence Number=SeqID_19488
MTTDRPLELLDMDLFSPIAYISIGRRKISNPRDLKGILEMSSK

SEQ ID NO: 62864 - protein, 329 aa, Zea mays
  Coding DNA Sequence Number=SeqID_19489
  Pfam annotation: Domain name=HALZ; Domain location=61-99; Score=4.4; E_value=0.1; Accession=PF02183.9; Description=Homeobox associated leucine zipper
MGIRKKPEYVWKEYRENGIENNKNTPTWRKRLQALSGRDPTEDDPTIVYMAGYLHTLDTHYDDLSSHCTHLNSRVESLEQQVKELKKEKTSLQECLDIAEGEEANTREAYRTLKMDYDKKLKKLAPMKKIQKKTKNQGGQAERRKKAPPAPAPARIENLSDIEDMSLASLDDLLKEFGDTLEKEFSRFPLRAKREAGREESETHLPALPAPPVSRVVFLTYDAPPSPHRRPLHLRPLAAQEEFGTAPSSPLDQRPCPVPPRRGVSSAALCGINVGAVHLTGARRAPSLLSPSGAYKKAAPGTSFPAPASATPLLPSSSAIRRAPPSSPL

SEQ ID NO: 62865 - protein, 148 aa, Zea mays
  Coding DNA Sequence Number=SeqID_19490
MGKSKKGSSSSPCSDDKRKREPTPPSEDFGNSEYSEEEFSFESEGSPAPASPPASSDDSDDSQGIAAEVWTYIRAVERAGLEGSDESEYSSDEEGSGGDGRDSDDDGGDGGDDSGNGGDGSGEGGDGGGKGGNGGGKGSSRGSNQASA

SEQ ID NO: 62866 - protein, 407 aa, Zea mays
  Coding DNA Sequence Number=SeqID_19491
  Subcellular localization annotation: CTP_CleavageSite=80; ConfidenceScore=5.16e-01
MAATRGMNPFLKADSPDCAPKRHGKSPPMHTGVPNQWRGGPAPQVIQLVRWSPSTEKANRHARSESLRLFVSIESSRPASGMEGPGPRVILFGHQPPCAEKANRRTREVEPPLVPVPCLLRATAEDREGGTPYYSMKMRCPTRLSLVTWVNNTRLHHVDGPKDLRKCNPDLRVGSRMPQHGVWTAHSRVLGLWGRENLGLAQAGVRRRPDAAMWPTTRDISQWAEPDLAGGVQAILQVACLSVAKYTLPWCPRARAALLRARRLLLAENATCLIDLSPAGLLLVAWRLELARPMVPASEELERRNHYLSALVRRTKYSDPPQIESESRRVGVAPRRKRPCRGGEAVKEMTQSCARGTAWRGAARIWRVATLFGSWNCLMRGVGAPALSHERVIRMRLGDVQLKKILK

SEQ ID NO: 62867 - protein, 273 aa, Zea mays
  Coding DNA Sequence Number=SeqID_19492
MEDSLAIRTSYCSEVEGFPTSFCEVVRFAWESRKKPEYVWKEYFEGGMEKCSMAVYLGESRNYPEPSFLPSHFLPDTSFQILARMLPDQPSDNYARTTTSNKNTPTWRKRLQALSGGDPIENDPTIVYMARYLHTLDNQYDDLTLHCTYLTSQVESLEQKVRELSGEKASLQESLAIAEGEEANTREAYRTLKMDYDKKLKKLAPARKIRKKTKSQGCQTEQKEEAPPTLPPAGLRNSSDTEEMSLASLDDLPKEFGDTLEKEFGSTLDSTRV

SEQ ID NO: 62868 - protein, 147 aa, Zea mays
  Coding DNA Sequence Number=SeqID_19493
MAGMLFRRAIQSNHGAQSTHRRHSNLRQDRMGHPDPPTGPRTVVHTADHDSGMDLPSAALLSLDGARCAPPMDGSEGGGSCLCTRGIPVKVGSRGEVVGGKRELHGGAQQLRPSAENACRLVAWLHGRDESAGPPVGEVLKSQHVPS

SEQ ID NO: 62869 - protein, 205 aa, Zea mays
  Coding DNA Sequence Number=SeqID_19494
MVKVRLADGKKNLVREDSIQGDAIMDITPQLITLKQRSKSDKMGLLFLKVTLSTGFQSVKSKFVFGSRKDRHHSKILPRASPGIPCRTAITAKSSRGPSQESLAGPPSQQNPPEGLPTLTTPLLPLPLSETAGSRVNAPDFKLPGPLTSVRSRSDGPELKKRKDMSDLISTAKREINGSRVVFYPRRTNTTAPPGSHGGDPAGDT

SEQ ID NO: 62870 - protein, 120 aa, Zea mays
  Coding DNA Sequence Number=SeqID_19495
MVHQSFSGPPEATSPPLSSLYPWIHGLFPAIEFVMAPSSPLPNSGDPEATLARACLNSGDLTATERSGATRSHMFSLSLISPPSDSDQTIRTTGYRFTHARLTRPGPPVSATRSRSSFPV

SEQ ID NO: 62871 - protein, 184 aa, Zea mays
  Coding DNA Sequence Number=SeqID_19496
  Subcellular localization annotation: CTP_CleavageSite=35; ConfidenceScore=5.38e-01
MAMMDPPSSFIFKNIPSTLHIIFSKNKTFCFAKARLSIRKTFCKTGVPRKVIKFKEACLSGGDQFEQDVLAVGEVGVHWRKEFVALTVAALTCDDQTIIASHGDAMDVSRYMAQGHETAVTSELIRFHRGKLDTMVRIVYWPELIHDGDIYLTLNAIQTIRARIKTATTRIACGSSTARAELLI

SEQ ID NO: 62872 - protein, 120 aa, Zea mays
  Coding DNA Sequence Number=SeqID_19497
MAHRSFSGPLEATSLPLFPLCPWIHGLFPTIEFAVAPSSPLPNSSDPRATLARACLNSGDLTTAERSGAARNHLFSLGLISPPSDLDRTAQTAGYRFAHVRLTRPGPPVSATRSHSSFPV

SEQ ID NO: 62873 - protein, 212 aa, Zea mays
  Coding DNA Sequence Number=SeqID_19498
MPPAPPHGIPAAGGDPDGDGDNDDAGGSSSHDTELSEELEPEGWIARPITRDAARECHFHDALDTLLHRAFDQHTWSIEYRCVVYQQYEVADGLDLKYYPRRSTGSAGGMIVSPVGEGNARLNNMVNLVAVLNIELDHALDELGKVRAEVAELRAECATRHYLDGGPPAPVRIQHPYRSSPMVASTMVSSDSNRYHSGRSPKNTKVDTASKL

SEQ ID NO: 62874 - protein, 176 aa, Zea mays
  Coding DNA Sequence Number=SeqID_19499
GEEQERWQPNDESTSSTGLSSISNKCLIANNDGEDKSDDEEEYEDEESTSSQGTFSCFASTDNNDRENETDDVEEEIRRFYIHLNKEDKALLIKLLRRNKEQGETLLRLEDTLIKTNDSLEKMTKEHEELKYSHGNLVQRHGHVVKKLEKGKTTASVKLHKKNVPKDEEINMSLEK

SEQ ID NO: 62875 - protein, 57 aa, Zea mays
  Coding DNA Sequence Number=SeqID_19500
MEARRASRYQVHGRRSKRLRNPKPRVKKKTCKVKDVGNLRHIKSSQVKPDLRFGVSH

SEQ ID NO: 62876 - protein, 124 aa, Zea mays
  Coding DNA Sequence Number=SeqID_19501
MWAVTQSELVRSNSRVMKAGEHREDKEGECFVRFGHGGGLTPSGITVKVRTCEERKRFGIRVSRRKRRSAQARATALESREVIAVEALKQAKDEHVQKLMEAHLVTHNQRRALRIQEPASSNPV

SEQ ID NO: 62877 - protein, 950 aa, Zea mays
  Coding DNA Sequence Number=SeqID_19502
  Gene Ontology: Mol. function=binding; Cellular component =intracellular; Biological process=nuclear mRNA splicing, via spliceosome
  Homolog annotation: Hit_ID=A2Z903; Match level="QueryCoverage=97%, HitCoverage=88%, E-value=0.0, Identity=84%"; Hit description =Putative uncharacterized protein
  Pfam annotation: Domain name=HAT; Domain location=368-400; Score=4.2; E_value=5.3; Accession=PF02184.7; Description=HAT (Half-A-TPR) repeat
  Pfam annotation: Domain name=HAT; Domain location=429-461; Score=4.2; E_value=5.4; Accession=PF02184.7; Description=HAT (Half-A-TPR) repeat
  Pfam annotation: Domain name=HAT; Domain location=569-601; Score =10.9; E_value=0.34; Accession=PF02184.7; Description=HAT (Half-A -TPR) repeat
  Pfam annotation: Domain name=HAT; Domain location=870-902; Score=8.4; E_value=0.94; Accession=PF02184.7; Description=HAT (Half-A-TPR) repeat
  Pfam annotation: Domain name=PMC2NT; Domain location=159-239; Score= -12.4; E_value=0.049; Accession=PF08066.3; Description=PMC2NT (NUC016) domain
  Pfam annotation: Domain name=PRP1_N; Domain location=38-203; Score =324.8; E_value=1.6e-94; Accession=PF06424.3; Description=PRP1 splicing factor, N-terminal
  Pfam annotation: Domain name=TPR_1; Domain location=724-757; Score =13.6; E_value=0.12; Accession=PF00515.19; Description=Tetratricopepti de repeat
  Pfam annotation: Domain name=TPR_1; Domain location=792-825; Score =1.6; E_value=3.4; Accession=PF00515.19; Description=Tetratricopeptide repeat
  Pfam annotation: Domain name=TPR_1; Domain location=856-889; Score =0.7; E_value=4.4; Accession=PF00515.19; Description=Tetratricopeptide repeat
  Pfam annotation: Domain name=TPR_2; Domain location=324-357; Score =13.6; E_value=0.61; Accession=PF07719.8; Description=Tetratricopeptid e repeat
  Pfam annotation: Domain name=TPR_2; Domain location=445-478; Score =4.1; E_value=9.3; Accession=PF07719.8; Description=Tetratricopeptide repeat
  Pfam annotation: Domain name=TPR_2; Domain location=623-656; Score =5.7; E_value=5.8; Accession=PF07719.8; Description=Tetratricopeptide repeat
  Pfam annotation: Domain name=TPR_2; Domain location=690-723; Score =5.9; E_value=5.6; Accession=PF07719.8; Description=Tetratricopeptide repeat
  Pfam annotation: Domain name=TPR_2; Domain location=724-757; Score =15.4; E_value=0.21; Accession=PF07719.8; Description=Tetratricopeptid e repeat
  Pfam annotation: Domain name=TPR_2; Domain location=792-825; Score =12.2; E_value=0.9; Accession=PF07719.8; Description=Tetratricopeptide repeat
  Pfam annotation: Domain name=TPR_2; Domain location=856-889; Score =11.4; E_value=1.1; Accession=PF07719.8; Description=Tetratricopeptide repeat
  Pfam module annotation: Pfam domain module=HAT::HAT::HAT::HAT::PMC2NT: :PRP1_N::TPR_1::TPR_1::TPR_1::TPR_2::TPR_2::TPR_2::TPR_2::TPR_2::TPR _2::TPR_2; Domain location=368-400::429-461::569-601::870-902::159 -239::38-203::...
  Pfam module annotation: Domain location=724-757::792-825::856 -889::324-357::445-478::623-656::690-723::724-757::792-825::856-889
  Subcellular localization annotation: CTP_CleavageSite=74; ConfidenceScore=5.55e-01
VMSGTTPTPTPTPTPLPPPPPPPPAARPARYDFLNSKPPPNYVAGLGRGATGFTTRSDIGPARAAPDLPDRSASAAAAGPAVGRGRGKPPGEDDGDDDGGDEEKGYDENQKFDEFEGNDAGLFSNADYDDDDREADAVWESIDQRMDSRRKDRREARLKQEIEKYRASNPKITEQFADLKRKLADLSAQEWESIPEIGDYSLRNKKKRFESFVPVPDTLLEKARQEQEHVTALDPKSRAAGGTETPWAQTPVTDLTAVGEGRGTVLSLKLDRLSDSVSGLTVVDPKGYLTDLKSMKITSDAEISDIKKARLLLKSVTQTNPKHPPGWIAAARLEEIAGKLQVARQLIQRGCEECPKNEDVWLEACRLASPDEAKAVIARGVMSIPNSVKLWLQAAKLEGSDLNKSRVLRKGLEHIPDSVRLWKAVVELANEEDARLLLHRAVECCPLHVELWLALARLETYDQARKVLNKAREKLPKEPAIWITAAKLEEANGNTQSVNKVIERGIRSLQREGMDIDREAWLKEAEAAERAGSVLTCQAIVKNTVGIGVDDEDRKRTWVADAEECKKRGSIETARAIYAHALTVFLTKKSIWLKAAQLEKSHGTRESLDALLKKAVNYNPRAEVLWLMAAKEKWLAGDVPAARAILQEAYAAIPNSEEIWLAAFKLEFENNEPERARMLLAKARERGGTERVWMKSAIVERELGNVGEERRLLEEGLKLFPSFFKLWLMLGQMEDRLDNGAKAKEVFENGLKHCPSCIPLWLSLANLEEKISGLSKSRAVLTMARKKNPATPELWLAAIRAELRNGNKKEADALLAKALQECPTSGILWAAAIEMAPRPQRKGKSTDAIKRSDHDPHVIATVAKLFWLDRKVDKARSWLNRAVTLAPDVGDFWALYYKFELQHGNVDTQKDVLKRCVAAEPKHGEKWQAISKSVENSHLPVEALLKKAVV

SEQ ID NO: 62878 - protein, 175 aa, Zea mays
  Coding DNA Sequence Number=SeqID_19503
  Subcellular localization annotation: CTP_CleavageSite=36; ConfidenceScore=5.34e-01
MAGNHHQHKLQRLMGAIQENSVSRPAPTAVPPARVRLATAKFSLRHNRKLRLARPLGLGLNLSLGRRSPPRPTLGLDLNLGLGGWSPPRPTPRLSLSLGLGGWSPPRLTPGLGLNLDLGRNRVLARPRPRPQEESPPRPTLGSDRPRHRGYIIILPLASSGYRGTRPASHPGSPR

SEQ ID NO: 62879 - protein, 347 aa, Zea mays
  Coding DNA Sequence Number=SeqID_19504
  Homolog annotation: Hit_ID=Q6QP51; Match level="QueryCoverage=25%, HitCoverage=39%, E-value=2e-27, Identity=71%"; Hit description =Putative growth-regulating factor 1
MTASKKKGSTAAPEHSGFRLITDQRFEGWPLGRVRQPPQNTRAPRPLLIRGSKAGPSEGFDSRPRARRARDDSGYVRYMSEARATLPRRIHASPEGLLKQRAHPRLARSPARAGFVVKQPWPNRLTNRPYHRRIQCEDRLTPYPDTRASVGKVEVTAVTLPFSLTDLTGKQRRSPRSDCCATRQRLGLNLGLGRRTPPHPTPGLGLNLGLRRRTPPRPTPRLSLILGLGGWSPPRPTPGLGLNLDLGRNRVLARLRPRPQEESPPCPTLGSDRPCHGGYIITLPLPPMEARRRQQDPSSPDSCASTGLKRSSDGHDTASEVAELEKKLDEVTENFNVKQSKHEISDA

SEQ ID NO: 62880 - protein, 140 aa, Zea mays
  Coding DNA Sequence Number=SeqID_19505
  Gene Ontology: Mol. function=transporter activity; Cellular component= integral to membrane; Biological process=transport
  Homolog annotation: Hit_ID=A3B496; Match level="QueryCoverage=65%, HitCoverage=19%, E-value=9e-36, Identity=79%"; Hit description =Putative uncharacterized protein
  Pfam annotation: Domain name=CRAL_TRIO_N; Domain location=1-47; Score= 14.3; E_value=0.0026; Accession=PF03765.6; Description=CRALTRIO, N -terminus
MPLVGDNERTDTVLLKFLCAREFKVKEAMAMLKSVVLWRKRFGIDELLGTDPRPAQSWRRYVTPEQVPVQFGGLYKEDDTEFSASNAVTELTVKPSSKETVEVPATEGSTVVWELRVLGWEVSYGAQFAPDAEDGYTVIV

SEQ ID NO: 62881 - protein, 100 aa, Zea mays
  Coding DNA Sequence Number=SeqID_19506
MTVGLSYGAPDSPVYTGHVRRPLARSSRCPVVAPDSPVYTGHVRRIIAEQPLRIPEAAKFRSRVLLEHRTLSGVHRTVRHESHIKDGVGSNDVMGEYRSK

SEQ ID NO: 62882 - protein, 97 aa, Zea mays
  Coding DNA Sequence Number=SeqID_19507
  Subcellular localization annotation: CTP_CleavageSite=38; ConfidenceScore=5.05e-01
MEVYNGSNSPWHKPQPPNMTVGLSYGAPDSPVYTGHVRRPLAWSSRCPVVAPDSPVYTGHVRRIIAEQPLRISEAAKFRSRVLLEHRTLSGVHRTVR

SEQ ID NO: 62883 - protein, 473 aa, Zea mays
  Coding DNA Sequence Number=SeqID_19508
  Subcellular localization annotation: CTP_CleavageSite=67; ConfidenceScore=5.27e-01
MVTTAAESRGAQMQRGAKSSKAKGRSSWEKMRKHTCNTRGPQAIQLVCGSPSAEKANSRARSKLSPTAVHLFNSAETNGQVSYTGTRAHGSYSLGVGSGKSESPLALVLHLLETAAKDREGGFFKTNAVVSRCLACGLAKPSDVGAAGQSAAGTDVEVGVTKGGLVGITSASARKRRANRQPSFGPTCRPVSSPEVGPGATVDTLKLGYPYYSVKARAATWLEKTISSKDLRGYRLDPRDGSWTSLCGVRATLSRVPGFWDKEYSDLSQGQAGVRSRHVSGPYRVRFCSPLRRRPDAATWPTARDAMCRLSIKCAMSTSLTGGDRTILQTACLSIPLAGRVTSFASEGTDLRSLERSNAVERGFCLEPQVLLIFLCLRRELRTIDVMDRSQSEAVSGEAVTSPEAEAEVGRGCDSSRGRGRARRRPSPEAEVEAEAWVGRSDDSSRGRGWGRARRSSLLRPRLNSGEAITYYC

SEQ ID NO: 62884 - protein, 142 aa, Zea mays
  Coding DNA Sequence Number=SeqID_19509
MPPGPPRRRAPCAEANQPAWRAATPAEEADPVLRAFVGARPAEPCLRLLKGRKGKIKTHRKMSETGIPSDTYPLRGKANHAYGETSQAPVSTGAAEGCPAAGFDAASASDTRGAEGAACPAEGPTSRTAGTGTCSWGACGST

SEQ ID NO: 62885 - protein, 166 aa, Zea mays
  Coding DNA Sequence Number=SeqID_19510
  Subcellular localization annotation: CTP_CleavageSite=27; ConfidenceScore=5.19e-01
MLAHASRRPLPLAGCSTGLPPVPLFPVAATVFRYLFLLCVALPTPLLELGPLGCRLDVSRLDTSIPKKELVSRPPGDQQAGLTRADLTGLAYTYAQPGYKKKKPQPLRLAPMDRTYGDTLCSRGWKRHPFSCGKADTPESAYFRHLEGSFPAGGEFVEPFKAQYSP

SEQ ID NO: 62886 - protein, 463 aa, Zea mays
  Coding DNA Sequence Number=SeqID_19511
  Gene Ontology: Mol. function=DNA binding; Cellular component=cell outer membrane
  Homolog annotation: Hit_ID=Q2QPI6; Match level="QueryCoverage=96%, HitCoverage=86%, E-value=1e-83, Identity=45%"; Hit description =Expressed protein
  Subcellular localization annotation: CTP_CleavageSite=57; ConfidenceScore=5.49e-01
MQAAPGSVSWAASQPSVLGRCGGGAPSASLKWRAGGVGGGECRVRGRDVVVPRSCARAQEKRLPRVRKSKEERREMVESFIKSYRVSNEGKFPSINLTHKEVGGSYYIVREIMRDIIQENRVLGPGGLDAMTLSFEDCADSSKSSMKLELGQDSIEILDMSGSEVSKSHVPEISSTDESFPLQGNAISNHRLLGSSNILEVGVLNSVVQNGSVADAIFMETNLAKQDEVPSRGSIEFDLNTSEEQARLFAQVSDSDEEVTLNNQADAQDGTTNSGTDRVILPLESFAVYENNASLLRDHETLPDDNHDGSTDRVADDASLLAATNGVQAKQASLHEHDASTRSVLIDNAQSLDGQFSTTVSTDPINGFKLETEIATKTVETSQVHRLQDEFEQPLVDASYDGQENSDSPVSHPALDTKGLLHTEDQLNVVQVDETEFKNSTSGITKEEHHSAADRTWDPTGTT

SEQ ID NO: 62887 - protein, 92 aa, Zea mays
  Coding DNA Sequence Number=SeqID_19512
MAIHLGSEDRVCTTQAGKGSRPVGKVYNLCRVLKTGISVELTVKSILGILFDDAIKSDLCCRSAMAALVPIISSMGDSISGLMRSKFCGQVQ

SEQ ID NO: 62888 - protein, 235 aa, Zea mays
  Coding DNA Sequence Number=SeqID_19513
MMLQNLISGISSFEEMARIRCTARKSVIPFLPSRLAKRPLRRTVLGQSNHLERLHRCLHEEQECRRQEQEQEQQDSSPSPQWGVESERPPSPAPQLEMPPAPPQGIPAAGGDPDEDGDRDDDDAGGSSSHDTLLSEELEPEGWIARPITHDAAHGCHFHDALDTLLCQAFDRHTWSIEYRCVVYQHRRGLYPDQWEATCLVRRLDDDLRGAEAFSEHYSITERDTAEAAMQDAAR

SEQ ID NO: 62889 - protein, 131 aa, Zea mays
  Coding DNA Sequence Number=SeqID_19514
MEAKSHQQPITLRGTCKNYATSKAEYTNTQLDLPGYNGSSSLISCEKQTIRIEFLSLQVTALVPTITGMGDHVSGRVRGYVCGQVQSGIRTLILIPISSRRPRIPMDLCPQTNHQYDMKVGTTNFLTSREC

SEQ ID NO: 62890 - protein, 201 aa, Zea mays
  Coding DNA Sequence Number=SeqID_19515
MREVENEREGCCSAWLAAHFVEHLRRVAVVGLRGKLGCEELRCREMGTGGTVPGREPLQGISGRRGGMKLGRACEQGAMAAGEMELLRRAMDMDLAEVGQGALVRRGERLPALNAMEKGRWAEEGAGTWPPLLLAEQGFLAAALGGKEGGGRCLEEEEGGGGVRAHGRLGSYCRGEEARLAMEEALRTHRKQRGEEVAGGG

SEQ ID NO: 62891 - protein, 197 aa, Zea mays
  Coding DNA Sequence Number=SeqID_19516
MAKGEEPSATVGASPIVGIGSPSVRGAVWHHRDVANQGADSLDHLVSSPASLPRPSRRSTVGKPLLPSHQNPGHAFLDNPLGQGRARAWGLGLTGDVRGGRHSKWGAFAARYLRTQVGITADQNNTKVDTAPKVNSTPVLFTLIWHLLLRHTCTLILFQAEGISFMTFVRKSLYPKGNNASKNEGLYRLIFSVLPCS

SEQ ID NO: 62892 - protein, 187 aa, Zea mays
  Coding DNA Sequence Number=SeqID_19517
  Subcellular localization annotation: CTP_CleavageSite=36; ConfidenceScore=5.53e-01
MPPPSPPFGVPLSAPSPPRSTLSHRHRIWPRLRRTSVRRGWAAVTQITGEITSHKLYFASASCCRIRGMSREAPSNPEERDKQKTLGVDLRWARGVEMDGLGSLLAGRNFAVERERVGIAGRTGPLVGGHHRRQERPRLRLPRVKKTKENRWIRDVGSSLSRPLCGGIYRYLSAQRPVLRTHVPPGA

SEQ ID NO: 62893 - protein, 316 aa, Zea mays
  Coding DNA Sequence Number=SeqID_19518
  Subcellular localization annotation: CTP_CleavageSite=31; ConfidenceScore=5.21e-01
MASSISRSGGIPGNSLGKTSAYSQTTGIFFRVAHIATSEALVPIALAELLLLRRLIVSWSGSWKTSGCGLLLLRWPDHPSACLLLKSPALVVRNNPEPLGLREWCCHWCLSLLLCPVSYNTVLLGDGQVDQLIEAISPNSVETFPQLGVETSAEAVSLLLIRISMVTCILAQVVEGLSILQYRAGSLIKCQKLIQLAIENSSWDVVPSESSLEFLPRHFMISGEHSTEVVPPSPSRAAKLLRGEASLGFIRAVFREEGKLGLNDAEPHVGIQRILCLGEQGWLRTQELLVGCRCRRSLMLASTMLLRVGLALQELS

SEQ ID NO: 62894 - protein, 668 aa, Zea mays
  Coding DNA Sequence Number=SeqID_19519
  Pfam annotation: Domain name=MAP7; Domain location=467-611; Score= -83.0; E_value=0.083; Accession=PF05672.2; Description=MAP7 (E-MAP -115) family
MEVVELVPCACNKWGNWWDFWFYVAEGTVEDHPGLPVAEMCSHYYSAYPQFEVAEEDADEGALRCAAGLSSGRDLVEEFVAYGVWPLARGWALGEVCPRQMPSHGRMLVRSPSFALDLHGRDPDPFVREAEDGAARIVGRYVPKTEGQRSWDIRGSNDRLNRVFELNHLPYGGYPGQDDVDRRGKKPAAETEDDPALAAAPSTKKRKLGTAMGGLGVSDSFAMELMGTCAAPGGRMSSPELRESSTRMLKVTGGWWPKNVPIPRAAGEDFFTSRMVRDMRVFPYGRNIAAVVSAVMDKDRQEAAQKRRAVVRLPEARPKRARGTAKSAALGGSQLTLAAKTAAPGSSKVPEVVKATGVGGTKSASAGAAKTRELPSPARSVADFATDISVDDYLVGSGEGQHVVVPPAVAAVVSAAVSGAKGIALSAGGEIPELAAVKDEAGAVSRWLKEASQRLSQAADFADRVASGSLTAVVSAEVERLRAQHAEVVREKSAADSKCRKLAEKVAALEGERTELRHQLAEERREANQALAKAQSAQAEANVAWVEGSLARQRAKEWEERFNALQARLERAEASTRSEVERTRKQLMDSYHELGTRTADFEVPDRESGLRCLEWLQEELLALPTIVGGILCPMPPWSPCEGAMNTLSSERGAVTMRSSTDLMRDFRV

SEQ ID NO: 62895 - protein, 136 aa, Zea mays
  Coding DNA Sequence Number=SeqID_19520
MWCNHVSHVKDVWAMYPDLVVRVTVQCMGVLYGLQALQSNAMAHLANIAQTTKLTLDSREDFVVDLSSELVEKDLHRELEEANDHLDMHHLEMEANEAESEGEEAPKELGPAPGANGTISTMPPSPASSVASTTQG

SEQ ID NO: 62896 - protein, 521 aa, Zea mays
  Coding DNA Sequence Number=SeqID_19521
MSAKVPRAKGGALSAGGEILALAAVKDEAGAVSRRLKEASQRLSQAADFADRVASGALTTVVSAEVERLRAQHAEAVREKSVADSKCRKLAEKVAALEGERTELRRQLGEERREANQALAKAQSAQAEANVARVEGSLARQRAEEWEERPAWRGLRLLRARMDSYHELGARTADFEVPDRESGLRCLEWLQEELLALPTIVEGFMSYASLVTCEGAMNALSREGCRHYEVFDRSDEDFEREIYKVEDPVVKESAGALFDQMWGPHGREVVRERSDTARGQAARDEKVDDFGALNSAWPEVESNPVAAGLEVAPAPPSETVEGSLDAPAATAAGGGSSPTAVPRAEDPPKTATELAAKDPTAAGSSQVQDFGPAHATATANFLAASTVDAGNESDESASKFSDFGDSGSSVGWTEESLDEDLDYFAALDVAAAEASPRAADAEVVPGPSAGRRRRRVVAKRRVSEADGGRLRVGRAGKKELLSSPAVASVGEGELRSLFEGEELKIMLFNYREMGIILKVEP

SEQ ID NO: 62897 - protein, 217 aa, Zea mays
  Coding DNA Sequence Number=SeqID_19522
MTVMPLNTQSAAAEEAPFAPDPAIEVDEGGTSSSILPPTPEETEVIFGWRLRSGAKPEAAPVPLPRLERDRKDYKKDLHKVFARELEVAQKEKKVAKKEEHLDQREEVITELQAKLNAFNKMLEEQRVQQATAVESLKRLQQGLDDRASSLALAEENLKEKDASLDKRAADLAWQEKDLAFREEMFERREKLLADHEVEAEKKERALEERVCQFHAT

SEQ ID NO: 62898 - protein, 112 aa, Zea mays
  Coding DNA Sequence Number=SeqID_19523
MDQSMTRGPRPTSHTPWAPVPGCKEVEPPLTPALRRLGAAAEDKEDVAVGMTEGGLAVITSAGARKQRANRQLLGAFGFRREARSQKRKAVIPTPPEDDLDQEIQNLEILQQ

SEQ ID NO: 62899 - protein, 347 aa, Zea mays
  Coding DNA Sequence Number=SeqID_19524
  Homolog annotation: Hit_ID=A0EVH6; Match level="QueryCoverage=63%, HitCoverage=8%, E-value=3e-07, Identity=89%"; Hit description=Milt putative polyprotein
MADSKDLNSASPNSNTRLTNLSAAEHKKLEDDMKKIDEEAHRQKDQVLKVADKWYLSHFKVDCHQKTVQEREINAEYMLAVLQQLPTIGDARSADDIPSIKISFDNRIKSITEDIERMTHALGKTHMPNFLSHKLGDETIAPNTSAANGFPQPYSEGTATVLVECLALQKGVNILFGDSAGEEVADLQNQAYMADSKDLNSASPNSNTRLTNLSAAEHKKLEDDMKKIDEEAHRQKDQVLKVADKWYLSHFKVDCHQKTVQEREINAEYMLAVLQQLPTIGDARSADDIPSIKISFDNRIKSITEDIERMTHALGKTHMPNFLSHKLGDETIAPNTSAANGFPQPYS

SEQ ID NO: 62900 - protein, 183 aa, Zea mays
  Coding DNA Sequence Number=SeqID_19525
MELLLGTMYNREREEWLHGKLELGQGKEERGSASKLLEPKERVLAAVRKGRGGRLEHRAGCSAMEPLHGFAAAPWEKNSRGVKDAMAGGAGSREPAGGLAAVKRGRRKAEDATRRASTRWREGTPGHGSPCALGKELQLYVLEGAHGWKMVEEEEKGVGGWGGNGKFSECKVGKPIFIEEKLG

SEQ ID NO: 62901 - protein, 49 aa, Zea mays
  Coding DNA Sequence Number=SeqID_19526
MGDHVSGRVRRAICGKVHSDHASPWTRVHRPSPLCYQSGYNQFLTSREC

SEQ ID NO: 62902 - protein, 94 aa, Zea mays
  Coding DNA Sequence Number=SeqID_19527
MAARCLFQALKQWRGRGLRLGKWWLGHSKNREGEAGRRPWARAGKMELLLGAMYNREREEWRHGKLELGQGKEERGSASKLLEPKERVLAAVRK

SEQ ID NO: 62903 - protein, 169 aa, Zea mays
  Coding DNA Sequence Number=SeqID_19528
RDSRDAREDMGARNWTETHRLALSTRGGGRPKSGEVDLGPPVKSGLVRGLGKLHGPLAELAEALARLGGGWSGLATAAEALVAMAGGIELAGAKERWLAGEGRARRTPVRALAPSTASSMRQRRERSSSNADWAQIFEIKATIPLKDLLLSGIKVNIPDLWLKVSISEF

SEQ ID NO: 62904 - protein, 61 aa, Zea mays
  Coding DNA Sequence Number=SeqID_19529
MNAFQPNDGGDDQIEAGEGFAGSPGPYRVIGSVNRNGGGANRGEDRSSVVRALRWQPDPIQ

SEQ ID NO: 62905 - protein, 396 aa, Zea mays
  Coding DNA Sequence Number=SeqID_19530
MHMVGDFLKRQIAPLQRRVCLCCWFTGPNDINRIQHGPSTDLSWEELELLGIPALCDDPGFRTAILATLPTLDESGVAVRQIGGRDSTAGSRSLMRQLEAPSLPAWLPAPPPWLLAPPPWPPAPWTRVKVLQAAPPPVPPPQGQQQQQQQQQQQQQPQQQQQQQQRSPRFQGRWKVQGPKASSSTAPKATPPPSGTRPTDGSSSQQQDSVGSGVGCPPPAAAKTVPVASHAPAWGPVAVAPASCGVAATEEVPAGGSTHASNIAPTPDVGGDTGGASSSNPPPALEEMEVVFGRRLRSGAEEEAAPIPLPRMLSRTHQQELEGKASDAALVEEKLKAKEQSLYRWETDLARRETDLSRWEADLTFREEMLTRRGEMLAEHELEAEEKEKKLEERIR

SEQ ID NO: 62906 - protein, 63 aa, Zea mays
  Coding DNA Sequence Number=SeqID_19531
MASAKVGGTSGGIGVSPNYPKKSLSHHDHGSDPAFHSGSGSRLTILGYGSRTHHPIYSLIKLH

SEQ ID NO: 62907 - protein, 1070 aa, Zea mays
  Coding DNA Sequence Number=SeqID_19532
  Homolog annotation: Hit_ID=A2XTZ9; Match level="QueryCoverage=33%, HitCoverage=50%, E-value=9e-80, Identity=52%"; Hit description =Putative uncharacterized protein
MDVNPAQLLPIARYTSIIDVIMRRRGMLLAERALVVASVRSSARYRQQQRAMGCLPNLAGGSLRSQDDHGRGASSRNRSSGRDRDRSSQQSSSRRGSSSSGSRRNDRDGTGKSRGYGNFGKHSKDRIQEKDLDFRERESRLVQPDDPLRDGFESFSSCRSEKDRLNRTRSKVAIPNRAGVSLDNGNVSKKDNGVISFEREFPHLGSEDKNGKQDIGRVPSPGISTPIQNIPLVVSDGWNSVLAEASISLDKLLKSKGARAGESNGPIKVAPQLSIQPSSNSVRTPVKTELVKQSQSGSLQVLSREQNGTVNTAAKDITSNNPVSPVLGRSSSMEPMRKSIVNPKLKVGTNGRSLHPLQGSFADRKASAKDKYKFFELLRSKSVNGSSAAIESPSSLTDDQQNSSPELPFKFIENGNSSCEEANSCEGSQRHLSDNEEIIPPSESHDVLDEGSLGIQVDDKGSSSSPVLGTQDISSKKPQEDNVDIVVPVYVNDGSVMPNSVDNEARLLLEEANPAQVLQHIDAREENPCPAQEFESIGAGGEEELNLLRSMGWDENEEVQPLQQEEIADCKAERQAAAEASGMQGLIAESMEQRHSLWGKKEYTKWKSCLVLEAHRDKHLLTALAVAGPRDMVAARSLPNRCGHCPSPRASAATVPSPPAPTRLGRHLCNRRHHLPSPRAEAAIRAITFLPHARAEAATRAITFIPHARAEATITFLPHAPRPPSVPSPSFLTCAPPPCVPRPCPSLTLCPATSAVTASLTSDIHGTAQCDPDLSVPWKARSTLLSSSSLHRRTRRPRSSPSSASISSLSSSSLQSASREREISQAHLQQEGEAAVQGQAVVVVGGGGGCEDEHQSRLRRQQLSRSLWMRHVKVIIAVDTVVYHSASCYSWPGRRSSECENKKVQNLLISDGGTRWLFPLATTLGPSTSTSGTSGIIRILDWADIINAHIVPRTGIVDGLKLKVLDFKTLSWSKLEAKSQAEPSELAGAVSFSASAGHSLVAVFHSLLETLQCPTAEPEIIFNLLLQAKLETVTKELQATDQMQVLPRKRRRSRSWLLNVVNQILVRLPE

SEQ ID NO: 62908 - protein, 24 aa, Zea mays
  Coding DNA Sequence Number=SeqID_19533
MVAAVQVGGAVARMGIRRVFERLG

SEQ ID NO: 62909 - protein, 151 aa, Zea mays
  Coding DNA Sequence Number=SeqID_19534
MGKSKKGGGSSHHSGDKRKREPTPPSEDFGDSEYSEEEFSSESEGSPAPASPPASSDDSDDFEGITAEVWTYIRAVERTGLEGSDELEYSSDEENSSDPSEEGSGGDGGDGDDDRGDGDGSGDSGKGGDGSGKGGSGDDGGGSKGSNKASG

SEQ ID NO: 62910 - protein, 131 aa, Zea mays
  Coding DNA Sequence Number=SeqID_19535
  Gene Ontology: Mol. function=protein serine/threonine kinase activity; Cellular component=cytoplasm; Biological process=protein amino acid phosphorylation
  Homolog annotation: Hit_ID=A2YI77; Match level="QueryCoverage=51%, HitCoverage=13%, E-value=1e-24, Identity=85%"; Hit description =Putative uncharacterized protein
MAGYLPFKDSNLMSLYKKIFKADFSCPSWFSTSAKKLIKKILDPNANTMSSVIIAIAEHINNEWFKKIPLTVPNSHIGRDVVVHAAPGDLRKELLVFISVQLKIGDYILVLGHRICFKFQQWSSEAHIHED

SEQ ID NO: 62911 - protein, 97 aa, Zea mays
  Coding DNA Sequence Number=SeqID_19536
MCWTSSENYTPVFSSDGFRAWSSEGSPTPKLESVLIIFFVDQPTYVFLEQFHAPTENLDCEMVQVISVGLSWEAEEESSLPVVALVDKVGNRDGMNN

SEQ ID NO: 62912 - protein, 74 aa, Zea mays
  Coding DNA Sequence Number=SeqID_19537
  Subcellular localization annotation: CTP_CleavageSite=65; ConfidenceScore=5.09e-01
MAFNDTSSSSDDEKIALVLGDGVPQRLPTLTPGVGPSGTASPSPLLSQSDNRVVRHLMWASGRLSNMILVGDHN

SEQ ID NO: 62913 - protein, 97 aa, Zea mays
  Coding DNA Sequence Number=SeqID_19538
MAADNPPAGGRIDDVFPTWRKNNIRVCPVPSPADGGGGATKAKQEAAPRRLSSESTAPIARLTVGPADRWLTGQSGAHRTVRCTPDSPVHTGQSGEL

SEQ ID NO: 62914 - protein, 177 aa, Zea mays
  Coding DNA Sequence Number=SeqID_19539
MSGAPGGLRLILATFGNFQRRLGYNSPDCPVYTGHVRCSKEGRPQELASLGFSPSPLRYNSPDCPVCTGLSGATSEQRLLRANGYLQRHLMRAQRAQESESPMLAHRTANSTCPVCTGHPGGPTSQKFQRSESNGSDDVAGGTGLSGVHRTVRCAPDCPVRHRTDKPPNGHFWWLGL

SEQ ID NO: 62915 - protein, 152 aa, Zea mays
  Coding DNA Sequence Number=SeqID_19540
MINSACGEVSRTSTPEAEGSSTPSIFPRSSDRDPNVPAPETDGASPLGGWLDDSWPGLRSGLRPRRAAISSSSSSSSSSGVSSDGSLGSPSLSCRRRSLSKASRARIRSRDRAFFASFFSFLFSTATLRAARSTASSGTGGREGLCHPTSWG

SEQ ID NO: 62916 - protein, 97 aa, Zea mays
  Coding DNA Sequence Number=SeqID_19541
  Gene Ontology: Mol. function=protein serine/threonine kinase activity; Biological process=protein amino acid phosphorylation
  Homolog annotation: Hit_ID=Q8H334; Match level="QueryCoverage=68%, HitCoverage=14%, E-value=2e-16, Identity=50%"; Hit description =Putative uncharacterized protein OSJNBa0077M12.113
MEVCDLRKVWEIHELKTKLDAAGAQGTVGDLITSGAFRQVYLGMDLESSEILVVKQRYIGMTWEENMLNILLEFVPGGSIQSLLGRLGSFPEAIWWG

SEQ ID NO: 62917 - protein, 84 aa, Zea mays
  Coding DNA Sequence Number=SeqID_19542
  Gene Ontology: Mol. function=catalytic activity; Biological process =metabolic process
  Homolog annotation: Hit_ID=A7PKG0; Match level="QueryCoverage=58%, HitCoverage=12%, E-value=3e-13, Identity=65%"; Hit description =Chromosome chr15 scaffold_19, whole genome shotgun sequence
MDTTQGARFNKFYQSWEDNPDIGFVMMKGSGRAFCAGGDVVRLHELISEAGSYYDEIIQQNNSTFACLLNPLHFSLEKAYTDLF

SEQ ID NO: 62918 - protein, 598 aa, Zea mays
  Coding DNA Sequence Number=SeqID_19543
  Gene Ontology: Mol. function=transporter activity; Cellular component= membrane; Biological process=oligopeptide transport
  Homolog annotation: Hit_ID=Q2QLL1; Match level="QueryCoverage=91%, HitCoverage=94%, E-value=0.0, Identity=63%"; Hit description=POT family protein, expressed
  Pfam annotation: Domain name=MFS_1; Domain location=62-518; Score= -2.4; E_value=0.023; Accession=PF07690.7; Description=Major Facilitator Superfamily
  Pfam annotation: Domain name=PTR2; Domain location=124-510; Score =250.4; E_value=3.8e-72; Accession=PF00854.12; Description=POT family
  Pfam module annotation: Pfam domain module=MFS_1::PTR2; Domain location=62-518::124-510
MEGAADHKRQVDDKPPYAAVDDTMTTTTKKMVEEQLSDDAGGGGELPEQNYRGWKAMPYVIGEWNETCEKLGTIGTTANLLVYLTTVYGMSGASAATLLSLWSGTVNLAPLLGAFLSDTYMGRYATIAFASMASFLGMIVLTLTAAVPSLHPAANSSTTGGPSSLQMAVLLASFALLAVGAGGIRPCNLAFGADQFDPRTPAGRRGINSFFNWYYFTFTIAMMVSATVIIYLQSDVSWALGLAVPATLMGLSCALFFMGTRLYVRVPPEGSPFTSFAQVLVAAARKRRLPAPRADLYDPPHRSSLISKIAYTDQFLCLDKAAVRTPEDGPAPNPWRLCTLQQVEEVKCLARLLPVWSSGIVYYIVLTNLGNYNVLQAMQTDRRVGRGGFHIPAGSFVVFNMLALTLWLPFYDGVLVPAMQRLTGREGGITQLQRIGTGIVLSIVTMLVAAAVERHRRRLGDSASCFLLVPQQMLAGLSEAFGIIGQVDFYYKQFPENMRSVAGAMLFLAFAIASYASGLMVSVVHRTTGGPDGRPDWLAQDLNQGHVDLYYLLIAAMAAVNLVYFVACARWYRFKNPAAADVEQLELELEGKAAAPPV

SEQ ID NO: 62919 - protein, 399 aa, Zea mays
  Coding DNA Sequence Number=SeqID_19544
  Gene Ontology: Mol. function=catalytic activity; Cellular component =cytoplasm; Biological process=metabolic process
  Homolog annotation: Hit_ID=A9ZMZ5; Match level="QueryCoverage=98%, HitCoverage=96%, E-value=1e-166, Identity=75%"; Hit description =Acetyl-CoA C-acetyltransferase
  Pfam annotation: Domain name=Thiolase_C; Domain location=276-398; Score=223.8; E_value=4e-64; Accession=PF02803.9; Description =Thiolase, C-terminal domain
  Pfam annotation: Domain name=Thiolase_N; Domain location=8-269; Score= 385.2; E_value=1e-112; Accession=PF00108.14; Description=Thiolase, N -terminal domain
  Pfam module annotation: Pfam domain module=Thiolase_C::Thiolase_N; Domain location=276-398::8-269
MASNGIAPRDVCVVGVARTPLGGFLGALSSLPATKLGSIAIEAALKRANVDPALVQEVFFGNVLSANLGQAPARQAALGAGIPNTVVCTTVNKVCASGMKATMFAAQSIQLGINDIVVAGGMESMSNAPKYIAEARKGSRFGHDTLVDAMLKDGLWDVYNDCAMGMCAELCADNHALTREDQDAFAIQSNQRGIAARDSGAFAWEIVPIEVPVGRGKPPVLIEKDESLDKFDPAKLKKLRPSFKENGGTVTAGKCFYDGAAALVLVSGQKAQELGLQVLARIRGYADAAQAPELFTTTPALAIPKAISNAGLESSHVDFFEINEAFSAVALANQKLLGIPSEKINVHGGAVSLGHPLGCSGARILVTLLGVLREKGGKIGVAGVCNGGGGASALVLELA

SEQ ID NO: 62920 - protein, 73 aa, Zea mays
  Coding DNA Sequence Number=SeqID_19545
  Gene Ontology: Mol. function=catalytic activity; Cellular component =cytoplasm; Biological process=metabolic process
  Homolog annotation: Hit_ID=Q5XMB8; Match level="QueryCoverage=78%, HitCoverage=14%, E-value=3e-11, Identity=66%"; Hit description =Cytosolic acetoacetyl-coenzyme A thiolase
  Pfam annotation: Domain name=Thiolase_C; Domain location=2-72; Score =17.6; E_value=5.3e-08; Accession=PF02803.9; Description=Thiolase, C -terminal domain
MVNNIFVLTAHVELQEKDNVHGGAVSLGHPLECSGARILVTLLGVLREKGGKIGVAGVCNGGGGASALVFELA

SEQ ID NO: 62921 - protein, 253 aa, Zea mays
  Coding DNA Sequence Number=SeqID_19546
MKSRMALGARSPEKSQPESGSSSSSEPGGHANAQQVLHESAGVICPLGVGVLRGNDARRRLKCEVNTRRVPSGGADVVDSLDSQRGATFCLAMVAPPPPPAAGKVMGQTRMLLFRNGGKTSPSPPSSGKLTAVVVVVARRRKEYHVVAVVEGHELETPETEQRPGLERLLETTHLELDGKLFVNTQQAPTWRANFRRFDPGGSLYRRGGCACSRGLQAFAREGESLLVSPSSRAATPRTRALDLPFIDVRRGS

SEQ ID NO: 62922 - protein, 151 aa, Zea mays
  Coding DNA Sequence Number=SeqID_19547
  Homolog annotation: Hit_ID=Q6QP51; Match level="QueryCoverage=32%, HitCoverage=22%, E-value=6e-13, Identity=73%"; Hit description =Putative growth-regulating factor 1
MQVACNCTTETHPFGLDASSMESQAHTSCNRRAGYYVRKTAPPLTPMSRLLDCGTGAATRGNRAHGPTGPTEHIGHGDRERGYSERDPSPRRKWAPSPPTDQGFEGWPIGRVRQPPQSTRASGSLLIRASKADPSEGFDSRLRPLGLRAHY

SEQ ID NO: 62923 - protein, 502 aa, Zea mays
  Coding DNA Sequence Number=SeqID_19548
MDEGTPLGGLESKDDAKSSHGLHVVFSSLWGRGYLAHRLRIRFPEHEGVRRPKQPDQPRRLTGPAGGGSGHGLTTLGAVSAVSATLPRPRGSVLRPPGGGLGTSAAARRPRASQAHSSLGRAIHHRQDFEAWNIQAGQQSRRKHLFALFDCFDSGILKTTEYTHQQREQQHPRRCFHLRRNLARPRTATRAEDLHLEGRCQHCAWAIAARVSSRNPTRADGLSGRSVASASCPPRTSARLMASAARLRGWSCQWTTWPGSSRGCYASSVWEATRSWADEAPFRANSTFVHADTAASGFGSSQSSRGCSGLDSRNEHTPSLKVPLQTELRFHSRGYEQPPHRRACGTTNSGWLASDLCSSSDGPRANATAGRLSFMSPHGGQEPDIKAKELEAWSAGDADDLVDGETFSGCHHLSTDGGVHLPTNTAPASADRPKAHRQSPGQKMECCTLAGQQQFAFLRMAGGRLLRRAGGWFPPPDAGGRSGTLAHAKAGPGSPRPPPQQG

SEQ ID NO: 62924 - protein, 167 aa, Zea mays
  Coding DNA Sequence Number=SeqID_19549
SEPKVGRGGGSSEVEVEAEPWGRARRRPSSEVEVEAEPWGRARRRPPSEAEAGGRALGSGEAESSPEAEAQGRARRSFLWRLRRDLAVVSLNLAGGTAVGAGQATLFSCQPNQESSVLGMSRAFDDYYIEDRGVILMTQEVTQRRTDNNNQFVILATVGVAFVPTCI

SEQ ID NO: 62925 - protein, 281 aa, Zea mays
  Coding DNA Sequence Number=SeqID_19550
  Gene Ontology: Mol. function=nucleotide binding; Biological process =defense response
  Homolog annotation: Hit_ID=A3A135; Match level="QueryCoverage=62%, HitCoverage=19%, E-value=2e-18, Identity=35%"; Hit description =Putative uncharacterized protein
MEFLLYLNLSGEFLPSSMFTSSSMRRLQTLILHGKLQGINDLPSDDRYVLPNLTMLYLHGSEVSQQFVHKLGTLPCLVEMELSAVSYSEGEMKLFLDGFPSLARLKLKNVSMLQEVEIRGGAMPMLSILAMYDCDSLKTFKNLNSLEHLQEVAIYNTPPEIVDNIKLEDEKLFSKIKLLTNPMMTADRDFPGHVVRMRIKMLDEPAHDLRVAVASEPHCSDMEGDYHGERKATDQVHYGPDILVDDVGGWFFTLSPLFHDLVSMPFTVSQLIYRIRPSKEN

SEQ ID NO: 62926 - protein, 166 aa, Zea mays
  Coding DNA Sequence Number=SeqID_19551
MSGSHALSPSLADEPLTHRFLLAGEALLELKLAFNAHRASSAHQLAAQRPQPLCLGGHLLLRPRPQGTIHKSPIHAAWGHHFAQHREAGQAAETSSAPEQLARPNPRRDQELHRAQGNLPESQLPARRYPFGDWRARAPHHLGPVKQSVEGNDTGLHRKPHSPSLP

SEQ ID NO: 62927 - protein, 125 aa, Zea mays
  Coding DNA Sequence Number=SeqID_19552
MRGKVNCCCLARVQLSVLHPIDGHAVRRWLLSPVLKRRPPLVRLPTAAVVASADETVSATCALGLRLFGFNGWFSSPVRGRERGPFSGFEMALDEAVKNCKALAEAAEQKEAERVAMSEAISAFC

SEQ ID NO: 62928 - protein, 165 aa, Zea mays
  Coding DNA Sequence Number=SeqID_19553
  Homolog annotation: Hit_ID=Q8H6I2; Match level="QueryCoverage=89%, HitCoverage=77%, E-value=6e-41, Identity=52%"; Hit description =Putative MURBZC
MDSGMESVAELCAQKFSVAVEAGRDTVNASVATCVVAGDLCATASVGNHVVSTLDVLESVVEAEKCVMCSYQQASAAVVCAQEQWPNTLSDALNYDVSQMQATAKKLQDTASFCYTNEDVVDGFTMTQVARSMDELAEILDVTSMDYQFSMMCCYEASRSFGTQM

SEQ ID NO: 62929 - protein, 238 aa, Zea mays
  Coding DNA Sequence Number=SeqID_19554
GRARRKSFGRGQGGVRALGSGEAEFVVFRGRARVRALGSGGAEFVVFRVLARVRALGSGGAEFAVFRVLARVRALGSGGAEFAVFRVLARVRALGSGGAEFAVFRVLARVRALGSGGAEFAVFRVLARVRALGSGGAEFPMAPLARPDCLSDSLCRVALQSEWRRRHCPSVRPLYADGGYQLRIRRLEGTSNYGPRQLRYNSLDCPVEHWTVSGGTPDCLVCQRSNGYFAPTVVCRRH

SEQ ID NO: 62930 - protein, 126 aa, Zea mays
  Coding DNA Sequence Number=SeqID_19555
  Gene Ontology: Mol. function=calcium ion binding; Cellular component =plasma membrane; Biological process=abscisic acid mediated signaling
  Homolog annotation: Hit_ID=A4ZKI4; Match level="QueryCoverage=61%, HitCoverage=35%, E-value=3e-27, Identity=83%"; Hit description =Calcineurin B-like protein 2-2
MARAYLGEVPGRGEAAARGPAQRRAQAAAGAPRPQVLAREIVFSVSEDVLLYELFRKISSAVIDDELINKEEFQLALFKTNKESLFEDRVFDLLDRKHSGILGFEEFARALSISRILFAGIYAAAQ

SEQ ID NO: 62931 - protein, 154 aa, Zea mays
  Coding DNA Sequence Number=SeqID_19556
MGKNNKRKREPTPPSEEFGDSEYSEEEFSSESEGSPAPVPLRESSDDSDDSQGLAAEVWTYIRAVERSGLEGSDESEYSSDEEDSDGGGEDDDDDDGDDDDDGDGDGDGSGSGRGSGGGSKDGDGGGSRGSNRGGSSRGSTRGGGGGDSNRASG

SEQ ID NO: 62932 - protein, 164 aa, Zea mays
  Coding DNA Sequence Number=SeqID_19557
  Gene Ontology: Mol. function=double-stranded RNA binding; Cellular component=intracellular; Biological process=RNA processing
  Homolog annotation: Hit_ID=A2Y2L5; Match level="QueryCoverage=56%, HitCoverage=26%, E-value=5e-40, Identity=90%"; Hit description =Putative uncharacterized protein
  Pfam annotation: Domain name=Ribonuclease_3; Domain location=75-150; Score=47.1; E_value=6.2e-11; Accession=PF00636.17; Description =RNase3 domain
  Subcellular localization annotation: CTP_CleavageSite=39; ConfidenceScore=5.22e-01
MTPSKPPGKRRRSAPPPRLPSPAPPVALSPPGFVADRAEAAARVERLLRYQFCDRALLEEALTHQSFSDGALSYQRLEFVGDAALGLAFSNFLYLTNPTLGPGALSTLRAANISTEKLARVAVRHDLYPLLRRKCPRLDLLGSCGWLVFGDESLSFVSSAGVYR

SEQ ID NO: 62933 - protein, 309 aa, Zea mays
  Coding DNA Sequence Number=SeqID_19558
  Subcellular localization annotation: CTP_CleavageSite=47; ConfidenceScore=5.55e-01
MTGRLSKQPSITLRGRLSAICASTPPTSLGVFNAWAKLGVPLSSFVMSSHVLAPVSPSPSIALGRYGGVLLLILFEGGGVGRIARCVFLPRYGTFTSLLRVICVHSLVGEVDNEVLWAGEALVDWTSILQGLLSSDLCGAVPCRAVSGGMACGFTLASRGISEEGFLLGGAVVRCKVPFMSATHEMVPKQKIAPGLKVILLLKIMAMKLALIDDTPYLARQLSVFSIRPHTRGKFGLLEERNTLLPGMTLYVGAVYKWCLPSGEQTNFATPRKTRRLRFELSAAFEGDWHVAPSGVFAPEWTWGISVPH

SEQ ID NO: 62934 - protein, 338 aa, Zea mays
  Coding DNA Sequence Number=SeqID_19559
  Homolog annotation: Hit_ID=A2XFR6; Match level="QueryCoverage=34%, HitCoverage=34%, E-value=4e-17, Identity=44%"; Hit description =Putative uncharacterized protein
MGTYSWLRYLTQGASTIDFRNISGLLSFKSICESLIGDPYPFTSAVFKGWFVLSKLPGPTPDYAPQPRQIPVYPVVVEEVPVDLPHIRVENGVILEDSSEEQLSTPTPLAESLAFAAGSSTSAPPAPAVQAHALGGDDPDESGDDDDEDDDDDEGEDEQVNEEANYAQQDYFMGFGPITEHYTSMFETGHFPNLLQEVMHALGTYVRPLYETRRVSEPPRACYYITRIHVRLHDTRFRHLTLRLSGGSQTSIVLDGAGEERLNTLAGVVAGLNTDLDSATLDLSRVHLELEDAHARIAALEAQLQGWDPPEAQVPAMALSPPRKRLHYEEPGSVTRLL

SEQ ID NO: 62935 - protein, 133 aa, Zea mays
  Coding DNA Sequence Number=SeqID_19560
MGVTKGCLGQEGSRFATSLRRQAEARAKSSLGGFGDSEYSEEEVSSESEGSPVYASPPASSDDSDDSQGLAAKVWTYIQSIERAGLEGSDESEVSSDEENSSGSSEEGSDGDGDGEGDNSGGGGGSDDGNDGG

SEQ ID NO: 62936 - protein, 423 aa, Zea mays
  Coding DNA Sequence Number=SeqID_19561
MVSPVSCKRVIRVDVRAPFVGGRLGAQRHAQKYLRQLARWLRDAWAWASKLACQKSEKRVHLARLHAACMAARPFRPLVWAKVGGRLIATPWELVPFSHRSASRIFIMQPGRTPPPAVTQDGDLRLDGGGKRAGLRPLPLPQPQGFSSPGLGRGVRRVEVGPRVGGGPLLHPVMGGGAVVVRGAGSCSVPGFRTRVASEPLAAPASAMAAGRGSSAGVIARAGHGLTSNSTAFCPSLPYEFRHGRGPPSSSTRSEVSATAVRPPGAEVVVVAAAGAGDGAPFVGLPLLRRPSPSEWGFSPVDYLNRFTKHESPRVKVTSEPGCLSAGLTPESISRGLGSGWRPWKMVGRGPRGNRPSRLLGPDSRRSPWTASPSEAGSDLAEGVVDAEGATAPFSVKTRACRIRLSCSGCLRGRELLLAEGDE

SEQ ID NO: 62937 - protein, 127 aa, Zea mays
  Coding DNA Sequence Number=SeqID_19562
MELLSKSYPTKEKTLKGMLVIWESRISMRVIKIKEGNARIVLSSNSYHLMQQSSEKDFKNIKGGGKCTGACLRLQINPCTSIYSRFEVPDGVHAQPSSGEHLRRPIGTTARVPERRKSNWIKPEHYP

SEQ ID NO: 62938 - protein, 326 aa, Zea mays
  Coding DNA Sequence Number=SeqID_19563
MSSVPPPAGGMSAAIVVVARRWKEYHVVAAVEGHELKTPETEHRPGPERLLETAHLELDGKLFVSTQQALTWRANCRRFETGGSSSRRSARGRMMMALPVDVAGLCPRSGDVGAPPKPRSSLSSVAEAEPEPPGRARRRSFGRGQGGVRALGSSEAEFRRLLGLSPSPSPEVGRSGVRRLPGLSPSPSPRVVQSRVRRLPGLSPSPSPGSGGAEFAVFRVLARVRTLGSGGAEFAVFRVLARVRALGSGGAEFAVFRVLARVRALGQAERSFLWRLWQGLTACQTHSVEWHCSRSGAGGAVLLSDRSVERRSDDGHFGSAGGRASG

SEQ ID NO: 62939 - protein, 231 aa, Zea mays
  Coding DNA Sequence Number=SeqID_19564
MALPVDVAGLCPRSGDVGAPPKLRSSLSSVAEAEPEPPGRARRRSFGRGQGGVRALGSGEAEFRRLLGLSPSPSPEVGRSGVRRLPGLSPSPSPGVGQSRVRRLPGLSPSPSPGSGGAEFAVFRVLARVRTLGSGGAEFAVFRVLARVRALGSGGVEFAVFRVLARVRALGRAERSFLWRLWQGLTACQTHSVDWHCSRSGAGGAVLLSDRSVERRSDDGHFGSAGGRASG

SEQ ID NO: 62940 - protein, 126 aa, Zea mays
  Coding DNA Sequence Number=SeqID_19565
MTKKTEKILNYKCTFGLIEGKKYKRDAKASTSQREQYGGTVHLFIGTGRSMIFGGRRPLTILDPRASRQLVAAIPPPREAGRRLQCSVEERGEPDIWWPPNSVTRRASQRELGERDCNCPDGPAYW

SEQ ID NO: 62941 - protein, 107 aa, Zea mays
  Coding DNA Sequence Number=SeqID_19566
MFDYIYTFALTRSNNSRVIRQQLQDCVNSKGILFTIYRHRTQPDLRRRSMVPKVGESSGDGEGGGNDDKGDGKGGDSDDKGDDEGGGGDGDGDDDGDGKPGGIMLPA

SEQ ID NO: 62942 - protein, 219 aa, Zea mays
  Coding DNA Sequence Number=SeqID_19567
MSSRSLMHRVFPPSEPPDGEHPQSFCLVIRGTQLRGSWYLSAIVRLQGFSSASPAASPRRWSPKTVTASPWVGRSKPGCDLGPTLSFKDVHHPRWGGGWAEPELYLPRGFVGQPLPQRSRERELTDPTRGADFNNAGLVDGGRRQLQRVGLAGLAPGAPSCRKGGCRAVRTGGPPKTSCAARAAFVLWGGPAFAPVRRPRAEVGAPLVREDPSGDLPVG

SEQ ID NO: 62943 - protein, 121 aa, Zea mays
  Coding DNA Sequence Number=SeqID_19568
  Gene Ontology: Mol. function=calcium ion binding; Cellular component =plasma membrane; Biological process=abscisic acid mediated signaling
  Homolog annotation: Hit_ID=Q3HRP5; Match level="QueryCoverage=89%, HitCoverage=49%, E-value=8e-37, Identity=75%"; Hit description =Calcineurin B-like protein 2
MVKCLDGVKQLLVALLNVELKQPRGAPRPQVLAREIVFSVSEDVLLYELFRKISSAVIDDELINKEEFQLALFKTNKESLFEDRVFDLLDRKHSGILGFEEFARALSISRILFAGIYAAAQ

SEQ ID NO: 62944 - protein, 99 aa, Zea mays
  Coding DNA Sequence Number=SeqID_19569
MDKRQRLYKGRQSSFDEARKLRAAVLEPRRGTTVLRGFKTGRSAKQGSPHQAPLAHPTEPTLPERGKAVSNGPLDILQPFPLTLPVPLNGYNVTDPRIR

SEQ ID NO: 62945 - protein, 231 aa, Zea mays
  Coding DNA Sequence Number=SeqID_19570
MKVRCQTSFCQNEDGFPKLLRACTVRLGIRSQPEYDGREFIEHGTEKCVMIVYVGSSPHHVEWNVTAAGHRFKDTYQVVARKALRALCQIYEEEVADTSIRFFPPFQRDRQVWMARMRALEGQQLLEDDPSVVYLTAYLLTLDAQAQARATALESHEVIAVEALKQAKDEHVQKLIEAYLVTHNQRRALRIQEPASSNPVQPRRAEDPRFLKVTRSLSKEIRRLGNSWKEP

SEQ ID NO: 62946 - protein, 259 aa, Zea mays
  Coding DNA Sequence Number=SeqID_19571
  Homolog annotation: Hit_ID=Q6J9V9; Match level="QueryCoverage=33%, HitCoverage=30%, E-value=2e-32, Identity=80%"; Hit description =Putative uncharacterized protein
MRDRERGHFEGALRSKRNRPRALLLIRGSKVAPCGVRQPPQSTRAPSPLLISGSKAGPSKGFDSRPRTCRVKDDPGYVCYMAKARATLPRYLKTFSRPAGMGKTNNSKSRPLPSSASGLTGSSASPDPRARPQPRPREKVSASLDPRPRPQPQPREKVPASPDVSLGLGRSHNLARPQPRPQERSPPRPTSASDRLRYRGYIITLPLASRLRLRRNKTGVTSRLLRQQLSTKAKKRQQDPGPHRQLRFYRAQALLRWPR

SEQ ID NO: 62947 - protein, 137 aa, Zea mays
  Coding DNA Sequence Number=SeqID_19572
MEPTAELCSQKLSAAVDAARDTMKASSTACMVAANGNGGSPELDPRASSCRSEYRRGLVVGGALGIACHGYVVAADSPVVVAQPAMSVTNAGLGRFGWGGRAGSPDLYVPVICAALELFALSRMGVWRKEMGPGPLI

SEQ ID NO: 62948 - protein, 171 aa, Zea mays
  Coding DNA Sequence Number=SeqID_19573
  Homolog annotation: Hit_ID=Q8H6I2; Match level="QueryCoverage=67%, HitCoverage=47%, E-value=5e-55, Identity=90%"; Hit description =Putative MURBZC
MAHSAAEGTLRRGSTGEDAGQGEEDGAVPNFPVRRGDGDEETAVKDGGEGTAGRPLRYSLSLMSDTPKKLQDTASLCYTDEDVVDGFKLTQVARSLDELAETLEVTAIDCQVSMMDPTTILEAGYGSEDSAVWEDVFRDREIMNQPLEAETLAEHCAKWGLNYNEIRDRSV

SEQ ID NO: 62949 - protein, 93 aa, Zea mays
  Coding DNA Sequence Number=SeqID_19574
  Subcellular localization annotation: CTP_CleavageSite=38; ConfidenceScore=5.36e-01
MAAVGALQRGVGGGSALQRGAWGGGSALQRGRGAVVVRCKRGRGAVVVRMEAGTRARGTAGQDSSVACSRLQGALAKVKKNFTTQCMQRTGYN

SEQ ID NO: 62950 - protein, 177 aa, Zea mays
  Coding DNA Sequence Number=SeqID_19575
MQTYGVCMQDGIRPRRQHPPGDGFLRRTVEEREDGHKNSHALISDDLLVHVTLVVRQICMLKTHVDILSYFTPVFGSKLRSVVVAETRRPLKPPPGWNQTAKMISTASTKAEPLKPPPPQRRLGDLLREAQDDDNDNDTAVDGLSRDDSLRMGAEANRCCVPRLAWAISCNGRTQRK

SEQ ID NO: 62951 - protein, 56 aa, Zea mays
  Coding DNA Sequence Number=SeqID_19576
  Homolog annotation: Hit_ID=A2Y2T8; Match level="QueryCoverage=76%, HitCoverage=12%, E-value=2e-07, Identity=46%"; Hit description =Putative uncharacterized protein
MGGRVMEKVTKEINALLNGLCLNYEGKEQFDASSIAEADDARINYFCNEVFSFVVV

SEQ ID NO: 62952 - protein, 83 aa, Zea mays
  Coding DNA Sequence Number=SeqID_19577
MRVADIAGAAARQLHGAGTAVEVGARPMGIILANGVIHDSCYVGLGGATAGGRRQAWGEGRRDGKQGWAKSGTVIIGQGSEAR

SEQ ID NO: 62953 - protein, 94 aa, Zea mays
  Coding DNA Sequence Number=SeqID_19578
  Gene Ontology: Mol. function=cAMP-dependent protein kinase regulator activity; Cellular component=protein serine/threonine phosphatase complex; Biological process=protein amino acid dephosphorylation
  Homolog annotation: Hit_ID=Q6K3D4; Match level="QueryCoverage=65%, HitCoverage=5%, E-value=7e-12, Identity=62%"; Hit description =Putative PKG-Ib
MATSLRYMSIKEEWKMCIYAADCSEIGLVQVSHELDKIRSLKRPYIKRVQDRHKEVQSYDILSHELDKIRSLKRFYIEYKIAIRKYKSLRKVAL

SEQ ID NO: 62954 - protein, 411 aa, Zea mays
  Coding DNA Sequence Number=SeqID_19579
  Gene Ontology: Mol. function=transporter activity; Cellular component= integral to membrane; Biological process=transport
  Homolog annotation: Hit_ID=Q9AQU5; Match level="QueryCoverage=69%, HitCoverage=99%, E-value=1e-152, Identity=92%"; Hit description =Aquaporin PIP1-3/PIP1-4
  Pfam annotation: Domain name=MIP; Domain location=46-275; Score =457.0; E_value=2.4e-134; Accession=PF00230.11; Description=Major intrinsic protein
MEGKEEDVRLGANKFSERQPIGTAAQGTDDKDYKEPPPAPLFEPGELKSWSFYRAGIAEFVATFLFLYISILTVMGVSKSTSKCATVGIQGIAWSFGGMIFALVYCTAGISGGHINPAVTFGLFLARKLSLTRAVFYIIMQCLGAICGAGVVKGFQQGLYMGNGGGANVVAPGYTKGDGLGAEIVGTFILVYTVFSATDAKRNARDSHVPILAPLPIGFAVFLVHLATIPITGTGINPARSLGAAVIYNQHHAWADHWIFWVGPFIGAALAAIYHQVIIRAIPFKTAATLLLQCGQPPYCATASKQRRLGTSYSAVTTATQRNRLWPLKRSALKLGLVPAKRTAMSHPPHIRSSVPDSQGGRLPEAPFSSSYHHQGPYEIGLVPQPRSIQGRSEERNSARCILGRARPHQP

SEQ ID NO: 62955 - protein, 138 aa, Zea mays
  Coding DNA Sequence Number=SeqID_19580
  Gene Ontology: Mol. function=protein serine/threonine kinase activity; Biological process=protein amino acid phosphorylation
  Homolog annotation: Hit_ID=A2XWD6; Match level="QueryCoverage=65%, HitCoverage=10%, E-value=4e-26, Identity=65%"; Hit description =Putative uncharacterized protein
MSEPPAKGEVPPTHKWQNVTLSYFEPQNYIRHFHTPIWWYATYSSEGFGTTSRGLDDHFSNCHKDLNLGHFAEAHQVSQGPRERVVSEADILSPQFRKKLGNVFDLRERLSPSEHFTRRALVDHVELNPSNPGLKRGK

SEQ ID NO: 62956 - protein, 85 aa, Zea mays
  Coding DNA Sequence Number=SeqID_19581
MNKFLHATPPRYMQIVMAIETLLALDTTVELIGRLKAVEERGWRWTQRSDQGQKQHLGLRELLEGGMVHRLPSIDHIDQVHEFLG

SEQ ID NO: 62957 - protein, 71 aa, Zea mays
  Coding DNA Sequence Number=SeqID_19582
YASFLVILLLLPGFHLHGSAAARPEATRSDGRADRGVNGAERDCESGMGTERLRSVDFLERNGSGSEENIL

SEQ ID NO: 62958 - protein, 324 aa, Zea mays
  Coding DNA Sequence Number=SeqID_19583
MERVEASTRSEVERTRTQLMDSYRELGARTADFEVPDREAGLRFLEWLQEELLALPTIVEGFMSFASLVTFEGAMNALSREGCKHYEVFDRSDEDFGREIFKVEDPVVKDSVGALFDRMWGAHGREAVRERSDRAREHMARAEDVEDLGDLNGARPEAEVNSVLPEAEVNPEAVEGSSARPMPTVSGEGSLPAPTSTAEGPPKAVAELAAEDPKAAAGPSQVQDFGPAHPTATDTANFVAASTVVAENDSGDSVSKFFESDDSGSSVVWTEESSDDDLDYFAALDVAAAEASPRVVGAEVPGPSVGCRRRRAVAKRRVSEVEGG

SEQ ID NO: 62959 - protein, 433 aa, Zea mays
  Coding DNA Sequence Number=SeqID_19584
MEVVELVPCARNKWGNWWDYWFYVSEAEVEDHPGLPTAIMCSHYYVVYLPFEVEEDDENERALRIAARTSSGRDLVEEFIGYGVWPLAHGWALGEDPAAVVREAEDGAVRIVGRYVSKTEAQRSWDIRGSNDRLNRVFELNCLSYGGYPGEDVVDRRGKKPAAVTKDDPAPEAAPATKKRKLGTTVGELEVSDSLAMELMGTCAAPEGRMSSPELRESSARMLEVTEGRWPKNVPIPHAAGEVFFTSRMARDLRVFPYGRNIAAVVSAVMNKDRQDAAQKRRTVIRLPDARREAKRARGSAKAAVPGGSQPTLAAKPAAPGSSKVLESTKAVGAGGTKSAPDRAAKVRELPSSGKRVADFGMNISVDDYLVGSGEGQLVVVPPAMATTVSTVVLGVKGGAFSAGSEISVATAVKDEAGTMSHRLREASQQLSQ

SEQ ID NO: 62960 - protein, 28 aa, Zea mays
  Coding DNA Sequence Number=SeqID_19585
MKDAKPIKTPMGTNGHLDLDTGVHRMQD

SEQ ID NO: 62961 - protein, 84 aa, Zea mays
  Coding DNA Sequence Number=SeqID_19586
MATTSHEQGAKTYIKKVDKKAATPYLMKKKKNGKVIAIKANKQANKGKGAKRIWVPKEIITTMKSTKKVCIPKGKYAYLFFSCI

SEQ ID NO: 62962 - protein, 348 aa, Zea mays
  Coding DNA Sequence Number=SeqID_19587
MNGGNHSCSGEPSFPQLLQGLQKGLEILLSVARGPVALVISGGSHHSLRKRREPPVVISEIEPPALPPFVRGRKDGGDILRRPRLPQLEDTATSPHCRADPSLSRRRGKKLHGEEMSPQVPVRVNPQVSFANRREDGGLRDGVRTEVVQLHPVDMQNRPHKTTCRRSEPPLVKGDEAHDIPRRWGRGGSARRGHPLRLQVSGERAKQTLSKKGLQVIRRDGGERPRVARRNNGHPVGHHQAEEVAAERTGTGGTFGKRSRQRFASAIMTASKKAGPSEGFNSRLRALGLRAHYWSEVRRPAPRKGSTAASGHSGSAPTTDQGFVGWPSKGSTAASDAERGMTLGTFDT

SEQ ID NO: 62963 - protein, 187 aa, Zea mays
  Coding DNA Sequence Number=SeqID_19588
  Subcellular localization annotation: CTP_CleavageSite=56; ConfidenceScore=5.01e-01
MQAACNRTKGAHPFDSDASSMGAQAHTSCNRRAGYYVREAAPPLAPVLRLLDCGTSAATRGNPAHDPTVPTEHIDHGSVSRGRRRDSQYGQKWADSNGGDRRAEAADRRHLWQAKQATLHLRHNDRVKKGIGKGDTPKGILLREGSGPRAPLLIRDSMVGPSEGYDSRLRALGLRALLLESRLEGGG

SEQ ID NO: 62964 - protein, 230 aa, Zea mays
  Coding DNA Sequence Number=SeqID_19589
MASPDLRRLQGTRERRAGAYRLVDEAAAGSETNQPLRAANQEPPLQPETPCYGQRNKTLRRRERGEDAGTGTQSVHWTEGEGTLTCGGAGWSGGSESDEIRSRRSWDEMAGELVDGEESGLSRAKLTNQTSGRPKSSEVDLRLPVKFCQVRGLGKLHGPMAELTEALARLGGDWSGLATVAEALAAMAGGKELAEAKEGCLAGGGERGVNVEHEAAQREVEFKRGLAPNL

SEQ ID NO: 62965 - protein, 142 aa, Zea mays
  Coding DNA Sequence Number=SeqID_19590
MTWQGAPDCPGLWEIDIPRVLLSIETRFQLARGQPWMGDAVQTRSRQTSDGRCNSDLPEANLGWEMQFRLARDQPQTGDVVPTRLRPTSNGIRCSDSPETNLGRERQSRLAPGQPWVGAQKHSMGRLMGLPMAFLARHALGP

SEQ ID NO: 62966 - protein, 175 aa, Zea mays
  Coding DNA Sequence Number=SeqID_19591
MTTITRSMSAPGACAHGEPTQADVPATHLLPHHNRRGLVEAEENSAACPASTAVPLDRVRLTAAKSNLGCHGKLRLARPRARTQPRPRKTNSASPDPRARTQPRPRKTNSASPDPGLGLSLGLGRRTPLRPTPGLGLSLDPGRRTPPRPTPGLGLSLDIGGASASPDLRLGPATS

SEQ ID NO: 62967 - protein, 132 aa, Zea mays
  Coding DNA Sequence Number=SeqID_19592
MQYKGSSSLISCEKQTIRIEFYPCKAGELVGGEESGLSRAKLTNQTGQRASPGIKEGVRGLGKLHGPMAELTEALARLGGDWSGLATVAEALAAMAGEKELAGAKQGCLAGGGEEEEEEEEEEDDDDTDTES

SEQ ID NO: 62968 - protein, 43 aa, Zea mays
  Coding DNA Sequence Number=SeqID_19593
MTTDRPLELLHMDLFGPIAYISIDERKITNPRDFKGILETDSK

SEQ ID NO: 62969 - protein, 447 aa, Zea mays
  Coding DNA Sequence Number=SeqID_19594
MAAEELHPGDTVEFGVSWISSFEVAEDDEDEGALRCAARMSSGRDLVEEFIGYGVWPLAHGWALGKVCPLMNKDRQDAAQKRQAVVRLADPMREAKRARGSAKTAAASSSSKPVPAAKPVVPGPSKASASAKTAVSGGTKPPPGGPAKGRELPSPGRRVADFGMNISVEDYFAGSGEGQLVVVPPSAATTSPTAVVGAKGAAQDPWAAFCASGEILSAAAAKDVAGSMSQRLREASQQLSQQLKQAADFADRMASGVLTANVAAKVESLRAQHADAIREKSAAESKNRRLAEKVVAMEAEKPDFRCQLAEERREANQAIAEAQAARAEAKVARAESSLASQRAEELEARFNTLRSRVDKAEASTRLEVKRMHAQFVDAYRELGARTADFEVPDREAGLRFLEWLQEELLVLPTIVEGFMSFASIVTCEGTMNALSREGCRHYEVFDQ

SEQ ID NO: 62970 - protein, 604 aa, Zea mays
  Coding DNA Sequence Number=SeqID_19595
  Pfam annotation: Domain name=Transposase_28; Domain location=171-319; Score=-51.2; E_value=0.0076; Accession=PF04195.3; Description =Putative gypsy type transposon
MVIALLIWPLKGTVRGEINEGLERRVASLTSPQHLPSEGPVRLSHLVPKTSLDGGDAALARSGSAGVFDVTIDRRVLLDCELPEASRPVYKKEGGGAAQAFLPFCVSRNPNILKPFARSPAFLLSFIRDLARVKQTARHRRRYVAMPSSSSSAVSTPLVEPSSEDTFSDLVAVELHPSHTMEFGVSRISSARVQDMQQLGYFGSGVGRVPGAEEIPEPEGEMVMFEAFFTAGLWLPPHRFVAEPSIEVFAKNYCLHWQKRKVGNKIAQFGSCTFTPRNGKTSAEVVELVPCTHNKWGNWHDYWFYVAGGEVKDLPGLPAAVMCSHCYVAFPPFEVAEGDSDEEALRGAARMSSGRDLVEEFIGYGVWPLAHGWALGEALRSWDIHGSNVRLNRVFELNRLPYGGYLGDDAVDRRGKRPVAVTEEGPSQELMGTCATLAGRMSSPELRESSARMLEVTGGRWPKNVPIPRAAGEDFFMSRMARDLKVFPYGRNIAAVVSTVMEKDRQDAAQKRQAVVRIGDPLREAKKARGSSKAAAPGSSKPVLAAKLSAPGHSKASASAQAATSGAADFADHVASGALTADFAAEVESLRAQHADAVREKSAA

SEQ ID NO: 62971 - protein, 75 aa, Zea mays
  Coding DNA Sequence Number=SeqID_19596
  Gene Ontology: Mol. function=nucleic acid binding
  Homolog annotation: Hit_ID=A7QZ72; Match level="QueryCoverage=56%, HitCoverage=20%, E-value=1e-11, Identity=67%"; Hit description =Chromosome undetermined scaffold_265, whole genome shotgun sequence
  Pfam annotation: Domain name=zf-CCHC; Domain location=35-52; Score =25.7; E_value=0.00017; Accession=PF00098.14; Description=Zinc knuckle
MRMHAGDCALNDDENRERGHSLKNCPDKSERNLKKFCYNCGESGHYLSKCPKPIENGNPHALIVDISGALCLLAV

SEQ ID NO: 62972 - protein, 485 aa, Zea mays
  Coding DNA Sequence Number=SeqID_19597
  Gene Ontology: Mol. function=acyltransferase activity; Cellular component=cytoplasm; Biological process=flavonoid biosynthetic process
  Homolog annotation: Hit_ID=Q6Z4U6; Match level="QueryCoverage=88%, HitCoverage=90%, E-value=8e-77, Identity=40%"; Hit description =Putative Anthocyanin 5-aromatic acyltransferase
  Pfam annotation: Domain name=Transferase; Domain location=13-472; Score=86.6; E_value=8.1e-23; Accession=PF02458.6; Description =Transferase family
  Subcellular localization annotation: CTP_CleavageSite=18; ConfidenceScore=5.14e-01
MGEANATGTPATATVRVLAVSRVAPAPAPAAADPVVVKLSFFDTPWVVLPPIQRVFLYELPGGDGEFTAAVTRLKSSLAATLAVYLPLAGKLAYVAGTGDVVVDCVDDPGVAFVEAEADAGIDTMDVRRLASDEAHDIPAFLALVPELPTKVLPAPVLSVQATRIPGGGLALGLSVHHAVADGQAVWRFMGAWASAARDGSPVTKSLPAPHYSREAVHVPNGDEFARQMLKMVAPNLPAAGTVADYDFSQRFRLARRTFYLGGDDIRALKLRISALAEAEAEAEDDVVADGRSKKKPVSTFVALSALGWTSFVRCKGLGAGDDTYLVFLADLRARMDPPVADGYLGNCIKGCLATADAGDLLGERGLLVACRAIQAAVAEMEAAPLAGSERWIQKMMGLPFARLANVAASPRFRVYEASDFGFGRPARVELVSMNNDGEMVLVGGRGDGEVQLSVSLDPARMEDFKAHVFATSAAPSDSAAAAAN

SEQ ID NO: 62973 - protein, 589 aa, Zea mays
  Coding DNA Sequence Number=SeqID_19598
  Gene Ontology: Mol. function=RNA binding; Cellular component=nucleus; Biological process=regulation of transcription, DNA-dependent
  Homolog annotation: Hit_ID=A5B418; Match level="QueryCoverage=58%, HitCoverage=54%, E-value=3e-88, Identity=45%"; Hit description =Putative uncharacterized protein
  Pfam annotation: Domain name=Agenet; Domain location=384-465; Score =68.7; E_value=1.9e-17; Accession=PF05641.3; Description=Agenet domain
  Pfam annotation: Domain name=BAH; Domain location=197-313; Score=8.2; E_value=0.0023; Accession=PF01426.9; Description=BAH domain
  Pfam annotation: Domain name=START; Domain location=74-264; Score= -5.5; E_value=0.0003; Accession=PF01852.10; Description=START domain
  Pfam module annotation: Pfam domain module=Agenet::BAH::START; Domain location=384-465::197-313::74-264
MERAEGRREEGKRSQESFMHHAGLGRIREKQRKESSRLQIVNRKLSAMNKLLMEENDRLQKQVSRLVLDNGLLAIVEETLAEFMSKATGTAVNWVQMVGMEPGPDSVGIVAVSHNCSGVAARACGLVAEIHKDRASWFRDCRHVDVLHVIPTGNGGTIELIYIQGFGFVTMPCVKEAYRYIKYLNRFVMQDQVITAEKVHNFVFIMSEEMKRLIAYVKDLYEDTNSCNMVKVQWFDKVDEVGVPLPMDFDDREIFFSLDRQDLNVECIDGLAAVLSVQHYEKFKGDTRYNLWQPYFCCRQIDNGDIKPFDVTQLQGYWSQEVLMTMFNATSSLKVRFKVPKSRPNSDGGLKRKRDAFNDDANPQKFIPSSASTSRFYGENIQQLCPGCHVEVLSQDSGIRGCWFRCLILKRHKDKIKVRYLELQDADETGNLEEWVMLTRFAKPDQLGVRFLGRPMVRPQRVEQSKASCFDVGAIVDAWWHGGWWEGIVLCQVGSGRLQVYFPGENRTAEFGEDELRCSLEWVGNKWNPLKGRKDVTSKLTSTADCGSECLIGKQDPLNFYVPKNSEPQLERHQYDKGGIEKSSVSTIS

SEQ ID NO: 62974 - protein, 246 aa, Zea mays
  Coding DNA Sequence Number=SeqID_19599
  Gene Ontology: Mol. function=calcium ion binding
  Homolog annotation: Hit_ID=A3AGB6; Match level="QueryCoverage=34%, HitCoverage=13%, E-value=4e-21, Identity=58%"; Hit description =Putative uncharacterized protein
  Pfam annotation: Domain name=efhand; Domain location=18-46; Score =28.1; E_value=3.2e-05; Accession=PF00036.23; Description=EF hand
MALSASATSTGRGSRAEKVRRIFERFDTNGDGGLDRNEMAAIVVAVNPRFILLDDSGLSLSGLLRTYNDGAGDVDRDFVALSLPTVRSDASSPDIAAGDAAAHSSPPSASAAAWTTAVGGVAVAAFAVVRVLVAFAAWGSRHGWRVFHDGVSRMAAGKQGAWWRACGWWRSFREGDSRVEAGSATREARAGGIRRGGGGAAGGGGSSLHCPLNSQYILEIEERASCRPCVTGMQSELSNHRLVMGM

SEQ ID NO: 62975 - protein, 151 aa, Zea mays
  Coding DNA Sequence Number=SeqID_19600
  Homolog annotation: Hit_ID=A2WLP9; Match level="QueryCoverage=27%, HitCoverage=13%, E-value=1e-15, Identity=88%"; Hit description =Putative uncharacterized protein
MWFSVSLRWEASGWFLFYDGNVVAAFGSAYYHLKPDDDRLIWDRYTMFANVIDSSLVRVQRGGSSRSAARSSCRSTQDPAEVEQLREELRRHQDYLKQQAAQHEYYATQIQQQQTLIQPPPATLPTHEQEDGLDFVETLFNSGGIDHHSSL

SEQ ID NO: 62976 - protein, 143 aa, Zea mays
  Coding DNA Sequence Number=SeqID_19601
MQVACNCTAGAHPFGFITSQHGGSGPHVMDRERGYSERDPSPRRKRAPSPPSDQGFKGWPLGRAGPSEGFDSRPRARRARDDSGYVRYMAEARATLSSLRRNRKLRLARPLGLGLRGEISALPDPKGSAPASASEGGLRLTRP

SEQ ID NO: 62977 - protein, 174 aa, Zea mays
  Coding DNA Sequence Number=SeqID_19602
  Gene Ontology: Mol. function=kinase activity; Cellular component =ornithine carbamoyltransferase complex; Biological process=amino acid metabolic process
  Homolog annotation: Hit_ID=Q6QP54; Match level="QueryCoverage=41%, HitCoverage=25%, E-value=5e-26, Identity=83%"; Hit description =Putative kinase
MAPPVDVVGPCPGLGEVEAPPRSRSSLSSKAEVESEPLGRARQRPSADARAESEPWGWAKRSSSSFGAEPESEPWGRAKRSSSSSGAEPESEPWAGRSLGARSGPKFSGWYVDAVNNLVGAGFARAVPEPPHRARGRSRTDSTFLHTPLRRLFRKEEGEKRHVALGGRRTWCLR

SEQ ID NO: 62978 - protein, 154 aa, Zea mays
  Coding DNA Sequence Number=SeqID_19603
MGKSNKRKREPTPPSEDFGDSEYSEEEFSSESEGSPAPVSPPASSDDSDDSQGIAAEVWTYIRAVERSGLEGSDESEFSSDEEDSDGGEDEDDDDDGDDDDGGDGDGDGSGSGGGGDGSKGSTRGGSSTGSTRGGSSKGSTRGGGGGSSSKASG

SEQ ID NO: 62979 - protein, 659 aa, Zea mays
  Coding DNA Sequence Number=SeqID_19604
  Gene Ontology: Mol. function=protein prenyltransferase activity; Cellular component=barrier septum; Biological process=protein amino acid prenylation
  Homolog annotation: Hit_ID=A2YG63; Match level="QueryCoverage=97%, HitCoverage=94%, E-value=0.0, Identity=66%"; Hit description =Putative uncharacterized protein
  Pfam annotation: Domain name=LRR_1; Domain location=513-533; Score =5.0; E_value=36; Accession=PF00560.24; Description=Leucine Rich Repeat
  Pfam annotation: Domain name=LRR_1; Domain location=535-555; Score =11.1; E_value=2.6; Accession=PF00560.24; Description=Leucine Rich Repeat
  Pfam annotation: Domain name=LRR_1; Domain location=560-590; Score =7.6; E_value=12; Accession=PF00560.24; Description=Leucine Rich Repeat
  Pfam annotation: Domain name=LRR_1; Domain location=622-642; Score =3.1; E_value=81; Accession=PF00560.24; Description=Leucine Rich Repeat
  Pfam annotation: Domain name=PPTA; Domain location=125-155; Score =35.6; E_value=1.8e-07; Accession=PF01239.13; Description=Protein prenyltransferase alpha subunit repeat
  Pfam annotation: Domain name=PPTA; Domain location=171-201; Score =34.2; E_value=4.8e-07; Accession=PF01239.13; Description=Protein prenyltransferase alpha subunit repeat
  Pfam annotation: Domain name=PPTA; Domain location=43-73; Score=18.6; E_value=0.024; Accession=PF01239.13; Description=Protein prenyltransferase alpha subunit repeat
  Pfam annotation: Domain name=PPTA; Domain location=88-118; Score =34.4; E_value=4.1e-07; Accession=PF01239.13; Description=Protein prenyltransferase alpha subunit repeat
  Pfam module annotation: Pfam domain module=LRR_1::LRR_1::LRR_1::LRR _1::PPTA::PPTA::PPTA::PPTA; Domain location=513-533::535-555::560 -590::622-642::125-155::171-201::43-73::88-118
MHGRPRRPAKPEDDEAASAKAAKLRDLQAQVLHNHHARTYTKESIGLSFKLLETNPEAYTAWNYRKLALQHNVKELSDPQAIKSAIDDELRVAEVALRQNPKSYGAWYHRKWLLNQKLAPVDFKYELGLLDKLLKVDARNFHGWNYRSILLSNLLIQQSKGFESKQKIFSEEFELVTQALFTDPSDQSGWFYHLWLLAQTSSPDNPQLIASWPSNAAKLSFSFIKEKAEQHTLSSVWSRTVPIVLYFNEPVKGLNHSSVNLKSDLEFGKDIQWRPLTMADSGYSKCWATYLQITNECSSLQEYSVEMSIPCSDDIVSRSGSNYNCPVHFTFYIELISNNAAQGLDTFDKPVAWNCSDSFQSHGNRDPIPLDLLNITSALVEHDSDWHFERLSEEIDLFRELADDNSKFGKLTLARLLLACAAIKSRGRSLIERKGYCEEALGLFTDLIHLDPSHKQYYEDERSLALMDKLTCDMETFTKHCSVQVQPNSAPLHHVQFRRLSVTRIGFAERLLWVQMLDLSHNSLRSVEGLEALQRLVFLNISNNQISSFTALEPLTKIISLKVLDLSFNEIGAHSIDTARYICPSPFSHKTEASEAFEEYQEVNNINVTEYWDAILFFRSLKLAQLDIRGNAVASKDGFRTLVVTLIPCLKWFDGEGVS

SEQ ID NO: 62980 - protein, 122 aa, Zea mays
  Coding DNA Sequence Number=SeqID_19605
MGKGKKGRGSPRHTGDKRKRDPSPPSEDFGDSEYSEEEGIVAEVWTYIRSVERAGLKGSDESEVSSDEEDSFGSSKERSGGGDSDDGDGSGGDDDGGRGGEGDDGGNGGSGGDKASGKAPLL

SEQ ID NO: 62981 - protein, 571 aa, Zea mays
  Coding DNA Sequence Number=SeqID_19606
MVCLGLGGRRKHTLQDNPILQARILTIEGSSNTLGVNYTFGEVRPSLGRRRSRRISTPKDDISTTPGPSPPGSSPGIRLEQTARSATPRPRPAIPRRHQPGPWPRQLNSGVGPASGRPGQALADQVFFSSQLSLCPCSHRYLRLRLIEEQPRVHLTKQEKPWAARPTEPRDSYASGIRIPHSSPLHEVRTTPHDWGGPAERQKADGWLTVARSSSSDNDPRYGCPNCSSDGLRADAAATLPSPMPTLEGRGQEPSAHRQIPTRILPDEWSTDLRAEAPYRCKGRTAPEHERRRSSARRLGWSSRARGATTALAAGGGTGSQAGEPNALKLTTPAVDQPRVVKPGLRPSKDDEHPLKRRAGPRSQPGLLLPTEGLAVTVLAIVGRVFSNTLQGPPPTTRGLGPTRHAGWPRAEEAKLPRTVHATAQRLQAFLHFRPDRRVKGRTAMLSACNRAKWAHPFDSNAPSMEAQAHTSRNRRASCYVRAAAPPLAPLPRLLDCGTSTVTRGNPAYDPTVPARRIGHGPVSRGRRRDGRCSQKWAGSNGSGRRAEAAVTSSAKLTSPRGIAREPSLTA

SEQ ID NO: 62982 - protein, 178 aa, Zea mays
  Coding DNA Sequence Number=SeqID_19607
  Subcellular localization annotation: CTP_CleavageSite=49; ConfidenceScore=5.10e-01
MVLLLARARWALGVAVAGQSCAARAARLGCLGRVARLLASSWALKAGPAASDERRGSGGSVSCERCYTPPTTRPVALTPRQDRRRFWQEKRATLHLHRNNRAKKGTEKGDTPKRILPREGTRLRASLLMRGSKAGPPKGSTAASDRVGPTPTTSQRFEGRPPEGFHGRLRLLGLRAHY

SEQ ID NO: 62983 - protein, 222 aa, Zea mays
  Coding DNA Sequence Number=SeqID_19608
MGTEHGVSGELQAGPTRSEAAVEPFGGPAFEPLISKEARSLVPSRGRILFGRPAARQKPRDPPQAPQPSSPSRAGLPRDRDAQRPTRPRQKQHHADRRRAPGACAVRAEPKTRSRAQSRNFTASVSPLCVQYVCSFSSPLIPPMMNAFDDSLNGRPPFLLLPGVSLSLSFLYKLDAELLYSPPLLELSSSPRSLSLSHSPTPLSEFVYIVAVRPAVRGASPK

SEQ ID NO: 62984 - protein, 249 aa, Zea mays
  Coding DNA Sequence Number=SeqID_19609
  Gene Ontology: Cellular component=cytoplasm; Biological process =protein transport
  Homolog annotation: Hit_ID=Q336S7; Match level="QueryCoverage=14%, HitCoverage=11%, E-value=2e-09, Identity=75%"; Hit description =Autophagy-related protein 3
  Subcellular localization annotation: CTP_CleavageSite=30; ConfidenceScore=5.51e-01
PSASSPPLNSPSRRAPVMRPRPCPLRACPAAGHRRPVRTLAPSGLAQPPTTSDPSTPSPAPDHARAASAPYELPVTGTYTVSVFLEKGFLSIPGFILAGDNLIAKCPSLFCRRAPVMRPRPCPLRACPAAGHRRPVRTLAPSGLAQPPTTSYPSTPSPAPDHARAACAPYELPVTGPYTVSDFLEKGFLSIPGFILAGDNLIAKCPSWFWCILYSSRPALVIFIPKYVFYANLNVLLCSITRSRVRSAL

SEQ ID NO: 62985 - protein, 217 aa, Zea mays
  Coding DNA Sequence Number=SeqID_19610
  Gene Ontology: Mol. function=cysteine-type peptidase activity; Biological process=proteolysis
  Homolog annotation: Hit_ID=Q5NKQ2; Match level="QueryCoverage=96%, HitCoverage=24%, E-value=3e-60, Identity=56%"; Hit description =Putative uncharacterized protein 9C20.3a
MKNVDRPPSNPKRIVIQSTQECFSVDIPRVPTETVRPETRQAADEDDDFMPLSKKRNLDDSPGKVLKKVVTKRRKVVPPDRCKCLRYSLYTFFQQRLNVRCNPQDVLVSIQILNDRQRQAIARRGFSSILDMRLDALGSRSHLAWLMEKLDHNDMTIRAGPGKELKITKDTVHLILGLPNAGGRTALGIDEAVAANNLRAELGLSKEDFGLQLFKIV

SEQ ID NO: 62986 - protein, 158 aa, Zea mays
  Coding DNA Sequence Number=SeqID_19611
GVTGSSDPIWDLEAQVELLQSELRHRNDLWVADAAIRYLQDQLAKRDLALDWMVNSRLLAWAREAKARAHVEELSLAMDNLQVYYNTLHEEVHELYSQLHPNVPANSVRMEAEPSHVAGEALDGALDLFRPPPSMKLVDKWSSTPDNKATKSEKKWLI

SEQ ID NO: 62987 - protein, 96 aa, Zea mays
  Coding DNA Sequence Number=SeqID_19612
MVSTSSCENFRFFGHPSEKLCPFYGRKKTLDKLTDQPGNLIPIDVAEVPDLSASRDNSDLAEDDPCDPTTTSKPEAPMQSLNQLPVVTDLADARSA

SEQ ID NO: 62988 - protein, 200 aa, Zea mays
  Coding DNA Sequence Number=SeqID_19613
MAPAIGAEAEAAREVPVADGITATIRASGLRAGGGEPLVSLLLLRRPTPIEWGCSYPRRGNRSSVCDGTLNANSPVNYRNRFTKHESPRVKVTSEHEQRRSWLENETWLAGAWPGCPSAGPTPELISRGLGSGWRPWKMVGRGPRGNRPSRLLGPDSRRSPWTASPSEAGSDLAEGVVDAEGATAPFQRQDPSLQDQSVL

SEQ ID NO: 62989 - protein, 382 aa, Zea mays
  Coding DNA Sequence Number=SeqID_19614
MAVAGGREQRSRRQPSSRPIRGQQENPLSWREDDAPDKRRSWQEKRATLRLRRNNRAKKGTGKGDTPKRILPREGTRLRAFLLIRGSKAGPPKGFNSRLRSRGPYTHYWSEVRRPAPRRVPRPPQATRAPRPLLIRGSKAGPRRVHSRLRRRARDDQGYVRYITKARAALPRARTRAKPRKTANSAPPDPGLGLGLSPGRRRTPLRPTQGSDSGSAPEDDELRFARPQGSDSALASVERPPPRPTQGLGLGLGHGRQTRPRLRRSLHVAQPRAQASHGPLRGDWPRGDEDETGALLGPLAPSPAWTLVTPYCKRTRPGRGTNTKAAGFPPLSRPSPATSLPPFALAHALDPLGWGTRRHSLVGLGTPRSRNADKCCPDGSGR

SEQ ID NO: 62990 - protein, 330 aa, Zea mays
  Coding DNA Sequence Number=SeqID_19615
  Gene Ontology: Mol. function=phospholipase D activity; Cellular component=membrane; Biological process=phosphatidylcholine metabolic process
  Homolog annotation: Hit_ID=Q8SAG7; Match level="QueryCoverage=76%, HitCoverage=32%, E-value=1e-98, Identity=63%"; Hit description =Phospholipase D beta 2
  Pfam annotation: Domain name=PLDc; Domain location=165-200; Score =25.3; E_value=0.00022; Accession=PF00614.13; Description =Phospholipase D. Active site motif
MALIPLLSHLGFRGPNPGREIITKCAGTKSHTYDDSWPSHRLATVGSPRRHRAVTATGPSPRPRQKQKRRTVCVFKLSEVRLGNCYRHGQCRRDVYDAICQAQRLIYIIGWSVFQTIHLLRDDHDDMALGDLLRRKSQEGVRVLLLVWDDPTSRRLRGIKMETGTIFTHHQKKVILDADAGNHRRKIVDFMGGLDLCGGRYDTPKHTLFRTLQTFHKEDYYNPIFAVEDARGPREPWHDLHSKIDGPEAYDVLKNFEERWLKASKRSAARKLSKLSRSHNDSLLWINKIPDIIAIDDEIYSNDDDPERWDVQSIAAKRSQEKNSQPKSSW

SEQ ID NO: 62991 - protein, 224 aa, Zea mays
  Coding DNA Sequence Number=SeqID_19616
MATSSAEFPQENVRYDLGHGYEQMTYGPVVGVLCRTAHPGKTTFTITRKTQRLHSELSPAFEDVGEKKGKKGRRSTDGKRKRPPSPPSEDFGDSEYSEEVSSEYDLSPALASPMVSFDDSDDSMGLSNAEWVYIRSVERAGLGGSDDSEEVSSKAVVDSSDSEEGGDSEVDGDEGDSGSSSRGGDGSSRGGDGSGDVDGGEGSSRGGDSKGGDDGDVGGRVPPA

SEQ ID NO: 62992 - protein, 253 aa, Zea mays
  Coding DNA Sequence Number=SeqID_19617
MELELGHTVEFGTSRISSVRVQEMQQLGYFGDGVGRVPGAEEIPEPDCELVVFEAFFIAGLRLPAHRFVAVVLQRFEVQDLQDATRKRRAFTRVLDPSREVKRARRGMKSTAPGSSKPPPAAKPAIHGPSKSLSGARAVASGSGKPPSAEPTRERRPPSPVRTDEAAAGGADLDMDICVDDYRVGGVMMFDAHTGRGLIGDWVLDKNVVQGQMLGNWLLSRLWWRPRRLWRRPGRRVLRRTHGLFLASVSHPI

SEQ ID NO: 62993 - protein, 243 aa, Zea mays
  Coding DNA Sequence Number=SeqID_19618
  Homolog annotation: Hit_ID=Q6J9V9; Match level="QueryCoverage=29%, HitCoverage=24%, E-value=2e-27, Identity=87%"; Hit description =Putative uncharacterized protein
MEARAHMSCNRRAGYYVQGIRTATCANAASSRLYNQCRDSRQPCAPRALLLIRGSKVAPSGVRQPPQSTQAPSPLLIRGSKAVPLEGFDSLPRARRVRDDPGYVRYMAKARATLPRELCLARASASASASGEGLRLARPQASASGGVSSSPDLNLGLRRSNDGSPRAPKTSVALKPPTEASKRQQDPCRTSSYASTGLKALLRQTHADEDNVGFYCDYDYDYGKDEGVEADVQEFQDFDEFED

SEQ ID NO: 62994 - protein, 168 aa, Zea mays
  Coding DNA Sequence Number=SeqID_19619
  Subcellular localization annotation: CTP_CleavageSite=89; ConfidenceScore=5.44e-01
MEAGLLPRVVVLGPILSPGSSPRSFPCSLGAINVQTWPIPSPRAASLPCRSFPKPSRKSNAFSRLVSSPSHTRGRECRVGEDPRRGTARAAEGLGASHAMTGTYGVDMEAKQNREIEGAVCSEYCGMFTGWSTSSPTRIFHLDVVRNPGSGLGIARYLEERSTARNLE

SEQ ID NO: 62995 - protein, 281 aa, Zea mays
  Coding DNA Sequence Number=SeqID_19620
  Pfam annotation: Domain name=zf-CCHC; Domain location=216-233; Score =17.0; E_value=0.0041; Accession=PF00098.14; Description=Zinc knuckle
MSNRIQALEQQMEIRDNTIEVLENQLRDVQDELEEANAHIEMHHQDMNAMEADNEEEEDPEEIEPASSLDTTYSGVPPTPGASVASATQGYHADSDEKKRDRFQRGLNTKLREHLNTVRADSYNELVNLAISQEDCILAHRAEKKKKAPVIGSLAPPQRFWIVSNNQSRGSQQQVGRWVIRPPQQQQAPNCFPALAPKNNQAQRQQQQQFRQGNGNKCFTCGNTCHYAKDCPRNQPRQMSAPNPRKWEEAKGASQAREAQFHYSGGATRRGTRHDSYLFSF

SEQ ID NO: 62996 - protein, 147 aa, Zea mays
  Coding DNA Sequence Number=SeqID_19621
  Subcellular localization annotation: CTP_CleavageSite=41; ConfidenceScore=5.28e-01
MAGSTVGQRTTQPAVQRPTTTVKYRFTAVDLLLQRALRNPRTRTAGHDLGHLSQVVSLRSGLTGIQYGTVQADPTKGDESAGWGPRDSVRRECADAGGENGPIQFVLAQSQKEDGQGQDGLDCIWLRNRALHFAPERTRGISVHESS

SEQ ID NO: 62997 - protein, 297 aa, Zea mays
  Coding DNA Sequence Number=SeqID_19622
MARIRCTARKSVIPFFPSRLAERPLRRMVPGQSSHLERLHRRLHEEQEHRCQEQEQEQQDSSPSPQQEVESERLLSPAPQPEMPPAPPQGIPAAGGDPNGDGDDDDADGSSSHDTELSEEPELEGWIAIPITRDAARGCHFHDALNTLLRRAFDRHTWSIEYRCVVYQHCRGLYPDQWDATCLYCSLFSGVADGLELKYYSRRSTDSAGGVIASLVGEGNPRLNSMVNLANVLNIELDHTLDELGKVRAEVAELRVECATRHYLDGGSPAPVGIQHPHRSPPRGRFDYGTPDCRKNP

SEQ ID NO: 62998 - protein, 83 aa, Zea mays
  Coding DNA Sequence Number=SeqID_19623
MQSQKNVLLQYQIRHSQNGIDFLLAGCSNGIAAAEETASGTGAAGSDADAGAGAVCNSRSTALEASGLAPEAEAVVVAVAPAA

SEQ ID NO: 62999 - protein, 213 aa, Zea mays
  Coding DNA Sequence Number=SeqID_19624
MERPEAGDVGGPSMGELAADRSRGDGEMRAKAGGGSGGVVHGGQHGRSGGGGCVHRGDGWREPQQRASGQGGAQLCWPPGGVDDLRRVGVGCGIDDQSQVGVGRGRRGRWARSWRRLLARLGRAACRAPGLGAGRDEHAGAGAGAPGGAPGREAGGWRPAAGGRGMSENRRKGARRAQPEQQTPQEEAAPQQHLPLPPPMTIEQMFLMQTQAV

SEQ ID NO: 63000 - protein, 114 aa, Zea mays
  Coding DNA Sequence Number=SeqID_19625
MAGQTQVFLFCRGEMSSSSSPPLGEPTTVVVVVLRGEEYHVVAAVVGHELESLEAEHRPGLKRLLKTTHLELNGKVFVNTQQAPTWRANCRCFGPARTLNRPVKLMMCVPAQMG

SEQ ID NO: 63001 - protein, 66 aa, Zea mays
  Coding DNA Sequence Number=SeqID_19626
MERRGVLDVDAMERAALVASLLGGRLAGDSGDWRVWRWTLWTRPKRHGLGRWRMQRFFGETLLSNC

SEQ ID NO: 63002 - protein, 213 aa, Zea mays
  Coding DNA Sequence Number=SeqID_19627
MVGALGRLWRVAGRSPELRASSGELGACSSGFDFGLASYEEVTLGGRQTRPLLMRRLRKPRPRLRGAEGSLARQLAEELHARLDALRSRVDKAETSMRAEVGLTHAQFVDAYRELGARTAAFEAPSQEAGLRFLEWMQEELGVLPTTVTGLMSFASLVTCEGAVNALSRKGCRHYEVFDQSNKNFEREIFKVEDPVLKQSVGALFDRMWGPHG

SEQ ID NO: 63003 - protein, 294 aa, Zea mays
  Coding DNA Sequence Number=SeqID_19628
MGMCAALGGGMSSPELRESLAQMLKVTGGRWPKNVPIPRAAGEDFFTSRMARDLKIFPYRRNIAAVVSAVMEKDRQDAAQKRRAVVRLGDPFREAKKARGAAKSAAPGSSKPLPAAKPAALGPSKASAGAKAAASGASKPPSGGPVKGRRLPSPARTDGATTRVADFDIDICVGDYFLGCGSHGFMCQAADFADHVASGGLTVEFVAEVESLQAQHAEAMWEKSAAESKSRRLSEKVAAMEAERVDLRCQLAEERRQILDDRFWCWILGYLLSNSLLRHVDVLSVSEVAIYQMQ

SEQ ID NO: 63004 - protein, 236 aa, Zea mays
  Coding DNA Sequence Number=SeqID_19629
MDGLAREGFPRILWEVLQGAGYMTPPQYAVRLFKKHRVPRCRVRMTLESHPLQPGWRSLDSESFGYRAEDTIEAIALHGLTTFCGLTAHLTVRCMDALYRLQVRRGEAMSHLMALLEATKITLDNREELVVDLSTKMVEKDLQVEQMSNEIQELEELVGTRENTIEVLEDQLINTQQQLAEANQHLDMHHQEIHDMEANEDVDIEGGEEPEPASSLETAGSGRPPSPESSVASFAH

SEQ ID NO: 63005 - protein, 170 aa, Zea mays
  Coding DNA Sequence Number=SeqID_19630
  Pfam annotation: Domain name=zf-CCHC; Domain location=102-119; Score =19.0; E_value=0.002; Accession=PF00098.14; Description=Zinc knuckle
MMNPNGDKVDDANNKYPTSIVVKRKDESHGYLLNGMKNNKRTRRMFGYNIKPPQPQAKSSKFTNTQMGESNQDQLFNMQTTDQPSSAGNQVRPTRREAKERGACFYYKEEGHFIHQCPNKLLEWLEKKVSKQNSTDNNQEEIVFTRSKYKVIQTSNEGDRLLDISVEPRE

SEQ ID NO: 63006 - protein, 197 aa, Zea mays
  Coding DNA Sequence Number=SeqID_19631
  Homolog annotation: Hit_ID=Q6J9V9; Match level="QueryCoverage=60%, HitCoverage=41%, E-value=1e-51, Identity=82%"; Hit description =Putative uncharacterized protein
MDRNYERTMNDRMIERTNDQNFSSITTVFLRKKILGDMLVEYLGNISGKKLKGITREISGQDRERRYFERVLLSKGNGPRALLLIRGSKVVPCGVRQPPQSTRASSPLLIRGSKTGPSEGFDSRPRACRVRDDPGYVRYMAKARATLPRYPKPFLRPTGTICNGIPPKGGTEPSDPIKWVRVQRITYRYFWSAPLGH

SEQ ID NO: 63007 - protein, 255 aa, Zea mays
  Coding DNA Sequence Number=SeqID_19632
MVTSGLMVGESKPGCGLCPSLSLKDFHHQGWGEDCSVPGFRTRVASEPLAAPASATAAGRGSSTGVIAKAGHGPTSNSMAFSPSLPHEFWHGRGPPGSSIRPEVSAAAVRPPGAEVVVVATAGAGDGAPFVGLPLLRRPSPMEWGYSPVDYLNRFTKHESPRVQVTSEPGFPSAGPMPELISRGLGPGWRPWKMVGRGPWGNRSSRLLGPDSRRSPWTASPSEAGSDLAKGIVDAEGATAPFQREDLSLQDQIVL

SEQ ID NO: 63008 - protein, 217 aa, Zea mays
  Coding DNA Sequence Number=SeqID_19633
  Gene Ontology: Mol. function=kinase activity; Cellular component =ornithine carbamoyltransferase complex; Biological process=amino acid metabolic process
  Homolog annotation: Hit_ID=Q6QP54; Match level="QueryCoverage=47%, HitCoverage=36%, E-value=1e-17, Identity=54%"; Hit description =Putative kinase
MALPVDVAGPPPEVGRRGGSSEAGVESVFRGRGRARALGRARRSHSAEAGAESEPGGRAKRSLSCSGVDPESEHWVGRSGDRCHLGFSPTPSPGSRGAEFAVFLGLSTSPSLASPATPPSLSSGAEPEFEPWVGRSESSSPGLSPSPSPGSGGAEFAVFRGLARVRALGRAERSSPSSGAEPESEPWVGRSGVRRLPGLSPSPSPGSGGAEFAVFWG

SEQ ID NO: 63009 - protein, 181 aa, Zea mays
  Coding DNA Sequence Number=SeqID_19634
MEKDPAALCSDFLAAVLLIFWARGAYLPARRAQPPFSFHATIHAWLSSRTPFHTITLSSPSVVSSSGCLSCNTRALDRIQSSILDSSACYSPTGSLTFSIPSSFRASSKNPKSRVKTEPTAWCSPNARQKARTSRQLSRQQPHPRLQRSNNFVSSPFKSESSSVGSSLTLQLQLELIMRLS

SEQ ID NO: 63010 - protein, 181 aa, Zea mays
  Coding DNA Sequence Number=SeqID_19635
MEKDPAALCSDFLAAVLLIFWARGAYLPARRAQPPFSFHATIHTWLSSRTPFHTITLSSSSVVSSSGCLSCNTRALDRIQSSILDSSACYSPTGSLTFSIPSSFRASSRNPKSRVKTEPTAWCSPSARQKARTGRQLSRQQPHPRLHRSNNFVSSPFKSESSSVGSSLTLQLQLELIMRLS

SEQ ID NO: 63011 - protein, 280 aa, Zea mays
  Coding DNA Sequence Number=SeqID_19636
MTSHGSSEGGNAHSHTDGLAHEGFPRILWEVLQGAGYTMPPQYTVQLFEKHRVPCCRPGWRSLDSKSFGYRAEDTIEAIALHGLTTFCGFHPLELSTHPIGLFPAEKEDNPMWKDRVEHAKDIWVLYPGQTAHLTVRCMDALYRLQVMRGEAMSHLMALLEATKITLDNREELVVDMSTKMVEKNLQVEQMSNEIQELEELVGTRENTIEVLEDQLINTQQQLAEANQHLDMHHQEIQDMEANEDVDIEGGEEPEPASSLDTAGSGRPPSPESSVASFAH

SEQ ID NO: 63012 - protein, 128 aa, Zea mays
  Coding DNA Sequence Number=SeqID_19637
MSKNCFLLCINQQWGKLARSMGRSSYDYRVYTSASRRTFENKSPTKSIHVIVVTNGEHILGLGYLGCQILLIQDNILIMCLKRVKEEQLFATLGASRGCRDVSSHDELDVVCVDITNLSFVLVSLKVA

SEQ ID NO: 63013 - protein, 201 aa, Zea mays
  Coding DNA Sequence Number=SeqID_19638
  Subcellular localization annotation: CTP_CleavageSite=74; ConfidenceScore=5.70e-01
MDATRISSSPSMTSMRRRSTSSYATRSSATARYNPPLPAQPTIFRSQRQTLVLLTYRSLFDIAMRLPVTLLRDRCTRFSNRNAIYLSISIAELTLDFRNAFVSRKSGSFVQVLTKQSTSTGLSSSKHAIQLLFLALVICTLMVGSYHQPCATIHEYFTLWELIQRTVPTNMECQQQIIPTVKIFLLGLERLYFECLRFQCE

SEQ ID NO: 63014 - protein, 172 aa, Zea mays
  Coding DNA Sequence Number=SeqID_19639
  Gene Ontology: Mol. function=transferase activity, transferring hexosyl groups; Biological process=carbohydrate biosynthetic process
  Homolog annotation: Hit_ID=Q10Q30; Match level="QueryCoverage=36%, HitCoverage=11%, E-value=2e-10, Identity=56%"; Hit description =Glycosyl transferase family 8 protein, expressed
MALKVLKEDKYDYCSEFFELAAEFSSSDNGEDGATLLMYKHYAATAIPKGIHCLSLRLTDEYSSNAHDCAKEKDVMLLVDLEKNIIAGADLSDLAVEHSFCPSKENGGQDGANLLLICNSWLMSVNSLLLANEKATAVDDIGYGHLLRLGDIASKGTQPSSPVSQHQYCPSD

SEQ ID NO: 63015 - protein, 400 aa, Zea mays
  Coding DNA Sequence Number=SeqID_19640
  Gene Ontology: Mol. function=DNA binding; Cellular component =chromatin; Biological process=regulation of transcription, DNA -dependent
  Homolog annotation: Hit_ID=O04418; Match level="QueryCoverage=35%, HitCoverage=97%, E-value=6e-61, Identity=86%"; Hit description=HMGd1 protein
  Pfam annotation: Domain name=HMG_box; Domain location=75-163; Score =82.5; E_value=1.3e-21; Accession=PF00505.10; Description=HMG (high mobility group) box
  Subcellular localization annotation: CTP_CleavageSite=67; ConfidenceScore=5.63e-01
MPTAPYFKSRPLVASFPLHSHQSGAGLQPFSCSHTQTLVAIRPQGLEMKSRARSTAGDSRLSVRKTKAEKDPNKPKRPPSAFFVFMEEFRKDYKEKHPNVKQVSVIGKAGGDKWKSLSDAVSLFVPQSHFNRLSPQLVAEKAPYVSKAEKLKAEYTKKIDAYNNKQSGDPTASGDSDKSKSEVNDEDEEIVRSSLNGYTALHVVIREKGRLSLKGMSPSARFVGFTALARDAKPPLLLVARCPRRVFPRDPHPQTLVRYPRACSAGSTAPCLLAYLPTLMLSLLPAVASVYTKRNAFTFPRVLSVVPHVWRRLAAKFLAAFALVFAYHAAAVLVFIGLLIAGFNDSSLSGLLRPNAPSPDAYLPTLAPAQCSSRPAPCASSGGLPRRARRRPSARSYGPC

SEQ ID NO: 63016 - protein, 56 aa, Zea mays
  Coding DNA Sequence Number=SeqID_19641
MENAAHQRRNQGRLGFRGRGLGLFSEYLSIRTCSLIDHLGKQCSHEGGMERPWPSN

SEQ ID NO: 63017 - protein, 192 aa, Zea mays
  Coding DNA Sequence Number=SeqID_19642
MEHAGRHHYLFTGASQMGHRSEPEFGRGGDPSEVEVESEPWGRARRSPSSSGAEAESDPWSRARRSSSFPGAEAESEPWGRARRSSSSSGAEAESEPWGRARRSSSFPGAKAEFEPWGQARRSSSSSGAEAESEPWGRARRSSSFPGAKVESEPWGRARRSSSSSGAEAESEPWGRARQSSLSSRAEAESEP

SEQ ID NO: 63018 - protein, 147 aa, Zea mays
  Coding DNA Sequence Number=SeqID_19643
MGKSKKGVSSSHHSGDTRKREPTPPSEDFNDSEYSEEEFSSESEGSPVHASPPASSDDSDDSQGIAAEVWTYIRAVERSGLKGLNESEVSSDEENSSDSSKEGSGGDDDGEGDDDGDGDGDDDKGNGKGDNKGGSGSGKASGKAPLA

SEQ ID NO: 63019 - protein, 92 aa, Zea mays
  Coding DNA Sequence Number=SeqID_19644
METAETGMCPGSAENVHVSQFLQQRLEQETSHLEGEFDESTVGSMHHRVVPVTIEDQLAEDVPNGTQFDELVLLSSPALNNGTIIALFTVNW

SEQ ID NO: 63020 - protein, 407 aa, Zea mays
  Coding DNA Sequence Number=SeqID_19645
  Gene Ontology: Mol. function=transferase activity; Cellular component= chloroplast; Biological process=biosynthetic process
  Homolog annotation: Hit_ID=Q40027; Match level="QueryCoverage=97%, HitCoverage=87%, E-value=0.0, Identity=76%"; Hit description=Beta -ketoacyl-ACP synthase
  Pfam annotation: Domain name=Ketoacyl-synt_C; Domain location=240 -354; Score=171.5; E_value=2.1e-48; Accession=PF02801.13; Description= Beta-ketoacyl synthase, C-terminal do
  Pfam annotation: Domain name=ketoacyl-synt; Domain location=24-232; Score=234.6; E_value=2.2e-67; Accession=PF00109.17; Description=Beta- ketoacyl synthase, N-terminal domain
  Pfam module annotation: Pfam domain module=Ketoacyl-synt_C::ketoacyl -synt; Domain location=240-354::24-232
MAMAVALQAERSVIEKKKPDIKQRRVVVTGMGVVTPLGHDPDVFYNNLLDGVSGISEIERFDCSNFPTRIAGEIKSFSTDGWVVPKLAKRMDKFMLYLITAGKKALENGGLTEELRNELDKTRCGVLIGSAMGGMKGWMGPNYSISTACATSNFCILNAANHIRRGEADVMLCGGSDAPLIPIGLGGFVACRALSQRNSDPTKASRPWDMGRDGFVMGEGAGVLVLEELEHAKERGATIYAEFLGGSFTCDAYHMTEPHPEGRGITLCIEKALADAGVAREEINYVNAHATSTQAGDLKEYEAIVRCFRQNPQLRVNSTKSMTGHLIGAAGGIEAVASIQAIRTGWVHPNLNLENPEDTVDVGILVGSQKERCEVKVALSNSFGFGGHNSSILFAPFKELPSSSSSK

SEQ ID NO: 63021 - protein, 431 aa, Zea mays
  Coding DNA Sequence Number=SeqID_19646
  Homolog annotation: Hit_ID=A2XHR9; Match level="QueryCoverage=89%, HitCoverage=77%, E-value=1e-19, Identity=29%"; Hit description =Putative uncharacterized protein
MTSNTIPHDHHHHRQEMDQLQALAVKPQVKRQVRRRRTHTSRPYQENLLNMAEARREIVTALKIHRASSRRQQQPKYQRHQEPPLRQPPFAQLQQQQEEPKHVQEAFLDPSRSQPAVDEEASLAHTTMSYASFTNNPLRSSPPAHWIAARSYCSPPPILRLPCDITPPELPPTAAMGGLGLDLDQYQYQYQGGLERLVRSLPAQPLGLNLSFQGFGVSVDDGAKEDLLALPLTQPSPAASYSCSPPAVETATTHACAPSPALSATDAENQVIDAPPAAALVPALDGEMAQQASVGGEMQGVEWSEAAAADVAACWSKIFESVENGQGQHAPRPNAEDVAAAAAGLPMEWWWLCGDDAGVGEQAGSVTGGKPSPDVLGRRVHVDDGDGDYSCCYDYEGGRRSNDDGDEVTLPCMDDIGDDTQGWDGEWFSCP

SEQ ID NO: 63022 - protein, 82 aa, Zea mays
  Coding DNA Sequence Number=SeqID_19647
MGKPVPSLLMLLLCRVTALVPTITGMGDHISGRVRRAICGQVHSGIHTLILIPISSRRPRIPMDPCPQTNHQYDMKVGTTNS

SEQ ID NO: 63023 - protein, 221 aa, Zea mays
  Coding DNA Sequence Number=SeqID_19648
  Homolog annotation: Hit_ID=Q6JAD6; Match level="QueryCoverage=88%, HitCoverage=28%, E-value=4e-28, Identity=42%"; Hit description =Putative uncharacterized protein
MPPRSHDHEARSSSATPAAPPAIDPAIASILQSLTQQQAHLAAEQSRLSERMLSMFQTMQDRHDSLQQQLLQDRAESRAFMALMLQHSGVSVPPVQSAPPPPLQAPVVPALQSGPPLTSVGPSSSPLRPVTLVFTSPVLSSVCPQPPVPPASAVTTTAVAVSVTTSVPAASAARPQSESVPALASTADPGSETDSDPLPAFALLPRPRPDAPPPPPPASDV

SEQ ID NO: 63024 - protein, 188 aa, Zea mays
  Coding DNA Sequence Number=SeqID_19649
  Homolog annotation: Hit_ID=Q8GS08; Match level="QueryCoverage=78%, HitCoverage=78%, E-value=1e-25, Identity=49%"; Hit description =Disease resistance response protein-like
  Pfam annotation: Domain name=Dirigent; Domain location=9-182; Score =44.8; E_value=3.1e-10; Accession=PF03018.5; Description=Dirigent -like protein
  Subcellular localization annotation: CTP_CleavageSite=53; ConfidenceScore=5.08e-01
MASSPALPLVLLALLLAPTGLAASGSGGGGGGEKRTRIRVYVHERFTGRNATVGSVAPSLRGGNSTFGEVGVVDDVLRAGPRASSQEVGRYQGLFAGADLADDSGGGGGYFSAITLVFAAGEHRGSTLSLQGRYSFPADGALERAVVGGTGGFRMARGFSLLQVASAPPEAAVFQLDLVVFTPRGHRY

SEQ ID NO: 63025 - protein, 139 aa, Zea mays
  Coding DNA Sequence Number=SeqID_19650
  Gene Ontology: Mol. function=metal ion binding
  Homolog annotation: Hit_ID=Q5SMP0; Match level="QueryCoverage=69%, HitCoverage=87%, E-value=4e-31, Identity=71%"; Hit description =Putative uncharacterized protein P0554A06.10
  Pfam annotation: Domain name=DUF500; Domain location=18-136; Score= -2.4; E_value=1.2e-05; Accession=PF04366.3; Description=Family of unknown function (DUF500)
MASEDSKDMLKNVDWKTVGGAVTTESSQPVVKKRLPKKIRQVPECYFLPRRSLPSALAIYGAVCAAGVGAGMLIEVWINKKIKGAFVGVSLEGNVVTTRMETNLRFYGDAYQTATHILFGRVERPRAAQPLFASRFRAS

SEQ ID NO: 63026 - protein, 135 aa, Zea mays
  Coding DNA Sequence Number=SeqID_19651
MALASPGRRRWAKPGAGGSRRGGGGALCGVGAGPNYNLNGDEGSRRGFIPAGNEDEEEISNANVRGDSCKEMFSTRERNVEWLPILLKGILIGTEDGGDITSLPLPLPEESECAKPSARRDTCRNEQLLQFTKQA

SEQ ID NO: 63027 - protein, 455 aa, Zea mays
  Coding DNA Sequence Number=SeqID_19652
  Gene Ontology: Mol. function=oxidoreductase activity; Cellular component=peroxisome; Biological process=electron transport
  Homolog annotation: Hit_ID=Q8H3I4; Match level="QueryCoverage=72%, HitCoverage=95%, E-value=1e-121, Identity=65%"; Hit description =Putative (S)-2-hydroxy-acid oxidase
  Pfam annotation: Domain name=FMN_dh; Domain location=16-336; Score =430.7; E_value=2.1e-126; Accession=PF01070.9; Description=FMN -dependent dehydrogenase
  Pfam annotation: Domain name=IMPDH; Domain location=108-353; Score= -219.7; E_value=0.003; Accession=PF00478.16; Description=IMP dehydrogenase  GMP reductase domain
  Pfam annotation: Domain name=ThiG; Domain location=139-300; Score= -201.1; E_value=0.1; Accession=PF05690.5; Description=Thiazole biosynthesis protein ThiG
  Pfam module annotation: Pfam domain module=FMN_dh::IMPDH::ThiG; Domain location=16-336::108-353::139-300
MEDNLPVNVREYQELAKKALPKMHYDYINGGAEDEYTLRENIAAYGRILYWEVATARAAAACNTIMMLSFSSSCRIEEVASSCDAIRFYQLYVYKRRDVSATLVRRAESLGFRAIVLTVDTPVLGRREADIRNKMIAPPLSNLEGLMSLDDFDDAEGGSKLERFSRETLDPSLSWKHPQYWASICKDASTSGIRADVEWLKSITSLPILLKGIVTAEDARKAVEAGAAGLIVSNHGARQLDYAPATISALEEVVKAVAGAVPVLVDGGVRRGTDVLKALALGAKAVMVGRPVFFGLAARGEAGARHVIEMLNKELELAMALCGCRSVAEDVEWLKPAITCLRADPAQRASSPPMPIMNSNDRRPRRWAARKVVEAGASGVIVFNHGVLRAVSGGGHRTSSALGEQVTGCRPADRIYPHYRKTHSFRRPKPSEVNPKPSEVTTSDGLRRVPSEVTP

SEQ ID NO: 63028 - protein, 60 aa, Zea mays
  Coding DNA Sequence Number=SeqID_19653
MKKEMMMKMISPPHHPPEMKIQPNCGPQCSGTGERHNAQQNVGLSTLASRRACLVHAVQL

SEQ ID NO: 63029 - protein, 31 aa, Zea mays
  Coding DNA Sequence Number=SeqID_19654
MDNMGYPKLELGMSAMTKDQLADSLAYNSLK

SEQ ID NO: 63030 - protein, 265 aa, Zea mays
  Coding DNA Sequence Number=SeqID_19655
  Subcellular localization annotation: CTP_CleavageSite=66; ConfidenceScore=5.55e-01
MAKRAGPARPGPGPVKPGQNRAGPAEPAGLSFCPSPARSGPKRAGPARLARKNGPKSGLNGPMRIRVSTNKEQAQVRSQGRINGKEATHSGELAAGGDNAEGDRQPTLRSAREARRFGRRGGNCGHGEGPRIKLLGVAEQGRMGFDGARGRSELEDSEQGLELDTASSTERFSTPVREPGDDTGSRRHATGKSTSDAASARDGDRRRRAAGRRHSANSTVDAMCMSRGGELGVTATGDGEETRTTSDPASRARGRRQQGRWRRAG

SEQ ID NO: 63031 - protein, 52 aa, Zea mays
  Coding DNA Sequence Number=SeqID_19656
MAATAPAPGPARIRPVTRRLSLRPTGHGATWRDSADTAPDHGVTLQTYPLHE

SEQ ID NO: 63032 - protein, 101 aa, Zea mays
  Coding DNA Sequence Number=SeqID_19657
MALPGLGGPGAAHPPYPAIARGSAPVPARHDHPPDMAPRPQRPAARSPAPACAVPAPSLRSPDGAAWHAHPLLAAPCMHTPASACPAPVQRGCGMSAPARP

SEQ ID NO: 63033 - protein, 150 aa, Zea mays
  Coding DNA Sequence Number=SeqID_19658
MGKNNKRKREPTPPSEDFGDSEYSEEFSSESEGSLAPVFPPALSDDSNDSQGIVAEVWTYIRAVERSGLEGSDESEYSSDEKDSSEEGGEGDDDDDGGDGSDDDGGGSKGGNGGGRSSRGGNGGGRSGDSGSSRGSGGGGSSKGSNKASG

SEQ ID NO: 63034 - protein, 93 aa, Zea mays
  Coding DNA Sequence Number=SeqID_19659
MDNVYRSFILPVDPGDICPPQLRSETLRTHLGSVQGSVQPEAKRESRLMGKVAMGLMVLGSDSGNGCPHCNHCSGEDEAVEGDFQEFQDYDEF

SEQ ID NO: 63035 - protein, 129 aa, Zea mays
  Coding DNA Sequence Number=SeqID_19660
MEESRASAAMGGAPAGRHGKAGGMGAMAAGGSLLLPWEAGLPALACVQEEEEHGRRVWNLRQGERGWKKSGRHGWRKLPALAAAAVSSEEEGREYGWWRLGKNGGWECKIANLQGREVLFIEGALGLGF

SEQ ID NO: 63036 - protein, 123 aa, Zea mays
  Coding DNA Sequence Number=SeqID_19661
MEAKSHQQPIILRSTCKNYATSKAEYTNTHLDLPGQHGSSSLISCEKQTIRIEFLNLARIQLLARSKSAITAGLSRFGQILTCNFKNSQLKIQASKQGDPRLSGKITKNSDPRLFGKLRKSPT

SEQ ID NO: 63037 - protein, 144 aa, Zea mays
  Coding DNA Sequence Number=SeqID_19662
MARRRCADSAKRDTETAEPRRSTAQHGGCCGGPAPLRRSGRRWRHGRDLMAAAAACSLLRRSAMELAARRGSEVVAGTTSSLGEEEQGLADHGQGRGLLLGVMDMDLAEVGPRSSCATKGEKQGRGNTVQGRRDRWPEMEFGLQ

SEQ ID NO: 63038 - protein, 99 aa, Zea mays
  Coding DNA Sequence Number=SeqID_19663
QLQSHLMRGTWRRADSARRRGDREARDGTGTWRRSAAVGKRVALGGGGGEGGTRWRWGRGWRGDREARGGGGQEGTHTGGRGVLEVLLQVGAFNIENAP

SEQ ID NO: 63039 - protein, 122 aa, Zea mays
  Coding DNA Sequence Number=SeqID_19664
MERLLEFLDACLGARLGDFSGRHGKLRVGEEQALCEGEQAPERAAMGHQGKGSASHGDARPWGRRASLSSAGRRARSRELAPRGEQGGRSAACHGQQREGGRDGRHGGRGEELSSLRWLLLS

SEQ ID NO: 63040 - protein, 48 aa, Zea mays
  Coding DNA Sequence Number=SeqID_19665
MRMAKLGLGKASRVHQGLWTHFGLGRTRPKEWVDGAIGDQIQSRTRSN

SEQ ID NO: 63041 - protein, 241 aa, Zea mays
  Coding DNA Sequence Number=SeqID_19666
MELGGGTAVGAVESLLTSSLLPSSEAEVESEPPGWARRRLSSSGAEPKSEPWVGRCGDRRLLGPSPSPSPGSGEAEIVVFLGPSPSPSPGSGGVRRLPGLSPSPSPGSGGVRRLPGLSPSPSPGSGGVRRLLGLSPSPSPRSGGVRRLPGLSPSPSPGSGGVRRLPGLSPSPSPGSGGAELPMMPPAEPDCLSVLLCPVAPQSVWRRRRCPSVRPLRADGGYQLRIRSLEGTPNYGPRQKY

SEQ ID NO: 63042 - protein, 135 aa, Zea mays
  Coding DNA Sequence Number=SeqID_19667
  Gene Ontology: Mol. function=binding
  Homolog annotation: Hit_ID=Q10P70; Match level="QueryCoverage=78%, HitCoverage=17%, E-value=3e-35, Identity=65%"; Hit description =Armadillo/beta-catenin-like repeat family protein, expressed
  Subcellular localization annotation: CTP_CleavageSite=17; ConfidenceScore=5.18e-01
MADTEQALHKAAGMAARCFQSHSRLRRFFTLNPVSGLPRTLTLLNTALEDIAWIIRVSSPQDNDGDGDLRGLPNIAQNEPVLGMVWDNIACLHTDGPDAARSLPKIRLQPRATTMGEGSKAILAKPIQLVNNMNP

SEQ ID NO: 63043 - protein, 120 aa, Zea mays
  Coding DNA Sequence Number=SeqID_19668
  Gene Ontology: Mol. function=catalytic activity; Cellular component =integral to membrane; Biological process=metabolic process
  Homolog annotation: Hit_ID=A2XYW7; Match level="QueryCoverage=90%, HitCoverage=23%, E-value=4e-39, Identity=71%"; Hit description =Putative uncharacterized protein
MGEIVLRGGCVHAQLPGRRQGHQGDNGWFYTGDVGVMHPDGYMEICDRSKDVIINGGENISSVEVESVLYSHPAVNEAAMVARPDDFWGETLCAFMSLKEEGSTTADVITIWFNIERIWF

SEQ ID NO: 63044 - protein, 152 aa, Zea mays
  Coding DNA Sequence Number=SeqID_19669
  Homolog annotation: Hit_ID=Q33B25; Match level="QueryCoverage=37%, HitCoverage=8%, E-value=4e-07, Identity=48%"; Hit description =Armadillo/beta-catenin-like repeat family protein, expressed
  Subcellular localization annotation: CTP_CleavageSite=58; ConfidenceScore=5.53e-01
MSTSTMPGVRMPCLALSRARSDAASLFHSPFHAQQTTSLAVSVSPYPWLTSNPMDSVRCSTAAGGGAPAVRMRTLALLDIALEDIAWLIRVSSLQDNDGDGNLRGLPNIAQNEPVLGMVWDNIARLHTGGLAARDDAAATLASLPVGNSYFA

SEQ ID NO: 63045 - protein, 65 aa, Zea mays
  Coding DNA Sequence Number=SeqID_19670
  Homolog annotation: Hit_ID=Q8W0Y3; Match level="QueryCoverage=40%, HitCoverage=2%, E-value=1e-07, Identity=92%"; Hit description =Putative gag protein
MADNPVEHSRTKHIDIRHHFLRDHRKIEMISSYKCTFGFKEETLLNHVFEDLRKTKAPNSSPSQG

SEQ ID NO: 63046 - protein, 89 aa, Zea mays
  Coding DNA Sequence Number=SeqID_19671
MVSHSGYGGYKCGHCTTAVGVSEALYAKAVSPDLLTGNRWGRLMCVGTECLATSCSLEDMVAGVTWPSILPPGWTVEWDPASAEEEHEE

SEQ ID NO: 63047 - protein, 32 aa, Zea mays
  Coding DNA Sequence Number=SeqID_19672
MAELAPRVDVVTLGPVKHAGATPAPRRRDTPA

SEQ ID NO: 63048 - protein, 146 aa, Zea mays
  Coding DNA Sequence Number=SeqID_19673
MAVAGGRAQQSRRQPGSRLILGQREGLLPRREDATPPTTRPVALTPRRDTRRLWWEKRATLHLRRNNRVKKRDRERGIPRKGSFSAKEPGSEPPLLIRGSKTGPPKGSTVASDRVGPTPTTGQGFEGQPPEGLHGRLRLLGLRAHY

SEQ ID NO: 63049 - protein, 193 aa, Zea mays
  Coding DNA Sequence Number=SeqID_19674
  Gene Ontology: Mol. function=metal ion binding
  Homolog annotation: Hit_ID=A3B7H6; Match level="QueryCoverage=64%, HitCoverage=13%, E-value=2e-49, Identity=72%"; Hit description =Putative uncharacterized protein
  Pfam annotation: Domain name=PHD; Domain location=38-92; Score=3.8; E_ value=0.0047; Accession=PF00628.20; Description=PHD-finger
MHPSKAMSTNLLLVGKSLGKLSLTCQLHFDSVLTGKGFLCRQKDFNNAVFDERTVILCDQCEKEYHVGCLQSQWQVELKELPEEEWFCCSSCSETRSSLDKIISDGAQLLADPDLEIIKKKHETRGLCMDTSKDLKWQLLSGKRATEDGSILLSAAVPIFHRAKVSLDQSLLAITPHSESPREVPEIGDAKSA

SEQ ID NO: 63050 - protein, 444 aa, Zea mays
  Coding DNA Sequence Number=SeqID_19675
  Homolog annotation: Hit_ID=Q6H6J8; Match level="QueryCoverage=75%, HitCoverage=77%, E-value=2e-59, Identity=43%"; Hit description=F-box- like
  Subcellular localization annotation: CTP_CleavageSite=41; ConfidenceScore=5.84e-01
MAAALQPQRLFSTASTSTSASSSSSFATRPRRPTTAAATCRAGLRVPSGVQTTTTAASPSSSPAADAGLGGIKLDWIDVTALSVGSPSPAGRSNAAEKLRAVAEAAADRAEMHDIIGRQRDNWNHLLLHSTNSLALAASVMAALAPAAPAPALRASAGALLATAAVTMAAANRLQPSQLAEEQRNATRLWRQLERDVRATLQQHREEGEAQLAQADVQDAVDRVLALDAAYPLPLLPGMLEKFPKAVEPARWWPRRRPQQQAKSASSSRSRSFGRRGGNGWGQEVEEEMRGLLRVLRAKDEQEYLRVGKLVLGVNRGLAVAGPALAGAAAVATAFIGGDAAWASGAAVTCGALAAAVNTVEHGAQLGMLFELLRNCAGFYRKLQEDIEAALGEPDVERRENGDVFRTKVALLLGRDASELRQFRRMASVSVKDDDIKDYAGKLF

SEQ ID NO: 63051 - protein, 263 aa, Zea mays
  Coding DNA Sequence Number=SeqID_19676
  Homolog annotation: Hit_ID=Q6JAD6; Match level="QueryCoverage=100%, HitCoverage=36%, E-value=1e-119, Identity=80%"; Hit description =Putative uncharacterized protein
MESWLPAQRVPTAAALFSTRTQEFFFRAQLSAQIALRAHRLLDILAFLLAAGADSEVHLPYLPGLLSLLTASGKYIEEWVRVLYATLWIDPDCEWMRFCFEREDVTLHASQICQLFGFLKSSTRLHNLCYGTSDPPHRPHGGVAPTTAHVAALFRPPFTDGSRRSPADFTPTAKYLYELMRRTLLPRMGYREATTHILLWLLGALVSHSEFDVVDFLICEIEDTILDGPHARRQLPYAHYLFHIFAQLIRPPQFQGTLEASLL

SEQ ID NO: 63052 - protein, 226 aa, Zea mays
  Coding DNA Sequence Number=SeqID_19677
MAMMGSTSEKMYLCQEDSSSDSNYPIGDLEAQVEQLRAELRHRNSMWVEDGQRINELRTDIRHLQDQLAERDLALDWAVNSRSLAWAKEAKARSRVEELSIAVDNLQMLSRTCGQDSAGTCRGRETTPNPPPVPPTLVEAIVALVNATADNTRFLREMAGHQYQQQGERAYPQIPRETSYLDFSETRPPLFVKAEDPLEADEWIWVIEQKFGLLRCIETQKPLFAA

SEQ ID NO: 63053 - protein, 129 aa, Zea mays
  Coding DNA Sequence Number=SeqID_19678
MTTTFRKYQGTSEASFNRMNRRVSSLVDRMDRLGNDDKFVIVAVDERLYMDWEMTIERKNSSHLIPRHHRTLGHGVVAILADIVDEEDAMDAILVGIIDLLGGIALGDSKVGLAVGDVIQGGARQFVRL

SEQ ID NO: 63054 - protein, 89 aa, Zea mays
  Coding DNA Sequence Number=SeqID_19679
MLLQGLGLASSAHYDNPAGYLLQKLVLVPAASCQSSPNAIISVREKEGSTTAAVVGEVDDGGGDASQGEGETGSREKGGIKNDSNNIVY

SEQ ID NO: 63055 - protein, 135 aa, Zea mays
  Coding DNA Sequence Number=SeqID_19680
  Gene Ontology: Mol. function=DNA-directed RNA polymerase activity; Cellular component=nucleus; Biological process=transcription
  Homolog annotation: Hit_ID=A2YYF3; Match level="QueryCoverage=51%, HitCoverage=47%, E-value=1e-27, Identity=88%"; Hit description =Putative uncharacterized protein
  Pfam annotation: Domain name=RNA_pol_L; Domain location=13-96; Score =20.9; E_value=0.0024; Accession=PF01193.15; Description=RNA polymerases L  13 to 16 kDa subunit
MVIIIMVMNGGVDEDLSYLGNYDQGVNVVVKNAEAYTYDDEVIKHAEAIGKPGLVEITAKEDSFVFTVETTGAITAYELIMNAITVLRQKLDAVRLQDDDGDLGELGAHLELFAGSPGRAQIDMLNARQHLMRYM

SEQ ID NO: 63056 - protein, 141 aa, Zea mays
  Coding DNA Sequence Number=SeqID_19681
MRPTSSEAEFSPEAGVVPRRRMSLLELLRTVTEVEEQSSVFVLVAFNVHVFVVPEKFGRGRAQGWPSSEMPSGEAEIVFHKKGGPSGESRIHAGTGFLTGSGKLFLIRMICEINFANAWFRVDSKHTCDHFEDASIKTIKY

SEQ ID NO: 63057 - protein, 401 aa, Zea mays
  Coding DNA Sequence Number=SeqID_19682
MKILEVEGGAEAAARLASPHHQTGGHRLGDKTKATRALPIRGLGRWKGAMHEESAKTWLSSKGVALLLKTTLPTCVLSRCGLSLHQHAPRSSPYDTGAGSHASYQRVKGRTAMQAACNCTKGAHPFDFDASSVGGQAHTSCNRRAGYYMRETAPPLAPLLRLLDCGTSDVTRGDPAHDPTVSTEHIGHGSVSRGRRRDGRYGQKLAPRKVSIAASEHSGSAPTIGQRLAPEGFDSRLRARRARDDSGYVRYMVEAWATLPRGLQLQLVTFGKIQRRSAIIHRTVQCTPDSVRCSKEGRPQELASFGNLQWLVHYNSPDMSGVHRTVRCDNEATDISAPTATCSALNARQRAQKSGTPILAHRTLYTTCPVCHRTSRRAQKSELQRSEPNSIGDVAGAPDMS

SEQ ID NO: 63058 - protein, 164 aa, Zea mays
  Coding DNA Sequence Number=SeqID_19683
MDHKSFDNTRDNHGIIVWVILEMKILLGEAGSEDEPPVIGSTGFGSEAAPAWSLNEAISSRSGSEFTGGGRQCWGLVLKCSALRTRQHRVLNVKCPSSNEGLFLWGLMDLGRSYTSALAKIGFRMMRLQIQECVNSKGILFTIYRHRAQPVRDYKYVPYESLQH

SEQ ID NO: 63059 - protein, 87 aa, Zea mays
  Coding DNA Sequence Number=SeqID_19684
MEFKSCSLLWGERLEVRGVRDQLNCPSGPVQPVLTTEFRRENPSSTARRQVQLVYGQRGSQLKLSSAEVEESSTQLKFSSTEKLSCS

SEQ ID NO: 63060 - protein, 176 aa, Zea mays
  Coding DNA Sequence Number=SeqID_19685
MRLSQNTLNTKQPAKVSKDDGGGPLGEGARRGSGRLQRGRDAAVELGSSEARQRTSGGLGELRGFLGAGRGAPGRGGLAAVGLDGQGDRGASIMAIEDLAQGLKFLWPGPAGGDQAIARGGAERERIVVSYRKRMDSLAKNEEHLIKGPTRQGDWTWVEMATGTNPLGFAILNPYP

SEQ ID NO: 63061 - protein, 233 aa, Zea mays
  Coding DNA Sequence Number=SeqID_19686
  Gene Ontology: Mol. function=DNA-directed RNA polymerase activity; Cellular component=nucleus; Biological process=transcription
  Homolog annotation: Hit_ID=Q6YX88; Match level="QueryCoverage=97%, HitCoverage=64%, E-value=1e-107, Identity=87%"; Hit description =Putative DNA-directed RNA polymerase II
  Pfam annotation: Domain name=RNA_pol_A_bac; Domain location=56-209; Score=142.2; E_value=1.5e-39; Accession=PF01000.17; Description=RNA polymerase Rpb3RpoA insert domain
  Pfam annotation: Domain name=RNA_pol_L; Domain location=19-134; Score= 25.2; E_value=0.00025; Accession=PF01193.15; Description=RNA polymerases L  13 to 16 kDa subunit
  Pfam module annotation: Pfam domain module=RNA_pol_A_bac::RNA_pol_L; Domain location=56-209::19-134
MDRPSGTSYQRFPRVRIRELKDDYAKFELRDTDASMANALRRVMIAEVPTVAIDLVEIEVNSSVLNDEFIAHRLGLIPLTSAAAMQMRFSRDCDACDGDGSCEYCSVEFHLSVHATDSDQTLEVTSNDLRSMDPKVCPVDQARAYQHALGGTDPFGANASNENRQVIHHLASRPTCLWGILIVKLRRGQELRLRAIARKGIGKDHAKWSPAATVTFMYEPDIRINEELMETLT

SEQ ID NO: 63062 - protein, 73 aa, Zea mays
  Coding DNA Sequence Number=SeqID_19687
MDEGLKPKIFKLSEFRFKRHVFTMFGEKMSEEKKVIAEMKLTEEAKLFEEKKDVDPYVAGFVESMESHQRENY

SEQ ID NO: 63063 - protein, 107 aa, Zea mays
  Coding DNA Sequence Number=SeqID_19688
MKDVIIKAEQKRKREAEAESSVAHQKCHHARNKEKRVVCLARVEPRRPHPTHRDFEVSSQCSSPRWGASPRTPVMLAESSGAPPGGHRIPVMTRLERRWWHHALKVT

SEQ ID NO: 63064 - protein, 79 aa, Zea mays
  Coding DNA Sequence Number=SeqID_19689
MGGRSGLNRHGGSMVGRLLSEGGGDYLNARMRSMEGGPPLEKDLVRPFEGEVCQSRINCSGDNQPRGSPPKIVSDSDAQ

SEQ ID NO: 63065 - protein, 126 aa, Zea mays
  Coding DNA Sequence Number=SeqID_19690
MAYCPFICHTGRTPGMVYLLCIIRYTGHCRSSDAENPHDQGRLDSRGSGGAPRTSTVDARLPLLRWLTRHVRCTSDSPVNYSGARLGETREWLVWVLLGVGHRTLSGAPLGSTLSSLAPNIVESPT

SEQ ID NO: 63066 - protein, 43 aa, Zea mays
  Coding DNA Sequence Number=SeqID_19691
MAYASTFTDARANSDADEALERACFVAMPPRNDNGKGDNESPN

SEQ ID NO: 63067 - protein, 140 aa, Zea mays
  Coding DNA Sequence Number=SeqID_19692
  Homolog annotation: Hit_ID=A5CBU4; Match level="QueryCoverage=54%, HitCoverage=42%, E-value=5e-07, Identity=36%"; Hit description =Putative uncharacterized protein
MHEKSATTLWKKLEELYMTKSLANKLRLKERLYTIRIDWFSDYVQSHAGEVDIGDGSTCEIIGISSIYIQVHDGSIKKFSDFGDSGSSVEWTEESSDKDLDYFAALVWQRRRLRRMLRMLKLCLVRVLGVGGKGRLRSVE

SEQ ID NO: 63068 - protein, 150 aa, Zea mays
  Coding DNA Sequence Number=SeqID_19693
MSQAMDKLPKAVYCDVVSLLSTWRLGDKRQTPARSSGPAVGASGYGGPAHDLIRGQDLFIAGRYLHPERTNRDAGEDHGAEFTGGTFTASEYLFIHCTMWIFFSLSDRAYSGVFLFNFYVKSYRPDYNKVIYLYASSNSTIGTLAICSLD

SEQ ID NO: 63069 - protein, 103 aa, Zea mays
  Coding DNA Sequence Number=SeqID_19694
MKVLTHRPRYIETDIVPEFGEGTSSAVEAKQAALAEAEAEGSTAVPKVPIVRSAEAKDGVAKEPELEKIVMLPKISSPPIEAELSKVTKLLPQLPREGEWPAC

SEQ ID NO: 63070 - protein, 90 aa, Zea mays
  Coding DNA Sequence Number=SeqID_19695
  Homolog annotation: Hit_ID=Q7XBE0; Match level="QueryCoverage=63%, HitCoverage=5%, E-value=5e-09, Identity=57%"; Hit description =Putative gypsy-type retrotransposon
MCEQVSSDSNRYHTFENKSPTEDDHGIMKAMCDKAMNKAVRAGQILMKRPGVVVPKDIVADVLAAFADMSKPSPSGDPAGKVPCDNAIAQ

SEQ ID NO: 63071 - protein, 207 aa, Zea mays
  Coding DNA Sequence Number=SeqID_19696
MRDSAPAPQGRALERVGEDSARDGWGRNPVAPLRWWSPKTVTSSSRMGRGKPGCDPDPALSVEGVRHPHWGGERGEPRFYLLRWSASHLFFQLLVVAIALQPCGGDVLQSCRGRRTVAVQPGCNIPPPPSHSRRGRQREPVDSPVDYLNRFTKHESPRVKVKSESGDPRTASPSEARSDLTEGVVDAEGATAPVRRQDPSLQDQSVL

SEQ ID NO: 63072 - protein, 320 aa, Zea mays
  Coding DNA Sequence Number=SeqID_19697
MTRLRHTTWKSLIPFLPSRLAERPLRRPVTGQSNHLERLHHRLHDEQERRRQELEQQGSSSSPQQEVESTRRCSPMPPSEASPAPPLGAPAAGVATRGDPGDGDDDDSSSSHNTDLSEEQEAEGWVARPITRDAARRCHFHDVLDTLLCRALDRHLVHRVSLCGLPAQSRVYPDRWEVTFLVRRPEDGLRGGEDAAWCALSHYCLVLGGAADYLDLRYYPHHPSGSTGGVVVSHVGEDNPRLSSTVNLAVVLNTKLDHTLDELSRAHAEIAQLRAERAERRHLEDGSPAFVGTQHLYCSPRRGHHVYDNPDYMTRITLES

SEQ ID NO: 63073 - protein, 80 aa, Zea mays
  Coding DNA Sequence Number=SeqID_19698
MDSTRNPPDGSASHGCSVFEHDCLLLAKEDEVPDYSASGTDFLLAGYSGGTAADAEGTASGTADEAGVGSAADIPEGGSA

SEQ ID NO: 63074 - protein, 260 aa, Zea mays
  Coding DNA Sequence Number=SeqID_19699
  Gene Ontology: Mol. function=metal ion binding; Cellular component =histone methyltransferase complex; Biological process=defense response to fungus
  Homolog annotation: Hit_ID=Q2QVM6; Match level="QueryCoverage=64%, HitCoverage=51%, E-value=6e-38, Identity=47%"; Hit description =Hydroxyproline-rich glycoprotein family protein, putative, expressed
  Pfam annotation: Domain name=PHD; Domain location=44-101; Score=16.2; E_value=0.00017; Accession=PF00628.20; Description=PHD-finger
MARKKATVEQLRTLNKVREFKRRRNMHKAAGAGPGNKVAKGENVCAICDDGGNLTCCEGCCQRSFHLDNEHNCIKTLGLTIQEAKNIIEKEDFICKNCQYKQHQCFICGSLGSSDDTDTSSQQVFQCEHDDCARFYHPKCVAQMLYPDSQELFELHVAAGESFTCPMHECIVCKEVDNKKDKSMQFARYHFQTEERSQGSHAKGVEEHASRSNSDILHVIKYCRSRSWIKATANMNQYKNQYKDEDLVELMSVVIWLGGF

SEQ ID NO: 63075 - protein, 124 aa, Zea mays
  Coding DNA Sequence Number=SeqID_19700
MAELSSAERPYAPLPAACPLPTPPLCPAFFLGAELHSFLAARHGQLPSVADHGCLAAASPSLSVDAAAPPSLSARIYAMCCLMCALCSLYNYIFVDMMYIGVGKDAPDGHVTKGWCSGEARSLI

SEQ ID NO: 63076 - protein, 112 aa, Zea mays
  Coding DNA Sequence Number=SeqID_19701
MGAAGLLLAVEQGTRREEGVEHCGEERVSFPARELKGKQRGGRALGKGDELSAGRWSCCWTPVRGGRRSACTFLRDGEAELGDAACARSRKEEVRGERTERIRVSANGRLSD

SEQ ID NO: 63077 - protein, 82 aa, Zea mays
  Coding DNA Sequence Number=SeqID_19702
MQFFCPLDYQCSAYHVPTDSDQNHSVKKHKEYKGWRRAEAMLRGAGHSAFASRFAYEGTPFITFVRKSLYPKGNNASKDEGL

SEQ ID NO: 63078 - protein, 163 aa, Zea mays
  Coding DNA Sequence Number=SeqID_19703
  Homolog annotation: Hit_ID=Q6QP51; Match level="QueryCoverage=77%, HitCoverage=53%, E-value=2e-19, Identity=49%"; Hit description =Putative growth-regulating factor 1
MSFFVDLSRFDQICSRNRVEASLQGRSDRSHFALSLTDLTGKQRRSLRSDCCATHQDDADNSQVQPQAQQEALPRPTLGLGLNLGLGRWSPPRPNPRARPSNLSLGKVVSALPDPRARPQPWPRKVVSALARPQGSASGEVSASPDLGAQTDRAMGDTSLLYP

SEQ ID NO: 63079 - protein, 161 aa, Zea mays
  Coding DNA Sequence Number=SeqID_19704
  Subcellular localization annotation: CTP_CleavageSite=38; ConfidenceScore=5.41e-01
MGTIQVKALSTQGAQSRLARAQPRAGTVAPDEVTSRPRASLGSGRTLGTPEAQLEQASSRSNLAKSPLQPTVSQDEADNSQVQPQAQEDAPPRPTPGLGLNLGLGRWSPPRPTQGLGLNLGLERWSPPRPTSVLGLGRSLLLARPWARTDRAMGDTSLPYP

SEQ ID NO: 63080 - protein, 135 aa, Zea mays
  Coding DNA Sequence Number=SeqID_19705
  Homolog annotation: Hit_ID=Q6J9V9; Match level="QueryCoverage=32%, HitCoverage=24%, E-value=3e-07, Identity=50%"; Hit description =Putative uncharacterized protein
  Subcellular localization annotation: CTP_CleavageSite=46; ConfidenceScore=5.38e-01
MAAADERKQRSNHLQARVPSWSGRGALSHGVKTTCPCSVPRTTRARATAAQQTARPIALTPRQGKRHLWHAKRASFHLRHDDRVKKGTGKGDISKGILLRERSGPRALLLIRGSKAGPSEGFDGRPRALGLQAHY

SEQ ID NO: 63081 - protein, 312 aa, Zea mays
  Coding DNA Sequence Number=SeqID_19706
MGGTRVAFVLLPLEERDLTGGRRRSSALWRGANSDNAGPVGRKRRQLQRAWLASSAGSAVASDAASCRLIRAWPSIYRTGDYCAVRTGGLSKTSYAVWAAFVFFDFLVLTPARRLRAEVGAVVGAEVVVARGGFSADETISVTRGQTSGSLALMACPRPLSGDVGEGLLTSVFALRSSLLLFSRPRQRSLSMLVQWSPASHLEFVVPQALRRVSSSFRALGLACRLAELLNQSVSCPTRKVTSENLQPLCDELEPEAAASAWTEAESTQKEASSAREHVASLAEEKVMSEVSVSRRRRSPSARSALPLTEST

SEQ ID NO: 63082 - protein, 49 aa, Zea mays
  Coding DNA Sequence Number=SeqID_19707
MGHDWCPGYGVSVVALCSTAVVRCWRYLGAKVNGADLCILGDNDDADIR

SEQ ID NO: 63083 - protein, 44 aa, Zea mays
  Coding DNA Sequence Number=SeqID_19708
MAGGNELAGAKERWLAGEGDMSLFPSLRVNLYFYFDKLDQSIAI

SEQ ID NO: 63084 - protein, 71 aa, Zea mays
  Coding DNA Sequence Number=SeqID_19709
MAMSSRLQQSYRNSNEFKIFDCAAPPRAMVGSVLVVVAAHLAPRCGRRTITKVPLIEEGASTIDLSRNDRD

SEQ ID NO: 63085 - protein, 352 aa, Zea mays
  Coding DNA Sequence Number=SeqID_19710
MKATSIQRIGLAAPRRPQALVSRDCPSPLLDGLNYAPGIELQHVVWNRWNLRIHDQSDYFSIYGILVAPIGLWNIVISVLKINLRGLRFKEMVFTSFAEFSKEVLKASVRPASGGADSSVMLELLLGKKTLSSSPLLEHCCPLRSDQSPDSSMVYHRVDPTPFLPQGFVTEHIQHREIMVQVLHMQWESSPESIHESIFNEHTINKRLHTWNSSIEGMCYDNKVLIPKAWVHFFTQHLMEPGTFDWAKKFLCSGAPLALIDKDIDYVHLSIPKKCPAKVDKDLCSEDALSATKSKLGAIQCPCKPSSSSKTKPVKKKDDKKNGSEKKGPRGPDMEYSQGHYCGGKTARIILT

SEQ ID NO: 63086 - protein, 88 aa, Zea mays
  Coding DNA Sequence Number=SeqID_19711
MEQRITRSTLAGGRVESGDRGLASPAKQTPIPRSGSFTEVCSVFSEDWTGLGKVLLAGFKREDPRFNPTLPKVILPKSLGNALALSIS

SEQ ID NO: 63087 - protein, 113 aa, Zea mays
  Coding DNA Sequence Number=SeqID_19712
MVDVVRMQFDAPPLPVPESLISRLESLVCRVWELETESFYRGICQAFAVLTSHFEGGIELEALSVGYCDAWSDAKLAGMVKVVEPFAQKLGVALLGSAPRGELRKTCVFAMAT

SEQ ID NO: 63088 - protein, 137 aa, Zea mays
  Coding DNA Sequence Number=SeqID_19713
MNVDEQGAEPGFDGQGGRTRVPAGVLRGQRSSGGERGWFLAGSRDVGLGRVGGALHGTRLAGLQAGARHRAQGRVQGAHAACGVAACAGGGAWRGGRRRGSAGCARLGGWTSCLGGRSAGRAGLRRPLRGRGRRGES

SEQ ID NO: 63089 - protein, 198 aa, Zea mays
  Coding DNA Sequence Number=SeqID_19714
MDIHPQEDDRGERNQGSTDRGDGREFRSGCCVDGEAPAGNADGSWRGRATSGLDGSVARFTVLGWRGSMRVLGIEHRGTCRAPVLRAGLRLVQGAEPGATGGVGERGMRSAGRLDVTPGRSVHGCAGLCAVEADAGRPRLARSAAGTAWTPGERVGEKRREGREALGPDGCRGGGGLQQGRGARTASLGLGEGAASWA

SEQ ID NO: 63090 - protein, 621 aa, Zea mays
  Coding DNA Sequence Number=SeqID_19715
  Gene Ontology: Cellular component=ribonucleoprotein complex; Biological process=mRNA metabolic process
  Homolog annotation: Hit_ID=A2X7M1; Match level="QueryCoverage=77%, HitCoverage=73%, E-value=4e-73, Identity=42%"; Hit description =Putative uncharacterized protein
MGLCFSKKQQAKRRDEQPSSDAKKSSRRKSGSDTVLVADAKKAPQAKAPAPPKKAVARPEELAADKRTVFVVKAAAAAAAAEVAAAAKGGSEEAEAKREAPEEEPMPVAVAVARAPVRTSSCTKEEVDAILIQCGRLSRTSSASGNPPSGEHGGGRRRYAGSKRSYDFDHGTRGGGGDVDECDWGREGAAVTRPSPRRRTPERKRSSSHDGRTGGGSGSGSRSRRISRSPGRRADVVPAAGSSETGERGARQHPGKMVSVPAREKGRAQSPVKAASSGKRYPSPRSNSPARAAASGNENAGVQSTHGPSLSRNSSKKAEQSPFRRNPMAELDENALGNNHHHSNGKPVKKSADGAIALPQKTAERAKDQIPSCRTTAKEKEIVEEAVASDTRAAPARMKATHSVSIVAENVTNPRPGSRSSRRSSRDFEHNDNTYASLLLEDIQNYHQQSASAATATATPAPTLALPACVSNAFSILEAVANLNSSSPDNKSFELERSVNDKESFVNGRYGGNGASTTLVVESEVGVKDDLMEPSMHKYVSVRDIRGERRETEPQESAGSNSFASDAWTCSWEPKSVDSTDRTRSRTASKSYNGDKVEQSWQSKQKLSSSQEPSHRGSTSN

SEQ ID NO: 63091 - protein, 435 aa, Zea mays
  Coding DNA Sequence Number=SeqID_19716
  Gene Ontology: Mol. function=hydrolase activity
  Homolog annotation: Hit_ID=A2XK77; Match level="QueryCoverage=57%, HitCoverage=77%, E-value=1e-46, Identity=44%"; Hit description =Putative uncharacterized protein
  Pfam annotation: Domain name=DUF1637; Domain location=92-343; Score =254.0; E_value=3.2e-73; Accession=PF07847.3; Description=Protein of unknown function (DUF1637)
MEAKSAAAEVLRKTDAGGDNERYRHGELGREAVEEEEVKPRRVADAPLPAERKRKRAADPEDDGSVSDSGSGSEGPPQQQQQVKPCLSPVPPLQRLLSACRALLTGSSSPPTPSAVALIRGIMVFSSDKIGPDDVGLRDEIRFFNKMNAAGLQNPPIVTCKPIYEGANFTIAVFFLPLGAVMPLHDHPGMTVFTKVLIGSARLEAYDWVRPRVLAGCCSGSRRRTLAKKVRDDHGVTAAASAWVLFPNSGGNMHRFAAAEDAHCAFLDVLTPPYAPTDRRRCTFYQDLPYEHHRPRPCTCRSTATGGAICDDDVLVAEEQTCRLAWLEEVPQPRNLRVVDDKATGFCTSVSAMNQITAIVNIIGSKMQTTPNAHVMLMKHQDDDTTSMVSVSLGWAMMRTRPKLDGRCGGAEPGGWCIRGEPEGLDGVQGGRGQD

SEQ ID NO: 63092 - protein, 60 aa, Zea mays
  Coding DNA Sequence Number=SeqID_19717
MVDFARKRRRSRTGHEQWLSGSPIHPPLGALRRLLNIDLFLDWSIEEGTFHVHLVKLKAM

SEQ ID NO: 63093 - protein, 90 aa, Zea mays
  Coding DNA Sequence Number=SeqID_19718
MSIYEHQIRFEIQNQKVDKVWRFEYQVADRPVVLVVFGRSLQVVSNQSALMQTMHTIVAEPPELFQLKCLSHAPGVVTHLNRNNPSVPQI

SEQ ID NO: 63094 - protein, 66 aa, Zea mays
  Coding DNA Sequence Number=SeqID_19719
  Subcellular localization annotation: CTP_CleavageSite=46; ConfidenceScore=5.26e-01
MDSPNRKQGRPVCSSLALTARKKARSQQAVSVWGTGLSGGAPDSVRCARLPRPEDAALGNLPTAYG

SEQ ID NO: 63095 - protein, 29 aa, Zea mays
  Coding DNA Sequence Number=SeqID_19720
MTKKGESTSVTHEQVQVSVNSTRVLFIYL

SEQ ID NO: 63096 - protein, 251 aa, Zea mays
  Coding DNA Sequence Number=SeqID_19721
  Gene Ontology: Mol. function=receptor activity; Cellular component =integral to membrane; Biological process=intracellular protein transport
  Homolog annotation: Hit_ID=A2XK78; Match level="QueryCoverage=94%, HitCoverage=76%, E-value=1e-100, Identity=82%"; Hit description =Putative uncharacterized protein
  Pfam annotation: Domain name=Sec20; Domain location=163-249; Score= -11.7; E_value=0.071; Accession=PF03908.4; Description=Sec20
  Pfam annotation: Domain name=V-SNARE; Domain location=62-228; Score =110.2; E_value=6.1e-30; Accession=PF05008.6; Description=Vesicle transport v-SNARE protein
  Pfam module annotation: Pfam domain module=Sec20::V-SNARE; Domain location=163-249::62-228
MEYSGGGATLSEMYQSARRLLLSARDGVGRVERLASAPTSSSYSSAPLVGGASGDPAVAEEVRREVAQIQGLCAQMDRLWRSIPAKGQRDLWKRKVEQLSEEVDSLKETLDRHSLRQKKRILEAKERAELFERAVIIPLSNNAVFSFPNGESSHVLRIFDDEAQAKQSARNSSRMLEEAYETGVGILHKYADQRDRLKSAQRKALDVLNTVGLSNSVLKLIERRHRVDRWIAYAGMVITVVVMIAFWRLTH

SEQ ID NO: 63097 - protein, 130 aa, Zea mays
  Coding DNA Sequence Number=SeqID_19722
MTKTLQMMLTNGSYYPNHSDQHQLHPSATASSCLQVVVEEIPADLPRIRVENEVILEDSLEEFLPTPTPLAESLAFAVGSSASVLPAPVVQAPAPRDDDPDDSGDDDEDDEEEEEEENINEEANDEQQDH

SEQ ID NO: 63098 - protein, 85 aa, Zea mays
  Coding DNA Sequence Number=SeqID_19723
MYLRLERRMPPKSKKSVKGLFKGLGLFQGSSSSSSRRRELLSAVHGDEDEQHTEEQHNEEEQHNEAEQHNEEVEHNEEVEHVTWD

SEQ ID NO: 63099 - protein, 100 aa, Zea mays
  Coding DNA Sequence Number=SeqID_19724
MARVACTLCGKRLDGGVSVLSGCLRSVGQGQLQVGLMTWEVPSQPDSAMWYPMLLVQLHRVQRGRRVTGGVKHLPQNGRKTIVRKEVRAETSVSSTGGGG

SEQ ID NO: 63100 - protein, 55 aa, Zea mays
  Coding DNA Sequence Number=SeqID_19725
MRLHTLRDDVVFIPSEVLLTQGSVIESIVVVRGNEMVLVAHPGKWEVAALPPSLS

SEQ ID NO: 63101 - protein, 129 aa, Zea mays
  Coding DNA Sequence Number=SeqID_19726
  Homolog annotation: Hit_ID=A2XFR6; Match level="QueryCoverage=98%, HitCoverage=36%, E-value=2e-17, Identity=36%"; Hit description =Putative uncharacterized protein
AASVSDAARQTLWSLNHTYRQQLHNMKYMHLPMRLHGESQTSIVLGRADEDRLNTLVGVVVGLNTDLDSATLDLSRVHLELEDAHARIAALESQLEGRNPPEVQVHAMALSPPRKRILYGEPGSITRLL

SEQ ID NO: 63102 - protein, 70 aa, Zea mays
  Coding DNA Sequence Number=SeqID_19727
MHISYSLHSLDCNLADGEYVLIPKQGAVHEEDQEQAPDTAIKDLPVAPAIEGIFGLESVPQWEKPKEYEG

SEQ ID NO: 63103 - protein, 56 aa, Zea mays
  Coding DNA Sequence Number=SeqID_19728
MDVLMIRNFGEDQQGLGKGLGVEEEQQGRHNRKEIKSDSAELALVARSIAQYTVDN

SEQ ID NO: 63104 - protein, 132 aa, Zea mays
  Coding DNA Sequence Number=SeqID_19729
GMRPEPSDQRSRAQIKRAYALNRYAIPLETDPTAQVPPSSHTPDSGGGAHKTRRRFAGVDRGGLRRGDVMAEKRVTAEVPVVDEQFRAPTPPPALDEAPSNPKRAPVESLGSSSRRDLCPRRCAAAANSNVP

SEQ ID NO: 63105 - protein, 115 aa, Zea mays
  Coding DNA Sequence Number=SeqID_19730
MTHWIAQSMRVGGRPKSDEDDLGSPGRSCWVRALGKLYGPLAKLTEGQARLGSDWSRLATVAEAWAVMAGGRELAGAKEGRLASEEGLVRHYFVNGSIRIRAKDQGEHARFWFKG

SEQ ID NO: 63106 - protein, 113 aa, Zea mays
  Coding DNA Sequence Number=SeqID_19731
MGKPVRSLLMLLLSRGGVPLDSPTRWQDGRPSHSSNHVLQITCKIYATSKAEYTNTQLDLPVTALVPTITGMGDLVSGRVRGYVHCQVHSGIRTLILIPISSRRPRIPMDPCP

SEQ ID NO: 63107 - protein, 438 aa, Zea mays
  Coding DNA Sequence Number=SeqID_19732
  Gene Ontology: Mol. function=inositol or phosphatidylinositol kinase activity; Biological process=phosphoinositide-mediated signaling
  Homolog annotation: Hit_ID=Q2R903; Match level="QueryCoverage=95%, HitCoverage=34%, E-value=1e-120, Identity=53%"; Hit description =Phosphatidylinositol 4-kinase, putative, expressed
MFKDKNEERRDSNHARHGNEERLGKSVEDDDREGFFRKIFKDKNEERKDEGHQKPDEREKVGANIEDDKRDGFFRQLFKEKNDEKKEGSTPSKKEEDDKGHKNADDDNFFRRLFKDKNEEKKGIVHDRNEDDKCEEGDKENFFRKLFKDKLEERRTEGPDKNDDYGKGSSGIEEEDNPEFLSFRRLFRVHPEDPKSGHIESSQSNNLSEGSLGSESFFKRLFRDRDRSLEDSEIFGSKMAKEARIWSHKHPGTTGINEKQSGKPPLPINAVAELRKGSYYASLELVQALCDTSYGLVDIFPIEDRVCFPMGKGIYRVVHIPEDESVLLNSREKAPYLICVEVLKAEAPSHSKGSSDGHKLSKDGIPLANGDVQLPKPPPWAYPLWSRHETQNYETDIMLKSTSQVIDQAMAQLWETKEINGWRLSGNGDRALVYEYYI

SEQ ID NO: 63108 - protein, 136 aa, Zea mays
  Coding DNA Sequence Number=SeqID_19733
  Homolog annotation: Hit_ID=Q2QSG2; Match level="QueryCoverage=62%, HitCoverage=5%, E-value=3e-08, Identity=40%"; Hit description =Retrotransposon protein, putative, Ty1-copia subclass
MIHTTTNMLRCLLFQASLPASYWAEALHTATHLLNRLPSKAMCFPLLAPPHPPILTPSSSPIRFPPTFGSLSCAVTCSSCGPHDLFRATRGPVDPACATRGPVDPACATRGPVDPACATRGPVDPACATESCLEGG

SEQ ID NO: 63109 - protein, 166 aa, Zea mays
  Coding DNA Sequence Number=SeqID_19734
MADSKDLNKASPNSCTRLTNLSAAEHKRLKDDMKKIDEEVQRQKDQVLKVADKWFLSHFRVDCHQKTVQERKIDVDYMSSVLQQLPTIGDARRQNNCAKHIDNKWVSPAIFWYADGLISRTTVTTIFSKWSDRPEHQKSPVIRLVRKTDINIIVHPSLKNKKVTCP

SEQ ID NO: 63110 - protein, 540 aa, Zea mays
  Coding DNA Sequence Number=SeqID_19735
  Gene Ontology: Mol. function=voltage-gated potassium channel activity; Cellular component=integral to membrane; Biological process=potassium ion transport
  Homolog annotation: Hit_ID=Q652U9; Match level="QueryCoverage=99%, HitCoverage=91%, E-value=1e-155, Identity=51%"; Hit description =Putative potassium channel
  Pfam annotation: Domain name=Ion_trans; Domain location=36-201; Score= 23.5; E_value=0.00038; Accession=PF00520.22; Description=Ion transport protein
  Pfam annotation: Domain name=Ion_trans_2; Domain location=113-207; Score=45.3; E_value=2.2e-10; Accession=PF07885.7; Description=Ion channel
  Pfam annotation: Domain name=cNMP_binding; Domain location=301-379; Score=29.6; E_value=1.2e-05; Accession=PF00027.20; Description =Cyclic nucleotide-binding domain
  Pfam module annotation: Pfam domain module=Ion_trans::Ion_trans _2::cNMP_binding; Domain location=36-201::113-207::301-379
MGWWQGFLIGPVLYSAWSSPFELALDRAATTPVVVASLVMDAFFAADIAVSFFVAYFDRSANLFVDDRRKIATRYLKRPSFAMDVASTIPFNVIYQLVSGRSTGWFRYLNLLRLWRLQRVSKLFARFHHGDREHTWLGSQVRDFADGSVWVNYTYAVYWSITTLATVGYGDLHAVNPGEMVFATCYMLFNISLTSYIIGNTTNLVVHAATNTFKMRDMVRRVSTFGSVNRLPPELREQMMASAQLRFSTAEVIQQQLLSDLPTALRSRVAHHLFRDAVQRCYLFQGVSNDLVVRLVSEMRAEYFPPQADIILQKVTTTACYIIVSGSALVMKIGPHGMAGEMGVILGVPQPFSVRSRRLTQALCISNSHLLGILRSNTADANTVCANFVKQLKSLKELQVAEDAPFFEETFSKTNMDELQIGSIFQQLLNDGDAARRIPRQNQKASFGTEQHEETAPCMLPRRQGGLRVVIHDRFPSDGAEKNRGLAAGKLILLPDSLQELMKVAEVKFGKAARRVLTVEGAEVDDVAVLRDGDHLVLCS

SEQ ID NO: 63111 - protein, 179 aa, Zea mays
  Coding DNA Sequence Number=SeqID_19736
MAGFTVGDITGPGTPPHRPCCTQQRAHPWGGPYIAGLGPIHASSPLPLRRSSPPGFPAFASPTWSHRVAPSTDSPLVGTLATIQAAVTASRERERAASLALERERALGAALTTQMATMQRLLGRPPLADAEPPADPHASDLDADLIAALHAQAAGLHNIRALVSVVSDPPSSHYPRGED

SEQ ID NO: 63112 - protein, 331 aa, Zea mays
  Coding DNA Sequence Number=SeqID_19737
MTSGQTLLRQGPRPCPRPRGEDMQKAIELEVPTSAKLRSSNDDKAEEPRALPIRGLGRWKDVMHEGSAKTWLPSKGVTLLLKATLPTCVLSQRGPSLLQRAPWSSPYDTGAGSHALCKLAQGRRSQTAARVRVTAQRLQAFLHYRPDQRVKGRTAMQAACNRTKGAHPFGFDASSMEAQAHTSCNRRAGYYVQETAPPPAAVLRLLDCGTGAATRGDPAQDLTVPTEHVGHGSVSRGRRRDGRYGQKWVGSNGGGKQAEAAVMLSASSCPLVGQQENPLPRREGDAPVYRSSNGSHTHNGRPANHSSRRINSAVGQTAPLAGEAGDASPPP

SEQ ID NO: 63113 - protein, 231 aa, Zea mays
  Coding DNA Sequence Number=SeqID_19738
MVAQFYLGFCRRFDPGGSLDRRGVTSVRVRDLGVGPFSCAANLLGNDGPPCVMIGSSPRSGEAEAPPWPRSSLSSEAEAESEPWGRARRSSSSSEAEAESEPWGRARRSSSSSEAEAESEPWGRARRSSSSSEAEAESEPWGRARRSPSSEAKTGAEPWGRARRSFLWRPRPDLAAVSLTLSSGTAVGVTQAALFSCQAILALNAPAIWSVGVAIWPRLLLCEDWASGEPK

SEQ ID NO: 63114 - protein, 64 aa, Zea mays
  Coding DNA Sequence Number=SeqID_19739
MASSPQVNFKYYLEALENEEEIEVEEARTSPPPPEEPQAGNCFYFDICGTEPDSPITEGKHRLA

SEQ ID NO: 63115 - protein, 73 aa, Zea mays
  Coding DNA Sequence Number=SeqID_19740
MNAPDPFPKPLEPRHGRPPRLRRALAMRPSGATALRGLRLYPEHLSVRTYLGSDNLGQQCNHEGGMGCPYLIN

SEQ ID NO: 63116 - protein, 97 aa, Zea mays
  Coding DNA Sequence Number=SeqID_19741
MVRKNTMRPATNERKHTNSTMQIIERRKKTLDKLTDQPGNMIPIDVAEVPDLSASRDNSDLAEDEPCDPTMTSKLEAPMQSLNQLPVVTDLADARSA

SEQ ID NO: 63117 - protein, 163 aa, Zea mays
  Coding DNA Sequence Number=SeqID_19742
MGRRKERESSMAEKGEEGIDHGSLHTWAGARLAWPGQTAARTTLAGLQAAAMGNEAGAGRASRPAAARRSSWHGSRGSRPGATEPGRACRGLRSAGGKAGHGRWKERDGAGRSGTELQQRRCGQGALARRPIQPGPMLRTQGEGRDERTPEIGMGTSSTCCTR

SEQ ID NO: 63118 - protein, 57 aa, Zea mays; identical to SEQ ID NO: 60984
  Coding DNA Sequence Number=SeqID_19743

SEQ ID NO: 63119 - protein, 233 aa, Zea mays
  Coding DNA Sequence Number=SeqID_19744
IHFSKHFCKTESLIIEKPHLDSLNQHTLESLFFSRVKRSWKGKKKIPNLSSGSGAPTGLSELAPRQDNSSSGSNDPIGDLEAEVSRLQAELRRRTTIWVVDGDRINELRRDVRHLRDQLVDRDLALDWVVQSHSLAWDKEQKAQARVAELNLTVEELQTYCNTLHEEVHVLYSQLHPSEPTNPDESEAGPLHVAGHALGGELDLFQPPPSMRLVDEWSPTPDDEAAKSNGKQE

SEQ ID NO: 63120 - protein, 39 aa, Zea mays
  Coding DNA Sequence Number=SeqID_19745
MASTVWAPLSMPGGNAEHGWEKSWMAFGPLIGDPMAVEA

SEQ ID NO: 63121 - protein, 110 aa, Zea mays
  Coding DNA Sequence Number=SeqID_19746
MQSVDDPRKDGHNQWMLAKRGASYATSPQYAVQLFEEHRVPRCKVRMTLDPHPLQLGWRSLDSKSFGFRAEDTIESTALHVLTTFCGFHPLELSTHPIGLFPDEKEDDPM

SEQ ID NO: 63122 - protein, 147 aa, Zea mays
  Coding DNA Sequence Number=SeqID_19747
MGKSNKRKREPTPPSEDFGDSEYLEEEFSSESEGSPVPVSPSVSSDDSDDSQGLAAEVWTYIRAVKRSGLEGSDELEYCSDEEDSSEEGGGGDGGDDDDDGGDGDNDDSDGDGGSRGGNGDSKGGNGGSSRGNNGGGSSKGSNKASG

SEQ ID NO: 63123 - protein, 123 aa, Zea mays
  Coding DNA Sequence Number=SeqID_19748
MRNRARPSPLLLLLLSCWSSIPLDRPTRWQGGRPSHTINHTLKRTCKKYATCKAEYTNTHLDLPGYKGSSSLISCEKKTIRIEFLNLAREILSGRLGSWLLVFLVDSSLLRNEHVLSVSEVAI

SEQ ID NO: 63124 - protein, 141 aa, Zea mays
  Coding DNA Sequence Number=SeqID_19749
MAIIVKIWSQSALELDLSLRCLVLDAVPKRQSAHWRSPAYTLSACTTLSSGELCATRPSHPSVGHRDQPFLETFSLHRAFGKIPRGAVKLLQARIEALPHRNSKIIVAELRSPAAARRPSYPAGALTADELPRLRTWIGLL

SEQ ID NO: 63125 - protein, 93 aa, Zea mays
  Coding DNA Sequence Number=SeqID_19750
MSHLMALLEATKITLDNREELVVDLSTEMVEKDLQVEQLSTDIQELEELVGTRENTIEMAGRQRRGQNERVPPPPPPPPTLQELMAQQNEILR

SEQ ID NO: 63126 - protein, 104 aa, Zea mays
  Coding DNA Sequence Number=SeqID_19751
MDPQRTEMHCPTLTGLHERAFPAFCGRVRMTLEPHPLQPGWRSLDSESFGYRAEDTIEAIALHGLTTFCGFHPLELATHPIGLFPAEREDDPMWKDRVEHAKDI

SEQ ID NO: 63127 - protein, 21 aa, Zea mays
  Coding DNA Sequence Number=SeqID_19752
MVRKKWEKFSRELKLKPETHY

SEQ ID NO: 63128 - protein, 92 aa, Zea mays
  Coding DNA Sequence Number=SeqID_19753
MKHLRTSPQQLQYVQGFNDLCQYAGYHADSYEKKRDRFRRGLSTKLRERLNTVRANNYNELVNLAISQEDCILAHREDKKRKAPMAGSSAQP

SEQ ID NO: 63129 - protein, 374 aa, Zea mays
  Coding DNA Sequence Number=SeqID_19754
MPFIKVYNNDSDPYGLKEFGIIVTPARIPPTRRSPLHITQRHRPIAQPLPEAVTQPPPLETCRVAAVVGDLLRSCRCRGLGATRGTRTHRIPDLKTQIFQGATLPHDPTPRPSSSPQHRHPIQPPGPLDATAPPLLGAAAPTLPHDPTPRPSSSPQRRHPIQPPGPLDATAPPLLGAAAPSNCLNAAIHPTSSVSPPHYVAVIKMPRGRMDGTRTRKDLGEVPITEYEKERALNVMRNNKMLSSLGITGLTSVIRSSSTRKNSIAREDIDPLYEPDHSEDNDHHVADQDEPFYIERRNTNMSTGFGGTKGSKRVVAPNVEDQVGRVTRQKTKELSLVEKDIHGSTANTDEHTLISANFPAHLDDEIQMCDEGKK

SEQ ID NO: 63130 - protein, 223 aa, Zea mays
  Coding DNA Sequence Number=SeqID_19755
  Homolog annotation: Hit_ID=Q6QP51; Match level="QueryCoverage=78%, HitCoverage=79%, E-value=6e-14, Identity=38%"; Hit description =Putative growth-regulating factor 1
MQAACNRTKGAHPFDFDASSMEAQAHTSWTGKGDTLKGILLREGNGPRAPLLIRGSKAGPSEGFNSRLRALGLRTHYWLALEGFDSHLRRRARDDPGYVRYITKARAAVPSHFAAPLIGLTRGQRRLRRSNYCATRQSEGDSSQGSDSASASEDDELRLARPQGSDSASAPEDDELRLARPHGSDSASTSEDRLDLDLGGASASPYPWLGPTTSQEGPSLPYP

SEQ ID NO: 63131 - protein, 1023 aa, Zea mays
  Coding DNA Sequence Number=SeqID_19756
  Subcellular localization annotation: CTP_CleavageSite=66; ConfidenceScore=5.14e-01
MQDEIARWDDLVIVLRPAPCRAKDLARVKKTARRRRRYVAMPSSSSFAAATPPAGASSEETLSTVAAEELRAGDTVEFGVSRMSSVRVQDMQQLGYFGSGVARPPVDANAVVALAKYVWATTSYGGQPSVKVFTKYYCLHWPKRKIGNKIAQFGSYTFTPKTGKTSMEVVELVPCARNKWGNWWDFWFYVAEGTVEDHPGLPVAEMCSHCYSAYPQFERVAGRWAKGLGEVCPRQMPSRGGMLVRSPAFALDLHSRDPAAFVREAEDGAVRIVGRYVPRTEGQRSWDIRGSNDRLNRVFKLNRLPYGGYPGQDDVDRRGKKPAAEIGDDPAPAAAPSSKKRKLGTAMGGLGVSDSFAMELMGTCAAPGGRMSSPELRESSARMLKVTGGWWPKNVPIPRAVGEDFFTSRMVRDFRVFPYGRNVAAVVLAVIDKDRQEAAQKRRTVVRLPEARPKRPRGTAKAAAPGGSQPTLAAKSAGPGSSKVPDVVKAASAGGAKSTSAEAAKARELSPPGKRIADFGTDISVDDYLTVPVAKGGAFSAGGEISALDAVKDEAGAVSRRLKEASQRLSQAADFADGVASGALTTVVSAEVERLRAQHAEAVREKSAADSKCRKLAEKVAVLEGERTELRRQLAEERRKANQALAKAQSAQAEANVARVEGSLARQRAEEWEERFNALQARVERAEASTRSEAERTRKQLMDSYHELGARTADFEVPDRESELRCLEWLQEELLALPTIVEGFMSYASLVTCEGAINALSREGCRHYEVFDRSDEDFEREIYKVEDPVVKESAGALFDRMWGPHGREVVRERRRVTKKVDDFGALNSARLRWSRTRWRLGPRSLRRRPPEIVEGSPDAPAATMAGGGSSPTAEDPPKTAAEPAAEDPAAAGSLQVQDFGPAHATATSNFLAASTVDDGNESDESASKFCDFGDSGSSVECTEESSDEDLDYFAALDVAAAEASPRAADAEVVPGPSAGRRRRRAVAKRRVSEADGCRLRVGRAGRQELLSSPAAASVGEGEL

SEQ ID NO: 63132 - protein, 90 aa, Zea mays
  Coding DNA Sequence Number=SeqID_19757
MGVYGYTDMGILRSVMYLQRHTYAQVRRYTNLKNILILDLVISMIVGTCFPVQVDPTWECSNANRVFARDGNSFVNLASQGHCAGVFIGI

SEQ ID NO: 63133 - protein, 128 aa, Zea mays
  Coding DNA Sequence Number=SeqID_19758
  Subcellular localization annotation: CTP_CleavageSite=8; ConfidenceScore=5.68e-01
MARLKLLPARAKFSARPVCAPLYLSPWRSSLPLLGFPFRTAPPRLTPSTSPTRQASCSPLRSAQLPLSVPSRDAPWRLACSGSEAGRPVCSTVSCHKTPTPSSPAVPRMSCLLWSALVVGIVDCRFRQ

SEQ ID NO: 63134 - protein, 71 aa, Zea mays
  Coding DNA Sequence Number=SeqID_19759
MGAGERERDGESASKLRACGRSASRGEEYKEEAASVVKNLKEGWRDFSLELSDAEIRSNAGKMNAVSNPRQ

SEQ ID NO: 63135 - protein, 63 aa, Zea mays
  Coding DNA Sequence Number=SeqID_19760
MAGALAAIAGGIELAGAKGKWLARYHSCVGAIGFCLLVAEIWSQEIRSVSVPKPEANPRFCRV

SEQ ID NO: 63136 - protein, 49 aa, Zea mays
  Coding DNA Sequence Number=SeqID_19761
MEGKPSRERKSELKRVSPPLAGVGEFICGRESRICSDTSCGRTTRIIPS

SEQ ID NO: 63137 - protein, 294 aa, Zea mays
  Coding DNA Sequence Number=SeqID_19762
  Subcellular localization annotation: CTP_CleavageSite=66; ConfidenceScore=5.43e-01
STPNTDSASSGSRKYAIYDELLSLHSHARSRSVFARRQPRRPSARAPPPEQRCSGRRPPSPPARPAASRRVPCALPRPPPDRLPCELSLPRRAPAALALARAAAASAARRPGRPTPPALLAVATGSYHSTVASPSIEIGSGVNYLADEAHARYVQDKMATVELMEEEDDDTSRLSELIALAEAGLHKEEEDDMSRLSELIALAEAGLRAQEEEDEFLSQATAEVEAAYYKKKSDEAEAEDELFSQAADEAEANYYKRTGDKCDAGQCSKWNEVVVEDCETDDSEDELLIDCDSD

SEQ ID NO: 63138 - protein, 53 aa, Zea mays
  Coding DNA Sequence Number=SeqID_19763
MQPQYLVHSRAVYDRYVQYPQMMDKIWTSVVFSTLGKLEEPFELSFLLTVVLW

SEQ ID NO: 63139 - protein, 462 aa, Zea mays
  Coding DNA Sequence Number=SeqID_19764
  Gene Ontology: Mol. function=metalloendopeptidase activity; Cellular component=mitochondrial respiratory chain; Biological process =proteolysis
  Homolog annotation: Hit_ID=A2Y6N6; Match level="QueryCoverage=36%, HitCoverage=13%, E-value=5e-60, Identity=71%"; Hit description =Putative uncharacterized protein
  Pfam annotation: Domain name=MMR_HSR1; Domain location=195-327; Score= -20.3; E_value=0.078; Accession=PF01926.14; Description=GTPase of unknown function
  Pfam annotation: Domain name=Peptidase_M16_C; Domain location=300 -442; Score=22.8; E_value=7.8e-05; Accession=PF05193.12; Description =Peptidase M16 inactive domain
  Pfam module annotation: Pfam domain module=MMR_HSR1::Peptidase_M16_C; Domain location=195-327::300-442
MAIVDEGGKGEAQPPGLDPRTRRSAVTRATGDMDGGGRGEEWEGPPGYVLSLPAAALPLPVAVSCLDATVRRKGRSHIRHRGHPSGWWAFSLPVPAPEEAKGPVPPSSTANNPTEEGPSSNTRGKNLAVSRDQGAVQMSTIIVSVDLECSRCRAKIEKVLNRIQESQPLSRYKPGDWIEGVGGAKAGHFVLPEVTTLLLVGPRGSGKSTLVNRITRVFDKDDDPFAPDRAQVSCNSKSNGTMFLREYPIPRNSSALQNIKSEIADVSANPQGLLLEALHSVGYSGALAKPLMASESAVNRLDVSSLEEFVAEHYTAPRMVLAASRVDHDALISVVEPLLSDLPCVKRPEEPKSVYVGGDCRCQADSPNTHIALAFEVPGGWNQEKTAMVVTVLQTCPEISQAVSSVLERAVYAIAPAGVKKTITCVVAYANLIVLQRYVDQFENRQQPKLPAMVVAGACPWH

SEQ ID NO: 63140 - protein, 120 aa, Zea mays
  Coding DNA Sequence Number=SeqID_19765
  Subcellular localization annotation: CTP_CleavageSite=38; ConfidenceScore=5.11e-01
MAASTNPLPSSNSSPTGCLHRTLLFNARHNRPHPHDPRAADSPPSTHDLHSRMLPMHDLYFAWVMHGCQMKIKPEHARTLESEEFPREGGQPTQFPSRSVLYVRARARVDAIAGIVPPRA

SEQ ID NO: 63141 - protein, 60 aa, Zea mays
  Coding DNA Sequence Number=SeqID_19766
MEDATTGAIQASNKSMETDIVVLLAATVPRVWTNAVLPRSQHPDDLAVNLYSYVFWPLDD

SEQ ID NO: 63142 - protein, 120 aa, Zea mays
  Coding DNA Sequence Number=SeqID_19767
  Subcellular localization annotation: CTP_CleavageSite=38; ConfidenceScore=5.09e-01
MAASTNPLPSSNSSPTGCLHRTLLFNARHNRPHCHDPRAADSPPSTHDLHSRMLPMHDLYFAWVMHGCQMKIKPEHARMLESEEFPREEGQPTQFPSRSVLYVRARARVDAIAGIVPPRA

SEQ ID NO: 63143 - protein, 144 aa, Zea mays
  Coding DNA Sequence Number=SeqID_19768
MSCFTTTLQPSVSCRLRYMPRHDLYGLIIGEHVPHMLEEIFSYIVSHQTRTTIRSYLNKKNNPRVIDVGDNHEAPLLNDGQRGAAALDHVQVVASRELVIHSGVYDHVGLLLEVELTVVKLLLVIDERRQRECLLLMVFARGFK

SEQ ID NO: 63144 - protein, 369 aa, Zea mays
  Coding DNA Sequence Number=SeqID_19769
  Homolog annotation: Hit_ID=A2Y2N2; Match level="QueryCoverage=10%, HitCoverage=5%, E-value=5e-08, Identity=75%"; Hit description =Putative uncharacterized protein
MNPGCTSFGSPTKSHRYSLCPRAFDDYYIEDCGVILASEPSFPMRTTHYACHPLWQPPPPRRRRTHELHSRDLLPTTSTSSATSTRSLCTPSLIAHGRNPSPHPVSPLDVSELTPAPSSKPLRALCSAAVPAPLQGPLPLRHTRSIVRSGPRKRGPLLPAAPPSPSPSSLPLHLTAPALVLAISSHPFPTLAAFLASRRDELLRADITSLIKALELSGHWEWALALLRWAAKEGAADASSAAAEVSRWMVLERGMRPALPLPKAYWDETLEYESLGEHFQDEEVVAALCVVVNTKQFASPSTTSVLNRAWTRKHDDSMTRHCASATAAAIHTNLQSNGGNSNTIVALAGNKADLLDKGGILFLMPLQLL

SEQ ID NO: 63145 - protein, 637 aa, Zea mays
  Coding DNA Sequence Number=SeqID_19770
  Gene Ontology: Mol. function=N-acetyltransferase activity; Cellular component=plasma membrane; Biological process=metabolic process
  Homolog annotation: Hit_ID=Q84NP5; Match level="QueryCoverage=49%, HitCoverage=46%, E-value=3e-82, Identity=50%"; Hit description=PHD -type zinc finger protein-like
  Pfam annotation: Domain name=Acetyltransf_1; Domain location=288-365; Score=22.8; E_value=0.0012; Accession=PF00583.15; Description =Acetyltransferase (GNAT) family
  Pfam annotation: Domain name=PHD; Domain location=113-156; Score =50.2; E_value=7.2e-12; Accession=PF00628.20; Description=PHD-finger
  Pfam module annotation: Pfam domain module=Acetyltransf_1::PHD; Domain location=288-365::113-156
MAINSNTLAEMEVAEPYLDSLPKNGRSTLGDIIYRYITSDQFSPECLLDCLDLSTEYQALEVANRVEASVSLSLCLVKLMRRDDVSAGAANRNRNGSVMRVKEKCSEEEGDSVCSVCIDGGELLLCDKCPSAFHHACVGLQATPEGDWCCPLCRCGVCGGSDLDDDTAEGFTDKTIIYCDPECGEVFQHLQGLAASSRARSIPTTVEGVSLSTLRRRRYMSTVTRITRWQHEEEDAADHGQLCAALDVLHECFDDMVEPRTQTDLAADIVFNQESGLCRLNFRGYYVVGLEKAGELITVGTLRVFGNQVAELPLVGTRFAHRRQGMCRLLVTELEKMLRQVGVRRLVLPAVPELLPMWTASLGFHAMTRSDVMEMAVEHAILSFKGTTIQDGVSSLDFFHAHEIKDGEKRDEELREYLIDGTGLCYIAEKLMPDIQEPCPPPRRARPRRSRPPEHTSATEIRPPKRPRRSRPPEHTAAAEIRPPKRPRRSRPLEHTAEAEIRPPERPRRPRSSCRAARANGSCGCGGRRRRARRGPARARLRSAAQRTPETRPRRLGPALCHAAWTPLPCRAPEKGPSPPHAGEGRWGCRTPEKGVVESDGPAAASEPGSVLACDSIWEEKQGKGERVPLVRCQVHL

SEQ ID NO: 63146 - protein, 171 aa, Zea mays
  Coding DNA Sequence Number=SeqID_19771
MNHGTEFGHVRAVSASCRQRSTHLGAKICGAKPCYLGATGYGAEQRVQNEIKSSKGLNLNIFQKGLKYKHHRLWRRGGTTAISNYNYYNKESTDTTHKASDDNDASLVGICLTDDSSGSCGGVSHPDLRDKARVSSQKIIAQQVVGNNVHELTKGGSSCEGVVTSDIEAGG

SEQ ID NO: 63147 - protein, 183 aa, Zea mays
  Coding DNA Sequence Number=SeqID_19772
  Gene Ontology: Mol. function=hydrolase activity
  Homolog annotation: Hit_ID=Q10J20; Match level="QueryCoverage=93%, HitCoverage=60%, E-value=4e-78, Identity=87%"; Hit description =Hydrolase, alpha/beta fold family protein, expressed
MAMLIWDAGHNSSPGLQKQLVLELDNEIRRLELLQRYLNDVDYYGGFEQDELDELFEAMRSNYKAWCSGFAPLCVGGDMESVAVQEFSRTLFNIRPDIALSVAQTIFQSDVRSLLPHVTVPCHIVQSTKDLAVPVVVSEYLHRHLGGDSIVEVMPSEGHLPQLSSPDIVIPVLLRHIQHDIAV

SEQ ID NO: 63148 - protein, 77 aa, Zea mays
  Coding DNA Sequence Number=SeqID_19773
  Gene Ontology: Mol. function=structural constituent of ribosome; Cellular component=ribonucleoprotein complex; Biological process =translation
  Homolog annotation: Hit_ID=A9NMM9; Match level="QueryCoverage=62%, HitCoverage=37%, E-value=4e-19, Identity=97%"; Hit description =Putative uncharacterized protein
  Pfam annotation: Domain name=Ribosomal_L11_N; Domain location=12-69; Score=33.7; E_value=6.6e-07; Accession=PF03946.5; Description =Ribosomal protein L11, N-terminal domain
MPPKLDPSQVVEVFVRVTGGEVGAASSLAPKIGPLGLSPKKIGEDIAKAQGDRQGLEGPPRHRQAHRAEGRERWGGR

SEQ ID NO: 63149 - protein, 149 aa, Zea mays
  Coding DNA Sequence Number=SeqID_19774
MDWIVRRRRTIPRPLDQRTPQKPSDRRWSSEEDALRCTASEEIVVFGCHHGRSPQLSSLAPRKVVTIATDRASGVRGRCNHLRLGKTWPPLLAPRQSRLLRRSRLGPPLTDIAWDHRSRLASQEVVVGIWLPLAPHMVVAVTRPRNPNP

SEQ ID NO: 63150 - protein, 248 aa, Zea mays
  Coding DNA Sequence Number=SeqID_19775
  Gene Ontology: Mol. function=nucleic acid binding; Cellular component= intracellular; Biological process=regulation of transcription, DNA -dependent
  Homolog annotation: Hit_ID=Q75KE5; Match level="QueryCoverage=87%, HitCoverage=95%, E-value=2e-41, Identity=47%"; Hit description=C2H2 -type zinc finger protein ZFP36
  Pfam annotation: Domain name=zf-C2H2; Domain location=149-171; Score =10.2; E_value=0.9; Accession=PF00096.17; Description=Zinc finger, C2H2 type
  Pfam annotation: Domain name=zf-C2H2; Domain location=93-115; Score =20.6; E_value=0.0058; Accession=PF00096.17; Description=Zinc finger, C2H2 type
  Pfam module annotation: Pfam domain module=zf-C2H2::zf-C2H2; Domain location=149-171::93-115
MAAGFEALLDSTALSLALPVPVPTMTLLGLKKLNSEDYLAICLAALAGTRGRSGLSKAAAAAAGFGRQEGGGSRKQWSCPPPAPAREEEELRFRCAVCGKAFASYQALGGHKSSHRRPPTGEQYAAALAAAQQAADHSEETTTTSGGPHRCTICWRGFATGQALGGHKRCHYWDGSSVSVSLSATASATGTGTGSSGVTVRNFDLNLMPVPESDGMRRWVEEEEEVQSPLPIKKRRISNPSLTLATCD

SEQ ID NO: 63151 - protein, 184 aa, Zea mays
  Coding DNA Sequence Number=SeqID_19776
MAPVLRQGNHNMSSSSEEIHGSRRGAGNVEVIFPESHVVGGAPASSVADSTEPVSTSLATADSSAAADSSALAEKDIAALSPELRAQATDPKSRQGHRTLDGSLGGSISGVKQPSRFVQPFAEPVQMPTSLMTYFVMIQTYISHSAKGLAKGSTGGLFAECQSTRHSAKKPPLPSAYESSRHRD

SEQ ID NO: 63152 - protein, 57 aa, Zea mays
  Coding DNA Sequence Number=SeqID_19777
MEITNYRLLEFKFVYILSPSLSEVRGQVEAKMSKEDVLKVQDEMQGGATSVTPGFRR

SEQ ID NO: 63153 - protein, 214 aa, Zea mays
  Coding DNA Sequence Number=SeqID_19778
  Subcellular localization annotation: CTP_CleavageSite=67; ConfidenceScore=5.17e-01
RAPLFFLLARAPALPRSPAARPAPPVPCCGGDPAPAPVGGATPPLPGPAAALPRPSPARGGDPARPCSPARGPRPPARPRRLGPGAAPAPCSPPRFNRPDPGPIAPALGLGRALARPCPRPAVPCSRRVGPRRGLELGQACLRRAASSSASARPRHPLCRQWGSVYAARSAKVDLSLGEECGDNETDGFGDDYGAGEDEAVEGDFQEFQDYDEF

SEQ ID NO: 63154 - protein, 110 aa, Zea mays
  Coding DNA Sequence Number=SeqID_19779
  Subcellular localization annotation: CTP_CleavageSite=45; ConfidenceScore=5.53e-01
MVSLFGFTILDFRSLKLIMYTFSYHDFYSAFRFSTSWTLPVSAVSSATSTANSGARCPTNFQSSCRQGDEVPDGDNFPLHNRILQQHMNPLKRHVTMPPKSSNKQAQSLR

SEQ ID NO: 63155 - protein, 234 aa, Zea mays
  Coding DNA Sequence Number=SeqID_19780
  Gene Ontology: Mol. function=nucleic acid binding; Cellular component= intracellular; Biological process=regulation of transcription, DNA -dependent
  Homolog annotation: Hit_ID=Q75KE5; Match level="QueryCoverage=85%, HitCoverage=93%, E-value=6e-36, Identity=45%"; Hit description=C2H2 -type zinc finger protein ZFP36
MAAGFEALLHSTALSLALPVPVPTMTLGLKKLNSEDYLAICLAALSGTRGRSGLSKAAAAAAGFGRQEGGGSRGGAPVPVRGKAFASYQALGGHKSSHRRPPTGEQYAAALAAAQQAAGSAAGHSEETMTTSGGPHRCTICRRGFATGQALGGHKRCHYWDGSSVSVSLSATTSATGTGTGSSGVTVRNFDLNLMPVPESDGMRRWVDEEEEVQSPLPIKKRRISGPLTLATCD

SEQ ID NO: 63156 - protein, 317 aa, Zea mays
  Coding DNA Sequence Number=SeqID_19781
  Subcellular localization annotation: CTP_CleavageSite=64; ConfidenceScore=5.46e-01
MSSSSLMRRVFPSSKPPDGGYPPSFRLLVGGTQLHGSWYLSAIVRLQGFSSAGPVAPPRRRSPRMVTTSSWVGKSKPGCDLGPTLSFKDVHHPRWGGGQAEPALYLPCGPAGHPLPRRLGVEAVTGPAGGADLDNVGLIDGGRRHLQRVGVVGRAPGGPSCRRAAAAPCAREDHPRYHALLGRRSCSGVALLLHWDGALAQRPRRSWLENGNLVGRSLAGLSVSGADAGVDQPRPRVGLAPLEVGWPRPQGDARVSESCFSRKVMSEDPLSEVVKKHERNSAKKRSFFEENFDAEGVSPLLAPEGGSGFAEARPTLP

SEQ ID NO: 63157 - protein, 634 aa, Zea mays
  Coding DNA Sequence Number=SeqID_19782
  Gene Ontology: Mol. function=transferase activity, transferring glycosyl groups; Cellular component=membrane; Biological process =cell wall biogenesis
  Homolog annotation: Hit_ID=A2Z218; Match level="QueryCoverage=85%, HitCoverage=98%, E-value=0.0, Identity=72%"; Hit description =Putative uncharacterized protein
  Pfam annotation: Domain name=XG_FTase; Domain location=131-604; Score= 609.4; E_value=3.3e-180; Accession=PF03254.4; Description=Xyloglucan fucosyltransferase
MAHRSCSGPHETLSPPFYPLYPWIHDLFPAIEFAMAPSPSLLNSSDPGATLARASLNAGNLTASERSGAARSRLFPRQDRRRIGMDAKLRPLPQPAVRKAAWPVGLLVALCFTTLPLFLALSPGRPTLFDVWQQIGIRVAVHYDDEPKPPEPSGSPLEGRDILLGGLLSPEVSERTCLSRYLSSLYRRASPHSPSPYLVSRLRRYEALHRRCGPGTPLYAKSVRQLASAHNSMGLAECSYLVWTPGNHLGDRMVSMASAFLYALLTRRVFLVDMAKDMAGLFCEPFPGASWELPPGFPVHNLTQLRRGSEHSYGSLLGAKKISNEDPVGVRSESLPSYAYLHLAHDYQLPDHFFFCDDDQTVLGKVNWLLLRSDLYFAPGLFLVPQFEDELRWMFPATDTVFHHIGRYLFHPSNKVWKMIQGYYTSYMAKFDEKIGLQITTLAWNPVSTEAYFNQIAACTSQEKILPEVVDPKVALSDEHEAAVASSKAVLVISAHPEYAERLKSMYYEHATVTGEPVSVLQPPGAGNQPQNHKVLVEMFLQSYCDVSVVSGWSTVGYVGHGLAGLNPWLLLPPTNQTVAHPLCVRAMSMEPCFHAPPSYDCRAKKNGDLGAVFPYLRHCEDVDDGLKLFDGLS

SEQ ID NO: 63158 - protein, 53 aa, Zea mays
  Coding DNA Sequence Number=SeqID_19783
MVGTSAVTARRQLGSVKHCLPCKDKNSIRIVCFSQLMRLLDPLYYIKCASEYG

SEQ ID NO: 63159 - protein, 35 aa, Zea mays
  Coding DNA Sequence Number=SeqID_19784
MAGGKELAGVKEGRLAGKGFEPRIKVNTLGLWLKV

SEQ ID NO: 63160 - protein, 19 aa, Zea mays
  Coding DNA Sequence Number=SeqID_19785
MWELQTLGLLFSSFLRIQG

SEQ ID NO: 63161 - protein, 107 aa, Zea mays
  Coding DNA Sequence Number=SeqID_19786
MAHSPLLLAERRRRGVCKKSSLSLIVLSPCAEARGLLSQKPAPAKPLTASTYQPESLGPDRAPGLRPVRMRERPDQPKHYARGTLKTPNSQLVTPISIKLQRPDGYD

SEQ ID NO: 63162 - protein, 131 aa, Zea mays
  Coding DNA Sequence Number=SeqID_19787
  Pfam annotation: Domain name=GRP; Domain location=40-122; Score= -27.9; E_value=0.057; Accession=PF07172.2; Description=Glycine rich protein family
MGKSKRGGSSSHHSGDKRKREPTPPSEDFGDSEYSEEEFSSKLEGSPVHASPLASSDDSDDSQGIATEVSSDEENSSDSSEEGRGDGDGGGDDDDGGDGDGDGDIDGDKGGGKGGSGDGKDGSKGSNKASG

SEQ ID NO: 63163 - protein, 141 aa, Zea mays
  Coding DNA Sequence Number=SeqID_19788
MLVDYTTVLDRPCVSVKGPTQQGIDSVVEVTPASGVTSDGSSDPSIRLRLLQKLCVVARTATGVVGVSVSVRVSSSSRVALRWCRGHLWLRCRGRRPLRLHLLLRQGGRVMLLLVLRLLLASALLLLVQVTMQSLQVAGLI

SEQ ID NO: 63164 - protein, 184 aa, Zea mays
  Coding DNA Sequence Number=SeqID_19789
  Gene Ontology: Mol. function=calcium ion binding; Cellular component =flagellin-based flagellum; Biological process=ciliary or flagellar motility
  Homolog annotation: Hit_ID=Q67TZ4; Match level="QueryCoverage=100%, HitCoverage=100%, E-value=3e-71, Identity=70%"; Hit description =Calmodulin-like protein
  Pfam annotation: Domain name=efhand; Domain location=116-144; Score =35.9; E_value=1.4e-07; Accession=PF00036.23; Description=EF hand
  Pfam annotation: Domain name=efhand; Domain location=152-180; Score =32.9; E_value=1.2e-06; Accession=PF00036.23; Description=EF hand
  Pfam annotation: Domain name=efhand; Domain location=83-111; Score =19.1; E_value=0.017; Accession=PF00036.23; Description=EF hand
  Pfam module annotation: Pfam domain module=efhand::efhand::efhand; Domain location=116-144::152-180::83-111
MSHLNILSFKYNLAKLRSKAGRRRIGRALSARDRQFSDLSTYRPDEEEMRKVFGMIAGQPRGVNKRDLQLLLERFGKADAAAEARRMLCVADHNKDGYMDLEEFMEVHRNGVQLGDIRRAFFVFDRDGDGRISAEEVMAVLRKLGQSCGLDDCREMVREVDRNGDGFVDMDDFMAMMTRPRRRP

SEQ ID NO: 63165 - protein, 70 aa, Zea mays
  Coding DNA Sequence Number=SeqID_19790
MSGDHAKKDIVTGGDKSTCHGKAPSGESGNKMKGSPSHAKSHRSGNKKKKMKKVPSVGDEGYDLDEVAQI

SEQ ID NO: 63166 - protein, 159 aa, Zea mays
  Coding DNA Sequence Number=SeqID_19791
MKCGAATVYELRREIDGGQDAPEPQVHAVHSTVARASLNFYLPGRVVDHGEVQQRRREHRTEGSRDLSRVADARSKKRGKVRRVLGPHLASGQRGWRPIQVLPKEGEVRRAARHARDSVGNGADEDGPLISGRETERAQRKTDKQAPVSSFPEYARGDR

SEQ ID NO: 63167 - protein, 139 aa, Zea mays
  Coding DNA Sequence Number=SeqID_19792
MGKSKKGGSSSHHSGDKRKRESTPPSEDFGDSEYSEEEFSSETEGSPVHASPPASSDDSDDSQGIATEVWTYIRAVEHSGLEGSNESEVSSDEENSSDSSEEGSSSDDNDEGDGNDGGDGEGDGDGGKGNGKGGSKASG

SEQ ID NO: 63168 - protein, 29 aa, Zea mays
  Coding DNA Sequence Number=SeqID_19793
MELSLPSRALSLPPTANLALFSRPSSLKL

SEQ ID NO: 63169 - protein, 284 aa, Zea mays
  Coding DNA Sequence Number=SeqID_19794
  Subcellular localization annotation: CTP_CleavageSite=70; ConfidenceScore=5.09e-01
MEETHLHVFDAFCQRQSTLTRAPACPAPRPSQASTMARARAYKTLPDFDCTLLRTLKPQRSLARRRLPVRSVSAAAQSLCHRRPASGAIPNSVQPSEKTLHTSVRLPERGIGVCFAGEASPRSPELSTPPEYVDRVNHSTILRFFVHTVATLPREAHRALGLNQFAVVWPVYSPPTRTPACARGPGDSGHPRRQAVPRRDRQSLPEPIPPSAGPPSPPVSRATLFFPAVTVCIRGRTTGERERREYILVPEQGAAQEVAPDPAPEPAPEDLPATALEGKPRFYA

SEQ ID NO: 63170 - protein, 15 aa, Zea mays
  Coding DNA Sequence Number=SeqID_19795
MDIFGPIAYLSIGGR

SEQ ID NO: 63171 - protein, 92 aa, Zea mays
  Coding DNA Sequence Number=SeqID_19796
  Gene Ontology: Mol. function=aspartic-type endopeptidase activity; Cellular component=chromatin; Biological process=RNA-dependent DNA replication
  Homolog annotation: Hit_ID=Q53JH7; Match level="QueryCoverage=95%, HitCoverage=5%, E-value=1e-08, Identity=37%"; Hit description =Retrotransposon protein, putative, Ty3-gypsy sub-class
  Pfam annotation: Domain name=RVP_2; Domain location=1-71; Score= -13.7; E_value=1.2e-05; Accession=PF08284.2; Description=Retroviral aspartyl protease
MTISTLERKMLVNYICPKVSVKISGIDFLADLIVMESMGKDVILGNNWLQRTKAVIQHTEKNICLETPSRERMVVEDNRPPALKIGTCDEEE

SEQ ID NO: 63172 - protein, 127 aa, Zea mays
  Coding DNA Sequence Number=SeqID_19797
MAENEEESEVTQEKTSPPLESQAETWLYFDICESEPDSPTNKGKPRLDDRGPFNWSHASSWHTLESLFLSRVRKRQSFVAFAPWWYLMKKNKNEDTGGLGPPHRIFLFDNYWEEFLPPLICVLSTRL

SEQ ID NO: 63173 - protein, 456 aa, Zea mays
  Coding DNA Sequence Number=SeqID_19798
MPALTAVRDEAGVVSRRLKEMKEALSQAADFADRVTSGALTAVVSAEVERLRTQHADAVREKSAADSKCRKLADKVAVLEGEKTVLRRQLAEERKEANEALAKAQSAQAEANLARAEGSLAKQRAEQLEERLSALHARVERAEASTRAEAERTRKQLMDSYHELDARTADFEVPNREPGLCCLEWVQEELQALPTIVEGFMSYASLVTCEGAMNALSREGCRHYEVFDQADEDFERDIYKVEDPIVKESAGALYDRMWGPHGREVVRERAETTRGQAAHGERVDDFGALNSALPDPESNPAAAVSEAALEPPLETAKVVPDAPAAAAAGGDFGPTHATATANFLAASTVDDGNKSDESASKFSEFGDSGSSFEWTEESSDEDLDYFAALDVAAAEALPHAADAEAVPGPSAGRRWRRAVAKRRVSEADDGRLRVSRAGRQELLSLPATVSSGEGEL

SEQ ID NO: 63174 - protein, 332 aa, Zea mays
  Coding DNA Sequence Number=SeqID_19799
  Homolog annotation: Hit_ID=A2WLC0; Match level="QueryCoverage=13%, HitCoverage=13%, E-value=3e-07, Identity=68%"; Hit description =Putative uncharacterized protein
  Pfam annotation: Domain name=DUF1639; Domain location=67-116; Score =78.6; E_value=2.1e-20; Accession=PF07797.5; Description=Protein of unknown function (DUF1639)
  Subcellular localization annotation: CTP_CleavageSite=46; ConfidenceScore=5.16e-01
MQSPTALAPFGQSRGGSLRRQRLAHQPWNLRTVAPTRQAGSDDATEAAERAPAPTPEVKKQASSVALSKQEIADDFTAIRGTRPPRWPKKRPRMVQQQLDLLYLGLWLADVAPGSYKIEEKATIGGVTIDGLLAAAARFSIGLAFVLIGFFTTQCAPDASTYPGGARFCLGSARPRPCVPKSRTARPRPYATTSSSPLTAPPPPPPPLPLTTSPPGSSPQPLQPPLCRPLDLVSHVRTTLAAHAAMGGKRSVDPPTLSSPQPLQPSPHPVVSPAPKTEGKRGRGGGGKGGGPGDAALAGVRFWILMAPCLHALAQETIIVKALKLNDVEEGC

SEQ ID NO: 63175 - protein, 147 aa, Zea mays
  Coding DNA Sequence Number=SeqID_19800
MADAGRAELTGKAHGAEREGARGATARRLAERAHEAEREEGSRGEATGADNAGIPRLTAIAAKSTQGPPYTDHSPTALAPIGYQDDSSDPRDLALVPPRPDQRSQFIFPPPTKQGHRRHDRAVEKNDRDTNRPPPSTTIKLNGATQS

SEQ ID NO: 63176 - protein, 233 aa, Zea mays
  Coding DNA Sequence Number=SeqID_19801
MGVQRLCGCLGHLDVIKYLSAIYFKHCVMVSNYVIAVYFYSYSCAYDVFCRWPVSGALHWSVHCVARCQWEATCLVRRPDDDLRGAEAFSQHYSITKRVTAEVAMQDAARWALFQYCSLFSGVADGLDLKYYPRRSTGSAGGVIVSPVGEGKPRLNNMVNLAVVLNTELDHALDELGKVWAVVAELRAECAARHYLDGGSPSPVGIQLPYRSPPRSRFDYGTPDCRTRIDLDP

SEQ ID NO: 63177 - protein, 142 aa, Zea mays
  Coding DNA Sequence Number=SeqID_19802
  Subcellular localization annotation: CTP_CleavageSite=35; ConfidenceScore=5.16e-01
MAVGALQKGCGAVVVRCKGGVGGGSVLQRGRGAVVVRMEAGTRARGTYGKTGSNSSSSVTGSYSFSEGSCAGGVLAASSLTSQDGAGIFFMVRGSNNSGGGSWENSGCSCLFVARGKTGIPYKTMAPSGSSQAFFSPLVETG

SEQ ID NO: 63178 - protein, 274 aa, Zea mays
  Coding DNA Sequence Number=SeqID_19803
  Subcellular localization annotation: CTP_CleavageSite=19; ConfidenceScore=5.27e-01
MPSSSSSAVATPPAGSSPPAAASSEETLSSLMAEELRAGDSVDFGVSRMSSARVEDMQRLGYFGGGVARAPGTEKVPEPEGELAVFEAFFAAGLRLPAHRVAEAAKAARALPSAGKRVADFATDICVEDYLGGSDEGQLVMVAPAAATAVAAAAPKAKGGALSAGGEVSALAVVMDEAGAATRRLKDVTEALSQVADFASRTASGALTAAVAAEVERLRTQHADAVHEKSAADSKCRKLADKVATLEGEKADLRRQLAGERRETNEALVKAQAA

SEQ ID NO: 63179 - protein, 231 aa, Zea mays
  Coding DNA Sequence Number=SeqID_19804
MSRTEAERTRQLLVDTYRGLGAGTCDFEVPDRESGLRCLEWVQEELQALPTVVEGFIAYASLVTCEGAMNALSREGCRHFEVFDQVEEDFERDIFKVEDPVVKESAGAIFDRLWGEHGREVVRERAETAKVQAARGERVDDFGALNSMLSDPEPAPAEAVPGPVLGPTPETAGDAPGASVAPEVAEGAPDASAAAAPSAVDPAAVAAEITAEATAEPTAEAPATSGPSQVA

SEQ ID NO: 63180 - protein, 133 aa, Zea mays
  Coding DNA Sequence Number=SeqID_19805
  Homolog annotation: Hit_ID=Q6QP51; Match level="QueryCoverage=69%, HitCoverage=40%, E-value=4e-16, Identity=51%"; Hit description =Putative growth-regulating factor 1
MAKPLTASTNQPKNSEPDHAPGLQSGRMREQPGRSDRSHFALSLTDLTGKQRRSPRSDCCATHQGEADNSQVQPQAQQEALPRPTSGLGLGRRSPPRPTPRARPQPLPRKVVSASPDPRARPQPRHGRNRVLA

SEQ ID NO: 63181 - protein, 70 aa, Zea mays
  Coding DNA Sequence Number=SeqID_19806
MCLSLLDLVSKEDERKKVDLDHARLPLHSDERLKILVRQWGSRAKIDPVLVLDAKGGENKAKAINGSATT

SEQ ID NO: 63182 - protein, 198 aa, Zea mays
  Coding DNA Sequence Number=SeqID_19807
  Subcellular localization annotation: CTP_CleavageSite=91; ConfidenceScore=5.18e-01
MDQRSMAARVIQTKGYDLLIAAVRYRIDGRGHSYARSNPRRSSTNGRTTNVFPTTVEQSGRARATVTATPLPARWNLNKGALTSNKTVLPVAELKANTGKGLIPRIELAGVQFTAKRGPRRRCNNGEKSTPLRSFHRPITPLYTIHTCFRTLGIASRALGEDTGDERRRRISQLEVGLDGSDPDTQLGKRRDGQSEVS

SEQ ID NO: 63183 - protein, 504 aa, Zea mays
  Coding DNA Sequence Number=SeqID_19808
  Gene Ontology: Mol. function=zinc ion binding; Cellular component =intracellular
  Homolog annotation: Hit_ID=A3BTQ6; Match level="QueryCoverage=47%, HitCoverage=32%, E-value=6e-62, Identity=54%"; Hit description =Putative uncharacterized protein
MPTSEQKGEERWDKVMRVLDRLDSRLEAMEMPNDCKQDVVPDAPWLFVVMSQQVSTYSISSEMGLTVAWDGEMQAKTHTHEGLLQQLAQGEEALKESAKKEGDVEDEASRPDPPSEATAMVINGGNSDEFIPASVVSVLEEDPKKEQDAENVDATSAGGILSQELAPESINETNGAGEIVGVDGVDDHEEEVVGSDILEAMTDEVDEEEGCFEGFSAIRIHDEDVNLKFLFYGVPCTLDACLLGTLKDGLNALLNIEICASKLQNRASAHPPLQAEDLSHGVPTMHCEITTCSSAHVAYLVYGSAQTCFGDQLLGSRIKNEIIEKRQLVCVLLNNEDIKPSSFEPWLSMGVACEASTFEVWITMQKWAAQVLKHLAPEISYRSLVALGIAWINGIPVSSFGRQDADQFIFFCSDQCGDQAILNGSFSHVSNWAAPFTKDSFMLVLYETCTGQEVRLECKNVLLFEGRQNKGSVRHGISELTQWWLNGFSPGNGAMAVQSQPYTQ

SEQ ID NO: 63184 - protein, 66 aa, Zea mays
  Coding DNA Sequence Number=SeqID_19809
MGHAGWGQNVVCWAGWQFGPNRANYKVGVTRDKQHTQDKKSQQHHAHKSQQELTTQLNEFTTQLEL

SEQ ID NO: 63185 - protein, 81 aa, Zea mays
  Coding DNA Sequence Number=SeqID_19810
MAVEVRWLDTSKLQYQGTAANDVGSHGFEEAAAGEERARFGDVATQGATNAGSGEGELLAWAPWTENRSCMGVAVPWGGEE

SEQ ID NO: 63186 - protein, 349 aa, Zea mays
  Coding DNA Sequence Number=SeqID_19811
  Subcellular localization annotation: CTP_CleavageSite=2; ConfidenceScore=5.42e-01
MSSSSLKRRVFPSSKPPDGGYPSPFRLLVGGMQLHGSWYLSAIVRLQGFSSGSLVAPFRRWPPKTVTSSSWMGRDRPGCGPTLSVGCVRHPRWGGGRGEPGLYLACGSANHLLFQLLVVAIVLPRCDGVVLQSCRGRRTVAVQLGRNIPSSPSHSGRGRQRGSTGALGGGPLFGFDGLFASLEWDREQEPSGDCVHPGPWLPLQRSSPRRPEVAHTPGDGTGVPFVMAPWMPASDRASALGSRLPEASGVTGLSRLLGPDSRRSPWTSAPPEAGSGFAVDVVDAEGAAAPFGVKTRACRIRSSCSVRFLRPPRPEEHALVALAKLRLFSSCFEHLDCVLSPVHEALSPI

SEQ ID NO: 63187 - protein, 16 aa, Zea mays
  Coding DNA Sequence Number=SeqID_19812
MAETNTEKITKEILEG

SEQ ID NO: 63188 - protein, 415 aa, Zea mays
  Coding DNA Sequence Number=SeqID_19813
  Gene Ontology: Mol. function=kinase activity
  Homolog annotation: Hit_ID=Q6QP54; Match level="QueryCoverage=10%, HitCoverage=15%, E-value=2e-09, Identity=79%"; Hit description =Putative kinase
MALPVDVAGPRPRPGDVGAPPKLGSNLSSVAEAESEPLGRARRKSFGRGQGGVRALGSGEAEFVVFRGRARVRARGSGGAEVVRQRPGRSPSPGVGRGGVRRLPGPSPSLSLGVGRSEVRRLPGLSPSPSPGSGGAEFAVFRPESEPWVGRSGVRRLPDLSPSPSPGVGRSGVRRLPGLSPSPSPGSGGAEFVVFRVLARVRALGSGGAEFAVAPLARPDCLSDSLCRVAPQSEWRRRRCPSVRLLYADGGYQLRIRRLEAPEPLHRARGRSGTDSTFYIRPYVAFPQGGGGECAMLPSMGTEHGVSGELQAGNPSGRPCPVRWGSARGPEARPKVPAGDFAGPGPLATGSEGSMPPSDGIPLQDRSRWSRKCPRVPRERSPNLGYVSNVPLVIPRSVSEATVNPSGASLRTPDQ

SEQ ID NO: 63189 - protein, 125 aa, Zea mays
  Coding DNA Sequence Number=SeqID_19814
  Subcellular localization annotation: CTP_CleavageSite=65; ConfidenceScore=5.02e-01
MAVGSVLSHGALDSPVRHRTLSGAPATSADHWGSTVGALTCGASGLSGGAPDKSCRLSALVLNVLAENLDALKCWWLGVFIAPTTKVAVGEGCCRRAHRRSLAQLAVAPLAHRTVRCYTGQSGEL

SEQ ID NO: 63190 - protein, 45 aa, Zea mays
  Coding DNA Sequence Number=SeqID_19815
MAGAPFSPRSSTSPWDPPSPPCSGIDMARDTTCRILLLFTGKVFL

SEQ ID NO: 63191 - protein, 135 aa, Zea mays
  Coding DNA Sequence Number=SeqID_19816
  Subcellular localization annotation: CTP_CleavageSite=61; ConfidenceScore=5.67e-01
MARARAYKAHSGVDHTLPRTLKPHRSSTHRRLPVRGVSTATRAPAAVDRPTQPFPTPSNPRRQVKKNRKDDLNNEPEGTPIFVKTLIQYCNLADGEYVLVPEQGAAQEVAPDPAQEPAPEDLPATALEGKPRFYA

SEQ ID NO: 63192 - protein, 208 aa, Zea mays
  Coding DNA Sequence Number=SeqID_19817
MDARCTVPYEDADAMVGTTRNLDDGARAAASLRQPYGQRKRVKETRQCKEKMVGTTMGGGIRTCVHQRRCVWVRTGGAPFGSRRRRRSVRGNPRLTARGFGRKPTQRRFASFWRPEAAQKLNQTATLSGRGRLWQGRGAWRGVQATGTWALATGHNALALLLGLRASVGLEKELEACEPARARSSSRASSEPNRARFSSLLRQRVESL

SEQ ID NO: 63193 - protein, 229 aa, Zea mays
  Coding DNA Sequence Number=SeqID_19818
MQVACNCTTEMHPFDFDASSMEAQAHSSCNWRASCYVRKTAPPLAPIPRLLDCGTGAATRGNPAHGPTVPTKRIGHGSVSRGRRRDGRYGQKWVGSNGGSRRTEAAVKSSAGSRPLLEQQGSPPPRCEDETPVPQTTRARTTAASQTTRPDALTSRQGRRHLWQVKRAAFHLRHDDRVKKGTGKGDTLKGILLREGSGPRALLLIRGSKAGPSEGFDSRPRALGLQAHY

SEQ ID NO: 63194 - protein, 165 aa, Zea mays
  Coding DNA Sequence Number=SeqID_19819
MYPPWRGRSEPKVERGGDSSEVEVEAEPWGQARRRPSSEVEVEAEPWGRARRRSSSEVEVEAEPWGRARRSPPSKAEAGAEPRGRARRSFLWRLRLDSAVVSLTLAGGTAVGAGQATLFSCQVSQWRGEVTAVTSALLTEEPCADGDYQLSLGVSRVPLIMVLDS

SEQ ID NO: 63195 - protein, 81 aa, Zea mays
  Coding DNA Sequence Number=SeqID_19820
MHISYSVYSLDCNLADGEYVLIPEQGAVHEEDQEQAPETTIEDLPAAPAFEGFLFEMDTSMLVSAFRPRGVPGPTRWMRLQ

SEQ ID NO: 63196 - protein, 157 aa, Zea mays
  Coding DNA Sequence Number=SeqID_19821
MHCRVSSAPLRACLTSARSGTHLMPLQRPSSEVEVEVEAEPWGRARGRPPSEAEAGAEPRGRARRSFLWRLRLDSAVVSLTLAGGTAVGAGQATLFSCQAILALNAPAIRSDGETIWSRLLHYEACPSWASGELRVPKVHKRPIKGPRKGFNKKSKG

SEQ ID NO: 63197 - protein, 354 aa, Zea mays
  Coding DNA Sequence Number=SeqID_19822
MGSARVAFVLLLLEERNFAEVGTFQPSLGFKDFHHSARLHPLTNGHAGGGEGAHRPSGGADFDNAGPIGRKRRQLQHAWFAGSAGSGAASGATSHCWAVCGYLPAIRAAIAPRAPGDHPRRRTPLGRRSCSWVVLPSLRHDASARRSVLARPGGLEWGSTGGQVAAVVGAEVVAAGEGFSADETVIATRGPTSGSLALIACPRPSSGDAGEGLVAAASALRSSLLLFSRPERRSLSLLMERAAASQLEFVVPNPRPLCDEPEPEAAVSAWTEAELAREEAPSTQEQLAEATEWPVKPSARAGFLEETLAVMAQARIAYLSESYLPQKVMSEESLGSVDLTAYVYSVVFRIPLSK

SEQ ID NO: 63198 - protein, 186 aa, Zea mays
  Coding DNA Sequence Number=SeqID_19823
  Subcellular localization annotation: CTP_CleavageSite=39; ConfidenceScore=5.09e-01
MAVAGGRAQRSRRQPGSRPILRQQESLLSRREDGAPVTRSSNESPARNGRPANHSPRRINSAAGHATPLVRHAVRFRILFRFPLSLSLATGTGEGGYPERDPSPRRNRAPSPPLLIRGSKAGPPRVQQPPQIAWARHPLLVRGSKANPSKGSMAASGYSGSAPITDQGFEGWPPKGSQSPQTPSEG

SEQ ID NO: 63199 - protein, 173 aa, Zea mays
  Coding DNA Sequence Number=SeqID_19824
  Homolog annotation: Hit_ID=A2X183; Match level="QueryCoverage=72%, HitCoverage=4%, E-value=2e-35, Identity=58%"; Hit description =Putative uncharacterized protein
  Subcellular localization annotation: CTP_CleavageSite=39; ConfidenceScore=5.01e-01
MNIVKGVADLLRKSTPASPGAGAGGGGGGGDRGGVGSPSADRLAAPPSPRVRFSDNGEEGVLNALWHKYESGIDKAEKKKTLQTFVMHFVKAFKDWEPGYIEQSIDHESLSDDTILGCSTGHPSEVILILIQEISQITSSITESQHSAPYNIAGLTDFKSGDQLVVTEDRPGA

SEQ ID NO: 63200 - protein, 460 aa, Zea mays
  Coding DNA Sequence Number=SeqID_19825
  Gene Ontology: Mol. function=transferase activity, transferring glycosyl groups; Cellular component=integral to membrane; Biological process=protein amino acid glycosylation
  Homolog annotation: Hit_ID=A2X194; Match level="QueryCoverage=96%, HitCoverage=96%, E-value=1e-180, Identity=73%"; Hit description =Putative uncharacterized protein
  Pfam annotation: Domain name=Galactosyl_T; Domain location=147-345; Score=232.8; E_value=7.6e-67; Accession=PF01762.12; Description =Galactosyltransferase
MSWRRGGSGGDGGVSRRWAVLLCVGSFCLGLLFTNRMWTLPEASEIARPNANVEEGTVPIAAECGSKKVQEKQDYRDILQVQDSHHDVQTLDKTIASLETELSAARSLQESLLNGSPVAEEYKVSESIGRRKYLMVIGINTAFSSRKRRDSIRYTWMPQGEKRKKLEEEKGIIIRFVIGHSAISGGIVDRAIEAEDRKHGDFMRIDHVEGYLALSGKTKTYFATAVSLWDADFYVKVDDDVHVNIATLGQILSKHALKPRVYIGCMKSGPVLSEKGVRYYEPEHWKFGESGNKYFRHATGQLYAVSKDLATYISINKHILHKYINEDVSLGSWFIGLDVEHIDDRRLCCGTPPGEFFHHFMPLTDKLKLVCSSFTRPRHLNCSSETWLWEPAAEQCQLFFMEPHLMTPLTTDCEWKAQAGNVCAASFDWRCSGICNSEGRIWEVHNKCAEGEKALWNATF

SEQ ID NO: 63201 - protein, 218 aa, Zea mays
  Coding DNA Sequence Number=SeqID_19826
  Subcellular localization annotation: CTP_CleavageSite=25; ConfidenceScore=5.14e-01
MGGLPAWLCVCDRTHAVPPVHRSRRASNVRAWKPPPPTACGGGRRAGKLLGGKPTTASDVTPPFSFCVRHRVHLAGDLRTKLDISLTSVDAVSKRIAEDLCDDVEALRQRGSGFRNPDHSPFVVDDEIEAPETNGHSRAPYDIVVDHPEPGEEDVENVQGPSLTHQLSVSRTNIDEYNCICVFCIWMVCSVGTRFVLVRVECPYFSVFGGLRYRHLLA

SEQ ID NO: 63202 - protein, 166 aa, Zea mays
  Coding DNA Sequence Number=SeqID_19827
MAPKRASSKVAPSVDEAAMAALLAEKKGKALVDTTHQEACEDDALSKRQRNEQPTPEGTLRTCSSGGQPQPPPGFAPLEGEDATEDGEVIGVSAEKQLQLRALRIKNRNLQKQKEILEAKRQRVSAQAKVHQMIRDEEQRAQELEQEIALMQREGQLDLQHGPPLQ

SEQ ID NO: 63203 - protein, 330 aa, Zea mays
  Coding DNA Sequence Number=SeqID_19828
  Gene Ontology: Mol. function=carbon-carbon lyase activity; Cellular component=mitochondrion; Biological process=aromatic compound metabolic process
  Homolog annotation: Hit_ID=A2Z3C9; Match level="QueryCoverage=58%, HitCoverage=43%, E-value=4e-69, Identity=57%"; Hit description =Putative uncharacterized protein
  Pfam annotation: Domain name=HpcH_HpaI; Domain location=102-273; Score=96.5; E_value=8.2e-26; Accession=PF03328.5; Description =HpcHHpaI aldolase family
  Subcellular localization annotation: CTP_CleavageSite=77; ConfidenceScore=5.14e-01
MQIIPGPTHAACMALRVACTATAFCRSRETHPRGRIPPNPSCGHQSTPRGHQSTPAPPPATFLQYRITDRLPCRGRRSSAAASDLLSPAPSLKSRLADGDTLYVLFLLSFSRTLAELAALAGYDYVVVDMEHGLGGIPEALACLRALDAARTPVVLCLPEASAVWAKKCRYPPRGVRGAAHPIVRASAYGFDDSYLSRCEDDTLVICQVETATAIAKIDANATVDGVDVVQMGPLDLSASMGYLKQNDPLEQLKLRGYHMVAGAVDIAMFRKATLDDVRLFREAVMEIDEEDDEDEKCEKENDEYWSDRILIKARDVARSSAQNSLSGKE

SEQ ID NO: 63204 - protein, 502 aa, Zea mays
  Coding DNA Sequence Number=SeqID_19829
MEVVELVPCARNKWGNWWDFWFYVSEGAVEDHLGLSMAVMCSHYYVAYPQFEVAEDDEDEGTLRCAARMSSGRDLVEEFIGYGVWPLGHGWVLGEVCPREMLSQGGQRVRSPAFALDLHGRDPAAFVRAAEDGAARIVGRYVPKTEGLRSWDIRGANDRLNRVFELNRLSYGGYPGEDAADRHGKNQWAPRGKDVFARALGVFGVDAGDPRREAKRAQGSAKAAASGSSQPMPAAKPTAPGLSKASAGAKTAASGGTKPPQGGSAKGRELPSPGRRVADFGTNISVEDYFVGSDEGQLVVVPPSAATTSPTAVVRARGATQDPWAAFCASGEILSAAAAKDVAGSMPQRLREASQQLKQAVDFADRVASGVLTADVAAEVERLRAQHADAIREKSAAESKNRRLAEKVAAMEAEKTDLRRQLAEERREANQAIAEAQAARAEAKVARAESSIISQRAEELEARFNALRSRVDKAETSTRSKVERTHAQFVNAYLRAPRGGGE

SEQ ID NO: 63205 - protein, 144 aa, Zea mays
  Coding DNA Sequence Number=SeqID_19830
MTCVGHRRPTAPPHQMTITDAGGGPLTSVMEPVRNCGRLNFGKLPCNNMTVGQPHLPLVQGEVRERRRKNYPRDRLPPLAPSNTRLSRRERTLPASSPAFGVGVEPIPIPTRNSIVFVAFGGIPARKQDQMTSCKHDYHVQCIL

SEQ ID NO: 63206 - protein, 266 aa, Zea mays
  Coding DNA Sequence Number=SeqID_19831
  Pfam annotation: Domain name=IQ; Domain location=143-163; Score=28.5; E_value=2.4e-05; Accession=PF00612.18; Description=IQ calmodulin -binding motif
MDCAACHLHHAVLATDVPISMGCAACHLRHVILATGVPISMGNIACQFCHHILDAGVPISKDNTKFCHIIFVDGVSVPWATPLGATTTRQSPAPPMGDLWTNIRTDLAKMQASLQKVEQGLLQIKAAVQHEQHQLALSARLQTSAAVGIQAAARGFLARRRVREMRRQMLEAALVTIKLGTRGCDLALSDGDQQRHQAAISKCEHGTCPVGDKLQLYGSGGKEGTPLVIGKGALFSATTFRYRPPRGRLCWLLYRAIGKLNAVIEK

SEQ ID NO: 63207 - protein, 652 aa, Zea mays
  Coding DNA Sequence Number=SeqID_19832
  Gene Ontology: Mol. function=microtubule motor activity; Cellular component=microtubule associated complex; Biological process =microtubule-based movement
  Homolog annotation: Hit_ID=A7PSE6; Match level="QueryCoverage=18%, HitCoverage=27%, E-value=2e-25, Identity=50%"; Hit description =Chromosome chr14 scaffold_27, whole genome shotgun sequence
  Pfam annotation: Domain name=Kinesin; Domain location=65-595; Score= -187.1; E_value=0.0069; Accession=PF00225.14; Description=Kinesin motor domain
MRGERSRSWHTCLPPMRGAARIVNGAAPSDSYVPAYAAQFDGFNLDHAAFLSNGANSDLMGSAFLKEREEANKCMPSQDKLVIDLDPPDDMETSFSESALHDVPGANYMEALTTCSTPGLTERAMDELIRMAQAGERLWVNSGGFARCSASTRTTTSSPSPATRSSAQTCTSTPGSARSGHLPSGCLIADMPDGSSKVTWVELEIEDRVSIHLLWSGQDRDVFGTFDADVTVDFLHAQELDIMCRAHQVVEDGYEYFPDRPFVTFFSAPNYRQLGCSFTIFKSKTDSSSSSPLGCSTKCPSQALHPIIKLNPVVVVNIAGAGGKFCGGFDINVFTMVHQIGGQGDVWGSLPVSYSSCLWALCDGCDGVVVRSGSVAAFGSKLRHTCVDGRTTHCYDCKLLTGETLESWRTRSPRKQPRKEYLEIPCAELCKHADCEVVNGEDIFEKKMRAFLDFYKDNLKCLIKHGEIQGNYISGATEISILNSSDALENLFPGIVNRAVGKTQTNLASSRNLCLYIFSVQYRSTSDKRVPSGKIILINLDGSVTIKKIGAEGRGLADAKAINNLEEIVLGLIASEARISGLGAASSGQGNFSVFLWDTGEFDNMYRLKGKPIFKKGGMLGNVVPNRKKKQSVIVKTREGRELRAPRGGVNR

SEQ ID NO: 63208 - protein, 232 aa, Zea mays
  Coding DNA Sequence Number=SeqID_19833
  Subcellular localization annotation: CTP_CleavageSite=51; ConfidenceScore=5.02e-01
MRNGISIQHQLSRSLMVAVSSSLTGSTHEDKVRSAWADAVAVGLLTRPVCRGRPRVARSHRIPKSPAPGQWPRRGRKKVEPPPEPTDTDRRFPRRPARCHRSSVADSRSQPAAERMDPCVFVSAASIACLGRAVSVIRTGHPRAVSTRVLSSSYLRRNRGVLRRLLLYARRYTAQRVRRVARHGLAWKRRMVFGEWWRTACEKREQQTVRWKGTSHSHRNRIRAGQGSDGRR

SEQ ID NO: 63209 - protein, 161 aa, Zea mays
  Coding DNA Sequence Number=SeqID_19834
  Subcellular localization annotation: CTP_CleavageSite=44; ConfidenceScore=5.29e-01
MASGQTVLLKGPHSRPLTGDENQPLKPKSRRPVAQVTLMVSPVEATTAAVGSLSSGNHHLSTDDSGHLPTNTAPASGGRPKAHRQVLTLVLAMRTRAGPFQNTSTALAAYDVLCDPPVQPATVVQVEDGQLHPVLAAAVRLPPHGWRTPPPQSWRMPFSPE

SEQ ID NO: 63210 - protein, 224 aa, Zea mays
  Coding DNA Sequence Number=SeqID_19835
  Homolog annotation: Hit_ID=Q6QP51; Match level="QueryCoverage=62%, HitCoverage=67%, E-value=3e-58, Identity=80%"; Hit description =Putative growth-regulating factor 1
MQEACNRTTVVHPFGFIAPGGDRERGYFERDPSRRRETGPPSPPTDQGFKGWPLGRPPQSTRAPRPLLIKGLKAGSPEGFDSRPRARRVRDDSGYVRYMAEARAALLSWQGRSDRSHFALPLTDLTGKQRRSPRSDCCASHPGKADNSKFSLGSNRKLRLARPWASASGGGLRLARPQDSASASASREITSSLEPGLGLRRSLRLARPWARTDRATGDTSLPYP

SEQ ID NO: 63211 - protein, 223 aa, Zea mays
  Coding DNA Sequence Number=SeqID_19836
  Homolog annotation: Hit_ID=Q6QP51; Match level="QueryCoverage=39%, HitCoverage=62%, E-value=9e-18, Identity=42%"; Hit description =Putative growth-regulating factor 1
MQEACNRTTVVHPFGFIAPGGDRERGYFERDPSRRRKRAPLALLLIRGSKPPQSTRAPRPLLIKGSKAGSPEGFDSRPRARRVRDDSGKADNSKFSLGSNRKLRLARPWASGGGLRLARPQDSASASASREITSSLEPGLGLRRTPYGSKETSAGSQHHRQLCFYGAQALLRRPPFENKSPTVDMIRILTIFKAGRLLNIDFLLDWSIEEGTFHVHLIELKAM

SEQ ID NO: 63212 - protein, 179 aa, Zea mays
  Coding DNA Sequence Number=SeqID_19837
  Subcellular localization annotation: CTP_CleavageSite=44; ConfidenceScore=5.29e-01
MASGQTVLLKGPHSRPLTGDENQPLKPKSRRPVAQVTLMVSPVEATTAAVGSLSSGNHHLSTDDSGHLPTNTAPASGGRPKAHRQVLTLVLAMRTRAGPFQNTSTALAAYDVLCDPPVQPATVVQQQFAFPAWLEDASSAELEDALLPRMTEEEAVRQPTRRQAPTRCTPLPSPDDEHP

SEQ ID NO: 63213 - protein, 262 aa, Zea mays
  Coding DNA Sequence Number=SeqID_19838
PCGPTTIQPAHQRFHCANPGRHAARVDDIGSCSSATVCVRASARKLGLVVPLPDTDRRDHAVSRSFFPVGGSEQSPSNSLAARPRNSAVESGRANGNSQGISMDLGRVVGAVLGIKSSPDAHRNLASVHVWCRDAEPSESRRRVGLAITQTVDRIYSPELYTASDPPACVCLVERIARQWLRRLELVRRRGTHPRYRSRFHQWVWELRLEAWMAHGASLDGIADRGNRDFTPRLVLRRGFRSHRGQDLIGVGHSTDGAAVEP

SEQ ID NO: 63214 - protein, 21 aa, Zea mays
  Coding DNA Sequence Number=SeqID_19839
MAGKRTGMGQFGLQMNFLRIK

SEQ ID NO: 63215 - protein, 161 aa, Zea mays
  Coding DNA Sequence Number=SeqID_19840
MKIADSESQILTPYVLSEWRRRRCFLYALYALRPFMMVGRARRPHPARQSPLRPTIDLVLGCSPCSSCSAARPARRLVGRARTARLYALLVGRARPARQSCSAARLYALRSIGDLVLGCSPCSSPRRSCSESRTARLCALLVGRARPARHSSVVSGAPALK

SEQ ID NO: 63216 - protein, 202 aa, Zea mays
  Coding DNA Sequence Number=SeqID_19841
  Gene Ontology: Mol. function=transferase activity; Cellular component= extracellular region
  Homolog annotation: Hit_ID=Q6F3A5; Match level="QueryCoverage=46%, HitCoverage=19%, E-value=2e-36, Identity=80%"; Hit description =Expressed protein
MYNAVRRFGKVRYDTLRLPHKVVAREADGSVKFGQGEGSAYLFDPDIYTDGRISVQGIDAVLFAPDDTKATQTADPNRKPPAIVTHKKKIKLRREAAAAAINQAGWPPATENSVRTMSVVRQQVAGRAPEPIRLGRRNLAQPNRDETARDTRASTAHRHAAAVPGWWPADGSRRRRHNPVTELGGRTGKTDRQTWLAHAHAT

SEQ ID NO: 63217 - protein, 1343 aa, Zea mays
  Coding DNA Sequence Number=SeqID_19842
  Homolog annotation: Hit_ID=A2XMQ3; Match level="QueryCoverage=54%, HitCoverage=99%, E-value=1e-151, Identity=46%"; Hit description =Putative uncharacterized protein
MYPSPYDGSGAGGKIRRRPHLRAASTPYERPPAAAAAHRLAAAAAAASASSEPGGERGGGGGGWVSRLVDPASRLIAGGAARLFGSVFRKRLAPPPAPSPPLSSPPGRNNEPKQGLPDSTHVDSLPIPEGGMEKGKSIVDTSDVKAMSEVEHLLMRKTFTKVEFDRLTDLLRARTIESDPPKPIVSREEKNEESIKVDGIRGSALRHMDLDDSPAVKCCCSLSAGYTPYLWPSSATTLPEGVHNHGASSPAELAKQYMSSRYLREPQSSSLRSRLFLENKGEASNTVNDRRSVPPIVQTPLELRNENPGLPVNGYVTSGLRGRSAIYRMSRSPYFKGQNYSSDLNTSSLSQRSQSLHVGGRQVLKRSGAELENELGSIGPIRRIRQKSNMMSSFRDSRANPKGNLLTSHISSTDFTEDGASIQSPSSKKLLVGSSQSLRPLESQKNEGDGKSSDSIPPIPAQSNKMAEKIFEQLNIIAPSPKQQQSVTLNASNSMSKKPVFQDAGSSSMYNQSSSLKFQDLDGANGPHDTNLNGSLLKKDKLNIIKDGSPKAAFSDRPALLGNSVSASKSWTPAFKMAVIEDLPELDDDLEVLIQSSKIEVETTEQKIDSNRKEQKVEQNILEQRVEPNLKNIAGSTISEQPVASLSKTVTSSGGLFLSNDPGKAVPKASVDNNTEFAFSNGPPGTRPATGVSAMPLASVNNDKQTGASNFIFGIKQPITSDFETSTAKNKSTLGQSVTKPTTLASTSSERGDKTEKAEDVANPSEKVLPSAASTTLNAPLHFTSVASTSSLSNGLSYSPPKLTTPPPTDKPAISSAVSTSIFAVSSSSPAISSSPAFTGFSFSSSAPVGLSLVTSAKSDGTTAENKAASTLSFGIGGTKAEVKSVAPDASSKASSELFISPVSSSIASFSSSPATSTPTFTAVAPSSDAAGISVAAPSSTSTAPGLQSASTPSFTFPSSGNNLFGFSSPAQSTGLSTSSLAGSTSQPPAASTLFGSKPTQSDGTIQQTSQSSKPQSGSPFPVMTPGVGASSSGPGTLSFGLGASSTGSGTASFGVGASSSAPGTLSTFGAAAHSSGPGVFSFGAGTSSSGPSTASFGAATSTSGTGFGNSPFGTGATFANPFSSSSSTGFTFSSPSSSAGASTAASTSVFASTSTASSASAFSNPFGSSSSPPSTFTFGQSGSSGNTFAFGAQPAPTFPSQPSLFSFSSANTSMNSSPQPAFGMINTNTAFSMASPGNDQMNEDSMADDTSQAAPAPAPVFGSSFGQQNNSSAAPVFGAPAVQPGGVFQFGGQQGSAQQNPSFPAVGSLEFQGGNFSLGSGGGGGDKSNRRVIKVKRTPKKR

SEQ ID NO: 63218 - protein, 197 aa, Zea mays
  Coding DNA Sequence Number=SeqID_19843
  Homolog annotation: Hit_ID=Q10RW7; Match level="QueryCoverage=68%, HitCoverage=14%, E-value=9e-34, Identity=60%"; Hit description =Expressed protein
PVGGPRGCRRPVAAAEAVLAAPTFSSWLAAVSGVVDFQGIKNDQPLRIERWSQRQGSPVRGTQSERKEYAGSKAHDLCRQLTGSTRRSSSDRSGGTPMKMLIAQEMAKEGDANQKTTNVVARLMGLDDNVDLAKPVVPPNRRSFPDGHLSATLARVNNQIPFEKHTSSAEDVVYKDVYEVGYQPPRAPPPPRTPPPE

SEQ ID NO: 63219 - protein, 134 aa, Zea mays
  Coding DNA Sequence Number=SeqID_19844
  Subcellular localization annotation: CTP_CleavageSite=36; ConfidenceScore=5.43e-01
MVYFQGGHPPFKGDYLYLRPQPSRAESSPTRSKALPCGAGAGSHMSCKPAQSRRSQTAMRGTGKGGYPEKDPSPEGTRLRASLLIRGSKADPPKGSTTASDRVGPTPTTGQRFEGRPPEGFHGRLRLLGLRAHY

SEQ ID NO: 63220 - protein, 69 aa, Zea mays
  Coding DNA Sequence Number=SeqID_19845
MEPGGGTAVGAVESLLTSSCFRKGAESRRRHRVGRCGGSSEAEVESVFHGRGRVRALGSGEAEFVVFWG

SEQ ID NO: 63221 - protein, 117 aa, Zea mays
  Coding DNA Sequence Number=SeqID_19846
MTEAQAGAMFYGDGGGFLTFRFNSDDAGASGLALPKVSPGCQLRQPDEDAESKVSAEWGASDGLPLHLAKLNMFVFKSYGLVQKLLERWEAAASKRQPQHQSQSVEDSEEDSSTVLD

SEQ ID NO: 63222 - protein, 210 aa, Zea mays
  Coding DNA Sequence Number=SeqID_19847
MKTLPKSRGSLDQNEVSYLGQFVHSHLYGIIPLRGARQPNNEIHIDFFPLPFRCIRFNTNQERKSVRDSIKDRSKTLSVLIFGAPNSVWSGAPGRTADEPATLKNLDARSAIIHWTVWCATGLFDEPAEQRLSARQWSSAAMNSACQKSERRSQRAPDCPVQLEDKRLQRSTAPNPNSCADVACTGQCTVVVRWRTGLSRAPSPTALTNG

SEQ ID NO: 63223 - protein, 375 aa, Zea mays
  Coding DNA Sequence Number=SeqID_19848
  Gene Ontology: Mol. function=aminoacyl-tRNA ligase activity; Cellular component=cytoplasm; Biological process=cysteinyl-tRNA aminoacylation
  Homolog annotation: Hit_ID=Q10RX2; Match level="QueryCoverage=39%, HitCoverage=59%, E-value=7e-17, Identity=54%"; Hit description =Cysteinyl-tRNA synthetase, putative, expressed
MENGNDYAIEGDVYFSVDSFPEYLLLSGRKLDQNRVGERIIQESDLRPHVTVTWFSGMVKAEEQNLVNRHHKAFLDSMSDDLKTTEVLDGEDGFTDLLKAINSNLNDLKKLQQKLKQQQQTQKQPEDYVQGLIALETEIKDKLSLLGLEVLKPPWPRDSLTADVYEAGERPCHSRPHEPSPTAISRQWSSRGMITSLVEERSEPGCGLPPALSFKDVHHPRWGGGRAELGSRLPHGLAAHFFLQHSGEKGFRQPCEGGELRVRGAGRLQAPPAAACPVPRLGWLRRRLRRCLRCCLLLLGRGMDVRPPHGRRSRRAQVRHIHGFSRTVGRTGGSYKTLYVVGGVSKVAAAVGAKVVASAGEPLGASYLAALLVWR

SEQ ID NO: 63224 - protein, 180 aa, Zea mays
  Coding DNA Sequence Number=SeqID_19849
  Homolog annotation: Hit_ID=Q6QP51; Match level="QueryCoverage=30%, HitCoverage=25%, E-value=3e-10, Identity=58%"; Hit description =Putative growth-regulating factor 1
MQAACNRTKGAHPFDFDASSMEAQAHTSCNRRAGCYVQETAPPLAPLPCLLDCGTSTATRGNPAHDPTVPTRHIGHGPVSRGRRRDGRYDQKWAGSNGSGRRAEAVIPGKGIPRKGSFSAKETGPEPPTDQRFEGWPLRRVQQPPRSTRAPCPLLVRGLKVGPSKGFNGGLRPLGLHAHY

SEQ ID NO: 63225 - protein, 1021 aa, Zea mays
  Coding DNA Sequence Number=SeqID_19850
  Gene Ontology: Mol. function=ATPase activity, coupled to transmembrane movement of substances; Cellular component=integral to membrane; Biological process=transport
  Homolog annotation: Hit_ID=A7KVC2; Match level="QueryCoverage=99%, HitCoverage=68%, E-value=0.0, Identity=83%"; Hit description=Low phytic acid 1
  Pfam annotation: Domain name=ABC_membrane; Domain location=311-583; Score=101.8; E_value=2.1e-27; Accession=PF00664.14; Description=ABC transporter transmembrane region
  Pfam annotation: Domain name=ABC_tran; Domain location=657-812; Score= 61.8; E_value=2.4e-15; Accession=PF00005.18; Description=ABC transporter
  Pfam annotation: Domain name=MMR_HSR1; Domain location=658-821; Score= -21.5; E_value=0.098; Accession=PF01926.14; Description=GTPase of unknown function
  Pfam module annotation: Pfam domain module=ABC_membrane::ABC _tran::MMR_HSR1; Domain location=311-583::657-812::658-821
  Subcellular localization annotation: CTP_CleavageSite=68; ConfidenceScore=5.02e-01
MPPSFPSLPLPEAVAATAHAALLALAALLLLLRAARALASRCASCLKAPRRRGGPAVVVGDGAGGALAAATAGAWHRAVLASCAYALLSQVAVLSYEVAVAGSRVSARALLLPAVQAVSWAALLALALQARAVGWARFPALVRLWWVVSFALCVVIAYDDSRRLIGQGARAVDYAHMVANFASVPALGFLCLVGVMGSTGLELEFTEDGNGLHEPLLLGRQRREAEEELGCLRVTPYADAGILSLATLSWLSPLLSVGAQRPLELADIPLLAHKDRAKSCYKAMSAHYERQRLEYPGREPSLTWAILKSFWREAAVNGTFAAVNTIVSYVGPYLISYFVDYLSGNIAFPHEGYILASIFFVAKLLETLTARQWYLGVDIMGIHVKSGLTAMVYRKGLRLSNASRQSHTSGEIVNYMAVDVQRVGDYAWYFHDIWMLPLQIILALAILYKNVGIAMVSTLVATVLSIAASVPVAKLQEHYQDKLMASKDERMRKTSECLKNMRILKLQAWEDRYRLQLEEMRNVECRWLRWALYSQAAVTFVFWSSPIFVAVITFGTCILLGGQLTAGGVLSALATFRILQEPLRNFPDLISMMAQTRVSLDRLSHFLQQEELPDDATINVPQSSTDKAVDIKDGAFSWNPYTLTPTLSDIHLSVVRGMRVAVCGVIGSGKSSLLSSILGEIPKLCGHVRISGTAAYVPQTAWIQSGNIEENILFGSQMDRQRYKRVIAACCLKKDLELLQSETKSSALLEHSTKDADIYLLDDPFSAVDAHTGSELFKEYILTALATKTVIYVTHQVEFLPAADLILVLKDGHITQAGKYDDLLQAGTDFNALVSAHKEAIETMDIFEDSDSDTVSSIPNKRLTPSISNIDNLKNKMCENGQPSNTRGIKEKKKKEERKKKRTVQEEERERGKVSSKVYLSYMGEAYKGTLIPLIILAQTMFQVLQIASNWWMAWANPQTEGDAPKTDSVVLLVVYMSLAFGSSLFVFMRSLLVATFGLAAAQKLFIKMLRCVFLFSNVIL

SEQ ID NO: 63226 - protein, 216 aa, Zea mays
  Coding DNA Sequence Number=SeqID_19851
MPESQQKDAAPASPSPSRRARARERERRDADNTTEQANKRGKRRAAAADHRTASRQIERRGGRSAATWHMHARRLRGVGCPGGEAARSGSAAAAPDGMGGGNLAWPPMVYRGGAPRRREKTRRLGCSVVAALCLLLGCSVLAARCSTTRRSSVLAARRSAPCARQLVARCSVALHHILRTPGGWRKLGQRLVEVDACSPAPQTSRLGFGRELGLGG

SEQ ID NO: 63227 - protein, 125 aa, Zea mays
  Coding DNA Sequence Number=SeqID_19852
  Gene Ontology: Mol. function=carboxyl- or carbamoyltransferase activity; Cellular component=ornithine carbamoyltransferase complex; Biological process=amino acid metabolic process
  Homolog annotation: Hit_ID=Q8SA97; Match level="QueryCoverage=76%, HitCoverage=21%, E-value=2e-13, Identity=43%"; Hit description =Ornithine carbamoyltransferase
MAPPVDVAGLRPRLGDVEAPPKPRSSLSSMAEAESEPWGWAKRSSSPSGAEPESEPWVGRSGVHHLPGLSPSSSPGSGGAEFAVFRDLARVRALGRGGAEFAVFRDLARVRALGQAERSSPSSGT

SEQ ID NO: 63228 - protein, 101 aa, Zea mays
  Coding DNA Sequence Number=SeqID_19853
MGVGRSMPSRDALPGWVESAKSTFSLDVRGRDPTVVVREAEDGVVRIVGRYVPKTEALQSWDIRGSNDCLNRVFELNRLPYGGYPGEDIVDRRGKKTSGCD

SEQ ID NO: 63229 - protein, 632 aa, Zea mays
  Coding DNA Sequence Number=SeqID_19854
MELMGTCVAPGGRMSSPELRESSARMLEVTGGRWPKNVPIPRATGEDFFTSRMARDLRVFPYGRNIAVVVSAVMNKDRQDAAQKRRAVVRMVDPVREAKRARSSAKAAASGSSKPVPAAKPAAPGASKASTGEKAAAAGGTKPLPGGPSPAKLPPPGKRVADFGTHISVEDYLGGKDFFDRRHVAGSGEGQLVVVPPSVTATSPSAVVKAKGVAQDSWAAFCASGEILTAAAARDVAGTMSQRLREVSQQLSQQLTQQLTQAADFADRVASGVLTADVVDEVENLRAQHEDAVRDKSAAESKNRRLAEKVASLEAEKTDLRRRLAEERREANQAVAEAQAAQAKAKVALAKGSLASQRAEEWEARFNALRSRVDRSRPWYAKKSCGRTRSSRKHTAIWGFMSYASLVTCEGAMNALSREGFKHYEVFDQSNENFEREIFKVKDPVVKDSAGALFDRMWGPHGREAVRERSDWAREQMARAEDVEDLGDLNGARPEAEVNPVPPEAEVNPALPSEAGEGSSSAPVSTVSGEGSLPAPVPTEDPPKAMAEPAAEDPMAAAGPSQVQDFGPAHATATDTANFVAASTVVAENESDDFVSKFFESDDSGSSVVWTEESSDEDLDYFAALDVAVAEA

SEQ ID NO: 63230 - protein, 128 aa, Zea mays
  Coding DNA Sequence Number=SeqID_19855
MAPGQYNFPLCPNPDLEYPNPLTETHAGLSAPDFLPIRRDCSPEHPLARPGPPPSSARPWSRSHDRSSTVVFVGFSPTTLACLDNPRPPRSLARLASGDCATEGASAAAPWPVGTVKPPGRLILASYP

SEQ ID NO: 63231 - protein, 963 aa, Zea mays
  Coding DNA Sequence Number=SeqID_19856
  Gene Ontology: Mol. function=carbohydrate binding; Cellular component= cellulose and pectin-containing cell wall
  Homolog annotation: Hit_ID=A7Q0P8; Match level="QueryCoverage=96%, HitCoverage=76%, E-value=0.0, Identity=49%"; Hit description =Chromosome chr7 scaffold_42, whole genome shotgun sequence
  Pfam annotation: Domain name=Cna_B; Domain location=151-209; Score =9.7; E_value=0.083; Accession=PF05738.4; Description=Cna protein B -type domain
MDPRRLPILLSLLLAFFSAVVASDEIHGCGGVVEVDVPHVALSPCTASSGLAKSRKASDSKLDYSDITVELCTVDGLVKESTQCAPNGYYFIPVYDKTIRLLVIVIKVPVIIDHNGCNGNADINFQFTGFMISGKVVGAVGGKSCSKRGGPAGVKIELMTDSDELIASALTSSSGEYSFTNIIPGRYILRASHPDYEIELRGSPEIDLRFGNAVADDVFFVSGYDIYGTVVAQGNPIVGVHLYLYSNDVTKVPCPQGFSDAPKEGALCHAISGADGKFTFRSLPCGSYELLPYYKGENTVFDISPSSLSVSVEHSHLTIPQKFQVTGFSVGGRVIDGYGAGVESANVIVDGQLRAITDSLGYYRLDQKFAYKNMGYNFAYGNTGYTMWSEQWVGNNVKTEYTVFEYESDWLPALEAIQVTSKKYTITAEKDHYKFNRLEDFMILPNLASIDDIRSVRYDVCGIVRTVTLNSKAMVTLTHGPENVKPQRKLVGENGHFCFEVPAGEYQLSALPVDSERSSSLMFSPGSISVNVNSPLLDLEFSQSQVNVHGKVSCKQQCSQNILVSLVRLAGGVEQEKKTTTLEQDNVNFVFKKVFPGKYRVEVKNSLPEGLAKDDWCWDQSILNIDVGTDDKGSQRICVETSGQHEIHLTNPCISFGTSSVLFDTANLMPIHINAKKYLVKGEIHVDMSSIQENIDSKDIVVDILKSDGSFIEKISTSLVLGKDNQNDFTAFEYSIWADLGEDFIFVPHDSSIGRNKVLFYPARQQYSVSMNGCQDTVPLITARTGLYLEGSVLPATSDVDIKILAAGKSNYAHLNKGDVATEAKTDSEGSFFAGPLYDDIVYKVEASKDGYHLKQTGPYTFSCQKLGQILVRIYGENSELLPSVLLSLSGEKGYRNNSISSSGGTFTFDNLFPGSFYLRPLLKEYKFNPSAVAIDLNSGESREAEFRATRVAYRFSSLSIYE

SEQ ID NO: 63232 - protein, 69 aa, Zea mays
  Coding DNA Sequence Number=SeqID_19857
MSEMYTCMDGGAPARSSYERNKIEFVAVQALDLRLWVVTRVDPKTLNPDAERLGQRRWTMEAKGLEVGS

SEQ ID NO: 63233 - protein, 102 aa, Zea mays
  Coding DNA Sequence Number=SeqID_19858
MATLPTLNNIDLAVQQVRGDPTEGSGFVVSKGGLGRWYGPSSLAKGKEPASSSSTPVWYLRTRIRKGEAQKIRRLTQRRSCEAGKLRHVRRKGNRLKDEKAI

SEQ ID NO: 63234 - protein, 243 aa, Zea mays
  Coding DNA Sequence Number=SeqID_19859
MSNVTCSLRALGATPKERGSSILPTRKVPLPPKPYSGLSEGLSKLWLMPMRSKAWRKMISAWLPLSTKTLCRSQPATLQLVTMASMWGALRSLLALGLGGGGCFAVAGVEVGVGEVQFVPPGGVGMRGEGARSLRRGTSSRICAAAAHVPGLDHEFRFRGPGGILLAARGLTSGVLVGDVVYLLLTAAVSTGVCLRRPRPRTAGLRRVFRFPLRLDFCAGGALRIRCIFRIADTAPGGSRADL

SEQ ID NO: 63235 - protein, 52 aa, Zea mays
  Coding DNA Sequence Number=SeqID_19860
MVDKVQTKDKGKIQLEMSWLEQPRMVHRTVSGAPGWLERTGRSREFTGDVRL

SEQ ID NO: 63236 - protein, 55 aa, Zea mays
  Coding DNA Sequence Number=SeqID_19861
MARLGHAVANGEGTAAVSTLPRAGKASIRVYCKYKHTLVGILLGMPRGGNIPATV

SEQ ID NO: 63237 - protein, 120 aa, Zea mays
  Coding DNA Sequence Number=SeqID_19862
MAHYIPADGIHWDFHNMHELEEEEVAEAWDDHGGCKASHIIMKCLGLTSVHSLINSMTVPHSKKPRYVVGQTHKQTSTLTHALTSSSIATIHRTRGGSSTRGGLMERRLRWWLIRGCRTS

SEQ ID NO: 63238 - protein, 48 aa, Zea mays
  Coding DNA Sequence Number=SeqID_19863
MAMCHVDERQRSNGALDGAPPDSPVCHQTEGKNCLPNGFPTALAALGL

SEQ ID NO: 63239 - protein, 452 aa, Zea mays
  Coding DNA Sequence Number=SeqID_19864
  Gene Ontology: Mol. function=unfolded protein binding; Cellular component=endoplasmic reticulum lumen; Biological process=protein folding
  Homolog annotation: Hit_ID=Q5Z9N8; Match level="QueryCoverage=28%, HitCoverage=19%, E-value=2e-51, Identity=73%"; Hit description=Heat shock protein 90
  Pfam annotation: Domain name=ERp29; Domain location=191-258; Score= -2.5; E_value=0.00092; Accession=PF07749.3; Description=Endoplasmic reticulum protein ERp29, C-t
  Pfam annotation: Domain name=KOW; Domain location=411-445; Score =21.0; E_value=0.0044; Accession=PF00467.20; Description=KOW motif
  Pfam module annotation: Pfam domain module=ERp29::KOW; Domain location=191-258::411-445
MSSERADEKTGRDEKEVLKAIEYVHELLDKEVAAEMSPTDILVSGMSQGGALAKASVLLYPKTLGSCAVFSVSVPLSKAFAQKVSSEARKAVELKAFIIALAEDILTIAKQTESAQNVVGLSPLGYSARVQSESCGREWMIFHIPIGLSLVLEFKLGGVKMENVYKATVGAIAQNGYYVAYDGWGNREEDGLVPSLNPLVKEFLNAADDKRKEVLSKIEEDVAKLSAKKLQVNAEESSHDLANPPKVEEKLGVVPHGLSTDSEVAQREAESISRKTLRSSAEKFEFQAEALDKIRFLSLTDKEVLGEGDTAKLEIQIKLDKEKKILSIPDRGIGMTKEDLIKNLGTIAKSGTSVQEQELLESLVKADTRRQERAKKMEEKKVYLQLYEAMEALVKIDLETNKIMDFIKFDVGNVVMVTGRRNTGRVGVIKNREKHKGSFETIHVLLGAFCYV

SEQ ID NO: 63240 - protein, 268 aa, Zea mays
  Coding DNA Sequence Number=SeqID_19865
  Subcellular localization annotation: CTP_CleavageSite=44; ConfidenceScore=5.06e-01
MGTNGHLDLDTGGKSVDQKVYKVHTQPIKRPSFGFNKGAKGQPKAPLVWRTGLSGVPPDSEQNLSGAPGDSDSNSSLSGILGSRRAIIHRTVRCAPDMSGAPRKRGLRNSPASVSRGSRSAKIHRTVRCAPDCPVYQRSNGSFRRQRLLAVHLMRAQRAQTSDMPIPVHRTSNSTCPVCTGHPGGPRSQKLQRSESNGSDDVAGAPDCPVCTGLSGAPSSRRLQPTVMFGGHTDLNKGDSDYAGCKVYRKSTSGMCQFLMKVPGVVEL

SEQ ID NO: 63241 - protein, 350 aa, Zea mays
  Coding DNA Sequence Number=SeqID_19866
  Subcellular localization annotation: CTP_CleavageSite=31; ConfidenceScore=5.12e-01
MPPRDSPRCLPPPAPRNRKLKMLLWSQLKIQMMTSRTLILKKTTPSSKTGRVDFGKSTIKGLPYLLHTNSGDDEVVELPILEETPLASIAYDTKESLTSEFFLSSVKEDERLTPVMSVFFVDDEDDDNEDKAEATATTATTEKDNVLSPVAVVANDTMKVPMAPPIVIQSLAEVAKTKVESAGPALVDEKGKGAAEIEEESIEGDMSMGECPFDQEFGGWRYRVYHSARKAIGVKQMVEALDFVEQLGLLDCSMTQLYFYFAGANLEQGSKEPEEYRGGSCPKGNYEASKKTLNIIEKDFTESRSEVQKLTEEKKEDIKPKGTMSDKISELEALNSHRFKCLAALEAEMK

SEQ ID NO: 63242 - protein, 145 aa, Zea mays
  Coding DNA Sequence Number=SeqID_19867
MMVPVGHPKFLAQDMQQWDRREASEARTINGMGLYETKSKGAKENKKEKGKSVLDCIAPDSLVHGPANCLLSKILAATSAEGQQSTGASDSLVPPPDGPVPPITGNQPITRFSVRTLFTVWCSHGQKATKAYQMELQQLLGYLGL

SEQ ID NO: 63243 - protein, 252 aa, Zea mays
  Coding DNA Sequence Number=SeqID_19868
  Gene Ontology: Mol. function=protein dimerization activity; Cellular component=nucleus; Biological process=regulation of transcription, DNA-dependent
  Homolog annotation: Hit_ID=A1E240; Match level="QueryCoverage=71%, HitCoverage=88%, E-value=1e-56, Identity=67%"; Hit description =Delayed flowering1
  Pfam annotation: Domain name=bZIP_1; Domain location=130-196; Score =54.2; E_value=4.6e-13; Accession=PF00170.12; Description=bZIP transcription factor
  Pfam annotation: Domain name=bZIP_2; Domain location=130-184; Score =37.4; E_value=5.1e-08; Accession=PF07716.6; Description=Basic region leucine zipper
  Pfam module annotation: Pfam domain module=bZIP_1::bZIP_2; Domain location=130-196::130-184
  Subcellular localization annotation: CTP_CleavageSite=61; ConfidenceScore=5.38e-01
MEDDEDIWANTASSPSASPPQPVAAGSVSTCSAFISTQLSLNSRLHLLSSAAAGGGSSPVRGGAYGADGVRHHHMALGGGFRNAAASQGSFFPYNLAGAGADVAPFDGGRGVLEDDMSVGAAASGTWAGGGTDRRKKRMIKNRESAARSRARKQAYVRELETKVQLLQQENESLRVKYDEDPKVDSMFTNKQEEVKGDSGNKQGKEDEEWFGDVSGDDEEDVGCSDHELHGKDEEGSSSDEEYKPPEDDSST

SEQ ID NO: 63244 - protein, 104 aa, Zea mays
  Coding DNA Sequence Number=SeqID_19869
MEEGQPWWDKPGRLVEEEIPVEEQRQGRSRCWAPWIWRRGAAGALLCRGKERSRSYKVKQEQAQKIMANAAVAGCLTGFLTATAAEGRGGVVDERRDGAVMGQK

SEQ ID NO: 63245 - protein, 85 aa, Zea mays
  Coding DNA Sequence Number=SeqID_19870
  Subcellular localization annotation: CTP_CleavageSite=54; ConfidenceScore=5.25e-01
MAAAAPAISLVADLAPAPATAPPSALLLQALSPSHGTRRNPMIWGKTKSKHNPRQSLDEKSKPKPSAFSWVPEGFYVGKLLDEMF

SEQ ID NO: 63246 - protein, 434 aa, Zea mays
  Coding DNA Sequence Number=SeqID_19871
  Gene Ontology: Cellular component=integral to membrane; Biological process=molting cycle, collagen and cuticulin-based cuticle
  Homolog annotation: Hit_ID=Q6Z750; Match level="QueryCoverage=24%, HitCoverage=19%, E-value=3e-50, Identity=96%"; Hit description =Ankyrin-like protein
  Pfam annotation: Domain name=Ank; Domain location=151-184; Score =18.3; E_value=0.03; Accession=PF00023.21; Description=Ankyrin repeat
  Pfam annotation: Domain name=Ank; Domain location=185-215; Score =29.6; E_value=1.2e-05; Accession=PF00023.21; Description=Ankyrin repeat
  Pfam annotation: Domain name=Complex1_LYR; Domain location=9-75; Score=46.1; E_value=1.3e-10; Accession=PF05347.6; Description =Complex 1 protein (LYR family)
  Pfam module annotation: Pfam domain module=Ank::Ank::Complex1_LYR; Domain location=151-184::185-215::9-75
MASRPKLSGIQKQVLALYRGFLRTARLKAPEERRRIESVILAEFRDNARSVDRRNFVHIEYLLRRGKKQLEQLKNPDITGLATLVSSNICMWKYEGFLISLLKQQEKKEDKSDKTEDEKRGCDLYIVKDHLDVVNAILDTDDSCIRIVRKNGKTSLHTAARIGYHRIVKALIERDPGIVPIKDRKGQTALHMAVKGKNTDVVEELLMADVSILNVRDKKGNTALHIATWKWENFGIMKHRRRGFDETEASIPDSEQKSGNTFHFHCHWLPESGNKIWEQNLGTQKSGNKICLWLPEFIAPISFAVHFTVHSLNTKSWEQTHFPSEQVAQFSSQNLGAQFSSQNLGAINRLNSFDYWCFYFICSNDKPPALARTRVVVAAPPPPALARGREQQGRRRGVWREGGAAPPPPALARDHGQQISGQQGRRLAGEGNGD

SEQ ID NO: 63247 - protein, 297 aa, Zea mays
  Coding DNA Sequence Number=SeqID_19872
  Subcellular localization annotation: CTP_CleavageSite=51; ConfidenceScore=5.17e-01
MSLRSLMHRAFPPSKPPDGGYPQAFHLVAGGTQLCGSWYLSAIVQLQGFSSCSPVAPLRRRSPKTVTSSPWMGRGKPGCDPDPALSFKDVHHPCWGRERGEPGLYLPRGPAGHLFFQLLVVATILQLCGGGVLQPCWGRRTVAAQLGCNIPPSSSLSWRGRERGAAVKGTPRPLFDEPRPGVAVSAWTEAELARKEDLVGRSLAGSSASGTDAGVDLPRSRAGLMSSGDNWPRPRGDQPRRLPEPDSRRRPWRRWPGCGDDAVLRSRDPWTASPSEARSDLAEGVVDAEGAAAPSTV

SEQ ID NO: 63248 - protein, 370 aa, Zea mays
  Coding DNA Sequence Number=SeqID_19873
MGTFDTQPRLGLRSQGTLGHFRDQRERSCNGIPSEGGIEPSDPVDRGPGPADHPQRLGGCSRKPGFGQTVDSVNIPARELGTRPYTRATASSHQGTTRPAKELREALRPRRSQTTPPRPRGLHLAGALTRTHRNKTQPRKAGLLAKKCDESLQASANTPFEARGLLSGTIIRGTLNAPNSQLVTPISIKLQRPDGRHRKLRSARPRARTRAKPRKTATSAPTDPGLGLGLSPGKTANSAPPDPGLGLGLSPGRRRTPLRPTQGSDLGSALEDDELRFARPQGSDSALASADGLRLARPRGPDSTTATEDRLNLDLGGGSTSPQPRARASHIKQEAPSLPYPKLTQATRNKTGVTSGSLRQEDNDGAPHTP

SEQ ID NO: 63249 - protein, 229 aa, Zea mays
  Coding DNA Sequence Number=SeqID_19874
  Homolog annotation: Hit_ID=A2YPN2; Match level="QueryCoverage=52%, HitCoverage=12%, E-value=2e-10, Identity=31%"; Hit description =Putative uncharacterized protein
  Pfam annotation: Domain name=FAR1; Domain location=131-208; Score =39.7; E_value=5.2e-09; Accession=PF03101.6; Description=FAR1 family
MAPPSLPHLESPRCSSPNSLAIVVAGGVDPILPSPIATTGAGVRGGSGVYSNCKLESLFLLTDYNLHGVSSNCKLESLFLLTDYNCMVYPLIAKLESLFLLTDYNCMDANILDVFVPRVQQTFDTKEEAYLFYLDYAKLAGFSVRTKRTSKETTHWVCNREGFLKPGQENEEPMTNKTSMRIGCPAYVKVKEDKKRNIWKAEQAREERDGDMDKLFQFFRECKEHNEYF

SEQ ID NO: 63250 - protein, 137 aa, Zea mays
  Coding DNA Sequence Number=SeqID_19875
MAEVRSEPRSSWRDLVSRVVSNSSVALAGGNNGRCELNRSPEFRLGAAPPRTVYWDIAAENRGDVDTLVLLLNWDELLLYSKDVTFDPVPLCIICVRLGPSTPGVYVRARVLVPLKPGCYNNEGAVGHGIGCVIALE

SEQ ID NO: 63251 - protein, 117 aa, Zea mays
  Coding DNA Sequence Number=SeqID_19876
MDAPPALGRFRTATWLGEPRRQPWLGMDAPPALGGAVASLVECRHADVAWGRRRLGAGRHSEEPGRAGMGAGRRGHGELPACLAVHDELLHLTVAMDDDAFDLNSQAPETDGFPRLQ

SEQ ID NO: 63252 - protein, 113 aa, Zea mays
  Coding DNA Sequence Number=SeqID_19877
MAEVRSEPRSSWRDLVSSELWREKSEEAEAGNHGVSSPLPSGARVLVGDLRRVVSNSSVALAGGNNGRCELNRSPEFRLGAAPPRTVYWDIAAENRGKFASQSIHHALVGIFR

SEQ ID NO: 63253 - protein, 167 aa, Zea mays
  Coding DNA Sequence Number=SeqID_19878
  Gene Ontology: Mol. function=protein dimerization activity; Cellular component=nucleus; Biological process=regulation of transcription, DNA-dependent
  Homolog annotation: Hit_ID=Q52MZ2; Match level="QueryCoverage=37%, HitCoverage=12%, E-value=3e-14, Identity=71%"; Hit description=TGA10 transcription factor
  Pfam annotation: Domain name=bZIP_1; Domain location=2-65; Score =24.5; E_value=0.00038; Accession=PF00170.12; Description=bZIP transcription factor
  Pfam annotation: Domain name=bZIP_2; Domain location=2-49; Score =15.5; E_value=0.011; Accession=PF07716.6; Description=Basic region leucine zipper
  Pfam module annotation: Pfam domain module=bZIP_1::bZIP_2; Domain location=2-65::2-49
MATTLRRLAQNREAARKSRLRKKAYIQQLESSRIRLAQLEQELHTARAHHGRQGKQAARHGRGALPPCPRVLAPRCGALPLACVDPKPRRRVDTQPGRRRPHPGRAARPSPAMAGGAAPPARSRCEIVPGRAARPSPARSRRGIPPPPAMHQEQREEEAEGTEGGDG

SEQ ID NO: 63254 - protein, 87 aa, Zea mays
  Coding DNA Sequence Number=SeqID_19879
  Subcellular localization annotation: CTP_CleavageSite=13; ConfidenceScore=5.18e-01
MAAAARLPARAVVAGRSAETRRTPRAYRRSVVARVGARRTAESFEWVWTLEKKKCIRHAGSFNHGRVPIVRAIPVWLCQVPAPKLWS

SEQ ID NO: 63255 - protein, 223 aa, Zea mays
  Coding DNA Sequence Number=SeqID_19880
  Gene Ontology: Mol. function=Rab GTPase activator activity; Cellular component=intracellular; Biological process=regulation of Rab GTPase activity
  Homolog annotation: Hit_ID=Q10N37; Match level="QueryCoverage=72%, HitCoverage=24%, E-value=1e-41, Identity=61%"; Hit description=TBC domain containing protein, expressed
MGSEELETALMEMVEHDNRRMLSAKVEKLETEAYELRKAFSDKQEQEQILLRMEQEQKVAEDARIAAERDAAEQKHAAHLLQEKYEAAMTALSQMEKRAVMAETMLEATKQYQVGQVKANQSFTSSSPRADHVPAKINQEPNQTAPIRRIGLLSRGLGWLDKGKHAVFLVPPLDLCRLMLHARKHLPPDWMPEHAKPGELHIIIFKKKKKVGAEALTNHNTEV

SEQ ID NO: 63256 - protein, 116 aa, Zea mays
  Coding DNA Sequence Number=SeqID_19881
  Subcellular localization annotation: CTP_CleavageSite=25; ConfidenceScore=5.30e-01
MELRHPTVVSPLPVTSGKIRPTLKLASLFSCYGTCPIPTNRATGGESPLNPPVAGFSPRVGRFNPPPSVADVVSPPALSSAWARNHDAVSSRARVVSRPWVVLGRHARARARTALG

SEQ ID NO: 63257 - protein, 286 aa, Zea mays
  Coding DNA Sequence Number=SeqID_19882
  Gene Ontology: Mol. function=rRNA binding; Cellular component =ribonucleoprotein complex; Biological process=ribosome biogenesis and assembly
  Homolog annotation: Hit_ID=Q10N30; Match level="QueryCoverage=67%, HitCoverage=88%, E-value=9e-95, Identity=89%"; Hit description =Ribosomal protein L10 containing protein, expressed
  Pfam annotation: Domain name=Ribosomal_L10; Domain location=107-205; Score=40.3; E_value=6.9e-09; Accession=PF00466.11; Description =Ribosomal protein L10
MSRAFDDYCIEDCGVILAPEVTQRRIDNSDQFVILAIVRVAFLPRRSAQPNPPFLLQSALLPRKMETSFLPTTLPNTRPLPALRTYAPAASIRSQQRPRRSTIRAAITRGRKEETVTTVREQLEGCYLLAGIKYEGLTVKQLQGIRDALPDTCRLLVAKNTLVGKAIEGTPWEALKPCMKGMNAWLFVHTEEVPAALKPYRAFQKEERVEETNDFVGAVFEGKFYGPGDFKALETMPSRAEVYATLLGALQGPATSLVATLQAPARDVVAVLSAYVRKLEEEAGAA

SEQ ID NO: 63258 - protein, 283 aa, Zea mays
  Coding DNA Sequence Number=SeqID_19883
MGSTKRERDNRRQPWSGAPESLSSVPPDSVWCTRGLQAKLCTFGNFQRRFAIISPDMSDAPEESDSELASFGNPLRYNSPDMSGKPIGQHEHDTISDDPFSPMIGPLGPESPARPGPVHLRPDYHCQSIRHAAARQYALTVSTLTHSRSPHSRSAVGRKPNPKPPAATSPAAAVRRFPSPRRQTPVRQYATSPAARRQRLQPPDATSLLQPTPLLFSSQQPPPPADSAANSRRHLRSADSALSAGSSALQCGYEIVDSGYDYDAGEDEAVEGDFQEFQDYDEF

SEQ ID NO: 63259 - protein, 275 aa, Zea mays
  Coding DNA Sequence Number=SeqID_19884
MEGAFVLKTSYCSEVEGFPYLLRGCALHLGVRKKPKYAWKEYQENGVEKCSMVIYLGESRSYPNHPPFQITAIGNRFPDTCQNTALKALRQLCQNCDKEITETPLCYFPPTNKNSPTWRKRLQSLSGREHNEYDPTVIYMARYLHTLDTHFDDLFSHCTRLTSRVENLEQQIKELKEENAALQNSLEEAEGEEANTCEAYRSLKKDYARRLKRFAPVKKIQKHFKNQGCQTVEEKAEEEPPSPIAALGLDNLSDVEEVSLASLDEILKEFGDVLA

SEQ ID NO: 63260 - protein, 424 aa, Zea mays
  Coding DNA Sequence Number=SeqID_19885
  Homolog annotation: Hit_ID=Q6JAD6; Match level="QueryCoverage=76%, HitCoverage=70%, E-value=1e-15, Identity=56%"; Hit description =Putative uncharacterized protein
MEKCKPIKTPMPTNGHLDLDEGVTLPAREPSPVLPGFSPLVRQVRMPRTKNVSAPGGGDDEDPPRPFRQVKGKTVYLEQQEGRKKWRMDRAARGAAAAAAAAEQAEQGAQLQIPSDQIAYRVRRHASRPRSSAPTTPSIATTPPPTLPAPVTPAPSTTSAIPITSSTPASTAPSAPLSAPPIPPAHIQERDETKVRPLVADPRLFDLQRATAARESFYRAQLSAQIALRAHRLLDLPAFLLATDANSEVFGFNESSTHLRSMCYGTSDPPRRPHDGVAPADSAPQFQSTLEASRLIFGSYRPAPEDPVSAPAPVIDTQAEDTTFHQFETQDAAVHDDDDDDDDDDDFGIPPPPPPPMPPRTHDHEAGSSSAAPAAPPAIDPALAAILQTLTQQQTHLAAEQARQAAVQQQLSERMLSMFLTIQD

SEQ ID NO: 63261 - protein, 56 aa, Zea mays
  Coding DNA Sequence Number=SeqID_19886
  Homolog annotation: Hit_ID=Q69SA9; Match level="QueryCoverage=55%, HitCoverage=6%, E-value=6e-08, Identity=90%"; Hit description =Thioredoxin family-like protein
ELSSYLAVNTTTSVIVDRSSDGEFLRIDFNMRIASAALVLQVSDSENFPTRSPLQM

SEQ ID NO: 63262 - protein, 520 aa, Zea mays
  Coding DNA Sequence Number=SeqID_19887
  Homolog annotation: Hit_ID=Q6J9V9; Match level="QueryCoverage=14%, HitCoverage=19%, E-value=1e-11, Identity=55%"; Hit description =Putative uncharacterized protein
MRKKHGSVPKIHTCSGPDSHNEQDTSTQGAITNETPVPPLQVRTTPTIGGPAEQQKADGWLAAARSSSSDDDFCSERPNNSSDDLRADAATIRPLPTSPLEGRGRAEGRRVGGQSAGGTDYLVGGETSSGCRGGRWCRKQRRSRSDRRAGHAAAVSVTNGERPSPRSLREGAGRCPRGDRPQLGALPSPTLMMNIPKLREGQRSQPGLLLPTQKLVVTISGNSPHLHPQPPRAESSPTRSKVLPLQHGGWVPRVMQASPGLKKPNRHTRDRERGYLERDPSPRRKRAPSPLLIRGSKAGPSEGFNSRLRALGLHAHYWLALEGFDSRLRRRARDDPGYVRYITKARATLPSAARVAPTAVPLDRVRLTAAKSGLGRHRKLRLARPRARTRARPQKTTNSASPDLGLGLGLGPGRRRTPPRPTQGSDSGSAPEDDELRLARPQGSDSGSAPEDDELRLARPQGSDSASASADGLRLARPKGSESTSTSEDRLDLDLGGASASPYPGLGPTTSQKGPSLPYP

SEQ ID NO: 63263 - protein, 161 aa, Zea mays
  Coding DNA Sequence Number=SeqID_19888
MTDSPRTRVNERRSARGCDRGRGQQVGVEKHGEGRVKASRPLRQMGSDSGSAPEDDKLRLARPRARTRARPRKTTNSASPDPQGSDSGSAPEDDELRLARPQGSDSASASADGLRLARPKGSDSTSTSEDILDLDLRGASASPYLGLGPTTSQKGPSLPYP

SEQ ID NO: 63264 - protein, 682 aa, Zea mays
  Coding DNA Sequence Number=SeqID_19889
MDKDRQGAAQKRQATVRIHEARPKRQRGTAKAAASGGGKPPLAAKAGASAPSKAPEATVGAGGSKLTKVVPPASGVAEASKAARTLPPPGKRVADFGTEINVDDYLGGSDEGQLAVVAPAAAIATAALAPKARGETLGAGGEVSALALVRDEAGVATRRLKGVTEALSQATEALSQVADFTSRTASGALMAALSTEVERLRTQHADAIREKSASDSKCRKLADRVAALEKEKADLRRQLAGERREANEAIAREQAAQAEARLARAEGNIAKELAGQLQERLTALESRAKGAEAAMRAEAERTRTQLMAAYRELGARTGDFEVPEREAGLRCLEWVQEELQELPTVLEGLMSFTSLVTCEGAMNALSREGCRHFETLDQADEDFGRDIYKVEDPVVKESAGALYDRMWGLYGREVVRERAEAARAQAERGERVDDFGALNSVLPDPEPTPAEAATGVALEPTPETAEDAPGAPTPAAAGEDLPPKVAEGSPDAPAAAVPSAEDPTAVVAETAAEPTAEAPAAAGPSQVQDFGPAHATATTEFLAASTAEGGNEYGGSVSEIFDFTDSGSSVEWTEESSEEDLDYFAALDVAAAEASPHAADAPDVPGPSTGRRRRRAVAKRRVSAEEGARLRVSRAVRQELLSLPAAVGAGEGELRSLFAGEELRIMLFNYREMGIIPKVEPM

SEQ ID NO: 63265 - protein, 168 aa, Zea mays
  Coding DNA Sequence Number=SeqID_19890
  Subcellular localization annotation: CTP_CleavageSite=50; ConfidenceScore=5.32e-01
MSKAGGSRLSKTVAVPLVKDFCYSSKGKHLRTSLQQTSTPRPGHRRQGLLQESGSSKRLGRPPRGLGQLSPEDIGQARGPSNSTPASVPPVDDPTRLWPTKSSFRANSASVRADTATSGFGSSESSRGFPLTKQEKPRTARPTEPRDSYASGIRIPHSSPLHEATHTW

SEQ ID NO: 63266 - protein, 37 aa, Zea mays
  Coding DNA Sequence Number=SeqID_19891
MKAYYKQTLSFVGALLIVLTTQGNGSGYFEQLGISPP

SEQ ID NO: 63267 - protein, 153 aa, Zea mays
  Coding DNA Sequence Number=SeqID_19892
  Gene Ontology: Mol. function=two-component response regulator activity; Cellular component=nucleus; Biological process=two -component signal transduction system (phosphorelay)
  Homolog annotation: Hit_ID=Q9ZQW0; Match level="QueryCoverage=65%, HitCoverage=63%, E-value=3e-35, Identity=79%"; Hit description =Response regulator
  Pfam annotation: Domain name=Response_reg; Domain location=36-152; Score=21.2; E_value=8.7e-05; Accession=PF00072.15; Description =Response regulator receiver domain
MAVAAAAPASVAPFPAPKASDNRKAMVPVDASELEKHVLAVDDSSVDRAVIARILRGSRYRVTVVESAKCALELLALDLLPDVSMIITNYWMPGMTGYKLLKCVKESAALRGILVVIMSAAIRGIPIQKYFSANYSDHSDPLNIILLATSYAY

SEQ ID NO: 63268 - protein, 205 aa, Zea mays
  Coding DNA Sequence Number=SeqID_19893
MAERYQLPRSCVPPTTRRKDCGCSPSGGSEGGKTRCIREREDMLAFQGGHPPSKGDSPCLRPQPSRAESSPTRSKVLPLRHGGWVPRVMQAGPGQKKPNRRARCMQLPSGTGKGGTPKGILLREGNVPRAPLLIRGSKAGPSEGFNSRLRALGLRAHYWSEVRGPAPRKGSTAASGHSGSARTTDQGFVGWPSKGSQPPLTQSEG

SEQ ID NO: 63269 - protein, 92 aa, Zea mays
  Coding DNA Sequence Number=SeqID_19894
MSPQRATIWALDPLRATIAPLIGGVDIARAGDTPKGLGPDSIHQPHVITQLLVQLIYTMIFNDLHQAFEIDLIFDYARAISTVGNDKFSYHV

SEQ ID NO: 63270 - protein, 118 aa, Zea mays
  Coding DNA Sequence Number=SeqID_19895
MSPPPISAAMVALNGANAQMVALCGDVANLNFADSAWPPGVEVVSTSWPGPHSSGCALHVRRRSARVLSYQRPSVHVGAVIVRPVVRLKSMHHWYGRPDPGSSYGDGRPPKTDLDDIE

SEQ ID NO: 63271 - protein, 81 aa, Zea mays
  Coding DNA Sequence Number=SeqID_19896
MADEAVSDNEGKAHQAAEANKKAGEALRLETPKEALAPLPEAYNLENVLELKDFLAGLEVEHKEIDEVVDNTLNNIIVKTF

SEQ ID NO: 63272 - protein, 469 aa, Zea mays
  Coding DNA Sequence Number=SeqID_19897
  Homolog annotation: Hit_ID=A2Y162; Match level="QueryCoverage=81%, HitCoverage=84%, E-value=6e-88, Identity=51%"; Hit description =Putative uncharacterized protein
  Pfam annotation: Domain name=IQ; Domain location=137-157; Score=25.9; E_value=0.00015; Accession=PF00612.18; Description=IQ calmodulin -binding motif
  Pfam annotation: Domain name=IQ; Domain location=159-179; Score=20.6; E_value=0.0057; Accession=PF00612.18; Description=IQ calmodulin -binding motif
  Pfam module annotation: Pfam domain module=IQ::IQ; Domain location =137-157::159-179
MGKAARWFRSFLGKKEQRPTKDQRRLQQQDDQAPPLPPPSAKRWSFGRSSRDSAAAAVVSAGAGNAAIARAAEAAWLRSAACAETHRDRDQDQDQSKHAIAVAAATAAAADAAVAAAQAAVAVVRLTSKGRAPLFAVAAAVRIQTAFRGFLAKKALRALKALVKLQALVRGYLVRRQAAATLQSMQALVRAQATVRARRAGAAALPHLHHLPGRPRYSMQERCADDARIEHGVAAHSSRRLSASVESSSYGYDRSPKIVEVDPGRPKSRSSSRRSSAPLLDAGSCCGEEWCASANPASSPLPCYLSAGPPTRIAVPTSRQFPDYDWCALEKARPATAQSTPRCLLQAHAPATPTKSVVAGHSPSLNGCPNYMSSTQASEAKARSQSAPKQRPELACCCGGARKRVPLSEVVLVDSSRASLSGVVGMQRGCSTGAQEAFSFRTAVVGRIDRSLEVAGGENDRLALLQRRW

SEQ ID NO: 63273 - protein, 147 aa, Zea mays
  Coding DNA Sequence Number=SeqID_19898
MELSVICGLSLLAINKIKKTETDGIIKNIILLEFGSSVKSERRREICLGDSRFEKGQRQPKKTQTRKGCENEEEDDQFGSNRSSGRLDRRIFGTKKTSMPDRRNRSTECDLRVAQSEYVVPPAEPSWGEGDRNPSESTFSTGSLTHL

SEQ ID NO: 63274 - protein, 172 aa, Zea mays
  Coding DNA Sequence Number=SeqID_19899
MANPPRTELPQGKDPDGHEVEKFGLGDDRHVVTCERQLAVGIDWRNHRRRRTRGFLLGAISILPASRVGGELQRGFGSKKARTRARKAEAAKSAALMGYSRATYRFKKRPVGTRRLLPKHRYLKNADVVFSRSAVTSKTPTSSTSHSAATSKNVDMMPELFTYKFQGNQLHK

SEQ ID NO: 63275 - protein, 80 aa, Zea mays
  Coding DNA Sequence Number=SeqID_19900
MTTDMPLELLHMDLFGSIAYISIDENTTDQAKDGGKKSFKVPSAREKIKETRNPKPGVKKKTCKVKVDRVKSYGASRITT

SEQ ID NO: 63276 - protein, 127 aa, Zea mays
  Coding DNA Sequence Number=SeqID_19901
MAASGGVRLRSSGDGVGATRQRVRQGEGGLGVVGDDGGGGCAAKGAGAAVVRMEAGTRARGTEKTFLRKSKRKHTSSAMISTNKSNVLNKGRIEFFQSTGYSDSGAKHNYYCLAPELRTMLNATYEH

SEQ ID NO: 63277 - protein, 86 aa, Zea mays
  Coding DNA Sequence Number=SeqID_19902
  Subcellular localization annotation: CTP_CleavageSite=44; ConfidenceScore=5.03e-01
MDGGLNSNLLRGSFAKQTGRRAVFPPTAHGGAALQTAVEDRRSKANHRPSALNLEGKGAIRRWGQSERDEGYLTSDFGAEAPGDDK

SEQ ID NO: 63278 - protein, 160 aa, Zea mays
  Coding DNA Sequence Number=SeqID_19903
  Subcellular localization annotation: CTP_CleavageSite=65; ConfidenceScore=5.06e-01
MAYASTSTDGETFTPWSHIMFDSLDFLATVTGKLCLADLNVPVTTGTRSASSTRSKAEKRHLKRSAATLKRCLNRAPESVCFVATLPRNNNGRGTTSLPTKRKNINASAMCISLTARPPFGNNKKSLMVLVRKFDRVYNDIEISFAGRNPFFSRPRRRLF

SEQ ID NO: 63279 - protein, 170 aa, Zea mays
  Coding DNA Sequence Number=SeqID_19904
MGARREARRALYRPARGDRQARGRERATALTSGESGRYRPGAGLAQFNEKLMWMWAEAIACYSLCTGAAEARVEARADVAGARERLCTGLSLTNRNRGGQGTQTQQGQTAAGSRHRSEASPVQRGRAAARRSVTVSLECKGASRQRGRGRCRAGWNQKALRCVLSSDLIS

SEQ ID NO: 63280 - protein, 451 aa, Zea mays
  Coding DNA Sequence Number=SeqID_19905
  Gene Ontology: Mol. function=molecular_function; Cellular component =cellular_component; Biological process=biological_process
  Homolog annotation: Hit_ID=A3AV06; Match level="QueryCoverage=62%, HitCoverage=42%, E-value=7e-83, Identity=58%"; Hit description =Glucose-6-phosphate 1-dehydrogenase
  Pfam annotation: Domain name=UBX; Domain location=131-210; Score=1.0; E_value=0.058; Accession=PF00789.11; Description=UBX domain
MEAEYPHQQAAPSYSTTATVFWPYATRRRKRAEDGSDLSLASDMDLDADAQRAADKLKAVSEELGHEIRVFSSENFALQPSKLPSADHEEGDDFYELQPADYYNLISNRMGELSKMLKTRKMREAELAAQRAKRTKAVMRVRFPDGYILEADFLPSERIHSLVDLLMKVLARPDLPFYLYTVPPKKRILDTSQDFYTSGFVPGANVHFSYDLPEGLLLNADDLKAGPFLREGILSLDGLSLLLKPASQPDDSRMNSSTHQSGASQSDPVPTTNKKPGRPKWLKSSHAYLRRIIPYRLLLFCFGTSFAFARPRQNNWYPLVAGDTTPGVRSLVVVWLELEAENLDAIECGVVGVFIAPTTKNVAVGRLLSHGVLDSPARIKCVAVDRCARSSRCSAGTPDSPVNYSGSTSHFPEGGKFSFEFPGAPDTVRWHTGQSGAPDQGVIGMSLALFI

SEQ ID NO: 63281 - protein, 71 aa, Zea mays
  Coding DNA Sequence Number=SeqID_19906
MKGGTVVPLERCTKVSMVPQVVKSTLSIIGPPSATSLCDPIFILHKRPPRPRHHTTAQARHPPSIDTDGMR

SEQ ID NO: 63282 - protein, 221 aa, Zea mays
  Coding DNA Sequence Number=SeqID_19907
MILPKFAKICALSALEQEQKKPCVHATWSIAADMPGARQPAHPRRAVRARSGPRPPVHRTRAFKSHPRTRNTSLHACPHCPDPVLSSGELCAARPSHPSAGHRGQPFLETHNLTRASGQVPRGAVKLLQARIETLPHWSSGITIVGLRPPATARRPGYQVGIPPPNSPTCARGLADPDHLRRRPIPRCDCRNLPDLPGRLTGAISPRVTPPPFPPPRVLFQ

SEQ ID NO: 63283 - protein, 395 aa, Zea mays
  Coding DNA Sequence Number=SeqID_19908
  Gene Ontology: Mol. function=magnesium ion binding
  Homolog annotation: Hit_ID=A9NY69; Match level="QueryCoverage=62%, HitCoverage=70%, E-value=5e-71, Identity=52%"; Hit description =Putative uncharacterized protein
  Pfam annotation: Domain name=YqaJ; Domain location=157-300; Score =150.0; E_value=6.5e-42; Accession=PF09588.1; Description=YqaJ viral recombinase family
  Subcellular localization annotation: CTP_CleavageSite=7; ConfidenceScore=5.23e-01
MCSTTCRSSAYRTWPRDSARGLSPRPPGGPRGARPHLRLPAPVAPFQVRCWGLRTVVSGTKGQWIFINGSKLQSSSQLKKTFLQIPTSSSSAYRALVASSAFLPSRRSFEGYIPRSCSSSSLQIYSRSPLLNLSPSSALMVSSQLTGSSDVAQRSEEWFALRKDKLTTSTFSTALGFWAGNRRPELWNEKVFGATEIKLADAARSAMDWGTHHESVAIEQYTSITGRPVGTLGFAVHTEASFGWLGASPDGVLGCEPHDGILEVKCPFNKGKPELALPWRAMPYYYMPQVQGLMEILGRDWVDLYCWTPNGSSLFRVPRDCAYWELIHEALRDFWWGNVVPARELALLGKDDEARSFEPQPKHRLTNLVLYRSRKLASEAKLLCMDVGGHVEFFQ

SEQ ID NO: 63284 - protein, 506 aa, Zea mays
  Coding DNA Sequence Number=SeqID_19909
  Gene Ontology: Mol. function=protein binding; Biological process =embryonic development ending in seed dormancy
  Homolog annotation: Hit_ID=A7PLU8; Match level="QueryCoverage=68%, HitCoverage=69%, E-value=3e-44, Identity=35%"; Hit description =Chromosome chr14 scaffold_21, whole genome shotgun sequence
  Pfam annotation: Domain name=F-box; Domain location=172-230; Score =24.0; E_value=0.00056; Accession=PF00646.24; Description=F-box domain
MALNCSSRSLWVADDCASMMLGCGCWSEEASPLSSRGVNSLWWDDLELEEEESDPVDLLPTDPFGMNLETTFTAAIASCIGDLTGMSGAGHLGSGDDDGFYADLSYYLNQAFVLTPEPWSGAYTSVFEDSFVSGCLSGAGGMEQFSRLPPSSFCSEPIGVTDDPSSSCDTALPCCDMVDVAPVQEGNDAHEAMVFVLSYLGLRDILSIEMVCKSLRSAVRNEPFLWKCIHIDSHLGEKMSDADLLCLTQKSPGSLQCLSLMCCVNITDQGLKAVLESNLQLTKLGIFGAFRITHQGLVDSLRSFSMEADIGIKKLRVANRVTASEVQYVELLSLMKIDKEMPLHKQEPRIFHADRLLPDLHGGYVPDSFVPDLHDEYALDIEKCPLCPNYKLVYDCTSKECKTSGSSICRGDVSFWNNGSALLRSVEVPGFARCVSVLFSGGYISVILLWLWLVWELSVFYVLTDTTNLLNQQASVLLGIRDHKWLKIHKPDRSALLPAVLIIEPD

SEQ ID NO: 63285 - protein, 760 aa, Zea mays
  Coding DNA Sequence Number=SeqID_19910
  Gene Ontology: Mol. function=nucleoside-triphosphatase activity; Cellular component=integral to membrane; Biological process=transport
  Homolog annotation: Hit_ID=Q2R1Y0; Match level="QueryCoverage=100%, HitCoverage=87%, E-value=0.0, Identity=53%"; Hit description=ABC transporter, putative, expressed
  Pfam annotation: Domain name=ABC2_membrane; Domain location=484-698; Score=235.9; E_value=9.3e-68; Accession=PF01061.15; Description=ABC -2 type transporter
  Pfam annotation: Domain name=ABC_tran; Domain location=225-407; Score= 70.8; E_value=4.4e-18; Accession=PF00005.18; Description=ABC transporter
  Pfam annotation: Domain name=PDR_assoc; Domain location=71-138; Score= 97.6; E_value=3.9e-26; Accession=PF08370.2; Description=Plant PDR ABC transporter associated
  Pfam module annotation: Pfam domain module=ABC2_membrane::ABC _tran::PDR_assoc; Domain location=484-698::225-407::71-138
MALFRFLGAVLKTMVVANTFGMFVLLIIFIFGGFVIRRNDIKPWWIWGYWASPMMYSQNALSVNEFLASRWASPNNDTIIDAPTVGKAILISKGLFTGEWGFWLSIGALVGFIILFNMLYLWALTYLSPSSGSNALVSEGEDDVMVLKGRSKDEMSQVVYSDPGTNGATNTVAQSSRVTLPFQPLALCFNHVNYYVDMPAEMKEQGFTESRLQLLSDISGTFRPGVLTALVGFSGAGKTTLMDVLAGRKTSGAIEGDITLSGYPKKQETFARISGYCEQTDIHSPNVTVFESITYSAWLRLSSDIDDGTKKMFVEEVMTLVELDVLRDALVGLPGVNGLSTEQRKRLTIAVELVANPSIIFMDEPTSGLDARAAAIVMRTLLLLKRGGQVIYAGELGRHSHKLVEYFESISGVPKITEGYNPATWVLEVSSPLSEARLNMNFAEIYANSVLYRKNQELIKELSIPPPDYQDLSFPTKYSQNFYGQCVANFWKQCRSYWKNPPYNAMRYLMTSLFGLVFGTVFWQKGKNIDSQQDLYNLLGATYAAIFFLGASNCITVQPVVSIERAVFYREKAAGMYSPLSYAFAQTCVEVIYTTLQGILYTVIIYGMIGYDWKSDKFFYFLFFITASFNYFTLFGMMLVACTPSALLANILITFALPFWNLFAGFLIVRPAIPIWWRWYYWANPVSWTIYGVVASQFGENQGELSVPGGKPMLVNQFLKDNLGIQHDLLGYVVLVHFAYVIVFFFVFGYSIKFFNFQKR

SEQ ID NO: 63286 - protein, 361 aa, Zea mays
  Coding DNA Sequence Number=SeqID_19911
  Gene Ontology: Mol. function=nucleoside-triphosphatase activity; Cellular component=integral to membrane; Biological process=transport
  Homolog annotation: Hit_ID=Q8GU84; Match level="QueryCoverage=73%, HitCoverage=63%, E-value=1e-115, Identity=66%"; Hit description=PDR -like ABC transporter
  Pfam annotation: Domain name=ABC_tran; Domain location=234-361; Score= -56.9; E_value=0.035; Accession=PF00005.18; Description=ABC transporter
  Pfam annotation: Domain name=MMR_HSR1; Domain location=235-334; Score= -20.3; E_value=0.077; Accession=PF01926.14; Description=GTPase of unknown function
  Pfam module annotation: Pfam domain module=ABC_tran::MMR_HSR1; Domain location=234-361::235-334
MGEGPEEDVSAQGVHQALPFRLAEQQEIKDPTGARTRLRTTGQAAGGPSTLKGQEQGEACSVLPTCQGVGRSLIGTALQRREHEHRDDDEENLRWAALQKLPTYDRMRQGILRRALDDQEQQSGDGDVEVVDIHKLAAGDGGRALLERLFQEDSDPFLRRLRDRIDMVGIELPTVEVRYEQLTVQADVVAAGRALPTLWNAATNFLQGLIGRFGSSNKRNITILKNVNGILKPSRMTLLLGPPSSGKSTLMRALAGKLDKNLKVSGNITYCGHPISEFYPERTSAYVGQYDLHNAEMTVRETLDFSRRCLGVGARYEMIAELARRERDAGIKPDPEIDAFMKATSVQGQETNIITDSLTNL

SEQ ID NO: 63287 - protein, 15 aa, Zea mays
  Coding DNA Sequence Number=SeqID_19912
NFFGDLLAHPLLIPT

SEQ ID NO: 63288 - protein, 234 aa, Zea mays
  Coding DNA Sequence Number=SeqID_19913
MAQALRGERVDDLGALNNALPDPEPTPAEAASEVALEPTPETAEDAPDAPTSAAAGEDLPPKVDEGAPDAPTAAAPSAEDPAAAAAETTAEAAAEPMAEASAAPGPSQVQDFGPAHAIATAKFLAASTAEGGNECGGSASEFSKFFDVADSGSSVEWTEESSEEDLDYFAALDVAAAETSPHAADAQDVPGPSTGRRRRRAVAKRRVSTEERSRLRVSRAGRREMGIIPKVEPM

SEQ ID NO: 63289 - protein, 98 aa, Zea mays
  Coding DNA Sequence Number=SeqID_19914
MSPPDAQVLVVSFSGNEQMTASARMEDIGRLPLSGVVGWDPIITVAWLLDASIGPSVGESFTTAGGKKLDTQAASQSHVAASSKIASLFVRPLIPRIK

SEQ ID NO: 63290 - protein, 107 aa, Zea mays
  Coding DNA Sequence Number=SeqID_19915
MASGAHAWGHARDTGQASHARSCAGLGMVAVQGCRTGLGQGPAGQRPVAWACLPSVAGGAAQGLRGARLAATAAGLAGGGAQPWGQGKACGEADGARGRRGGEDEGL

SEQ ID NO: 63291 - protein, 110 aa, Zea mays
  Coding DNA Sequence Number=SeqID_19916
MDDELALDVGSRGASRRARLTPSFVALAGKVLVEEEQRGPILRGRRAKANGSSTKPFRVDTSYDEEKEDSKPVEDQDESQIVGVGRCRGVSQRAQSVAATATQEAKIGEG

SEQ ID NO: 63292 - protein, 121 aa, Zea mays
  Coding DNA Sequence Number=SeqID_19917
  Homolog annotation: Hit_ID=Q6QP51; Match level="QueryCoverage=50%, HitCoverage=30%, E-value=6e-10, Identity=54%"; Hit description =Putative growth-regulating factor 1
MAAPRTTRPVALTPRRDRRHLWQEKRATLHLRHNDRVKKGTGKGGYPERDPSPRRKQAPSLPTDQRFKGWPLGGVQQPPQSAWAPRPLLAGPRSVHSRLRRRARDDPGYVRYITKARATLP

SEQ ID NO: 63293 - protein, 161 aa, Zea mays
  Coding DNA Sequence Number=SeqID_19918
MNKTPALKVPLQMELRFHLRGYEQPHMIGRPAEQQKADGWLAVARSSSSDDDDFCSGGPNNSSDDLRADAAAWRKAAPEAAPKPLGSESRARGSCQRHERRTPFPRSLREGAGRRPRRDRPQLGALPSPTLMMNNLEAEGGAEAASRLASPHPGAGGHRLG

SEQ ID NO: 63294 - protein, 126 aa, Zea mays
  Coding DNA Sequence Number=SeqID_19919
MGVTRGRGIGGGDRIGNENRNENGRNRNENGRISNGSLPLTFFIVVKISCSWTEGAHGWEWDQHRAVVAQPTMQFPQYPPYFVSDQQAQLQHQQQLWEVTQQESQFHHHHQQQRADGVPQLIINNI

SEQ ID NO: 63295 - protein, 83 aa, Zea mays
  Coding DNA Sequence Number=SeqID_19920
  Gene Ontology: Mol. function=two-component response regulator activity; Cellular component=nucleus; Biological process=two -component signal transduction system (phosphorelay)
  Homolog annotation: Hit_ID=Q94LW1; Match level="QueryCoverage=96%, HitCoverage=12%, E-value=1e-27, Identity=78%"; Hit description =Response regulator 9
MRVLAVDDDPTCLKVLENLLFRCQYHGTSLDNNGTGSHGPELLREKKDQFDLVISNVHMPDMDGFKLLELVGLEMDLPGISSK

SEQ ID NO: 63296 - protein, 173 aa, Zea mays
  Coding DNA Sequence Number=SeqID_19921
MEPNEAIAKDQEAQGEAKLSREEGNLAKELAEHLQERLTALESRMKGAEAAMRAEADRTRTQLMDTYRELGARTGDFEVLVCSAPEDDELRSARPQGSDSALASADSLRLARPRGSDSTSALEDRLDLDLGGASTSPNLGLGPTTSKEAPSLPYPKLTQATGNKTGVPSSSLR

SEQ ID NO: 63297 - protein, 46 aa, Zea mays
  Coding DNA Sequence Number=SeqID_19922
MRRATVFLMALALALALILIPPPIGSPAAGSSSPQEKSLRRISDRT

SEQ ID NO: 63298 - protein, 126 aa, Zea mays
  Coding DNA Sequence Number=SeqID_19923
MPPRTRKTTRKSTGPIGVPQPQLAPRHEDSSSGSNDPIGDLEARVNQLLTELQRRTNIWVANGDRINELRSDIRRPRDQLADRDLALDWAVQSRLLACAKEARAQARVKELSSAIDNLQVYCKYFT

SEQ ID NO: 63299 - protein, 117 aa, Zea mays
  Coding DNA Sequence Number=SeqID_19924
  Gene Ontology: Mol. function=nucleoside-triphosphatase activity; Cellular component=integral to membrane; Biological process=transport
  Homolog annotation: Hit_ID=A3CD00; Match level="QueryCoverage=64%, HitCoverage=5%, E-value=3e-31, Identity=82%"; Hit description =Putative uncharacterized protein
MGHARISWSSLSLPVFGALTGKVSLTFLQEVTSKKDQQQYWYLDQEQYRYVSVPDFAERFKSFHACQQMHKELQIPFDKSKTHPAALTTTKYGLSSWESFKNKDAPWQDESQNVCNP

SEQ ID NO: 63300 - protein, 464 aa, Zea mays
  Coding DNA Sequence Number=SeqID_19925
  Homolog annotation: Hit_ID=Q6J9V9; Match level="QueryCoverage=27%, HitCoverage=44%, E-value=1e-39, Identity=67%"; Hit description =Putative uncharacterized protein
MTFMPFDYIGNGILKTSERDLEKEGRPSRGTPTPPGYGYLTHHLPRKVTCTQISDSATEQVLMLEIRGKKHDFILKYPNVQASASTENKHTYLGNELPPHQKGYEATNSKRLTGDHCTSSDNGLCLGRLDSSSDCLRENATVKRPSPLSPAQGREQAIKAKDPEVRPQVALTVSSVEATPFAVGGLTSGGHHLSTDDSGHLRTNAAPASGGRPNAHKEVLTPILATGVRTKLSKNTDAAPAAYDVLCDPPFAASVRLVDALMPQMLEEEAGRQPMRKAGHQLGLPSSPSWMMNILEDEGKGEATARLALPHHKAADHHSGARDTSGRRSGRRFASVMMTASKKGSRKGIFRKDPSQRRKRAPSPPTDQGLEGCALRGSATAQSTRAPSPLLIRGSKAGPSEGFDSCPRACRVRDDPGFIHYMAEARATLPRYPRTFPRPAAMICNGIPSEGGTEPSDPIKWVRV

SEQ ID NO: 63301 - protein, 235 aa, Zea mays
  Coding DNA Sequence Number=SeqID_19926
MPRPRAPSGSGRTPGSPEAKLGQTLSYSNLGHIALPPTVSHAHENNTIHPVPTTVPTTRVKLTTVSHDLLRDPPRTQQGAPPRPTSGLGLSLGLGRRSPPRPTSGLGLSLGLERRSPPRPASGLGLSLGLGRRSPPRPTSGLSLSLGLGRSHNLARPQPRPQEKSLPCPTSASDRPRHRGYIITLPLASCLRLRRNKTGVPSRLLQQQAKKHQQDPGLHRQLRFYMAQALLRLPR

SEQ ID NO: 63302 - protein, 173 aa, Zea mays
  Coding DNA Sequence Number=SeqID_19927
MAGTALDAVGGGRGAGGEGPTEVEQWKGHASGSSGRRGAWASAPTVFQASRWWGGGMDLCGAVAVCGRRRGWLWTRQSDDRVGEWTYAGGAGHVGCHGFARFVCSRRTRKGGVGHRGSRHCWGSGARLPCRPAICGQSRRSHVAQGKGSRARGQPWMEADTAPVAGGAGHAGC

SEQ ID NO: 63303 - protein, 71 aa, Zea mays
  Coding DNA Sequence Number=SeqID_19928
  Subcellular localization annotation: CTP_CleavageSite=62; ConfidenceScore=5.02e-01
MEEACSGRWRTSESAWRFMGMKRHRAVTLASRAAVKKVIPNWSVMNTTRWVVSWSSMSRPASIEMKFGSHV

SEQ ID NO: 63304 - protein, 96 aa, Zea mays
  Coding DNA Sequence Number=SeqID_19929
  Homolog annotation: Hit_ID=Q338Y6; Match level="QueryCoverage=78%, HitCoverage=78%, E-value=4e-14, Identity=87%"; Hit description =Expressed protein
VDVDFLVDKLKVTNYFDPEVKKEKHPKPIAASPQDSRLLSEIQEQQNLLKTYVVKNIILEEGAERPKVGLMVMPGFLIGTSVIQSRVYLSDAKCAD

SEQ ID NO: 63305 - protein, 145 aa, Zea mays
  Coding DNA Sequence Number=SeqID_19930
MQGRYIAAHSANGGKEITEEGEGSSGVGQKHKRRKGLYCRTPTPEKKGRVAAPSDACTEEEGEGSSAVGRQHRRRRVGQPSGTGTGEGEGSRRTPALEKKGIVAVGRWMSRDQELIYLNQDTNTKKINLIKERIRVTVKEGNRQG

SEQ ID NO: 63306 - protein, 252 aa, Zea mays
  Coding DNA Sequence Number=SeqID_19931
MDQAVSLTARSRRFESSVYPCKIRAHRLGVQCLTDPDYRRAVTALVPTITGMGDHVSGRMRAKHGGARANAAVHRRRKRGLTPRIPLLPARGDSEGDHEGDLVRLTSMVIDGARSSAHGEVWYVADRKSTARNPKVLGSDSPQKHRWQPSPRPVEVDRAKSRKFSYLGSTSLGTCTIGPRSCANSPSPASNYQFPYGSCAEPEMTKTTTRDGESRELAPEDEAAARTEFTVGALPAARYPALQTSLSLSCVQ

SEQ ID NO: 63307 - protein, 147 aa, Zea mays
  Coding DNA Sequence Number=SeqID_19932
MWKDRVEHAKDVWALYPGQTPHLTVRCMNALYRLQAVRGEVMSQVMGLVEATKITLDNREDLVVDLSTELVEKDLQVEQMATQIQELEEQVGSRENTIEEIQDMEAEGANEDVDIEGGEEPEPASNLDTAGSGRPPSPESSVASFAH

SEQ ID NO: 63308 - protein, 137 aa, Zea mays
  Coding DNA Sequence Number=SeqID_19933
MTLPEPRIELYVAGNPRSTSPDITRPPAYVDRVHDSLAPREAPCALGLNSTVVSKPEHTPPMSSPACARGPTDSGHHRQQAVPQRDRKDFPELTPPFAEPPSPPQGVAQEVAQEPAPEPAIEDLPAPALEGKPRFYA

SEQ ID NO: 63309 - protein, 126 aa, Zea mays
  Coding DNA Sequence Number=SeqID_19934
MRTLPLTRPETGSPHASYGGYKCGHCTAVAGVSGALHAKAVRFRIWLMMTSPTPASGGDTHFSSDFLSHDGFPSILWEVLNSTGYPTPPLYMVQLYEEHRVPHLPSLADFGGSSPFSRVGVLLTPR

SEQ ID NO: 63310 - protein, 137 aa, Zea mays
  Coding DNA Sequence Number=SeqID_19935
MAILMELFGGSVARLKLLTKFSVIEEISAPSRHPRAMSLLEKFGYWLGGGQEIVDEATRKNEKESHTTLEEARKAKKAAEHARLIAELSPPPVPYDPEADPAMKGALDVIRIANEDVDEAINRLLNEAAHKVLKKDD

SEQ ID NO: 63311 - protein, 210 aa, Zea mays
  Coding DNA Sequence Number=SeqID_19936
MRQRRWLELIKDYDLENSQGALKRTARALSYGMEAGAPWRLLPLLGVLEGGLLFFPVREGFPAHEQRGREVPWLPQRASAKGTARCAQGRKGSLLLTPWRRGGIGQRKKKGLGTMAEELQRTEEGGADSTQGGGGSRHGRRRRAELLASCAPAMEEGVGMPAAMEQGNREPREGAPSTGGRGRRSTSAGQPTPEGSWAAMGGEEAPGAQP

SEQ ID NO: 63312 - protein, 143 aa, Zea mays
  Coding DNA Sequence Number=SeqID_19937
MDYRVRICAENKSFNRLQIWHSSRSNSSEFGEIAISLTEEYVLIPEQGAVHEEYQEQAPKTAVEDLPAAPAIEGKPREDVTEPPKSLGPPIVVLVQWTSDNPAGAPDHLTSSVSEFLTFPKSVSSVTQTLQNIGDTEIRKQLQ

SEQ ID NO: 63313 - protein, 51 aa, Zea mays
  Coding DNA Sequence Number=SeqID_19938
MGGAGVADRAGGEPRRGRRTGPRLHCGGWGSHGVEWTAGADGGTKKQRETG

SEQ ID NO: 63314 - protein, 151 aa, Zea mays
  Coding DNA Sequence Number=SeqID_19939
  Pfam annotation: Domain name=IQ; Domain location=75-95; Score=19.8; E_ value=0.01; Accession=PF00612.18; Description=IQ calmodulin-binding motif
  Subcellular localization annotation: CTP_CleavageSite=27; ConfidenceScore=5.38e-01
MSPGISSRLSSPPPAAHPSPPPAAAQSAAATPSHPPSPTPDAFTRLEESFGRLTEKWDQFVVMFHRYKEKTEKELQAAVRLQAAARGFLARRQKSRSGYAAPCTAKEGRLLHSGNCLGAGQTQHKNRLVPPSPFIQREVRSSALSLGSRRT

SEQ ID NO: 63315 - protein, 141 aa, Zea mays
  Coding DNA Sequence Number=SeqID_19940
MPLDSDRWSSDFWARLDVCCTPDMYCSMSGAPVWTFLTSARFWRALNVPAAEQSLRFLEAGEFRRPLFLGAPDTVRCTPDSPVNYSGVPLEIPEGGKFELESSRAPDTVRCTPDCPVPQTRGAFGCPFAPLLNPIFDLFIG

SEQ ID NO: 63316 - protein, 163 aa, Zea mays
  Coding DNA Sequence Number=SeqID_19941
MAPMSTEKRHLDQIELLSVRQLLFNNLFFSCGGGVRQQDLWEDPVQGSWLTAIAAKSTRDLPALTSPLLPLPLSGKIIKINKNMAGKVYCIHRGNRRLGDDPYLSLATAGAPSMAMCGWHGEDGTPVRNSPRSEDVQASTRSPKASRRLGDPDRWYAEGGSLV

SEQ ID NO: 63317 - protein, 116 aa, Zea mays
  Coding DNA Sequence Number=SeqID_19942
ADEDHGYDYAYGNETAPPPAREAGASAIGVGAAGLFFLASAGGRVCEELLPYAPARVAAGGDPDDGDDYSSSSHSTDLSEEQEPEGWVARPITRDAARGCHFHDALDTLLRQALDR

SEQ ID NO: 63318 - protein, 131 aa, Zea mays
  Coding DNA Sequence Number=SeqID_19943
  Subcellular localization annotation: CTP_CleavageSite=8; ConfidenceScore=5.02e-01
MPVGNNVLCAAPLATSSTPATVDVALRSGPFGEMSSHVDSPCDLSHFAQIGVFMREECMRKRWHGCIGKIGGQSSCACLKWRRELKMSISLKRRANRWMIVCAEMRCSSDGVKLNDNVSSARHNMVVCKTR

SEQ ID NO: 63319 - protein, 332 aa, Zea mays
  Coding DNA Sequence Number=SeqID_19944
  Gene Ontology: Biological process=response to stress
  Homolog annotation: Hit_ID=Q65XR0; Match level="QueryCoverage=91%, HitCoverage=91%, E-value=1e-126, Identity=69%"; Hit description =Putative uncharacterized protein OSJNBa0072C16.1
MARARDAALHLLLLAAGALLLLAVVSQATVVPPSVPAGAPEDPRCRALAPRRGALAVYPSDMEQLQFLLNAKFVEAEWFLHAALGRGVDFLDRNLSGGGPRPSGARKADLDFRTTEVAAELGYQEVGHIRAIRQAVGGFPRPPIDLGADRFAMVMDDAMGVRLDPPFDPYAGPVNFLLASYVFPHVTAAAAMGIGPSLMGYASKRLQASILAVEAGQDAVIRLLLYQRADDAVPPYQGHTVADFTRRISDWRNRMSGCGAKDEGVKVLDRRQGAERRTISNILGAGEDSLGFQRTPAEVLRILYGSRNEQIPGGFLPRGANGTIARGFFQLA

SEQ ID NO: 63320 - protein, 40 aa, Zea mays
  Coding DNA Sequence Number=SeqID_19945
MAESVVLPAQSRTSCTCVQDVRNAHVFVAVILADLILSSF

SEQ ID NO: 63321 - protein, 80 aa, Zea mays
  Coding DNA Sequence Number=SeqID_19946
MVIGVVPSMGRSLSCRIQVRKSSEQKECKFKTKWLWKRSLLQCLFSKWMELSNWLLGRKVLSLFTATKASPGAFATSLLF

SEQ ID NO: 63322 - protein, 67 aa, Zea mays
  Coding DNA Sequence Number=SeqID_19947
MAHRSYSGPPEAFSPPFSPLCPWIHGPFPAIEFAVVPSSSLPNSDNEQSEVPECVVGDLPDQPPGEG

SEQ ID NO: 63323 - protein, 274 aa, Zea mays
  Coding DNA Sequence Number=SeqID_19948
MARIRCTALKSVIPFLPSRLAKRRLHRKDQEQQDSSPSPQQEVESERLPSPAPQLEMPPAPPQGIPAAGGDPDGDDDDASGSSSHDIELSKEPKPEGWIARPITCDAARGCHFHDALDTLLRRAFDRHTWSIEYRCVVYQHRRGLYSDQWEATCLVRRPDDDLRANGLDLKYYPRRSTGSAGGVIASPVGEGNPRLNNMVNLVAVLNTELDHALDELGKVWAKVAELRAECAAHHYLDGGSPAPVGIQHPYRSPPRGRFDYGTLDCRTRIDLDP

SEQ ID NO: 63324 - protein, 21 aa, Zea mays
  Coding DNA Sequence Number=SeqID_19949
MTSIEDEQHDKEGTCGSFSRG

SEQ ID NO: 63325 - protein, 61 aa, Zea mays
  Coding DNA Sequence Number=SeqID_19950
MTLSGVGSSSLFEAKGVTSIELMIGKKTTSTAFFVPKVSDDVETVHADSSACIVMVDAPML

SEQ ID NO: 63326 - protein, 114 aa, Zea mays
  Coding DNA Sequence Number=SeqID_19951
MLRFVSKALRELARSHGTGRSKNTQPTAHAVLEVVRAPAAAAGGRGKRGDGAAEQGAVQEGGVRHPGLPLQEHVRLQEVRTPLFPKPEEFDCFVSLWVVGDFVSVDGMGAWGTT

SEQ ID NO: 63327 - protein, 287 aa, Zea mays
  Coding DNA Sequence Number=SeqID_19952
  Pfam annotation: Domain name=zf-CCHC; Domain location=116-133; Score =18.5; E_value=0.0024; Accession=PF00098.14; Description=Zinc knuckle
MEILSIHNNELTTKLENIGSTPAASLVEIPEIIKKDVSTSCFDLIDDSNPCNQVVVENIIVETCSDEVAKENEQLKQEVARLGKALYDKKGKAKQIQPPQDNTTAGVNKPMEGETVICRLCHKEGHKSFQCKAMTGDKQRQKLKQKPSSKISNTYIKKVNKKDATPYLIKKKKNGKVIAIKANKQANKGKGAKRIWVPKEIISTMKSTKKVWIPKGNLLPSGLVKILDPNFPPMTKICVSIYLLSSLPFLPSITFVMYFCSKSCILVHRMRRELDQGNEDATPQKKT

SEQ ID NO: 63328 - protein, 80 aa, Zea mays
  Coding DNA Sequence Number=SeqID_19953
  Gene Ontology: Mol. function=catalytic activity
  Homolog annotation: Hit_ID=A3B342; Match level="QueryCoverage=92%, HitCoverage=21%, E-value=2e-12, Identity=52%"; Hit description =Putative uncharacterized protein
MYYLADEPEVHFVWQPSQESSVLDMSRAFDGYYIMDGGIISAPNMTQRRTNNNDQFVILPTVGYLFVLAWGVLSNDETWK

SEQ ID NO: 63329 - protein, 108 aa, Zea mays
  Coding DNA Sequence Number=SeqID_19954
MAGEKELARAKEGCLAGDGFELGIKVNTFDLWLKHLRETLGDTGVSQPSPLKGISSRDSGQSPPGVKRRIRRAGGGVVCDYVPVSLGRQSGKLDLKNSSVSQVASSSE

SEQ ID NO: 63330 - protein, 36 aa, Zea mays
  Coding DNA Sequence Number=SeqID_19955
MGAAAASLCAAALVTGGGRRRAHRPIWIEWRRLGPK

SEQ ID NO: 63331 - protein, 116 aa, Zea mays
  Coding DNA Sequence Number=SeqID_19956
MEPGGGTAVGAVESLLTSSCFRKGAESRRRHRVCGTPSLPIWLGDVEAPPKPRSSLSSVAEVESEPLGRARRSSSSPRAEPKSEPWVGRSGVRRLPGLSPSPSPGSGGAEFVVFWG

SEQ ID NO: 63332 - protein, 50 aa, Zea mays
  Coding DNA Sequence Number=SeqID_19957
MLDENARWDDLVTGLRPVTYGTKAITAEASSEGWRLRLRPNICPPRDQFD

SEQ ID NO: 63333 - protein, 129 aa, Zea mays
  Coding DNA Sequence Number=SeqID_19958
MAPKRASSKAAPSVDEAAKAALLSEKKGKALVDTTHQEACEDDALSKRQRNEQPTPEGSLRTCSSGGQLLPPLGFAPLEGADATEVGKVIGVSAEEQLQLRALLIKNRNLQKQKEILEAQRQRVSTQAK

SEQ ID NO: 63334 - protein, 149 aa, Zea mays
  Coding DNA Sequence Number=SeqID_19959
MDQAVSLAARSRRFESSFYPCKADPLGQALVLDPGLPPEQLLAPARGRNRKMAQRLTRSTCAGGVSNSGESDCAFPVAEVLGSSSGKLHGLLGKLPRGLDRAKEGGKWFGHSGCPRAALSGRGEVAGAMGELWGVGHGTGDATGKMAGH

SEQ ID NO: 63335 - protein, 36 aa, Zea mays
  Coding DNA Sequence Number=SeqID_19960
MAGGNTLAGAKERWLAGEDPDSPTTQGKPRYIYLSL

SEQ ID NO: 63336 - protein, 45 aa, Zea mays
  Coding DNA Sequence Number=SeqID_19961
MRVPQGIFVKDGDEDDGFDYAYGNVSGEDEVVEEDFQEFQEYDEF

SEQ ID NO: 63337 - protein, 53 aa, Zea mays
  Coding DNA Sequence Number=SeqID_19962
MVGTSAVTARRQPGSVEHCTMQDVVDGVTWPTTLPPGWTVEWDVAPAGEEPQE

SEQ ID NO: 63338 - protein, 62 aa, Zea mays
  Coding DNA Sequence Number=SeqID_19963
MARVARTLLAKDRLKGVVIVFVLLLMVLSAGGLGLLIEVYPVFIFLLRMETVRQQGSWKEEA

SEQ ID NO: 63339 - protein, 113 aa, Zea mays
  Coding DNA Sequence Number=SeqID_19964
MTQSETWRPWWNNSGQSYVIGIGYGRRTANYEISEQDSAIDWAVNSRSIAWDREAKARARVAELSAALDSLPSGTVDEGPDGELDLFRPPPSMNLADERSPAAGNEETKDDED

SEQ ID NO: 63340 - protein, 144 aa, Zea mays
  Coding DNA Sequence Number=SeqID_19965
  Subcellular localization annotation: CTP_CleavageSite=57; ConfidenceScore=5.25e-01
MARAQRRRASDHDCGGASLGAPPPNHYCNLSPTNTNRSQVYHVLAKHSPALTTTPVSSSVRRARARDNKTVELQSSVWRASLTLQAHGAHTKSAGEDAVKRVDGQAANGADLRWRDPVPSSIHWKSSKLELCELHWSMAITEQT

SEQ ID NO: 63341 - protein, 171 aa, Zea mays
  Coding DNA Sequence Number=SeqID_19966
MARTRTTQRKATGPRGDLEAKVERLTSELHHGNRESARDNRHIAGLSAEVNRLQQEIVERDTTIDWAVNSRSFAWDCEANALAPVAELSAALENLQAYYNTLHEEVHVLFDRLHLNVPPEVAAMGAGTSGAPSGGPDGELDLFEAPPSMKLADKRSPKDGSGAGAAKDEDN

SEQ ID NO: 63342 - protein, 162 aa, Zea mays
  Coding DNA Sequence Number=SeqID_19967
  Subcellular localization annotation: CTP_CleavageSite=61; ConfidenceScore=5.36e-01
MKLSFSAKLNFSYIELSQLQLNFKFNRGPGKFNRGPGRFNRGPGQVQPGSRETKIYSKSISQVLERSGSDRPGPVEPPPRAVEPPPDTPGDLTASLTGRLQIRGQRVRDQLSCPQDQFSWSRPESFGEKTPAQLPWGKFNWVWSERSTAEVEVQLELKVQLS

SEQ ID NO: 63343 - protein, 212 aa, Zea mays
  Coding DNA Sequence Number=SeqID_19968
HYGIGGYEIDGSGYDYGAGRQGIAVAVSSDLCRGEVERGPGRGVEERGNHRGFLVRHAHVKLTVAKALAEAQRRQWNGEAKRGGSAAGWVSVRVGRERMWARTSWGSVRGLHLALRRCGRVVGTWARFDRARDERHGRGHGGCGEGTDLTSGTRGQARAGAREYTTALTGQPHCLERKKERARAGERGAAPTSGTHLSAGVDAREASWGVLG

SEQ ID NO: 63344 - protein, 830 aa, Zea mays
  Coding DNA Sequence Number=SeqID_19969
MPSSSSSAANTPLGKSSSEETMSDLAAVELHPGHTVEFGVSRISSVRVQDMQQLGYFGNGIGRVPGAEDIPEPEGEIVLFEAFFTAGLRLPTHHFVAEKRKVGDEIAQFGSCTFTPRTSKTSAEVVELVPCARNKWGNWYDYWFYVAEGEVEDLPGLPAAVMCSHCYVAFPPFDVAEEDSDEGALHCAARVSSERDLVEEFIGYGVWPLVHGGALGEVCPRQMPSLGEQLVQSPAFTLDLRGWDPAAFMREVEDGAVRIVGHYVPRIEALRSWDIRGSNIRLNRVFELNCLPYCGYPGDDTTVAVDRRGKKPVPMTEKGPLQEAAPAAKKRKIGTAVGGLGVSDSFAAELMGTIGDPFHEAKKARGAVKSATPGSSKPLPATKPTAPRPSNASAGAKAAASGTGKPPSGGPAKGRRLPSPARTGEAAARVADFDTDICVGDYFVGSDGGQLAVVLPPVAATSPTAVVGAKGATRDSWATFCTSGEILSAAAAKDVAGSMSQQLRQASQQLKHAADFADLVALGAFTVEFAAEVENLRAQHVDAMRDKSAAESISRRLSEKVAAMEAGRADLRRQLAEERREANKAIADVQATHYEVFDQSDENFELEIFKVEDPVLKQSVRALFDRMWGPHGRETVRERSDRAIDQMAHAESVEDFGFLDGALPEAVEVDPAPPSDAGEGPSSTPAPTATGEDPTPAPAPTCEDASKAMVPTFGPAQATTTENTDFAVETSAVVPADDSVPGSMSECFESDGESGSSFPWTEESLDEGLDYFVALDVAAAETSPRVEGAEDLHVASNRCRRRRVVGRQCVGEFSRSAGAVAWGWSVADFE

SEQ ID NO: 63345 - protein, 98 aa, Zea mays
  Coding DNA Sequence Number=SeqID_19970
MGSPELCWPPGGSPFRTSGLVPHSGNICGLLLALALPGCSDWLLGQEGEVPGCFGGTAVVAEENASNTTAGVGADAGACVLKDLLEHDIDGKLLLNSS

SEQ ID NO: 63346 - protein, 246 aa, Zea mays
  Coding DNA Sequence Number=SeqID_19971
  Subcellular localization annotation: CTP_CleavageSite=52; ConfidenceScore=5.08e-01
MAERRLSLLASQPSWAESSPTRSKVLPLRRGGWVPRVMQAGPEQKKPNRRARCMQPPSDYEHPSTFAQTSGQKGGQPCRRHATAPSGCAPPTSNAPSMGAHAHASRNRRAGSYVQATAPPLAPLPRLLDCGTGTATRGDPAYDPAVPAWRDGQYGQNWAGSNGGGRRGPGKGDTPKRILLREGNRLRASLLIKGSKVGPSEGFNSRLRARGPTPTTGQRFEGRPLGRVQRPPQATRAPRPLLIRGS

SEQ ID NO: 63347 - protein, 198 aa, Zea mays
  Coding DNA Sequence Number=SeqID_19972
  Gene Ontology: Mol. function=carboxyl- or carbamoyltransferase activity; Cellular component=ornithine carbamoyltransferase complex; Biological process=amino acid metabolic process
  Homolog annotation: Hit_ID=Q8SA97; Match level="QueryCoverage=98%, HitCoverage=24%, E-value=1e-24, Identity=40%"; Hit description =Ornithine carbamoyltransferase
VMMTPPVDVVGPRPRLGDVEAPLKSRSSLSSVAEVESEPLGRARRRPSAEAKAESEPWGRAKRSSSSSRAEPESEPWGRADRSSPSSGAEPKSEPWGRADRSSPSSGAKPKSEPWVGRSGVRRLPRLSPSPSPGSGGAEFPMVPEAGPDCLSASLCRVAQQSERRRRRCPSVRPLCADGGYQLRIRSLEGTPNYGPRQ

SEQ ID NO: 63348 - protein, 60 aa, Zea mays
  Coding DNA Sequence Number=SeqID_19973
MAGGKELVGAKEGRLAGDGGDEDDGFGYDYGNGCPRCNHWSGEDEVVDEDFQEFQEYDEF

SEQ ID NO: 63349 - protein, 214 aa, Zea mays
  Coding DNA Sequence Number=SeqID_19974
  Gene Ontology: Mol. function=kinase activity; Cellular component =ornithine carbamoyltransferase complex; Biological process=amino acid metabolic process
  Homolog annotation: Hit_ID=Q6QP54; Match level="QueryCoverage=44%, HitCoverage=36%, E-value=2e-17, Identity=52%"; Hit description =Putative kinase
MAPPVNVVGPRPRLGDVEAPPRSRSSLSSVAGVESEPLGRARRTQVCALGRAERSSSSSGAEPKSEPWVGRSGVRRLPGLSPSPSPGSGGTEFAVFRGLARVRALGRAERSSPSSGAEPESEPCVGRSGVRRLQGLSPSPSPGSGGAELPMVPEVGPDCLSASLCQMALQSVRRRRRCPSVRPLCADGGYQLRIRSLESSNFPLLFGSMSIRGV

SEQ ID NO: 63350 - protein, 48 aa, Zea mays
  Coding DNA Sequence Number=SeqID_19975
MNKNTRDTRFIPRFGHTTKTPVEPAWTPVELEVQLELRKINSAEVQLS

SEQ ID NO: 63351 - protein, 54 aa, Zea mays
  Coding DNA Sequence Number=SeqID_19976
MAKESSYYKEGSKKKVGVCQSSSLYIQKLFLKTKNLLNVLWLTALSFSAELNFS

SEQ ID NO: 63352 - protein, 201 aa, Zea mays
  Coding DNA Sequence Number=SeqID_19977
  Homolog annotation: Hit_ID=A2XNU4; Match level="QueryCoverage=46%, HitCoverage=46%, E-value=5e-20, Identity=54%"; Hit description =Putative uncharacterized protein
  Pfam annotation: Domain name=DUF1639; Domain location=34-74; Score =9.4; E_value=0.0036; Accession=PF07797.5; Description=Protein of unknown function (DUF1639)
MVEIRQTYDADEAAEGAPVPTTEAKKLASFVARSKQEITENFSSIGGTSPPRRPKKRPGATTNQFFPALIDTSFLLLCRMLARQPALALHNVSGALVAKLTGNKNKCGGRSNVQQQNIQPGKSRRREWRALSAADQAQASTPDVDEECKRVLTPLGFSSEDAEKMLKKAFGWTQSPYWSEEREKEVPTTEAVAGVPGSCDP

SEQ ID NO: 63353 - protein, 82 aa, Zea mays
  Coding DNA Sequence Number=SeqID_19978
MAVCPRVEVVVLSHCIATGDREMTALTMPASGTDSHPQGHLTARNLRHVQEPRQEVAPRQAPAVVQAEGRGDPGPAGEQGRV

SEQ ID NO: 63354 - protein, 121 aa, Zea mays
  Coding DNA Sequence Number=SeqID_19979
MDSGGSSGSVTAQGMAGNTSVSLERVEAGGGREGGDIRDLVHAHLHRNLDLTDLVQQYMPPIGLSPGARSSSMSRRCESEALDVVGERAGEGVVGEVEGSGCVIGVGGRAGVDLLISVYGG

SEQ ID NO: 63355 - protein, 47 aa, Zea mays
  Coding DNA Sequence Number=SeqID_19980
MKLRQGDMSQDEGVNRLKDEMTIRPMIVCVMVVIDCKGYVLHDLRPK

SEQ ID NO: 63356 - protein, 200 aa, Zea mays
  Coding DNA Sequence Number=SeqID_19981
MWGAHGREAVRERSGRAREQTERAEDVEDFGSLVSAPPEAAEGKPVLPSDAGEGPSDAPVPAAAGEDPVLAAVPTAEGTQEDFGPAHATATESANFVAASTVVAENDSDDFVSKFFESDGSGSSVVWTEESSDEDLDYFAALDVAAVETSPHVMDAEVLGPSAGRRRRRTVAKRRVSEVEGGRLRVDRAGKRELLSSPAG

SEQ ID NO: 63357 - protein, 185 aa, Zea mays
  Coding DNA Sequence Number=SeqID_19982
  Homolog annotation: Hit_ID=Q6JAD6; Match level="QueryCoverage=64%, HitCoverage=16%, E-value=3e-32, Identity=57%"; Hit description =Putative uncharacterized protein
RLSSRVRSTPDIFDPSAPARHYHSSRRYLSHHYPLYTHSLHHAYFHCSCSRSHSASPLAFFQEHDKTQVRPLAADARLFDLHRATIARVCHFRDVLVDSWLLAQRDPTASPLFNTQTHESYYSAQLTAQIALRAHRRLDMAALRTTAGSKVEGHITYLSDLYSFLTFGGHYVEAWVHMFLHYSMD

SEQ ID NO: 63358 - protein, 427 aa, Zea mays
  Coding DNA Sequence Number=SeqID_19983
MRGKANCYCLDKVQLSVLHPGRRSCRARVAAVTGLTEGANFDNAGLVGHERRQLQHAWHAGSAGSGAASDVASYRLVRAWLSVHRTGDCRAPRRSGMSAALPASPTAPRGSSKTSYAARAAGAAAIRRRGAGTQVAAVIGAEVVAAREGFSADETVGATCGRNPGSLALMACPRPSCGGMGEGLSTAAFALRSLLLLFSRLKRRSLSLLVQWSPASHLEFVVPQALWSGGCSYPREWNRSSVCNGTLSMGNLRPLCDELEPEAAVLAWTEAESARKEASSAQEQVASQAEEVQQLRLELGQVIRERDQPRSHAAEVVSQAEVLGGQLAEATERPAEVEILPPVSPSEAGPDSAEGGNDAEGAVVPSADIRTCRTSLSVDLFVGSRIAYPSESYFSRKVMSEDSVIDILEKTQKSFRQKSFRALGLVR

SEQ ID NO: 63359 - protein, 307 aa, Zea mays
  Coding DNA Sequence Number=SeqID_19984
  Homolog annotation: Hit_ID=Q6J9V9; Match level="QueryCoverage=27%, HitCoverage=31%, E-value=4e-21, Identity=66%"; Hit description =Putative uncharacterized protein
  Subcellular localization annotation: CTP_CleavageSite=62; ConfidenceScore=5.15e-01
MEEAKPPHAEHVTAPRLQALLHPRRNQRSKGRTAMQVACNRTVVAHPFGFVASGMQAQAHTSCNRRAGYYVQETAPPLAPMPRLLDCGTSSETRGSPAHDPTVPIEHNDHGSVSRGRRRDGTGKGDISKGILLSEGSGPRALLLIRGSKAGPSEGFDSRPEHSGSKPITDQGGSEAGPSEGFDSRPRARRVRDDSGYVRYMAEARATLPRPRPQKEVSASGLSLNLGLGRRYPPRPTPGLDLNFGLGRRSPPRPTLGLGLNLGLGRRSPSRPTPGLGLNLGLRRSLRLARPWARIDRAMGDTSFPYR

SEQ ID NO: 63360 - protein, 134 aa, Zea mays
  Coding DNA Sequence Number=SeqID_19985
  Subcellular localization annotation: CTP_CleavageSite=40; ConfidenceScore=5.50e-01
MGAFVRSAFKFPRASLASGVQVKRSVFLKRLYKGSPLSPRREMKRLRAARHPMTLCTPFKSLIGPMLVIAAIFSGLASMPRSETMNPRSMPRGTPKTHFSGLSFTPFALRHLNDVSRSERRSEAFLVLTTMSST

SEQ ID NO: 63361 - protein, 169 aa, Zea mays
  Coding DNA Sequence Number=SeqID_19986
MDIMRVLKVITDKDVGEEVIRNKTKDISTIKDGVKTGPANGKGEGDLPSQFALAWEIRATGRVDNVGHGENIQSGVNPIAGRTVRRVPPWLIALASPEFTVAINRSRCSSVQLIELDLGRSLGTPRIILENEEEITVEEEETAPSTENPAAGNCFYFDICGTEPDSPTK

SEQ ID NO: 63362 - protein, 49 aa, Zea mays
  Coding DNA Sequence Number=SeqID_19987
MAEAMNELPRAVYCDVVSENCDDGSPAVKGDESWDLFQLLYNGILIESA

SEQ ID NO: 63363 - protein, 608 aa, Zea mays
  Coding DNA Sequence Number=SeqID_19988
  Homolog annotation: Hit_ID=Q6QP51; Match level="QueryCoverage=36%, HitCoverage=95%, E-value=2e-07, Identity=30%"; Hit description =Putative growth-regulating factor 1
MQARTLTRERSSTLGGLLQESGPSKRLGRPPRSLSQLSPEDISPARGLGNSTPASVPPADGPARLRSTKSYFRANSASVHADTTTSGFGSSKSGRGRVLVLEMRKKHGSVPKIHTCSGPNSHNEQTPTLKVPLQTELRFHLRRYEQPPPPIGWPAEQQKADGWLAVTRSSSSDNDFCSERPNSSSDDLRADAAAIRPSPTSPFEGRGRAEGRRVGGQSAGDTNYLVGGETSSGCRGGRWHRKQRRSRSDRRAGHAAAAGATNDERPSPRLLREGAGRCPRGDRPQLGALPSPALTMNILEAEGGAEAAARLASPHLGAGDQRVKGRTAMQVACNRTKWAHPFDSNASSMEAQAHTSWIGKGDTPKGILLYEGNGPRAPLLIRGSKAGPSEGFNDRLRALGLRAHYWSEVRRPAPRKGSTAASGHSGSTPTTDQGFVGWPPKGSTAASDAERGMTLAAKSGLGRHRKLRLARPQGSDSDSAPEDDELRLARPQGSDSASALEDDELRLARPQGSDSASAPEDDELRLARPQGSDSASASEDDKLRLARPQGSDLALASADGLHLARPRGSDSTSASEDKFDLDLGGASASPNPGLVPTTSQEGPSLPYP

SEQ ID NO: 63364 - protein, 79 aa, Zea mays
  Coding DNA Sequence Number=SeqID_19989
MNRQSSFGVQEIELFEFYEAEDPEHLFGEGKGLERFLECLFIRTYSLDDHPGKQCSHEGGIEGAKADLQEFQDFDEFED

SEQ ID NO: 63365 - protein, 146 aa, Zea mays
  Coding DNA Sequence Number=SeqID_19990
MSQAWSSTARSRRRSTARDVVEPRPLVVVAAGTVPIGVDLEAPIDDVTGLPLIMCPDCKDVRVFAANTTYSNNVGKRFFKCPRKNRRNGTCDRFWFEEEYLVFLQDNGYLPSASSTIAAGSTTKVPELVGKNCQLRAKSEQGDGNG

SEQ ID NO: 63366 - protein, 246 aa, Zea mays
  Coding DNA Sequence Number=SeqID_19991
GEDEVGPATTAGPSATGATDWGGAQGTHEARPSRHHRGEAGSAGIQKTGSAGFQAVSAGRIRVERDPALYGRLNEEVGHLGDVDPRAVDLAMRIVERMFLKMKEDEAKNKIEEEENDRWRPNDESTSSQGSSFKSTSHMCFVASGSDSESESEDEDEHESDSEDKDDLQKFFAQLSKKNQMSLLKLMERAEEQKEMLHKQEDILIEKIKDLEKLTKEHEKLKCSHDDLVQRESVTLNLLMIIVITW

SEQ ID NO: 63367 - protein, 142 aa, Zea mays
  Coding DNA Sequence Number=SeqID_19992
MVAAGRETCRGGHWRAAGREKGGPDVQTGERRRTAGGCWLLPRWAAERCWTPGLDRWVLVANGATVAACRSRTAGDQASTERVVQRLSQVGFLLDSGCLGFALLGPLGYAPIVFLAAIALLANEQSTQFYPLSSTRLAAWHS

SEQ ID NO: 63368 - protein, 23 aa, Zea mays
  Coding DNA Sequence Number=SeqID_19993
VKKKENDVEANLQEFQDVDEFED

SEQ ID NO: 63369 - protein, 423 aa, Zea mays
  Coding DNA Sequence Number=SeqID_19994
  Homolog annotation: Hit_ID=Q6QP51; Match level="QueryCoverage=26%, HitCoverage=45%, E-value=8e-30, Identity=63%"; Hit description =Putative growth-regulating factor 1
MAERTEGAKPPRVERATAQQLQALLHLRPDQRVKGQTAMQAACNCTKGAHPFDFDASSMEAQAHTSCNRRSDYYVRETAPPLAPVPCLLDCGTGAATRGNPAHGPTVPTEHIGHGDRERGYSERDPSPRKKRAPSPPTDQRFKGWPLGRVRQPPQSIRASRLLLIRGSKAGPSEGFDNRLRALGLHAHYWLAPEGFDSRLRARRVRDDSGYVRYMAEARAMLPSHFAAPLTDLTGKQRRLPCSDCCATRQRLGLNLDAGRRTPPCPTPGLGLSLDLGRRTPPRPTPGLGLSLDLGRRTPPRPTPGLGLTLDLGRRSPPRPTPGPGLSLDLGGVTASPDPELGPTTSQGDIIILPLASSGYGEQDRRSIWLAPVKHLMMAPRVLHDDDGSQPLTEARRRQQGSDSPDSCTSMGLKRSSDSHNIT

SEQ ID NO: 63370 - protein, 76 aa, Zea mays
  Coding DNA Sequence Number=SeqID_19995
MATEKWLKKSFKEVKKASMVLGSNIAVSSPPSEPAEASPGPHPKGDDEIRKMAEAIMDKVVNQLLNEAAEVVLRED

SEQ ID NO: 63371 - protein, 236 aa, Zea mays
  Coding DNA Sequence Number=SeqID_19996
MEVVELVPCARNKWGNWWDFWFYVSEGTVEDHPGLPVAVMCFHYYIAYPQFEVVEDDEDEGALRCAARMSSGRGLVEEFIRYGVWPLAHGWALGEVCPREMPSQGGQRVRCPAFALDLRGRDPAAFVREAEDGAARIMGRYVSKTEGLRSWDIRGSNDRLNRVFELNRLPYGVYPGEDAADRRGKKPMGVTEEGPSQEAAPATKKRKLGTVVGEVGVSDGFVVELMGTWLYGCGSC

SEQ ID NO: 63372 - protein, 719 aa, Zea mays
  Coding DNA Sequence Number=SeqID_19997
  Gene Ontology: Mol. function=protein serine/threonine kinase activity; Cellular component=intrinsic to membrane; Biological process=regulation of transcription, DNA-dependent
  Homolog annotation: Hit_ID=Q69JW8; Match level="QueryCoverage=86%, HitCoverage=100%, E-value=0.0, Identity=60%"; Hit description =Loricrin-like protein
MGDEEKSTPRRTKLGGAVGDNDRGREERSKENEAAVGSARGWLRFPDPPTSFAEAAASPPVLRPRGRNIIRPLFFEISGVLSHFVFHHCYIVSTVMDNGFMDIPHPPLVNDPFVLVGCPAPASTMENMGQSTICMDGLNPAMVSCSHVNGNTHIMNGLTARDDGSRLLLGLGPTPNFYSAVSTGSKQAQRLSGQSSTSIDSGMLKLGLQTDDREAIQYLQQAPNGALHSLDIVDEASTSAAVRNMGGYMPSLLFAPCSNSIANETQVENQDSLDLTHSTSNSQHLQHDLQLSPEPSATTESSFGMSSDVVTATTTSERSHSRHPKKCRFKGCSKGARGASGLCIAHGGGQRCHKPGCHKGAESSSAYCKAHGGGRRCEELGCTKSAEGKTDYCIAHGGGCRCQHPGCPKAARGKSGRCIKHGGGKRCSVKGCIRSAEGKAGLCISHGGGRRCQYPDCGKGAQGSTLYCKGHGGGKRCIFDGCSKGAEGSTPLCKAHGGGKRCMFEGGGVCAKSVHGATEYCVVHGGGKRCSVPGCTKSARGRTDCCVKHGGGKRCKVDSCGKSAQGSTHFCKAHGGGKRCTWSTGCEKFSRGKSGFCAAHGTLMARQREEEVVKNVGSMIGPGLFSGIVASSATAASSMTNEHSASGVSTASDCDGTVRSQSMIPPLVLVPRSMMPSWSTEPVDGGREGGHVVPEGRVHGGGLLSLLGGSFRDADVEKL

SEQ ID NO: 63373 - protein, 127 aa, Zea mays
  Coding DNA Sequence Number=SeqID_19998
MAPKRASSKAAPSIDEAAKAALLAEKKGKALTDNTHQEASKDEAVSKRQRQEHPTPEGTLHTCSSRGLPQAPPLGFAPPEGEDAIEDDEVIGISAEEQLQLRALHIKNHNLQKQKDILEAKRQRVTA

SEQ ID NO: 63374 - protein, 220 aa, Zea mays
  Coding DNA Sequence Number=SeqID_19999
MHQDDVRLAAIVNQDFVSTSLASKSTLDPPVIMWMTPRYGCSAKSSCFGAWGDFGGVGSGDAEAEVGVEQLVLPDGADMCGWVDARRGRCCMVVVGGGGMCARRLAGCQLAVLETSCPWWPLFPDNVLLGARNPRHEIGSKICVVAVPVPGPALLCHYRGPEGIFLTADGLACGVLVGYVVHLLLTAAVPSGVWLRRPGPGSAGLRRVLRLSLRFDLSLM

SEQ ID NO: 63375 - protein, 54 aa, Zea mays
  Coding DNA Sequence Number=SeqID_20000
MSIIKDEAEVRIVTDKGENASKVRIGKTPFSNRYGKDDISKGMQKRRLQRIGSR

SEQ ID NO: 63376 - protein, 180 aa, Zea mays
  Coding DNA Sequence Number=SeqID_20001
MENKSHRLMEKLVAAEAKREDLSRQLAAERKDANRACTEAQAAQTEAKPARAEASLARQCAEEVETSYNSLLDRLDKEEAAIHAEVDRTHAQLVDAYRELGARTAPFDASGAVNALSREGCGHFEVFDRLDEDFKRGIFQVEDPVLKQSARALYDRMWGLPFHETVRERSDRAMEQVTNL

SEQ ID NO: 63377 - protein, 137 aa, Zea mays
  Coding DNA Sequence Number=SeqID_20002
  Subcellular localization annotation: CTP_CleavageSite=58; ConfidenceScore=5.81e-01
MKSPAPGSSKPPPAAKPAVPGPSKSSSGARAITSGSSKPPSAKPTKEQGPPSLLRTAEAAAGGASLAMDICVDNYHVGGVMMFDAHTGRGLVVVAAEAKGASQDPWSMFCASGEITSTATVKDVAGSVSQQLKHAMQ

SEQ ID NO: 63378 - protein, 67 aa, Zea mays
  Coding DNA Sequence Number=SeqID_20003
MAVNSAPFAMEWKRGDAWILSDNSGRLESLARLKLWGYATIGWLRCDCGHYSTTNHTQSKIQIKQVS

SEQ ID NO: 63379 - protein, 146 aa, Zea mays
  Coding DNA Sequence Number=SeqID_20004
MSSRSPHASCLSIFRAPDEGCPQSFRLVVGEMQLRGSWYLSATVRLQGFSSRGPAASPHRWSPKTVTTSPWVGRSKPGCDLGSALSFKDVHHPCWGGGRAEPELCLPRGFVGQPPPKHSRERALTGPASRADFDNAGLVDGGCRQL

SEQ ID NO: 63380 - protein, 333 aa, Zea mays
  Coding DNA Sequence Number=SeqID_20005
MARLRHTARKSVIPFLPSRLAERPLRRTVSGQSSHLERLHHRLREEQERQRQHREQQGSSFPPEQEVESVRRRSSVPQLEAPPAPPRDAPAAGGGPGGDPDDDSDHSTESSEPQEAEGWVARPITRDAARGCHFHDALDTLLRQAFDRHTWSIEYRCVVYQHSRGRYSDRWEATCLVRRPEDDLRGAEAVSEHYSISERDTAAHYARCSTTCTFPVLSLFGGVADGLNLRYYPRRSTGSTESVVVSPVGEGNPRLSSTVNLVAVLNTELDHSLDELSRARTEIAELRAELAERRHQEGGSPAPVGTQDPYRSPPRGHHTYGSPACKTRIDLDP

SEQ ID NO: 63381 - protein, 63 aa, Zea mays
  Coding DNA Sequence Number=SeqID_20006
MANDTDAHGVRRGEVDGGTTLEQKQQKYVASSPKNNKGINPEYGILSKSYPTKEKTLKGMLDK

SEQ ID NO: 63382 - protein, 183 aa, Zea mays
  Coding DNA Sequence Number=SeqID_20007
  Subcellular localization annotation: CTP_CleavageSite=15; ConfidenceScore=5.12e-01
MAVAGHGPPATGTQRAGARRGSGGGPAGRSSDGREKLGNGAPFVGAKWAAAALGAPRERAQQSARLSARPGRWAKRSRGGGAWAALPAACARALGWASGLRGGWAAQTRAGPSGCWRAGLGAGCARGVGWGGRDARARERVQARGGRKGQELGRALWAERGENEGGRGGAGGLAEMGQGGRLG

SEQ ID NO: 63383 - protein, 155 aa, Zea mays
  Coding DNA Sequence Number=SeqID_20008
MNKRPAFKVPLQTELRFHLRRYEQPHSIGGPAGQQKTDERHAVTRSSSGDDDDFCSGGPNSSSDDLRADAAARRPSLVPKLVRQGRAEGRRVGGRSVGGPGYLVGSESQARGSCQRHERQTPFPPITEGRSGPPPTQGPTPTRHTPLPSTDDENP

SEQ ID NO: 63384 - protein, 213 aa, Zea mays
  Coding DNA Sequence Number=SeqID_20009
LMPSSSAESPQRFSSPPPPPLAAVISVQLHHAGDVALQLYLADVLVLTAPVGSSADVFNQPRRPPLQLRPAVDACLPVLAFGSTSLSVSRHRAVSAIPSSSSFVPCVAASSSSAQALASSPSLYGFGVVVFHLAVTTSWSFGASTNHCLAALPCGAPYFLSSADGLRLARPKGSDSTSTSKDILDLDLGGASASPYPGLGPTTSQEGPSLPYP

SEQ ID NO: 63385 - protein, 299 aa, Zea mays
  Coding DNA Sequence Number=SeqID_20010
  Homolog annotation: Hit_ID=Q6QP51; Match level="QueryCoverage=29%, HitCoverage=40%, E-value=8e-25, Identity=64%"; Hit description =Putative growth-regulating factor 1
MKILEAERWLKGANPREVVLLQQQQDEGDAGGSPHSRPQASRAKSSPTCSRVLPLRHGGWVPRVMQADPKRKKPNRRTRSVDRERGYFERDPSPRRKRAPSPPTDQAFEGWPFGRVQRPPQSTRASSSLMIRGSKAGPSKGFDSRPRACRARDDSGYVRYMAEARAMLPRSRLRLLKGRDLASLEPSLGRRRSPPHPTLGLGPCLGLGRWSSPRPTPGLGLNLGLGRRNPPRPTPGLGLNLGLGRWSPPRPTQGSTSTSTSGRIASSLDPDLGLRRSLRLARSWARTDRTMGDTSLPYP

SEQ ID NO: 63386 - protein, 59 aa, Zea mays
  Coding DNA Sequence Number=SeqID_20011
  Subcellular localization annotation: CTP_CleavageSite=3; ConfidenceScore=5.00e-01
MARARATAALPTTRPVALTPRRDKRRFWQEKRATLRLRRNNRAKKGTGEGGYPEKDPSL

SEQ ID NO: 63387 - protein, 79 aa, Zea mays
  Coding DNA Sequence Number=SeqID_20012
  Pfam annotation: Domain name=GASA; Domain location=1-60; Score=-42.3; E_value=0.043; Accession=PF02704.5; Description=Gibberellin regulated protein
  Subcellular localization annotation: CTP_CleavageSite=57; ConfidenceScore=5.28e-01
MTAALLLCFLFLVVVVAFAKGHKMGRKNMKPSQCGRNYRRRCSKLHQKKSCLFSTTSAAPSAYRASWPRTRWRRCGALA

SEQ ID NO: 63388 - protein, 136 aa, Zea mays
  Coding DNA Sequence Number=SeqID_20013
MDPKKHSPPLAHDGPAAFLGLGSPALLHWALILIDTRAAASVPATAGGGGSSQQAAHLTPAYAVQHRVLSGDVAEQSGAGPERSCFGTTRLFSSASSGVGDHVVAAPRPAPWEDVVSLAATEPRSACVSGDEYCTA

SEQ ID NO: 63389 - protein, 35 aa, Zea mays
  Coding DNA Sequence Number=SeqID_20014
MARLRAIKDEPGGWKNFIFIDCSCNSPNNSNSPNS

SEQ ID NO: 63390 - protein, 452 aa, Zea mays
  Coding DNA Sequence Number=SeqID_20015
  Gene Ontology: Mol. function=ubiquitin-protein ligase activity; Cellular component=ubiquitin ligase complex; Biological process =protein ubiquitination
  Homolog annotation: Hit_ID=A2Y538; Match level="QueryCoverage=96%, HitCoverage=96%, E-value=1e-119, Identity=56%"; Hit description =Putative uncharacterized protein
  Pfam annotation: Domain name=U-box; Domain location=29-101; Score =61.5; E_value=2.9e-15; Accession=PF04564.6; Description=U-box domain
MDAAIAGQQARRRIQPPEPLVMAGTPPTPAAFRCPISLEVMRSPVSLPTGATYDRASIQRWLDSGHRTCPATRLPLASTDLVPNLLLRRLIHLHAATLPPSPSPEEVLSQLAAADGEPAAAEKAVRSLAAKIAPEKGKRASVASAVSADLDSAVPALLSFAKGGAGADARVDAVRVLATVAPELVPYLTGDGTENRDRVSMAVEALAAVLSAEGIAEEAREGLVLALVAEDLGRVVTTLLGAGANGAAVLEAMLTSARVDADAKTAIADRPELFPDLVRILRDAASQAAIRCMVAAVQVRGRPARASMVRAGAVPALALAVAAAPTAAAESALRLLAEAARCGDGKAAIGADAAEVAAAVMGRMIRVGPAGREAAVVALWLCCCAGGGDRRMREAVASAPEAVGKLLVVMQGDCAPTTSRMAGELLRAVRMEHEKKGMAAAYDSRTIHVMPY

SEQ ID NO: 63391 - protein, 186 aa, Zea mays
  Coding DNA Sequence Number=SeqID_20016
  Gene Ontology: Mol. function=zinc ion binding; Cellular component =nucleus; Biological process=regulation of transcription
  Homolog annotation: Hit_ID=A5HWF9; Match level="QueryCoverage=57%, HitCoverage=34%, E-value=2e-43, Identity=78%"; Hit description=Dof zinc finger protein 10
  Pfam annotation: Domain name=zf-Dof; Domain location=76-138; Score =132.4; E_value=1.3e-36; Accession=PF02701.6; Description=Dof domain, zinc finger
MCPWRVALLRVWRVLHMIGAKSPIMHTQLARTVFIPIAHSVVVATRMLSSHRESLLPYAPGRRAAVLLDHRRYRPNVEVAPSCPRCDSPNTKFCYYNNYSLSQPRYFCKGCRRYWTKGGSLRNVPVGGGCRKNRSRGKPVRAVAVDSVAPSSGGAAAFTHRASASSSSASPVTHGRTSYWHTQPHH

SEQ ID NO: 63392 - protein, 48 aa, Zea mays
  Coding DNA Sequence Number=SeqID_20017
METRPSSIPRTRETGTRLCCALLNRCDVVRGTKEPCRDHVHGSAGLDC

SEQ ID NO: 63393 - protein, 262 aa, Zea mays
  Coding DNA Sequence Number=SeqID_20018
MIRESGAVHAVQGDTRWGPSAHWCLRCRRGEVLIEVAALDVLATLARPLQGDLASSPARLRSSSARRSLVCAPLTEGEHTDADASCWRRDDRGLDLVEVECAMSSSRSTSSHHCFMAPGEAVELGGCRSNSLAADNAPGVALDGVRDVCAAVCCRATCIVAAPDTGRLGTSETNGEASCIRDGEHSELLGTGAQFDNRLDRLRPLAYVTGHQPRGSSGLPPSRVARARRVVRIGVGSGIHPWKSGPNDASWGASSSFVARCP

SEQ ID NO: 63394 - protein, 31 aa, Zea mays
  Coding DNA Sequence Number=SeqID_20019
MARSLRWSPLLVSVRVAKLRVRTPSGRSSRY

SEQ ID NO: 63395 - protein, 70 aa, Zea mays
  Coding DNA Sequence Number=SeqID_20020
MAYDVLYNPPGRHRSSMAGDAGDAMDVVDLRTARPSLVRWTDSRTPTKRQEVTTGGRLQPGCMMKIIEAE

SEQ ID NO: 63396 - protein, 208 aa, Zea mays
  Coding DNA Sequence Number=SeqID_20021
MAERYQLPRSCVPPTTRRKDCGCPPSGGSEGGKTRCIREREDMVAFQGGHPPFKGDSPYLRPQPSWAESSPTRSKVLPLRRGGWVPRVMQAGPEQKKQNRRARCMQPPSDYEHSSAFAQTSGRKGGRHATAPSGRAPPTSNAPNMGAPRPRVMQPARRSLRASNCTATRTTATPPRLRNQYRASKQPCIRPSSASQARRSIRPKMGRQ

SEQ ID NO: 63397 - protein, 134 aa, Zea mays
  Coding DNA Sequence Number=SeqID_20022
  Homolog annotation: Hit_ID=Q9DUM3; Match level="QueryCoverage=91%, HitCoverage=11%, E-value=2e-07, Identity=22%"; Hit description =Latent nuclear antigen
MASRQFAFERSELERDRKDYKKDLQKVFARELEVARKEKKVTKKEEHLDQREEVITELQAKLDAFNKMLEEERVQQPATVETLQTLQWGLDDRASSLALAEENLKEKDASLDKRAVDLAWQEKDLAFREEMFER

SEQ ID NO: 63398 - protein, 182 aa, Zea mays
  Coding DNA Sequence Number=SeqID_20023
  Subcellular localization annotation: CTP_CleavageSite=82; ConfidenceScore=5.05e-01
MTYGEKLMHQLSKIVVLLNSQQLCKQHAVAAPTNGTARRGALPRWSPPALASGEDDRMPRQRRRSFSFDSGGNRRRDDVTARSPVRWTPPVRRLCSLATRGLLAAPLRLPLPTGSGFDLVVGFAVRRRGGNGVGDGVLLGSFYMARPQQRAVAVRWGLKRHINIRRVFAKAPDIQPIVISKV

SEQ ID NO: 63399 - protein, 156 aa, Zea mays
  Coding DNA Sequence Number=SeqID_20024
  Subcellular localization annotation: CTP_CleavageSite=58; ConfidenceScore=5.75e-01
MWPPLRLPVAFVVGLSGVLSSSSSSAIAVVAASSSSLCSGRRPAGTTSSWGCAATRAAAAPSVGRQRGTNLRWGSYSFFRPARNPRTGFSLEPEGWQRKYMYGGGYTAEVLASAGPGTWRITGTPPLGCVTCNSTSDKRTGQCFGRRPTGKRPSHE

SEQ ID NO: 63400 - protein, 329 aa, Zea mays
  Coding DNA Sequence Number=SeqID_20025
  Gene Ontology: Mol. function=zinc ion binding; Biological process =regulation of transcription
  Homolog annotation: Hit_ID=A5HWF9; Match level="QueryCoverage=59%, HitCoverage=59%, E-value=1e-16, Identity=35%"; Hit description=Dof zinc finger protein 10
PSEPTLSWRPDRPPGPGGSLGPVLAVSPAAPATLRPDMLLEGMLGSPSELCQLTVTDDDAAENPAVAPDGPRIDLALLYAKFLNQQPPAPERRAVLPESLVVDTLSGSSSSDVGPVVPSRDHQPFTTQDDGLGELSAAASAEPSAPPPQSSSCAEALIGAFGMDQRCYDSLGLPPDGGDLVLPSTWPLLGAKYELFDPLPEDAVSLQDGFAGDEDVWSGALACQGLEAALCRPELVKRAGSRAGNVPLLPHITVTGLASSPWPTLTHVDATTSPLQQYTLALADRRIQVAGRREQEAGSFVAKLFPVAGFRRPGPNGSLILPGLIGFQI

SEQ ID NO: 63401 - protein, 37 aa, Zea mays
  Coding DNA Sequence Number=SeqID_20026
MGLIGCRLEGVGWGNQTPSHVWSTHAASLDRIKVTLD

SEQ ID NO: 63402 - protein, 505 aa, Zea mays
  Coding DNA Sequence Number=SeqID_20027
  Homolog annotation: Hit_ID=A2WXP7; Match level="QueryCoverage=77%, HitCoverage=65%, E-value=1e-123, Identity=58%"; Hit description =Putative uncharacterized protein
MATEVKQTYFSWSQGESTERDGPQGVSVSQTLDHGSISFGRFELESLSWEKWSVFTNDRRNEEFGKFNGLVAQKKAYFEEYYKKIRELKASQQQNQQTELILEYSGDGSDSSQTAEEEQGADLETPTGSGAAVDVYVEEVDFCSKLTMMLEFLFRGDNSTSKLYAAPQNASSVHDGTRKTYEAARTPRRIIEKDSRLRHSPKIIPKSVKALSQSAMDYTFTSERPGSVKPNTTTSQKAKPVQRPNAASQKMSASTERSKLTGLRRPSSAGAQRPSTGERHAIARENSQLPVVVSTPRRPSTAERRPVTRDRAEKQANVTTPRRPSTSERLPIKRETAAKHNDISAVRRPSTGERRAFSRDGVLRTDVKTPSKARATVAHPMSEMTTVGNTRKAITPNAARSSKLETKRLLLHTDRQILESNMAVKVVLAIFPDYNFWFCSSVNLPPRKIFSSTAGEPSVGTISRSKKKETFIRKQTSYYKVIIRTAISPDLADWIRPYKTDPLPY

SEQ ID NO: 63403 - protein, 221 aa, Zea mays
  Coding DNA Sequence Number=SeqID_20028
  Subcellular localization annotation: CTP_CleavageSite=57; ConfidenceScore=5.24e-01
MELDGKLFVNTQQSPTWRANCRRFDPGGSLDRRGVTSVRVGERERESVSLCVSPSSRATTFSYESPGPSFYRCKERAQRPSSEVEVESKPWGRARRRPSSGVEVESEPWGRARRRPSSEVEVESEPWGQARRSFLWRPRLDLAAVGLTLASGTTVGAGQAALFSFRIKCQAILALNAPAIRSVGVAIRPRLLLREACPSWASGESKLCADGGYQLRLGVLG

SEQ ID NO: 63404 - protein, 30 aa, Zea mays
  Coding DNA Sequence Number=SeqID_20029
MKDRSGNGEEVCDGRVGGLKSLALGDNTVG

SEQ ID NO: 63405 - protein, 308 aa, Zea mays
  Coding DNA Sequence Number=SeqID_20030
  Gene Ontology: Mol. function=catalytic activity; Cellular component =cytoplasm; Biological process=cellular metabolic process
  Homolog annotation: Hit_ID=A2XXX1; Match level="QueryCoverage=60%, HitCoverage=73%, E-value=3e-45, Identity=53%"; Hit description =Putative uncharacterized protein
MVLNSSTLSDEGFKLNARDWLSSSTSRKERWHPAWADLGGARTARVFIALTLERKEKKKRREAAGEWTKAGMHGMAGRQAGTPFPPSFLDCKLPKATGSASADPPRQPDAADPPLLAVSGLSGVGSTRQRPPRYPVSKVLLEKEASRFAEEHGIGLVTVCPGLTVGAAPAPTARTSVPNCLSLLSGDEAAFAVLDAIESATGCLPLVHVDDVCRAELFAAEEGAAARRYVCCSLNTTVAELARFLADKYPQYGVKTNLFSGERLEKPRVCLSSAKLVKEGFEFRYRTLDDICDDMAEYGKALGILPDL

SEQ ID NO: 63406 - protein, 137 aa, Zea mays
  Coding DNA Sequence Number=SeqID_20031
MGKRNKRKREPTPPSEDFGDSEYSEEEFSSESEGSPAPVSPPASSDDLDDSQGIAAEVWTYIRAVERSGLEGSDESEYSSDEEDSPEEDDDGDDDDDDDDGGDGGDDGDGDGKGGDGGSSRSSNGGGSSKGSNKASG

SEQ ID NO: 63407 - protein, 178 aa, Zea mays
  Coding DNA Sequence Number=SeqID_20032
MALFRLQHMQKLCGSLFAEPGVCIPMVRSLERTDRAHRDQKSNSSNVPLARQKGFNPNLAMARVNFDLARAALTYLLRRCTDRQVIEKPLRLPPALDLWSPTRSRPEEKEAEAQPYIMCLVCFLCHAYGKGDGFSTASCASTADGMEGSGSGDPWCGGQISLGSTGRIKDLTKGPRAQ

SEQ ID NO: 63408 - protein, 73 aa, Zea mays
  Coding DNA Sequence Number=SeqID_20033
MAIWPRLLLGEGWASGEPKPCADGGYQLRLGVLGVPLIMVPDTKSQYSPLVLVGAPTQGYRSPLVLARTKCSL

SEQ ID NO: 63409 - protein, 75 aa, Zea mays
  Coding DNA Sequence Number=SeqID_20034
MRCQAILALNAPAIRSVGVAIWPRLLLGEGWASGEPKLCADGGYQLRLGVLGGAEHGVSSELLTGNPSGRPCPIC

SEQ ID NO: 63410 - protein, 521 aa, Zea mays
  Coding DNA Sequence Number=SeqID_20035
  Subcellular localization annotation: CTP_CleavageSite=80; ConfidenceScore=5.03e-01
MGVPDFCAHWRAFNALQVAVDAEVSVASMAHRTCPVNYSGLAVVNSRSWRVPEAPFLGAPDTVRPAASPRRWSPKTVTTSLMVGRSKPGCDLCPALSFKDLHHPCWGGGRAEPELYLPHGFVGHLLLQHSGEKALTGLAEGGDFDNAWSSGRKRRQLQHAWFAGSAGSGSAPGAPSRRRAECGYLAAVRSCAARTRGPPKTSRAARAAFVFLGCPALASVRRLHAEVGAEVVAAEEVLVTDEVAAAICAPGLRLFGFDSLSSPLKWGRGRGPCRTSVCPKVIAAAVWPPGAKVVVAAAGAGGGEPHGILSSRRPSNVGVESLGSVGLAARGFSCPVKETLGRSAMSRSRRQPVSAWTEAELARKEAPVGRSLAGPSTGGTNARSRVAEAMSRADVLGGQLAKATERPVEPSAWAGFLEEALAAMAQARIVYPSESYFSRKVMSEDSIIDIVEKARKIVSAEEFSSVKTCSVSGIAYPSVSYLSQKVMSEDPTIEVVEKHERCSGRKTFSEENLDAEGVPPF

SEQ ID NO: 63411 - protein, 155 aa, Zea mays
  Coding DNA Sequence Number=SeqID_20036
MGKSNKRKREPTPPSEDFGDSEYSEEEFSSESEGSPAPISPPASSDDSDDSQGIVVEVWTYIRAVERSGLEGSDESEFSSDEEDSDGGEDKDDDDDDGDDDDGGDGDGDGSGSGGGSGGKGSTRGGSSTGSTRGGSSKGSTRGGGGKGSSSKASG

SEQ ID NO: 63412 - protein, 229 aa, Zea mays
  Coding DNA Sequence Number=SeqID_20037
  Subcellular localization annotation: CTP_CleavageSite=18; ConfidenceScore=5.51e-01
ENSAACPASTVVPLARVRPTAAKSSLGRHRKLRLARPQGSDSTSTSDDSLRLARPQGSDSTSTLEDGLRLARPQGSDSTSTSDDGLHLARPQGSDSTSTPEDGLRLARPQARTPPRPRTTVSASPNPRARTQPRPRRSHCLARPRARTDHVTRGAIITLPLASSVYGEQDWRPIWLAPVKQVTMAPHVLHDDGGSQPLMEARRRQQGPDSPDSCAPTRLKRSSDGHDLT

SEQ ID NO: 63413 - protein, 113 aa, Zea mays
  Coding DNA Sequence Number=SeqID_20038
MLWMASHDIIWAPRATVRFGSLEFIVADEGGLVRASTTRTPLMEDIDTITEAFGGLQLGLPQKHNLGQGPLRPYYIKFLGMVDPIMDSFHDLFLSESGCSLNTPSSRASYDPM

SEQ ID NO: 63414 - protein, 291 aa, Zea mays
  Coding DNA Sequence Number=SeqID_20039
  Gene Ontology: Mol. function=hydrolase activity
  Homolog annotation: Hit_ID=Q5N8H1; Match level="QueryCoverage=100%, HitCoverage=82%, E-value=1e-149, Identity=81%"; Hit description =Hydrolase-like protein
MALADTRIAYQPEVDKHAGVLAYELVQGNLVQWNSFMDKSIPDPPTAVLLHGILGSRKNWGSFAKRLAQEFPMWQFLLVDLRCHGDSTSIKKSGPHTVASTALDVLKLVWVLDATPGKVRAGGDGEDHPAELIEFLRRMPEQVSSKQEVVDALVKGQFSMDVARWVATNLRRTSPLGQRPSSSFSWTFDLNGISEMYKSYEDTNLWRIVENVPRGVHINFLKAERSLHRWALEDLQRIYTAEELAADEGGGVEMHVLEDAGHWVHADNPDGLFRILSSTFRIETTIRGMQD

SEQ ID NO: 63415 - protein, 142 aa, Zea mays
  Coding DNA Sequence Number=SeqID_20040
MEYCQVGSYTGKVRLAAVCGRWAAGLGDWDPPVEWLWLQLVLPYVSRQPSVRGGDVATGRSAVPTINHVSMWEKKYVMANAPDDHGLNELNAPDEHHMSEEYQTSYGMNGGAPFGASYGGVPYDSYRGASYRYPYMYGGAYG

SEQ ID NO: 63416 - protein, 116 aa, Zea mays
  Coding DNA Sequence Number=SeqID_20041
MPIGHNRATTQRKVDPITSSSESRIQTSPEAEVRSTHEYTIMLEMVGTAAEWSPVGFAGELVTFNALLSGQLAEAEFRRGKVSSQGYDRASGKAKFPFEAEAVPSRHTSGPELLKQ

SEQ ID NO: 63417 - protein, 136 aa, Zea mays
  Coding DNA Sequence Number=SeqID_20042
  Gene Ontology: Mol. function=6-phosphofructokinase activity; Cellular component=6-phosphofructokinase complex; Biological process=glycolysis
  Homolog annotation: Hit_ID=Q84P69; Match level="QueryCoverage=26%, HitCoverage=8%, E-value=1e-12, Identity=94%"; Hit description =Fructose-6-phosphate 1-phosphotransferase
MPPPLSRMMSCFASGTALFLRDLTLTWMHPIFPALFYACERVIRNFMRTTTIQRLLDFMVLGCCSTKNQITLRSCPKIVILNAQQQLNQNNALGRISLHMIAVGLTGYMTTVANLKDPVDKWRCAAAPLINVTLDL

SEQ ID NO: 63418 - protein, 129 aa, Zea mays
  Coding DNA Sequence Number=SeqID_20043
  Homolog annotation: Hit_ID=Q10CF7; Match level="QueryCoverage=58%, HitCoverage=21%, E-value=6e-27, Identity=76%"; Hit description =Serologically defined breast cancer antigen NY-BR-84, putative, expressed
  Pfam annotation: Domain name=DUF1692; Domain location=46-126; Score= -93.6; E_value=0.049; Accession=PF07970.3; Description=Protein of unknown function (DUF1692)
MAINSTVIGHNCIFVLPSDLPLFPFLAFSKQYKDQNHDHDHHDEQKKHEQTFNEEAEKMIKSVKQALGNGEGCRVYGMLDVQRVAGNFHISVHGLNIFVAEKIFEGSNHVFLQSCYPRAVIGPKYPTNL

SEQ ID NO: 63419 - protein, 269 aa, Zea mays
  Coding DNA Sequence Number=SeqID_20044
  Gene Ontology: Mol. function=ATP-dependent helicase activity
  Homolog annotation: Hit_ID=A2XDW7; Match level="QueryCoverage=20%, HitCoverage=2%, E-value=2e-18, Identity=81%"; Hit description =Putative uncharacterized protein
MRMLNVDPMFFVLCARADCYLIFFSETIVEVEKTKLEEEADVLSEIEEEKLESELDAQEGSFEVAKLRHGVRKQSPDAELVVLPPPFWGSQDPNSVFQVFLVPAPKLLVDQNHCSSSTTPFYRHYKWDLVGPLKLVADFGLQYWSAQVHLGQQGAAGFHSTGGAERTACRMRKNTLHPFQIIVHFGCIKPCLFLSVSSLCMLHEIKQTIQFVGELISGNVPYPVDQHHLDDPHIEANLLFQAHFSKAELPISDYLTNLKSVLDQSIRII

SEQ ID NO: 63420 - protein, 129 aa, Zea mays
  Coding DNA Sequence Number=SeqID_20045
REIFETPLRYFPPNNKNTPTWRKRLQALSGRDPTIVYMARYLHTLDNHYDDLSSHCTHLNSRVESLEQQVKELKKEKASLQECLDIAEGEEANTREAYRTLKMDYDKKLKKLAPTKKNPKEDQEPRRPS

SEQ ID NO: 63421 - protein, 27 aa, Zea mays
  Coding DNA Sequence Number=SeqID_20046
MAASSAPDNFGAGTHFNASAKPTSTMC

SEQ ID NO: 63422 - protein, 124 aa, Zea mays
  Coding DNA Sequence Number=SeqID_20047
  Gene Ontology: Mol. function=asparaginase activity; Biological process=glycoprotein catabolic process
  Homolog annotation: Hit_ID=A5C3M5; Match level="QueryCoverage=87%, HitCoverage=37%, E-value=2e-16, Identity=44%"; Hit description =Putative uncharacterized protein
MAMMGSTSEKMYLCQFDYLIPPMGMDKCCANNVDNNNVHKADMVMNGLHISVYASETLGWCGGHVHRRLMSKMLGRIGDSPPIKFGTYRCDACAVSCTLKWDMATFMEYKGLPLQQAVDYYVRA

SEQ ID NO: 63423 - protein, 99 aa, Zea mays
  Coding DNA Sequence Number=SeqID_20048
MAVPDGVVGSSESYYLEREGFLPEVGGGSKADRQVDLAERLDPLTGSYAVERSSASLDLGLIDPHKTQSLGVDDVEAATAVHDDFGEPGVAMMGFDDQR

SEQ ID NO: 63424 - protein, 100 aa, Zea mays
  Coding DNA Sequence Number=SeqID_20049
MTWQGHRTVRCQRFIYNYTKSTVRNTVDYSGQEKLFGKSGQARIVRAFAADRPRHLNDPRIEPMQKHMSLLRTVRAVDLQGRTVRTRGADRPRSAERCNG

SEQ ID NO: 63425 - protein, 178 aa, Zea mays
  Coding DNA Sequence Number=SeqID_20050
  Subcellular localization annotation: CTP_CleavageSite=76; ConfidenceScore=5.63e-01
MEAARQHPSCPSPHDRTGTVPRRPCPGSRPRRGSRAGHDRQSRPAPAVPSPMSRPVILFPSSSSPALPSTRRAPIHALYRSPSIGASDEDPHLSRPFVVGAPHQSPRIVGSPNSPSTAASAAHLLHAVKKAEDVMSSRHQDLGKLESDAQKEDTYYVLMQIQSRVVSFEEQVGETELR

SEQ ID NO: 63426 - protein, 156 aa, Zea mays
  Coding DNA Sequence Number=SeqID_20051
MKLTGVKGERGGASSIGLGEEWRRWPGLVWRKRSSGGRFYRRPGGGRKGGDGEHLRACHDGGDGANGDGMARAGEGVRGRLGYSGGEAAEAGASVNGEAMGREAVGGERADDGMGETMVLTGGPRLPVGERRERERGGAADRLLRFKPIERLCTYV

SEQ ID NO: 63427 - protein, 111 aa, Zea mays
  Coding DNA Sequence Number=SeqID_20052
MHRRAAIAVARELKEGGLNVEASAHLHELGEAGSSRAQGWRRLGGDLGRRVGASRAVLAEGWCGRQKEKGADLVRGMGRGLASEGERSIEKVLGQDCGGRVLNEGWRPVLR

SEQ ID NO: 63428 - protein, 170 aa, Zea mays
  Coding DNA Sequence Number=SeqID_20053
MCQWGKHRLLYAISRTLWLSQRAAVYRLTPGPLAGCTLSRIDQRAQLGTVATMDIPPCLHNKNGARRWTSAWEVDGLGDSRFTQICGREAADGGGAKKLGKDWGSLGDGLADIVPSLTVGRGRYGLTMGGCRCRKRSAASAEHGVDFTKSRAWEHGAVGAGRVRGHEAAQ

SEQ ID NO: 63429 - protein, 134 aa, Zea mays
  Coding DNA Sequence Number=SeqID_20054
MAWYGMREPFAPLFIGKVGDYGEEVFSDSELWIWSTTRTKAEPDEGRGQPKLNDSMMMLILYFVLYVSPSSLLVMFTKDGTEGASGGYARAVHMVVHRVQSGGDVVGAITLMSMLIPGFKDKLPGIFLGNVLFP

SEQ ID NO: 63430 - protein, 209 aa, Zea mays
  Coding DNA Sequence Number=SeqID_20055
MRSYSPMLPLEAPPAPPLSAPAAGVAVGGDPDDGGGDSSSSFSTDPSAGQEPEGWVARPITRDAARGCHFHDALDTLLRQALDRRTCRGVYPDRWEATCLVRRPENSLRGAEICSEHYSISERDSAEAATQDVARRALSHYYSVLDGVADGLNLKYYPCRPSGSTGGMIVSPVGGDNPRLSSTVNLVVVLNTELDHALDELSRAHAEIA

SEQ ID NO: 63431 - protein, 207 aa, Zea mays
  Coding DNA Sequence Number=SeqID_20056
MVTTSSMVGRSKPGCGLCPALSFKDLHHPCWGGGWGEPRFYLPHGPAGRLFLQHSGERALTSLAEGANFDNAGPVDRKCRQLKCACLAGSAGSIAASDAASCRLIRAWPSAHRTGGCCAMRTGGPSKTSHAARAAFVFLDSLVLTPARRLRAENPRLLCVESEPEAAVSAWTEAESARKEASSAQEQVASQAEEVQQRRPELGQVVR

SEQ ID NO: 63432 - protein, 334 aa, Zea mays
  Coding DNA Sequence Number=SeqID_20057
  Homolog annotation: Hit_ID=Q6QP51; Match level="QueryCoverage=34%, HitCoverage=60%, E-value=9e-25, Identity=52%"; Hit description =Putative growth-regulating factor 1
MGFKLITDQGFKGWPLERVRQPPQSTRAPRPLLIRGSKTGPSEGFDSRLRARRARDDSGYVCYMAEARATLPKENSAACPSPTVVPPARVRLTTAKFSLRRNRNLHLARPQGSASTPASKGGLGLDTGLGRWLRGNKTGVPSRLAPVTSNDGSPCASMTMVVLSPLRKQGDVSKVPAAPTTVLLQGSSAPLTATIPRTQGSSTSPTATLACTQGSGTSLPDTLAHSYTPIVHLDPLLASIKGRSKAFMRGGGRAGERADEQAHPLSLANACNPYYERIPLAQDNTSRVFPPYVPSRANPSGLGHAATILLVDPGTPRGRNADNSLDCVEDLLLV

SEQ ID NO: 63433 - protein, 104 aa, Zea mays
  Coding DNA Sequence Number=SeqID_20058
  Subcellular localization annotation: CTP_CleavageSite=68; ConfidenceScore=5.64e-01
MSRHLAVLGPSVELAGPSACTVPSPRSCPARRSCATRRVEPSPRHAPKPRLPFVARSSTSAPPAPAVQATAPGGDDPDDSGDDDEDDDDDEDDEENVNEEANDA

SEQ ID NO: 63434 - protein, 115 aa, Zea mays
  Coding DNA Sequence Number=SeqID_20059
MAGMYCNARDCLNKRMQPPARTAARILLSPVDKAKGSARKKDRERGIPRKGSFSAKEPGSEPPITDQGFEGWPPEGSTVASDRVGPTPTTGQGFEGQPPEGLHGRLRLLGLRAHY

SEQ ID NO: 63435 - protein, 53 aa, Zea mays
  Coding DNA Sequence Number=SeqID_20060
MGFGVCGSLCQGGDENDGFDIDYGNGCPCCNHCSGEDEAVEEDFQEFQDYDEF

SEQ ID NO: 63436 - protein, 54 aa, Zea mays
  Coding DNA Sequence Number=SeqID_20061
MYSAGFVSIKAKLVVTVVECPSGQGVTLHKIVTAIGGGVSIAKAQRLWKAVVRP

SEQ ID NO: 63437 - protein, 185 aa, Zea mays
  Coding DNA Sequence Number=SeqID_20062
  Subcellular localization annotation: CTP_CleavageSite=33; ConfidenceScore=5.17e-01
MAVGFNQSARGAPQGDVEAMCARNRKMVQWFTRSMRSGGVTNSGERDLTAPVGLVLGSSLGKLHGLSRKLSEGSDRAEVGGNGLSTAGALGWLWWVVGRSSVLRASSRKLGACSSGFDLWLASYEEVKLGLSDQTCLVENGRQNMSNQLGLLSNFSRVFKGSLGAILLIGPFGFEVWKNVNMLDL

SEQ ID NO: 63438 - protein, 131 aa, Zea mays
  Coding DNA Sequence Number=SeqID_20063
MTSHGSSDGGNAQSHTDGLAREVFPRILWEVLQGAGYTTPPQYAVQLFEKHRVHRSRLSTHPIGLFPAEKEDDPMWKDRVEHAKDIWALYPGQTAHLTVVMHGYSVSSTSEARKGNVSSNGIVGGYQDHLG

SEQ ID NO: 63439 - protein, 81 aa, Zea mays
  Coding DNA Sequence Number=SeqID_20064
  Subcellular localization annotation: CTP_CleavageSite=65; ConfidenceScore=5.83e-01
MTNSTSLYGGIPGNSSRKTSEKSLTTRMLTPTNFPSTKNVASLVAVVTAIPTSNLSPLELDPQTRARLLATTQTSTVYREN

SEQ ID NO: 63440 - protein, 199 aa, Zea mays
  Coding DNA Sequence Number=SeqID_20065
EEEDEEEEVQHHEEEEVQAHEEEVAGINAEADDDTIEAPVIRRRGTRKGHFVLPPTAPTQSEARVLIIPVGDSWSHFALDPHATYGTAQDTVKHDFWRCYHVESKAQEHADRVLEKNAKKVYKDAFSNARLQVVNAYMKRRGHSINNFRQYSDVYLIVDQYIEAGCGSSRSRRSSMEDAMREQQERFYEEMRQQQMTFL

SEQ ID NO: 63441 - protein, 147 aa, Zea mays
  Coding DNA Sequence Number=SeqID_20066
MAKQGGGAEEESGGGGAGAGEIEGRRRALLGGDGGGGFCAGSLGTIRSFLNDNKLQMYLRLEGKQKYQREAKTKCTMRGYRRVREQYRGTVHLFIGTVHSLYIITFIPFTMNYNNDTEYHGSLSHFIFKSVHPFVLKHVTVPKLYSR

SEQ ID NO: 63442 - protein, 262 aa, Zea mays
  Coding DNA Sequence Number=SeqID_20067
  Gene Ontology: Mol. function=transferase activity; Cellular component= cytoplasm; Biological process=spermidine biosynthetic process
  Homolog annotation: Hit_ID=Q7XAP2; Match level="QueryCoverage=96%, HitCoverage=61%, E-value=5e-85, Identity=64%"; Hit description =Aminopropyl transferase
  Pfam annotation: Domain name=Spermine_synth; Domain location=54-262; Score=71.7; E_value=2.5e-18; Accession=PF01564.8; Description =Sperminespermidine synthase
MEAGGAGSGLNGAVQAKGTGADDGSAKRLPPCCVKARAAAPESEARCHATVVSGWFTEPRSRCGKASKVQYYNNPMWPGEANSLKVEKILYQGKSLYQEVLVFESSTYGKVLVLDGIVQLTDKDECAYQEMITHLPLCSIPSPKKKSIGRLSAALSQHMGYFFLPEFEWKLWWLMSLRNTSQVLVIGGGDGGVLREVCKDFFPHLSVGFQDPRVQLHVGDAVEFLRNAPEGTYDAIIVDSSDPIASSFWRPEAPQKLNQTGA

SEQ ID NO: 63443 - protein, 36 aa, Zea mays
  Coding DNA Sequence Number=SeqID_20068
MTYFFSGFINLPLKVVEKSSPEVGANVGDLFSNVMS

SEQ ID NO: 63444 - protein, 117 aa, Zea mays
  Coding DNA Sequence Number=SeqID_20069
MKKVVYYETNSSSPSTSDTESSTTSKRHERKKYKSEKREEEKDLAGAAKTQLGLAHRTVRWCIGQCLVRQAGFRRTGRSRENLASYDYNFTGLSGGAPDCPGERLQVVEIPRKREKV

SEQ ID NO: 63445 - protein, 46 aa, Zea mays
  Coding DNA Sequence Number=SeqID_20070
MEPPRSTARAPFPLPQAFTDFALSLKLYSKETTNNLGLSLLQVLQQ

SEQ ID NO: 63446 - protein, 252 aa, Zea mays
  Coding DNA Sequence Number=SeqID_20071
  Subcellular localization annotation: CTP_CleavageSite=35; ConfidenceScore=5.14e-01
MARAHAYKTLPDLDCTLPRTLKPHRSRARRRLPVRSESAAAQSLCHRRPVGGAIPNPVQPSEKPVHTSVRLPEQGIGVCFAGEASPRSPELSTPPEYVDRVNHSTILRFLVHTVATLPREAHRALGLNQFAVVWPVHSPPTSTPACTRGPGDYGHPRRQAVPRRDRQSLPEPTPPFAGPPSPPIALLTRPETRSPIPVMVGTSAVTARRPVGVSEALYAKAEMVAGITWSSTLPPGWTVEWDPASAEEEHEE

SEQ ID NO: 63447 - protein, 228 aa, Zea mays
  Coding DNA Sequence Number=SeqID_20072
  Homolog annotation: Hit_ID=A3A687; Match level="QueryCoverage=93%, HitCoverage=29%, E-value=6e-18, Identity=26%"; Hit description =Putative uncharacterized protein
MGALDSPVRHRTLSDFDVGADVTWTLEQFSKAICDQQAWNVDDEVHFSYFDKFENKIVKIYSDLDLSLMFAMHIGERSVVIENDVVIGARDNQEIHYQPSYSQKHPMFDYDVVNDNEDERLYPDLVQSHPMLALDHRPAQFEGTDQEEEDETIDMGMSGHEGDEDRLMIDYDKDNPSLAEGTIFPLMVDCRNALATYCIKGEYDFEIDKSEPSRLRVHCTYERCRWRI

SEQ ID NO: 63448 - protein, 174 aa, Zea mays
  Coding DNA Sequence Number=SeqID_20073
  Subcellular localization annotation: CTP_CleavageSite=8; ConfidenceScore=5.35e-01
MDQWSRPTASRTGRVTHVRSRSASWVLVGRRPASRWLLAIHRTELNVRHVTRSGNFVQLPLSADQSLAGVVRSGNFVQLPLRADQSLAGVVGGAATDAFDFLVRVAGVVVAARAMVDFYAMAACAAMAQSNARPRALARAIAVEVCGVYCAALYRVLGASASAVEVVETGAERD

SEQ ID NO: 63449 - protein, 370 aa, Zea mays
  Coding DNA Sequence Number=SeqID_20074
  Gene Ontology: Biological process=intracellular signaling cascade
  Homolog annotation: Hit_ID=A3AP25; Match level="QueryCoverage=79%, HitCoverage=90%, E-value=1e-157, Identity=89%"; Hit description =Putative uncharacterized protein
  Pfam annotation: Domain name=DUF231; Domain location=194-367; Score =265.7; E_value=9.8e-77; Accession=PF03005.6; Description=Arabidopsis proteins of unknown function
MWAVGRGRPYSGTRGPCPCGSGLPLDGSVGKQMPDTPRCVLNVDVGTCPQASAPGGAPPPWEYGTMGDASARCHVPWARFNATLMLEMLRGKRMLFVGDSLNRGQYVSLVCLLHRIIPESSKSMETVDSLTVFKAKDYNATIEFYWAPFLAESNSDDAVVHRIADRIVRGTSIEKHAKFWKGADILVFNTYLWWMTGQKMKILRNSFEDKSKDIIEMETEEAYEMVLNAVLKWVESNMNPRTSRTFFVTMSPTHTRSRDWGDDTDGNCYNQTAPIEDLSYWGPDTSKGLMRVIGEVFSASKSRIPVGVVNITQLSEYRKDAHTQIYKKQWNPLTPEQVADPKSYADCTHWCLPGLQDTWNELLYSKLFFP

SEQ ID NO: 63450 - protein, 77 aa, Zea mays
  Coding DNA Sequence Number=SeqID_20075
MGPIVSPTRPINRDKKNARHKDAAVVPLVNPIKCPRWPSESNHGSLLLEVDTSALHIGHTYKNRDIVTFWSNKNCCV

SEQ ID NO: 63451 - protein, 149 aa, Zea mays
  Coding DNA Sequence Number=SeqID_20076
MGKNNKRKREPTPPSEDFGDSEYSEEEFSSESEGSPAPIPLRESSDDSDDSQGLAAEVWTYIRAVERSGLEGSDESEYSSDEEDSSEEDGGGDGEDDDDNDDDNDDEGRGGGDGDGSGRGSNRGGSSGCSNRGGSGGGGSSRGSNRASG

SEQ ID NO: 63452 - protein, 244 aa, Zea mays
  Coding DNA Sequence Number=SeqID_20077
  Gene Ontology: Mol. function=metal ion binding
  Homolog annotation: Hit_ID=A2Z3G8; Match level="QueryCoverage=67%, HitCoverage=51%, E-value=3e-12, Identity=78%"; Hit description =Putative uncharacterized protein
MEGSKGSGGGGAGAGSEKPSAESNPSLNLPPPTAADVEATDDGGATAAAAAAAEAARRPFTALSQEEADLALARVLQEQERAYMLLRMNGSGGEGSDYGSSDAGSYEYDEEGDDYEEELEHHLRVHHHEHPSGDGDGEGEGEGAEGSDYDEEYEEDEEGEPEVDPAEFENDEAYARALQDAEELEVAARLMALAGLSDWRTVDVEHEEDHVNDPQVVIHLIVDEFYLWWLGAREDHLSLQLMVS

SEQ ID NO: 63453 - protein, 146 aa, Zea mays
  Coding DNA Sequence Number=SeqID_20078
  Gene Ontology: Biological process=ubiquitin cycle
  Homolog annotation: Hit_ID=Q2HTR2; Match level="QueryCoverage=63%, HitCoverage=16%, E-value=1e-11, Identity=41%"; Hit description =Cyclin-like F-box
  Pfam annotation: Domain name=F-box; Domain location=32-78; Score =22.3; E_value=0.0019; Accession=PF00646.24; Description=F-box domain
MGPPLRLTAPMQIAAEDSGSGTSSSFAPPAQDYTQDLPDEILALVFVSLSPTDRNACSLACSRWMEVDATTRRCLSLDACAALGNAASALFARFTTIMKLALRWARGSGADSLSDNSAVAVTKTYYGVGGGWGEGIHRGDGICVLV

SEQ ID NO: 63454 - protein, 50 aa, Zea mays
  Coding DNA Sequence Number=SeqID_20079
MVYALFFFQAFYPLSSKRIKLTSVKEKSLGLLTQNFVKLFFTMEVETISL

SEQ ID NO: 63455 - protein, 188 aa, Zea mays
  Coding DNA Sequence Number=SeqID_20080
  Gene Ontology: Mol. function=protein dimerization activity; Cellular component=nucleus; Biological process=regulation of transcription, DNA-dependent
  Homolog annotation: Hit_ID=Q654B3; Match level="QueryCoverage=84%, HitCoverage=72%, E-value=6e-21, Identity=36%"; Hit description=RISBZ5
  Pfam annotation: Domain name=bZIP_1; Domain location=63-110; Score =18.5; E_value=0.0036; Accession=PF00170.12; Description=bZIP transcription factor
MDGSSWWYGNVRTPNPVMSQAASISASPGLTISTNHALESESDSDSESLYEVEGVPYERGNRSIETKRIRRMVSNRESARRSRRRKHAQLSDLESQVKMAEDMVARSVVSCGLGDLGLAPYVNSRKMCQALNVLTGLDLLGSDAFSGPTAGRPIASAPESWFDVVERTSKDNNKTLQKLKYEEIVANI

SEQ ID NO: 63456 - protein, 214 aa, Zea mays
  Coding DNA Sequence Number=SeqID_20081
  Subcellular localization annotation: CTP_CleavageSite=19; ConfidenceScore=5.36e-01
MVPRPGSTTSSSSPHNCAVCPRRTPPPRPRLRRRERDPHGGSEVRERDPHGVLVPVCVPVPIRARDAHSRGHVSDAGCGAQARDGVYGEIAASPRRLPHRAFARAKSGRLDSYTMPPLAQSSLPRNPNQESDSALDESDGRKTRRPRGERGNKEEDEGPCGGEAPVPVLQGGEASGNRLRQMHGQRQAQEAPGLLHHRRSSRCLVRSPASAAAR

SEQ ID NO: 63457 - protein, 47 aa, Zea mays
  Coding DNA Sequence Number=SeqID_20082
MFGLQVAMRLMVLGFDSGNGCQHCNHCSGEDEAVEGDFQEFQDYDEF

SEQ ID NO: 63458 - protein, 125 aa, Zea mays
  Coding DNA Sequence Number=SeqID_20083
MRKDEKREVTPEFVNMSKEILYPQIQGVTRMAHWIALSTRCGGRPKSGEGGSASLVRQCLDSSLEKLHDFTGKRSRGWVRLGVNRRGWPQWPCSGSDGGRWCLLSTVNSGDLWLERGFGCASANG

SEQ ID NO: 63459 - protein, 59 aa, Zea mays
  Coding DNA Sequence Number=SeqID_20084
MGDPVSGQVRGKVHARLHSGLAFNSWGCGEILDGSLGSLLLVFLVDNVGDRYPPGPLKE

SEQ ID NO: 63460 - protein, 261 aa, Zea mays
  Coding DNA Sequence Number=SeqID_20085
MARLRHTARKSVIPFLPSRLAERPLHRTVSGQSSHLERLHHRLREEQERRRQHREQQGSSSPPQREVESVRPRSSVAQLEAPPAPPRDAPAVGGATGGDPDDDDSDHSTESSEPQEAEGWVARPITRDAARGCHFHDALDTLLRQAFDRHTWSIEYRCVVYQHSRGSTESVVVSPVGEANPRLSSTVNLVAVLNIELDHSLDELSRARTEIAELRAELAERHHQEGGSPAPVGTQHPYRSPPRGHHTYGSPVCKTRIDLDP

SEQ ID NO: 63461 - protein, 131 aa, Zea mays
  Coding DNA Sequence Number=SeqID_20086
MEIFPEVEAGSAYGYAVVLGVVEIAVGVVSCEICARVGGIDAVGVSTPGGSLDRRVNLSLRVPAQMSWREMEHKGETRLVLSRTRGDKVSGDPRIECACDTVGWRGDLAEVASRRSLPELGLGRAEGAPTA

SEQ ID NO: 63462 - protein, 299 aa, Zea mays
  Coding DNA Sequence Number=SeqID_20087
  Homolog annotation: Hit_ID=Q6J9V9; Match level="QueryCoverage=39%, HitCoverage=32%, E-value=7e-32, Identity=65%"; Hit description =Putative uncharacterized protein
  Subcellular localization annotation: CTP_CleavageSite=29; ConfidenceScore=5.15e-01
MATARGINPFLKAALPTRILKRHGHSGRRGAAGSSPFDMEAGYHSSLKLTRNGRSQTAARGACNRPAVKALLHSRRNQWSKGRTAMQVVCNRTTRAHPFGFIASSMEAQAHTSCDWRVGYYVQETAPPLAPMSRLLDCGTGAATRGSLAHDPTVPIEHNDHRSVSRGRRRDGTGKGDISKGILLREGSGNRALLLIRGSKDGPSKGFDSRPEHLGFKPITDQGFEGCPLRRVRQPPQSTRAPRPLLIRGSKAGPSEGFDSRPRARRVRDDSGYVRYMAKARATLPRYPRTFLRPAGAIL

SEQ ID NO: 63463 - protein, 150 aa, Zea mays
  Coding DNA Sequence Number=SeqID_20088
MMTTSFVVGRSKPGCGLCPALSFKDVHHPGWGGGCTELGPASAWAGDPLRPPTFRGEGHTPALRRRRPLAMRGKANCCCLDKVQLSVLHLGRRSCRARAGHVQVLPMPSAAQRVVRRKGGTRVLGRSRSCSRGKNGSEDLLVRFGAAAAR

SEQ ID NO: 63464 - protein, 87 aa, Zea mays
  Coding DNA Sequence Number=SeqID_20089
MARSIRAQGRARRGLLLRPRPGSGEDAIPPEAEVEAEPWGRNNIELHVYLQLDRRHRTQPMRIYNYALYIYYWLIEKSMRTEQPFPF

SEQ ID NO: 63465 - protein, 53 aa, Zea mays
  Coding DNA Sequence Number=SeqID_20090
CNLADWEYVLIPDQGVAQEVVQEPAPEPATEDLPAPAFEGLYCALKCRSCLKP

SEQ ID NO: 63466 - protein, 86 aa, Zea mays
  Coding DNA Sequence Number=SeqID_20091
MDTCLLGWSGARVAAQSGSVLWACTLHHSATETTDQAKDGGKKSFEVLSAREKVKETRNPKPGVKKKTCKVKVDRVKSYGASRITT

SEQ ID NO: 63467 - protein, 861 aa, Zea mays
  Coding DNA Sequence Number=SeqID_20092
  Homolog annotation: Hit_ID=A5B731; Match level="QueryCoverage=97%, HitCoverage=92%, E-value=1e-144, Identity=49%"; Hit description =Putative uncharacterized protein
SVAALTLQRANSGARHSKDYVQARKRKDKANNSEHGEKEEEKEEVKTISGIINSARSLGDDDDDMLSEIESLLSGDIDIPIPSDRFDVNGRSRYNNAYMANEASEIEKLRSLVREMEEREAKLEGELLEYYGMKEMETDIAELQKQLKIKTAEINMLNDTINSLQAERKKLQDDVACGEVANKELEAARGKIKELQRQIQLEAGQTKGQLMLLKQQVIGLKAKEEEAGKKEAEVQRKLKKLRELEVEVLELRRKNKELLYEKRDLIVKLDAAEGKITESDVVANAREEINKLRHTNEDLTKQVEGLQMNRFSEVEELVYLRWVNACLRFELRNYQTPSGKVSARDLNRTLSPKSQERAKQLMLEYAGSERGQGDTDLESVVSSMPSSPGSEDFDNMSIDSSSSRYSFLSKRSNLMQKFKRWGRSKDDSSSLASSISGSPRRKPKGPLEALMLKNAGDGTAITTYGKRDPNDVLDDENVASSFQLMSKTVEGFADEKYPAYKDRHKLATEREKAIKEKAGQARAQRFGGGHSSALISSPKGALPPKLAQIKERSPAANAESSEQSSDNQNNTLVVSQMKLANVEKRATRVPRPPPPRSTAASGATSIASGVQTPRAPGAPPPPPPPPGKVGGPPPPPPPPGALPRNLGGGDKVHRAPEIVEFYQSLMKREAKRETSLGSISSNVSDARSNMIGEIENRSTFLLAVKADVETQGEFVESLANEVRAASFINIDDVVAFVNWLDEELSFLSVYALLRTRDMTVSRYKEYGIPFDWLSDSGVVGKIKVASVQLANKYMKRVASELDALEGTEKEPNREFLLLQGVRFAFRVHQFAGGFDAESMKAFEELRSKMTTQASAPPISQG

SEQ ID NO: 63468 - protein, 185 aa, Zea mays
  Coding DNA Sequence Number=SeqID_20093
MVIYYVLYCHRRAAWEAQLICGWKWRCQVNVCSRDVISGYVNVTARLEFFLAGGRYAGVARVEKVLLGGSWFFLWSRQTFTVSSLSKVRVGGQTDGQNRPWGPSVSYSVRKGSWKPNQGEGGGEDRAEQDSTGLRVFADKTAYGLTLTGDFQSTWAGRGRWIPRSRILSRPRGSTLRLRIFGHIC

SEQ ID NO: 63469 - protein, 164 aa, Zea mays
  Coding DNA Sequence Number=SeqID_20094
  Homolog annotation: Hit_ID=A2Y7S4; Match level="QueryCoverage=47%, HitCoverage=44%, E-value=2e-09, Identity=51%"; Hit description =Putative uncharacterized protein
  Subcellular localization annotation: CTP_CleavageSite=82; ConfidenceScore=5.70e-01
MASLVSQPRHSIQTYWARRSYLRLRSPSRRLRVARLGAGSGRAAAGSASAASTTTSSWKASRVARRAAALLAAPGLLLARLRDAYVDAMVALGGSGGAVRPCAALARSRSGAEAGLWDRRVPLARRGSGRASRRGGGAADFERRMMAHIYSVVVTPELPCAARA

SEQ ID NO: 63470 - protein, 509 aa, Zea mays
  Coding DNA Sequence Number=SeqID_20095
  Gene Ontology: Mol. function=icosanoyl-CoA synthase activity; Cellular component=integral to membrane; Biological process =metabolic process
  Homolog annotation: Hit_ID=A2Y7R6; Match level="QueryCoverage=98%, HitCoverage=96%, E-value=0.0, Identity=80%"; Hit description =Putative uncharacterized protein
  Pfam annotation: Domain name=ACP_syn_III; Domain location=227-297; Score=-15.4; E_value=0.029; Accession=PF08545.1; Description=3 -Oxoacyl-[acyl-carrier-protein (ACP)
  Pfam annotation: Domain name=ACP_syn_III_C; Domain location=393-477; Score=10.1; E_value=1.3e-06; Accession=PF08541.1; Description=3 -Oxoacyl-[acyl-carrier-protein (ACP)
  Pfam annotation: Domain name=Chal_sti_synt_C; Domain location=336 -479; Score=17.0; E_value=6.8e-05; Accession=PF02797.6; Description =Chalcone and stilbene synthases, C-te
  Pfam annotation: Domain name=Chal_sti_synt_N; Domain location=106 -299; Score=-81.0; E_value=0.024; Accession=PF00195.10; Description =Chalcone and stilbene synthases, N-te
  Pfam annotation: Domain name=FAE1_CUT1_RppA; Domain location=90-379; Score=762.6; E_value=2.6e-226; Accession=PF08392.3; Description =FAE1Type III polyketide synthase-lik
  Pfam module annotation: Pfam domain module=ACP_syn_III::ACP_syn_III _C::Chal_sti_synt_C::Chal_sti_synt_N::FAE1_CUT1_RppA; Domain location= 227-297::393-477::336-479::106-299::90-379
MADDDPRTTAAASSMPDFKQSVKLKYVKLGYHHLISHGAYLLLAPLPGLVAAHLSTFTARDLAELWQSLQYNLASVLVATTALVVTATAYALTRPRPVYLVDFACYRPRDERRCSRARFMNCTESLGTFTPENVEFQRRIIERSGLGEDTYLPEAVLNIPPNPSMASAREEAEMVMFGALDELFAKTGVRPKEIGVLVVNCSLFNPTPSLSAMVVNHYRLRGNVASYNLGGMGCSAGIIAVDLARDLLQCHRGTYAVVVSTENITLNWYLGNDRSMLVSNCLFRMGGAALLLSNRGSARRRSKYQLVHTVRTHRAADDRCFGCVRQREDGEGRVGVSLSRELMAVAGDALKTNITTLGPLVLPMSEQLLFFATLVARTVLKRKVKPYIPDFKLAFEHFCIHAGGRAVLDELEKNLRLTDWHMEPSRMTLHRFGNTSSSSLWYELAYAEAKGRIKKGDRTWQIAFGSGFKCNSAVWKALRSVNPAKEKRGNPWMDDIDRYPVAVPKVSAI

SEQ ID NO: 63471 - protein, 94 aa, Zea mays
  Coding DNA Sequence Number=SeqID_20096
  Subcellular localization annotation: CTP_CleavageSite=63; ConfidenceScore=5.13e-01
MSKNTRDTRFISRFGHTTKVPYFLVEAPTKSRVSFNPNPPFADHKGQAHTLIFAQTSGRENPSSTARRQVQLVYGQRGSQLKLRKLNSAEVQLS

SEQ ID NO: 63472 - protein, 53 aa, Zea mays
  Coding DNA Sequence Number=SeqID_20097
MSCAFDDYYIKDCGIISAPEKVKTMKCVEICGIVFLTRQKRCTKGAVDRAATE

SEQ ID NO: 63473 - protein, 144 aa, Zea mays
  Coding DNA Sequence Number=SeqID_20098
MRNRIIVARSGINRTLPPRLNRRWSLGEAYSEHYSVTERDTAEAAMQDVARRALSQYCSLFSGAADGLDLKLSSMVNLVVVLNTELDQALNELGKARVEITELRAERAECRHPEDGSLSPVGTQHPYLLSPRGRYAYGTTDCMT

SEQ ID NO: 63474 - protein, 129 aa, Zea mays
  Coding DNA Sequence Number=SeqID_20099
  Subcellular localization annotation: CTP_CleavageSite=58; ConfidenceScore=5.34e-01
MGKPVPSLLVLLLSRAINNFCQVITFPLVTQCSSMDQAVSLAARSRRFESSFYPCKIRAHRLSVQCLTDPDCRRAVTTLVPTITGMGDHALGHVRGYVCGQVHSGTRLTDLPYFSACVWLSYKFEVDTD

SEQ ID NO: 63475 - protein, 108 aa, Zea mays
  Coding DNA Sequence Number=SeqID_20100
MVKAECAGSGTVAARHRDLNEAHEIDARCSRPTDAILEDLLDLWVRTHTRFCCATLILLVDVDRIVFIGRLEDADRTGARGQGIDRKGETALRPSKDKRKDKTCRIGA

SEQ ID NO: 63476 - protein, 245 aa, Zea mays
  Coding DNA Sequence Number=SeqID_20101
MSLHALLPVGSRIHGPQYDRTRIPSEPQDVDLTEDEVIRSDGFLTGIRGGEHPVRGVRRVCGGGVAPSSNCLDVEGPHAKLMVSGAPRNNDAAPEYHTEVQATQPCARVGSGLPAPVVGIVAHATEKMTPAAQRRGSTAARERNKGKETGEIRGGSAPDGESARGSRHGSRSSEILGAERVVGEGDEPDEWVPPGSATIGKEKEEEQIGLARWKSSVGPRRARIRPKITWFNLYFCMMGMSPVDR

SEQ ID NO: 63477 - protein, 118 aa, Zea mays
  Coding DNA Sequence Number=SeqID_20102
MGATVTKECVAPVSITYLQNEIRLRTYLVPLLGSPELCRPPGGSPFHIEHGVFHGSLLLTEVRKVRCLVVVSDTGFLPVDCSGDTAAAAEGTTSRNDVDVDVDSGAGVGAGVPEGGSA

SEQ ID NO: 63478 - protein, 106 aa, Zea mays
  Coding DNA Sequence Number=SeqID_20103
MTPATQRRWSTAARERNKGKETGEIRGGSAPDGESARGSRHGSRSSEILGAERVVGEGDEPDEWVPPGSATTGKEKEEEQSGLARWKSSVGPRRARIRPKEHFSNV

SEQ ID NO: 63479 - protein, 166 aa, Zea mays
  Coding DNA Sequence Number=SeqID_20104
MGTHIQETALGARRRPAPDFCQDSHACDLGELLNKGRITLPRVRRALSAPEHAQRPTPRAPRRAKPRPCLLLAPTPIKPIEASTVLPRVLSTSLEPEITGVCPANGVPAATRSPATVDRPAEPLPAAPDPRSSLEDMVAGVTWPSILPLSWTVEWDPTSAEEEHEE

SEQ ID NO: 63480 - protein, 132 aa, Zea mays
  Coding DNA Sequence Number=SeqID_20105
MDKTFCHGHGWSLERLDAGHEPLEILVGGAGVEEEAKDKGEGGDKGRGSVAAGKGMRRQGQHAGAGAGAGEGRIGWRQGWWTFGASQERGMCGGAWSTRYVGFAADDGAEGERRFRWENGSCLAGRPEARPI

SEQ ID NO: 63481 - protein, 272 aa, Zea mays
  Coding DNA Sequence Number=SeqID_20106
MAPFYLAPQPNTTLASSNSPRHRETLSSAERTYSAASSEVADIDDDDRTGYTFTTSAGFLIELRRPIRMNKKKRRRRRQQQGGRPVLVTFYVTQPRDRGGSTASSSSHHHHHNRQERHDDHHRRSHGGSGGRPGMQRRRRNDGKAQSGDRRADLLEYSRQLRALARQTASATTPAAVGVHSEEQQGAPAVNHRLGRAMSQQQQVRPRCFGGDGWSWKKVLVLVLPSHSESRRPRRSNRDDSEKNVKINQTGRAAASSLLVGKLTVGTRRNNI

SEQ ID NO: 63482 - protein, 95 aa, Zea mays
  Coding DNA Sequence Number=SeqID_20107
MTRAMNGEIEARGGCLPQAQTQERLEDGGEAVKSQVDGGGLRLHGKHSGEHGPGKPEGLGANRGVSRVADGEAELTRAMDATQAQRESRNGGGPW

SEQ ID NO: 63483 - protein, 82 aa, Zea mays
  Coding DNA Sequence Number=SeqID_20108
MGKPVPSLLVLLLSRVTALVPTITGMGDHVSGRVRGYVCGQVHSASALANEKIFRRCSLSLGSSAMKHIPNSSPFAVLDRFS

SEQ ID NO: 63484 - protein, 304 aa, Zea mays
  Coding DNA Sequence Number=SeqID_20109
  Gene Ontology: Mol. function=protein phosphatase type 2A regulator activity; Cellular component=protein phosphatase type 2A complex; Biological process=signal transduction
  Homolog annotation: Hit_ID=A2ZV35; Match level="QueryCoverage=82%, HitCoverage=46%, E-value=1e-104, Identity=76%"; Hit description =Putative uncharacterized protein
  Pfam annotation: Domain name=WD40; Domain location=122-161; Score =7.9; E_value=3.4; Accession=PF00400.23; Description=WD domain, G -beta repeat
  Pfam annotation: Domain name=WD40; Domain location=224-262; Score =9.9; E_value=1.9; Accession=PF00400.23; Description=WD domain, G -beta repeat
  Pfam annotation: Domain name=WD40; Domain location=45-83; Score=6.9; E_value=4.5; Accession=PF00400.23; Description=WD domain, G-beta repeat
  Pfam module annotation: Pfam domain module=WD40::WD40::WD40; Domain location=122-161::224-262::45-83
  Subcellular localization annotation: CTP_CleavageSite=22; ConfidenceScore=5.36e-01
MNGAAAPERSPSPSPPPPAQAQAQAPPSPSPAQPLEWRFSQVFGERSAGEEVQEVDIISAIEFNKSGHHLATGDRGGRVVLFERTDVKDHACRKDAEKADHSISRHPEFRYKTEFQSHEPEFDYLKSLEIEEKINQIKWCQAANGALYLLSTNDKTIKFWKVQEKKVKKLSEMNLDRSAAPANGSPGGVGYLSPSLSNGNALKPGRLPLLRLPVVTSQETSLATSCRRVYAHAHDYHINSISNNSDGETFISADDLRINLWNLEISNQSFNIIDVKPTNMEDLTGITSKPTNFLICADYVCDRS

SEQ ID NO: 63485 - protein, 183 aa, Zea mays
  Coding DNA Sequence Number=SeqID_20110
MGDTVLLPAPRHPLLCHPLDLAHALVFTVGVVRVRLAVEGSEEGALREGACGRGGGRGEEEGGGVEGGDRVEAREREELGLAVAGLDLALHGGEHLLGLARDPAAEEARLPPPPAHRRRLSLAVFTRRTPWMVDPRRSMACPMASRFERCRGAVPRQRFGQAAIDLLPLHASGQATFRAIQRP

SEQ ID NO: 63486 - protein, 100 aa, Zea mays
  Coding DNA Sequence Number=SeqID_20111
  Subcellular localization annotation: CTP_CleavageSite=16; ConfidenceScore=5.09e-01
MGVDIPSSPSAPWPVPCSPRNPAGRAGTILPARMELPRLPRLELDQGRALHCCSPIDARRVFAVFGADPLATSSTLATVKVALRALQFDEMPSHVDNPCG

SEQ ID NO: 63487 - protein, 61 aa, Zea mays
  Coding DNA Sequence Number=SeqID_20112
  Subcellular localization annotation: CTP_CleavageSite=23; ConfidenceScore=5.28e-01
GEQAPFSQHAWSSLGSLAWSSTKAEHSTVAAPSTLAGSTVKVALRALQFDEMPSHVDSPCG

SEQ ID NO: 63488 - protein, 51 aa, Zea mays
  Coding DNA Sequence Number=SeqID_20113
MQVACNRTTEAHPFGFITSSMEAQAHTSWTGKGDILKGILLTKEAGPEPSY

SEQ ID NO: 63489 - protein, 257 aa, Zea mays
  Coding DNA Sequence Number=SeqID_20114
  Gene Ontology: Mol. function=carboxyl- or carbamoyltransferase activity; Cellular component=ornithine carbamoyltransferase complex; Biological process=amino acid metabolic process
  Homolog annotation: Hit_ID=Q8SA97; Match level="QueryCoverage=38%, HitCoverage=18%, E-value=2e-12, Identity=49%"; Hit description =Ornithine carbamoyltransferase
MGRRETGHKGENTRGRARQRPSFGVEVESEPWGRARRRPSSEVEVESEPWGRARRRPSSGVEVESEPWGRARRRPSSGVEVESEPWGRARRRPSSGVEVESEPWGRTRRSFLWRSRLDLAAVSLTLAGGTTVGAGQAALFSCQLCADGGYQLRLGVLGVPLIMVPDNTALHQFEAQDAAVDDDDDDFGIPPLPPMPPRSHDYEAGSSRATPAAPPAIDPSLALILQTLTQQQAHLAAEQTRQAAAHQQLSERMLSMF

SEQ ID NO: 63490 - protein, 211 aa, Zea mays
  Coding DNA Sequence Number=SeqID_20115
MVTSSLMVGESEPGCGLCPSLSLKDFHHQGWGGDCTVPGSRTRVASEPLAAPASATAAGRGSSAGEIARVGHGPTSNSTAFCPSLPHEFGHGRGPPGSSIRPEVSAVAVRPPGAEVVVVTAAGAGDGAPFVGLLLLRRLSPMEWGYSSVDYLNRFTKHESPRVKVTSESGDPRIASPPEARSDLAEGVVDAEGATAPFQRQDPSLQDQSVL

SEQ ID NO: 63491 - protein, 283 aa, Zea mays
  Coding DNA Sequence Number=SeqID_20116
  Gene Ontology: Mol. function=endonuclease activity; Cellular component=intracellular; Biological process=DNA repair
  Homolog annotation: Hit_ID=A2ZYQ5; Match level="QueryCoverage=80%, HitCoverage=54%, E-value=2e-65, Identity=60%"; Hit description =Putative uncharacterized protein
  Pfam annotation: Domain name=Exo_endo_phos; Domain location=67-279; Score=4.5; E_value=0.0015; Accession=PF03372.14; Description =EndonucleaseExonucleasephosphatase family
  Subcellular localization annotation: CTP_CleavageSite=81; ConfidenceScore=5.01e-01
MNSTSSQRGYPAKRWCAANMSSTSMRHSAWKSEPWTHLTHKQRRPQWIAYNPRTMRPPPLSTDTNSMKILSWNVNGLQAIVQSGFSADELVARENFDVLCLQETHLEASCFGVSIAAPSYTASSWAVGCFDVYMGFLNNPIYHDMERNVDLFKNLVHEYDYTCWSCSVARLGYSGTAVISRVQPISVQYGLGIPEHDQEGRLITLEFDDFYLVNAYVPKFWAVVYVDWISNFVLLLLGLQNYRINDWDPCFSDFIKKLECSKPVIVAGDLNCARQSIDIHNPQ

SEQ ID NO: 63492 - protein, 138 aa, Zea mays
  Coding DNA Sequence Number=SeqID_20117
MRAPTLLPAVVALDGLAAAVAWWRQGERDREVVANRRRHGGGTRPCGRSETRSPSAAAWSHSPEHKFLYMDLVETSPYFSKTQVKESSPLSLWIWMFSKWFRGLVECSNPYRSGVFDAQVLEDFWSCPASIGVNLDPL

SEQ ID NO: 63493 - protein, 152 aa, Zea mays
  Coding DNA Sequence Number=SeqID_20118
MAERDRERGIPRKGSFSVKETGPEPLKGKCALGPFLSILVIECQHRRNRVKEKLAVYSQGAVRSGAPDCPVVHRTVSGGAPDSVRCARLPRAKWSLSGIRRRRTAKIHRTVRCAPVYPSCVRCSFPLCSVFFVNFNCKGERLQVVEIPRKRD

SEQ ID NO: 63494 - protein, 64 aa, Zea mays
  Coding DNA Sequence Number=SeqID_20119
MGDGVAGGNGGGGCAAKRAWGGGSAHGGRARVREHGALAKVKKNFTTQCMQRTGHTNFRPSNFY

SEQ ID NO: 63495 - protein, 51 aa, Zea mays
  Coding DNA Sequence Number=SeqID_20120
MEKKKKAYSNLVEDQIIEAYKFLDEKWLPKQPDAPQGPDFVEVTSPRRVAK

SEQ ID NO: 63496 - protein, 128 aa, Zea mays
  Coding DNA Sequence Number=SeqID_20121
MLALLLLLLRKCMCQFLLKLTPMDDAEPNGCDQAEAEPNGCAIRIVDEDEEEEDEIPLVRKNSRRYIVSGESSGVPSPALSTLIGLQELSLANFDQTLEDMVPEDMLSEPADGGMMDICANVPDAGLE

SEQ ID NO: 63497 - protein, 118 aa, Zea mays
  Coding DNA Sequence Number=SeqID_20122
MEGDDAVARGPHASEGGVTVWTATEGEGGFDRSPADGEIPLRFSAVGLVLRRGGGGEARAGAGDHGGGVNLTGGGLWRPVRGKVAGVHGGEVAGAVVGCNRGRGGVPRDRDHVAELKH

SEQ ID NO: 63498 - protein, 54 aa, Zea mays
  Coding DNA Sequence Number=SeqID_20123
  Homolog annotation: Hit_ID=Q7XBE0; Match level="QueryCoverage=96%, HitCoverage=7%, E-value=5e-07, Identity=45%"; Hit description =Putative gypsy-type retrotransposon
MEVGEGPLALEVAVMESSALKDGTSVYPAPEGVVGDDPARMGSASYDPAPEGIG

SEQ ID NO: 63499 - protein, 142 aa, Zea mays
  Coding DNA Sequence Number=SeqID_20124
MAAADQAVGDAGGTDPTRRDEESSVRSGRRLNSAAGGAVGLRPDDSGGVNPGANSGKERNLFIGSLADEEIDAEIFGDITKPENGIRRNPYRETRSQKWEKLQKNESSEKEGILDDVTVGRLKNRPSRKQGNVGKIHSSDAI

SEQ ID NO: 63500 - protein, 42 aa, Zea mays
  Coding DNA Sequence Number=SeqID_20125
MPQFAVEALSARSNREEPVVGDPGEQQIEVAEQELIEGKLCP

SEQ ID NO: 63501 - protein, 117 aa, Zea mays
  Coding DNA Sequence Number=SeqID_20126
MASSVERQRWRRAPRLMRWQWARGIVGAAVRASEKIFGSLTALRCESSRPLSVVLVINDNHMWTNNSWRNKNAGWTTEKRKSWRLKALVVDHVKTKVFREGIDRISGLDSRTIKRGQ

SEQ ID NO: 63502 - protein, 168 aa, Zea mays
  Coding DNA Sequence Number=SeqID_20127
  Gene Ontology: Mol. function=aspartic-type endopeptidase activity; Biological process=DNA integration
  Homolog annotation: Hit_ID=Q109L4; Match level="QueryCoverage=89%, HitCoverage=7%, E-value=2e-10, Identity=29%"; Hit description =Retrotransposon protein, putative, Ty1-copia subclass
MLQFEVFWGHLLDTNFHKHQVIDWQYMQNEVVMAGLIPKFQTCGLYEFMGKKTHYNEMVVRQFLATSEIDIEEETIIWMTGHRRYFATFAEFAAANSLDYNLISAGIDLYTEDIFENYEPYYEPARLGIPRRFGETPGLRHHPAVINKIARVTILPKSGDKSKIRDKF

SEQ ID NO: 63503 - protein, 118 aa, Zea mays
  Coding DNA Sequence Number=SeqID_20128
MGALSSQFETLSTNESIHDIRQRQQQLQSDFSQFSSVFDTFSSHYYNMYPRPPCGGDCESSRPLSDVLVINDDHMWTNNSWRNKNAGWTTEKTKSWRLKALVVDQVKAKYFSVTLKMQ

SEQ ID NO: 63504 - protein, 66 aa, Zea mays
  Coding DNA Sequence Number=SeqID_20129
MAAGLGGGRPDRAGREAAEPAMGKGERGWGREERGRGSSPGRGATARGGRRQGRPRAAVGQGAAAA

SEQ ID NO: 63505 - protein, 53 aa, Zea mays
  Coding DNA Sequence Number=SeqID_20130
MGLGVCGSLCQGGYEIDGSGYDYGAGCQHCNHCSGEDEAVEGDFQEFQDYDEF

SEQ ID NO: 63506 - protein, 79 aa, Zea mays
  Coding DNA Sequence Number=SeqID_20131
MEAISNTRLALGILVADSVVLVGEKVTSKLFQISRSADVRRPPPLWDLLLIHKVGQAPRRDGRPDLEQCVGERRDGRPS

SEQ ID NO: 63507 - protein, 49 aa, Zea mays
  Coding DNA Sequence Number=SeqID_20132
MGEVCEEPNPEGIKVDEDSGGTSTTAWSSSARRCISSSITILSRLSGIP

SEQ ID NO: 63508 - protein, 44 aa, Zea mays
  Coding DNA Sequence Number=SeqID_20133
MTTFKTPGAAAYGSSSDLSLSEYMMEISRNPMESSSVFLLESFK

SEQ ID NO: 63509 - protein, 67 aa, Zea mays
  Coding DNA Sequence Number=SeqID_20134
DLSSGVQAVFWARMASTDQHAAAAMALGRRGLAGEKIATEPGEEDGSLAVGLRWTAGIKSSIYPFAY

SEQ ID NO: 63510 - protein, 567 aa, Zea mays
  Coding DNA Sequence Number=SeqID_20135
MCRIYLADRYEAHLSIQLYTAKAQSRQLHSRGIPHHGLHFSESVPLRAHNPRRAHPHSRCVRSNPDSPRPSPDRAKEEQYGQPLQAEFSSPSPDSGGGGGSCVTTESDEDASSPSPDVVRRSLAPQERTVLLEREHSLPPSQAVDGDDDDDLDANVERHHAEDAPGGSDCYPSSSSSSSRHAPSATAAAEGPGPVGRRRGDEQAIRRLHQEELQLLRPAIGDLCSVTIRPPPRRTMRIYSTSRTHASLVFHLGVPPELAEGGGRDDELSCSIGAAFRKKARKLVGFCATSLISDDTPVIRAGAGTGISAKLFELHRHLCHAAAAALSIQPSLCGPTVGAAHCCRFVRSHLLPGNCFRRLHHRPTFSSLRLSLCTHPHAHAERLRLTAPVATAAVAASTTSPDFPAVGAVLGKPTMLRRHLAPVLGAVVSTLSSEQHTPSRPRAPPRSRSFLCNCSRPASPPPRELAPHRSGPRPPPPELHRPSYRRWPTVWWPQTSSRATGDYDCPGKVHSSPRSILTPFPRIWAITAIESLKPKLKELLKYRDATQMVAVETTQEAAMAEILVRCL

SEQ ID NO: 63511 - protein, 204 aa, Zea mays
  Coding DNA Sequence Number=SeqID_20136
  Gene Ontology: Mol. function=aminoacyl-tRNA hydrolase activity; Cellular component=mitochondrion; Biological process=translation
  Homolog annotation: Hit_ID=Q5N9Q7; Match level="QueryCoverage=27%, HitCoverage=22%, E-value=1e-20, Identity=84%"; Hit description =Peptidyl-tRNA hydrolase, mitochondrial precursor
MVYAAPRTGWRRRLRGRGRGGGAEDGRAFSMNLAAPIFSATTYEHCGLPQDGAHGRKVGGGRRRRHGRGCDGGGEAQALGVGMGMCAEREAEGGERGTVVETTEAVAREKIFLGGAGLSVHGRTGRWQNSQRQTTITYLISSRDVEHKGLIGDVPVMLAKPQTFMSASGKSVGQLVSYFKIPLNHLVVIYDDLDLPFAKLRLLP

SEQ ID NO: 63512 - protein, 51 aa, Zea mays
  Coding DNA Sequence Number=SeqID_20137
MRLMVLGIDSGNALLYTPNPPSPGCPHCNHCSGEDEAVEEDFQEFQEYDEF

SEQ ID NO: 63513 - protein, 67 aa, Zea mays
  Coding DNA Sequence Number=SeqID_20138
MWKDWVEHAKDIWAIYPGQTAHLTEIQDMEANEDVDIEGGEEPASSVDTAGSGRPPSPESSVASFAH

SEQ ID NO: 63514 - protein, 142 aa, Zea mays
  Coding DNA Sequence Number=SeqID_20139
MGKGHKRKREPTPPSEDFGDSEYSEEEFSSESEGSPAPVSPPASSDDSDDSQGIAAEVWTYTWAVERSGLEGSDESEFSSDEEDSDGGGDEDDDDDDDGDDDDDGDGDGDGSNGGGGSARGGSSTGSTRGGGGKGSSSKASG

SEQ ID NO: 63515 - protein, 185 aa, Zea mays
  Coding DNA Sequence Number=SeqID_20140
  Gene Ontology: Mol. function=protein binding; Cellular component =nucleus; Biological process=ribosome biogenesis and assembly
  Homolog annotation: Hit_ID=A7QJJ2; Match level="QueryCoverage=79%, HitCoverage=20%, E-value=4e-68, Identity=82%"; Hit description =Chromosome chr8 scaffold_106, whole genome shotgun sequence
MKGNFAVLAVEYQRRLDLIHDLRFETATTKIKLTPDDQYLIASGIYPPQVKVYELKELSMKFERHMISEIVDFQILGDDYSKLAFLCADRSVNLHAKYGSHYSLRIPRVGRDMAYDCWSCDLLCAASSPDLYRINLEQGRFLASLSSESPAINAVTRRRSRLCNLMKIKDTLWQWGPVQERLLHV

SEQ ID NO: 63516 - protein, 158 aa, Zea mays
  Coding DNA Sequence Number=SeqID_20141
MTWMKTDVGGHPPIPLPPGGAPTSNSVGYALLDRRGYVAQGGGAEKASALAPVPSATEELSRWRDSLAHCGARFHDDSGGPTRNSTPRVAVPSQQGHRYEWCAPAVTKNHIPSSNLVGWRDTASGGSLQVLSYRRFCSSDGREEGYGRLIGRGTSPEL

SEQ ID NO: 63517 - protein, 194 aa, Zea mays
  Coding DNA Sequence Number=SeqID_20142
MTWMKTDVGGHPPIPLPPCGAPTSNSVGYALLDRRGYVARGGGAEKASALAPVPSATEELSHRRGLAWDRETHRRAQKNQRWRIPAAISLISHRLPGDGADSLARWGARFHDDSGGPTRNSTPRVAVPSQQGHRYEWCAPAVTKNHISSSNLVGWRDTASGGSLQFLSCRRFCSSDGREEGYGRLIGRGTSPEL

SEQ ID NO: 63518 - protein, 194 aa, Zea mays
  Coding DNA Sequence Number=SeqID_20143
MTWMKTDVGGHPPIPLPPGGAPTSNSVGYALLDRRGYVARGGGAEKASALAPVPSATEELSRRRGLAWDRETHRRAQKNQRWQIPAAISLISHRLPGDGADSLARCGARFHDDSGGPTRNSTPRVAVPSQQGHRYEWCAPAVTKNHISSSNLVGWRDTASGGSLQVLSCRRFCSSDGREEGYGRLIGRGTSPEL

SEQ ID NO: 63519 - protein, 148 aa, Zea mays
  Coding DNA Sequence Number=SeqID_20144
RRRHKEESSSDDEPKGVKKRAVQPLGLKQGKAEFYMFGGNRGRGVLAAAIAVMLSLSRAIGRRLFSSAEAASTAAVRTAQNPLEEFFEVERSTEEGKPPPHYDGRRSQPIEAMFGQFLIRGDWKGSKEVEGDFYLYDVDLSALLPPDV

SEQ ID NO: 63520 - protein, 124 aa, Zea mays
  Coding DNA Sequence Number=SeqID_20145
  Subcellular localization annotation: CTP_CleavageSite=69; ConfidenceScore=5.69e-01
MTPYPYPCFATSPTTWNRITGGEPSSSSDYRFSLPAGSPVSLPNVISPSPSLARGPVPTAPSPRRSRWQAELGEEGSDPSEIVVPEEGHETDLSEIDLSCQENFDKGKSILPLMHKLPTLSTTA

SEQ ID NO: 63521 - protein, 464 aa, Zea mays
  Coding DNA Sequence Number=SeqID_20146
  Homolog annotation: Hit_ID=Q2QNH3; Match level="QueryCoverage=51%, HitCoverage=18%, E-value=3e-07, Identity=23%"; Hit description =Retrotransposon protein, putative, Ty1-copia subclass
  Pfam annotation: Domain name=zf-CCHC; Domain location=276-293; Score =15.4; E_value=0.0071; Accession=PF00098.14; Description=Zinc knuckle
  Pfam annotation: Domain name=zf-CCHC; Domain location=31-48; Score =25.1; E_value=0.00024; Accession=PF00098.14; Description=Zinc knuckle
  Pfam module annotation: Pfam domain module=zf-CCHC::zf-CCHC; Domain location=276-293::31-48
MGMIRKINLMGVPLQVENILFNIDRKKQRKRGCFACGEKGHFRDNCPTMAEPKKERSKGKALTSVKTWDDSSSEDEPPRTRSHRSSSRSSLSSRKCLMESGLLEKFETFANLNSELSTKIELLESSAPSTATDDGLLKKNEKLKAKLASSQEAIENLLKKMEILSIHNNELSTKLENIGSTLEVSLVEIPEIIKKDASTSCFDLIDDSNPCNQVLVKNVVIETCSDEIAMENKQLKQEVARLRKALYDKKGKAKQIRPPQDNTTAGVNKPMEGEIVICRLCYKEGHKSFQCKTMIRDKQRQKLKQKPSRKISNTYINKVDKKAATPYLIKKKKNGKVIAIKANKKVNIGEGAKRIWVPKEIISTMKSTKKVWIPKGNSQDAKRIGLRKSGCNTSKEDIKRCIKVQDSITKEAQRNQQRNPRKGLSANAWWRTDSEQYISGAHRTVWWDNRTVCAKGPRTRALGL

SEQ ID NO: 63522 - protein, 89 aa, Zea mays
  Coding DNA Sequence Number=SeqID_20147
MAHRIARPTRGGGRPKSGVDDLAVLVRQGFDSCLEKLHGSSGKLSKGSVEAEGLRKWLDTVAGARVARAGGVELTGAKDGVCPAKISAE

SEQ ID NO: 63523 - protein, 165 aa, Zea mays
  Coding DNA Sequence Number=SeqID_20148
DRGGRKGGGAYRRRDCFGEVVEDVGEVSGITTLCGSPSGMVGVGRSTENMDARNWAETHRLALSTRGGERPKSGKVDLGLPVKSGLVRGLGKLHGPLAELAEPLARLGGGWSGLAAVAEALAAMAGGNALAGAKERGLAGEEIWSPEIRSVSLLKPEANPRFCRV

SEQ ID NO: 63524 - protein, 183 aa, Zea mays
  Coding DNA Sequence Number=SeqID_20149
  Gene Ontology: Mol. function=thiosulfate sulfurtransferase activity; Cellular component=mitochondrion; Biological process=sulfate transport
  Homolog annotation: Hit_ID=A3A3I3; Match level="QueryCoverage=41%, HitCoverage=23%, E-value=5e-30, Identity=73%"; Hit description =Putative uncharacterized protein
  Pfam annotation: Domain name=Rhodanese; Domain location=67-168; Score= 12.9; E_value=0.018; Accession=PF00581.11; Description=Rhodanese-like domain
MCSAVGASATVELDASTSGTKFVGRREDVRDRDLLVVVFEVDNSANLLASKTTSIDDGRKCHDYHRCHKVCEAHSKTPVVLKYRYSDDFPRIAVIHTPFYQSHLPHMLPSEEAFTAAISELDIKHQDKVIVYDGKGFFSAPCVWWMFRVFEHKKVWVLDGGLPQWRASGFNVENASPDDDAVL

SEQ ID NO: 63525 - protein, 188 aa, Zea mays
  Coding DNA Sequence Number=SeqID_20150
MGIGCLWDKNLNKDYGVVPRLPSSRDLRRCLPFRLWWVQVRSLHDDSRDDFSRILGRRNAQSHTDGLAREGFPRILWEILQGAGYTTPPQYAVQLFEKHRVPCYRVRMTLEPHPLQPGWHSLDSESFGYRDEDTMEAIALHGLTTFCGFHPLELSTHPIGLFPAEKEDDPMWKDRVEHAKDIWAIYLG

SEQ ID NO: 63526 - protein, 136 aa, Zea mays
  Coding DNA Sequence Number=SeqID_20151
MAQAVEMAHQMLSMRVPIYMPTALQLGGPYMSLTFTILVKGSIREQGPTVAMQDAARLSSMVNLVTVLNTELDHALDELSKARAEIAELRAERAERRHQEDGSPAPIGIQHPYRSLSRWRHAYGTPDCRIQIDLEP

SEQ ID NO: 63527 - protein, 290 aa, Zea mays
  Coding DNA Sequence Number=SeqID_20152
  Gene Ontology: Mol. function=protein binding; Biological process =apoptosis
  Homolog annotation: Hit_ID=Q8LJW5; Match level="QueryCoverage=81%, HitCoverage=58%, E-value=2e-31, Identity=39%"; Hit description =Putative uncharacterized protein SB234M12.19
  Pfam annotation: Domain name=BAG; Domain location=120-191; Score =19.5; E_value=0.0057; Accession=PF02179.7; Description=BAG domain
  Pfam annotation: Domain name=IQ; Domain location=99-119; Score=24.4; E_value=0.00043; Accession=PF00612.18; Description=IQ calmodulin -binding motif
  Pfam module annotation: Pfam domain module=BAG::IQ; Domain location =120-191::99-119
MASRRFFVHDPYDYDQYYTAAPYHYEPYYQPQSTPIFRRARDVFAGAEPAAARARSAPRATETQTSFSIPVHGPDSPEREPKAAEATRAGPVAPAMSAEDAAARIQAAARGLLARKSVRAVREVEREAEQVGGKMACQAEALRVDPRARVAVWEALMRMLLRLDAVRGARDYRRRVTKRVVTLQDAVDAFETKPAPAIEMAAEESAVAPELPDAAQHSNETESIKTTTHMPTQLEVSEAVAASDGVDAWKMMAALCEQIAQQSAVISALADRVEKLERSVRRISGGEPRS

SEQ ID NO: 63528 - protein, 103 aa, Zea mays
  Coding DNA Sequence Number=SeqID_20153
MGKGTQIEQKAMDTMRTAVLVDMEVDEESRLLPLEEPSFFNDQQPCVLLKIKVSVEARSRLWRRSYYHQEPTQNDQDAAEKLIDDEEESGVAGDQFKLDDDLI

SEQ ID NO: 63529 - protein, 62 aa, Zea mays
  Coding DNA Sequence Number=SeqID_20154
MWVKCTTSAECYETDISAVLTVMSGQGSSSLSALATPAQEKMKPWKETFQGVPRLRRVLGMG

SEQ ID NO: 63530 - protein, 56 aa, Zea mays
  Coding DNA Sequence Number=SeqID_20155
MNVCELTLALFTPGQEMYRQNEEHEGCYDEFGEIKEDFTPWNPVPEVMLRNNVILS

SEQ ID NO: 63531 - protein, 206 aa, Zea mays
  Coding DNA Sequence Number=SeqID_20156
  Gene Ontology: Mol. function=nucleoside-triphosphatase activity; Biological process=cell division
  Homolog annotation: Hit_ID=Q2R029; Match level="QueryCoverage=49%, HitCoverage=14%, E-value=6e-37, Identity=76%"; Hit description=AAA -type ATPase family protein, putative, expressed
MRVVAGIQDGMKQGIINPSDIDVTFEDFPYYVSENTKNVLLSCAFIHLEKKEFIKQFAEISSINQRILLFGPAGSEIYQETLVKALAKHFGARLLVVDSLLLPWIPDGNDLGGLCEEDHGFFCSAESLRPDFSAGEEVERLAMTELIEVISEENKSGPLIVLLKDVEKSFIGVTESLSSSRSKFESLPSGVLIIGSHTQMDSRKEK

SEQ ID NO: 63532 - protein, 553 aa, Zea mays
  Coding DNA Sequence Number=SeqID_20157
  Subcellular localization annotation: CTP_CleavageSite=41; ConfidenceScore=5.23e-01
MRQYVGPASANSVVPQLRQSPFASEFRGSPGHRLWCLGGKSATARRDLGLTRGTRHALLGAPDLYVQGVRCPSMERLHTVEEGTPDSGYRQLPSGPPQGRMQACSEAEGAHNRGAVVRFLRGGSPFRPLVSAKWFAFFMLWVSLYEMWGLAPRVIGRWGAPVFSGGIRVRVAPSGDLTTGELALVVPGRNLRPVVIHKDDYQPCGGEKRARLRPPPCPQIQGCSSSALGRRASRVGVPPSAWAGGPLLPPAFGGEGRSPALRRRRSSGTQDRPTAGAAGRRVPGSPAWMVSAPPPTLPPAVWLGRGCPSTARATVVPCAGLPHPRLLPRRRPHRGRYKTSYAAGAVAAFLDGLVLTPAVRTRARTSSCVLRQPPPTGAEMAAVVGAEVVAVAEVAAAVGAEVVASAGKPLGASYPTTLLVWRLDLLRLDTSVSEKVVNNSREAASPRAVERAGPRYGTRLSGYMGFGPPQETNAKRPHRLRTTPWNGVPFSGAGSQAVGPPNFRIGGPKLPIGRVYGDIPHRFVIHPGPVGNPEGFSEEGTLQLCRPGNSGSL

SEQ ID NO: 63533 - protein, 105 aa, Zea mays
  Coding DNA Sequence Number=SeqID_20158
MGGVAVGGDGIGSGRTVGQAPFVCFRILQISIGVASSSGDGHGLGQCSGRSSWPGASPTWTDGLDTRSNALIGLCKGFGPVQLVAHSTAAQQRANGLITCGQSGA

SEQ ID NO: 63534 - protein, 133 aa, Zea mays
  Coding DNA Sequence Number=SeqID_20159
MALLHGSFIARESRISVAIYSFDVVGRPGPRKNDLTIYWAFGPFGRSFTSLVDPGDIYPPQAPDLWVDLEVSIMSSKFRCRGIYCVLCTDVTVLKNILILPGRPPPMGVGKGRLDGWECLLNALRLFSDRGWK

SEQ ID NO: 63535 - protein, 173 aa, Zea mays
  Coding DNA Sequence Number=SeqID_20160
  Gene Ontology: Mol. function=isomerase activity; Cellular component =endoplasmic reticulum; Biological process=cell redox homeostasis
  Homolog annotation: Hit_ID=Q5EUD0; Match level="QueryCoverage=84%, HitCoverage=45%, E-value=4e-41, Identity=83%"; Hit description =Protein disulfide isomerase
MGSAVAFAKLDGERYPKAAAAVGVKGFPTVLLFVNGTEHAYHGLHTKLQSKDSVEEFLKKDMTFVIGLFKNFEGADHEEFVKTATTDNEIFTFAEAYDFEDLESMVEEIGRAFKTKIMFIYVDTAEENLAKPFLTLYGLESEKKPTVQENTSCSVVMKHETSRYKLKLSTSDT

SEQ ID NO: 63536 - protein, 453 aa, Zea mays
  Coding DNA Sequence Number=SeqID_20161
  Homolog annotation: Hit_ID=Q6AU54; Match level="QueryCoverage=68%, HitCoverage=55%, E-value=1e-62, Identity=49%"; Hit description =Expressed protein
MLKCSHSAPPKRPRARFARLSAETEAAGKAPAEPKPRVERICAMRASPIHTKTARVKCPSERKKALTTPRSKAVRSRQELFHSVKHQKEPLAAAARKGTVVKSLFMSTTPKKEPVQTPAADKSKGAVSEVCSKLRKLNLACREVPSRYMSQPQPKNTKTAKKSEETTVAKSEKRGLESKTNAKKKILGRSVKRANAGPDGENRNGCSTAADENSLVETAGSHQERKVVLQELRIEVDVSRCGNSDDNKENVSSAPSEEALDNSSYYGSENRLLENNDNVPLKENVALKVAKLQKKVHQEQAGKLKKTTNPRVVFVEATEAQYAFKKLIYTRYSLWQDTHEGRQHAYHYLLQSQPKEACAMNYRVSTMFLPPFIEQSLPKYGHRPYETLLDVWWTVGEGTNMVVGMTSMVAVEVVMVLIVAVTDTLVIVEMTVAIGAMTVMALIDQVLPDGVSS

SEQ ID NO: 63537 - protein, 99 aa, Zea mays
  Coding DNA Sequence Number=SeqID_20162
MRFFPTAILITWVAYTPRRNNNGTWPMPQWGLHAPPPPPPPQGSGVMGHNTPPPVIPAPGGAYAGEGAYAGEDPNPLHDFVDQLLASGGSGHNSNDPNV

SEQ ID NO: 63538 - protein, 186 aa, Zea mays
  Coding DNA Sequence Number=SeqID_20163
MSIVQTILICRGCFLGNTRVMMSVIDHAAQRPYVRLRLLAYVTGSRPCGSIGSPPDRGAEAYTVWFGHVSALDPYQALIKAWVFFVPESRDPAVSGPEPTHRGLEPVLGVRFLARGGPGPYPKVRSVYQGSDTFPWGSGPTVDTLEYIVFSGHVAAPEPSTWWGRVLFTTRLEIAARVPRLHTVVR

SEQ ID NO: 63539 - protein, 209 aa, Zea mays
  Coding DNA Sequence Number=SeqID_20164
MEVVEAEGMRCAVFYSLGLGEIHPKLRPNPPRNSNSKGKRHFRRQSGRRFTSVMMTASKKDECPSGQGVTLHKIVTAIGGGVSVAKAQRLWKAVVGPGRTLGSPEAQLGKTLSCSDLGQIALPTDRIACAFNENSAIHHVPTTVPTTKVRLSHDLPRVQPQAQQGAPPCPTSGLGLGRRSPLSSTLGLSLSLGLGRSHNLARPQPQPQE

SEQ ID NO: 63540 - protein, 194 aa, Zea mays
  Coding DNA Sequence Number=SeqID_20165
  Subcellular localization annotation: CTP_CleavageSite=66; ConfidenceScore=5.94e-01
MSSSSSSSSSSSSGVSGDGSNGSPSLACLRRCFSKASRARILSRARAFSASFFSFSFSAASLRTARSAASSRTSGRAGLKILNPWGRTKIPTVRIKGVENSAQNRRRIGHLPGHIPTVRTHHGLAKGASIQPPYLTCYPLEEIVSGEGGRGHPRALQIDPRLHLCKPQPPLCQREHPPTMDGGDDPRSGKALIS

SEQ ID NO: 63541 - protein, 116 aa, Zea mays
  Coding DNA Sequence Number=SeqID_20166
MRKRLHNLHLFKKVSRKTKVHDGVLARPKSGELLDRPIGAMTGANLRFTPDSTPEKYFPQHNCTNKQGVCSGHGGREQSGKIVVFPATRELLAQLRGSSSIVELRESSNERERRMS

SEQ ID NO: 63542 - protein, 91 aa, Zea mays
  Coding DNA Sequence Number=SeqID_20167
  Homolog annotation: Hit_ID=Q8H6I5; Match level="QueryCoverage=50%, HitCoverage=4%, E-value=3e-07, Identity=58%"; Hit description =Putative RIRE2 orf3
MAVKGPSTALASSFEVEILPPVSPSEAGPDSAEGGNDAEGVAPPPADDLFGSRIAYSSTSYFSRKVMSERGFPLLAPEGGSGFAEARLILP

SEQ ID NO: 63543 - protein, 23 aa, Zea mays
  Coding DNA Sequence Number=SeqID_20168
MPWDEESVANTKSIINLQSCHGA

SEQ ID NO: 63544 - protein, 50 aa, Zea mays
  Coding DNA Sequence Number=SeqID_20169
MKKYKECEDEQCSRTVHADWAFAFASRLYPYLLSSRRYVLHNLRPKIIIS

SEQ ID NO: 63545 - protein, 194 aa, Zea mays
  Coding DNA Sequence Number=SeqID_20170
MPPRTRKTARKSTGPIGVPRHQLAPRHEDSSSGSNDPIGDLEARVNQLQAELQHRTNIWVADGDRINELRRDIRHLRDQLADRDLALDWAVQSRLLACAKEARAQARIKELSSAVDDLQVYCNTLHEEVHVLYSQLHPSAPAHPVESEARPSHVAGHALGSELDLFQPPPSMRLVDEWSPTPDDEAAKSNGKQD

SEQ ID NO: 63546 - protein, 108 aa, Zea mays
  Coding DNA Sequence Number=SeqID_20171
MAGSRDSSDVSPSNIIEPTWETLPADEQLQFEEHKERMIQEAKARFLANFKVDRNNKVVRHRATDPASLQPTPDIPNAKSSACASLQPVQKKRQEEVKFTFNVDSIGH

SEQ ID NO: 63547 - protein, 336 aa, Zea mays
  Coding DNA Sequence Number=SeqID_20172
  Subcellular localization annotation: CTP_CleavageSite=5; ConfidenceScore=5.28e-01
MSSLSLMHRVFPPSKPPDGGYPPSFRLIVGGTQLRGSWYLLAIVRLQGFSSASPAVPPRRWSPKTVTTSPWVGRSKPGCDLGPTLSFKDVHHPRWGGGRAEPELYLPRGFVGHPLLRRSRERVLTGPAGGPDFDNAGLVDGGRGHTQRVELVGLAPGGPSCRKAVAAPCAREDRPRCRALLGRRSCSGVVLPLHRRRRLGKSPSPTGSPPPSALRASGSLYLSSPLERRRGRGQDCSSAHPEACAAAVRPPRAGVVVVAVGAGGGEPPVSLLLLRRPSPIEWGYSPVGYLNRFTKRESPRVQVTSESKPRVGLAPSKDGWPRPWGNRPSRLLGPDS

SEQ ID NO: 63548 - protein, 147 aa, Zea mays
  Coding DNA Sequence Number=SeqID_20173
MKKSNVVKRQMVFSRQFSKRHIFGRLGTYGCETRVFAGRDLFGSKLNFSMIHGELRLLGGWPLFVKSHRIEAGHSGQTLGHDVGELVCRRNMKNTELPQSYLLTDEVDVDFDVLRTAVMDWVGCHVHNARIVTVDHGRTWDGDVQLM

SEQ ID NO: 63549 - protein, 138 aa, Zea mays
  Coding DNA Sequence Number=SeqID_20174
MDQIGSREGIHSDLISAVSWPDQRRTSPRAKQLITNLDEPASIPNRGHTLGIQCPGIHRLESLSQRLILVVRCWINGVSAHHAITHRPQPRPWRCPQLRWRTAYPRRSNADERKQGDLALGNRERDVAARSGYHGEES

SEQ ID NO: 63550 - protein, 48 aa, Zea mays
  Coding DNA Sequence Number=SeqID_20175
MAVMGSTSEKMYLCQVRKQQTFAVFALRWCPRMNLNSNVVAEGRGPSF

SEQ ID NO: 63551 - protein, 75 aa, Zea mays
  Coding DNA Sequence Number=SeqID_20176
MANGSIARLDEGTAGSANDGQCVGTGGALLNDRRRGLSGDERRRTLANYTVRAREAREERASSGREKERARRRIL

SEQ ID NO: 63552 - protein, 673 aa, Zea mays
  Coding DNA Sequence Number=SeqID_20177
  Subcellular localization annotation: CTP_CleavageSite=49; ConfidenceScore=5.05e-01
MDKDRQGAAQKRQAVVRLHEARPKRQQGAAKATTPGGGQPPLVAKSAVPASSRAPEAAKAAAAGGSKSAKAAPVPSGVSEAAKAARELPLPGKRIADFATDISVEDYLVGSDEGQLVVAPPAGAKGGALSAGGEIPALAAVRDEAGAVSRRLKELKEALSQATDFADRTASGALMAVVSAEVERLRTQHADAVREKLAADSKCRKLADKVAVLEGEKADLRCQLAEEWKEANEALAKAQAAQAEANLVRAEGSLARQRAEQLEERLSALQSRVERAEASTRTEAERTRKQLMDSYHELGARTAEFEVPDREPGLCCLEWVQEELQALPTIVEGFMSYASLVTCEGAMNALSRKGCRHYEVFDQADEDFERDIYKVEDPIVKESIGALYDRMWGPHSREVVRERAETTRGQAARGERVDDFGALNSALPDPESNPAAAVSEVALELPPETNEGAPDAPAAAVAGGGPPPETAEGVPDATAAAAAGGGPPPTAAPRAEDPVTVAVEATAEAPATAGSSQVQDFGPAHATATTNCLAASTVDDGNKSDGSASKFSDFGDSESSVEWTEESSDEDLDYFAALDVAAAEASPQAADAEVVPGPSTGCRRRRAVAKRRVSGADVGRLRVSGAGRQELLSLPAAVSADEGELRSLFAGEELRIMLFNYREMGIIPKVGPM

SEQ ID NO: 63553 - protein, 56 aa, Zea mays
  Coding DNA Sequence Number=SeqID_20178
MKPTRELGMTTRRTSEGKTIARTAREALRDEARQCGKEEGVEVDLQEFQDFNEFED

SEQ ID NO: 63554 - protein, 229 aa, Zea mays
  Coding DNA Sequence Number=SeqID_20179
  Homolog annotation: Hit_ID=A2XFR6; Match level="QueryCoverage=70%, HitCoverage=46%, E-value=4e-11, Identity=30%"; Hit description =Putative uncharacterized protein
MPPAPPQGIQATRGDPDGDGDDNAGGSSSHDTELSEEPESEGWIARPITCDAALYQHRRGLYPDQWEATCLVRRPDDDLQGAEAFLEHYSITERDTAEAAMQDATRRALFQYCSLFSGVADGLDLKYYPRRLTDSAGGVIVSLVGEGNPRLNSMVNLAAVLNTELDHALDELGKGRAEVAELRAECAARQYLDGGSPTPVGIQHPYRSPPRGRFDYGTPDCRTRIDLDP

SEQ ID NO: 63555 - protein, 147 aa, Zea mays
  Coding DNA Sequence Number=SeqID_20180
  Subcellular localization annotation: CTP_CleavageSite=63; ConfidenceScore=5.13e-01
MAPRTLCDDGGSRPPYGSKRTRPIPMIPAANPAPYAQAPRATPAGRSRTPGRPASTRNAAQPDCNAAPCLPRPAPATSLTPVEQRCPGATRTDPADRAKPGRRAARAPNADRARAVRPSTRAGPPLAPTPDAQHPTPSRSTRQDPSR

SEQ ID NO: 63556 - protein, 77 aa, Zea mays
  Coding DNA Sequence Number=SeqID_20181
MASSLQWPLQCLDRGLLLPRPTPTRFNVVIKSVQPLIRRTLGLGFIGAQSTIDSYPFAEANFLKSPQEILKLTRRPL

SEQ ID NO: 63557 - protein, 136 aa, Zea mays
  Coding DNA Sequence Number=SeqID_20182
MVSSAFSNGDCAGFLDREQIRKAKLMSLNCFAANRDETHTAESLSCQYWVSLAIETTYRLRGHSNPPLILHCIEPCGTPTTSYNHHRPRQARRVPCPDPSHICSRVDSLPVTSFTIPSNGFAISARILVLITCCKA

SEQ ID NO: 63558 - protein, 22 aa, Zea mays
  Coding DNA Sequence Number=SeqID_20183
MIKVADQFLSKKSSMTHDKVVC

SEQ ID NO: 63559 - protein, 55 aa, Zea mays
  Coding DNA Sequence Number=SeqID_20184
MDVVGSQAGPRVEGISRCAWKVFIRSVSNKVSLDPNRYHSGRSSKNTKVDTAPKE

SEQ ID NO: 63560 - protein, 149 aa, Zea mays
  Coding DNA Sequence Number=SeqID_20185
MKSTAADMELDGGKRGADPPPAHRRASAYARASSSLHVEETLRPAAGTAEGWGGSCHGGHERRGKVNLDENKIENWELGKRRKCGVGPPPLQSPRPSHFAAASESSSSSTPGGEIPSARGTSTTNGVLWVYYLGPREEPRLGSIDLTDV

SEQ ID NO: 63561 - protein, 263 aa, Zea mays
  Coding DNA Sequence Number=SeqID_20186
  Homolog annotation: Hit_ID=A2YUG5; Match level="QueryCoverage=23%, HitCoverage=23%, E-value=3e-08, Identity=51%"; Hit description =Putative uncharacterized protein
MEVPKAVALVAALALVALGALATRWLQRMEARNEEVRRLALLAAAEEETIAREEAYYYGQYGGFVRSSDLPEAPSLWAAQEVPPAPKEVMAEAAAAAAATVASPTAGKGVCAMCSKPTTLRCKRCKSVKYCSKGGGLYTLPSKRQRVLIEQSQVEWWLWQPSDNDDGEAPAPGRMKYILRTNHTWGVVVRGAAEAVDDGMDQLALSIIFQAVDNETPLHVVEEIATDVWATLFHACGDNETPLHVVEEIATDVWATLFHACGH

SEQ ID NO: 63562 - protein, 897 aa, Zea mays
  Coding DNA Sequence Number=SeqID_20187
MQQLGYFGNGVGRVPGAEEIPEPEGELVVFEAFFIAGLRLPAHRLVVEPSVEVFAKNYCLHWQKRKIGNKIAQFGSCTFTPRTGKTSTEVVELVPCARNKRGNWWDYWFYVSGGEVEDLPGLPAIVMCSHCYVAFPPFEVAEDDEDEGALRCAARMSSWRDLVEEFISYGVWPLAHGRMLGEVCPRQMPTLGEQVVRSPTFALDLRDRDPAAFVREVEDGAVRIVGRYAPRTEALRSWDIHGSNVRLNRVFELNRLPYGGYPGDDVAAAIDHREKKPAAAAEEGPSREAASAIKKRKLGTVAEGSGVSDRFAVELVGTCAALGGRMSSPELRESSTRMLEVTEGRWPRNIPIPRAAGEDIFTSRLAHEMKIFPYGQNIAAVVSTVMDKDRQDAARKRRAFTRVGDPSRKVKRARGGTKSTTLGSSKPPLAAKPAVPGPSKSSSGARAVASGSGKPPSAEPTRERRPPSPVRIDEAATSGANLNMDICVDDYRMGGVMMFDAHTSQGLFGSEAGQLAVVPAPVVATPVAAAAEFTAERQRHEGRIERLWAQHTEAVRDKSAAENKSHRLTEKLAATEVEKEDLRQQVPNTRQRAEEKETSLCGLHDRLDKAKASTRAEVDRTHAQLVDAYRELGARTAPFEASGKEVGLRFLGWLQEELEVLPTIVTGLMSFASLITCEGDVNALSREGCGHFEVFDRSDEDFEREIFQVEDPVLKRSAEALYYRMWGPHGRETVRERSDRAMDQVPTYGPAQETTAADTNFVVAATVVPANDSLTGSGSGCFSSDGESRSPFFWTEESSDEDLDYFVALDVAAAESAPRVEVGEAADLPSARTKCRRRRVVSKHSVGDFSRSGRRRRMGIERDRLRVDRIGKRELLTSPIGTSIGEGICRIFSRVRN

SEQ ID NO: 63563 - protein, 679 aa, Zea mays
  Coding DNA Sequence Number=SeqID_20188
  Gene Ontology: Mol. function=glucose-6-phosphate isomerase activity; Cellular component=cytoplasm; Biological process=gluconeogenesis
  Homolog annotation: Hit_ID=Q6YXI1; Match level="QueryCoverage=94%, HitCoverage=94%, E-value=0.0, Identity=76%"; Hit description=Glucose- 6-phosphate isomerase
  Pfam annotation: Domain name=PGI; Domain location=98-587; Score=84.8; E_value=2.8e-22; Accession=PF00342.10; Description=Phosphoglucose isomerase
  Subcellular localization annotation: CTP_CleavageSite=70; ConfidenceScore=5.66e-01
MASISGAAAAPSSAACRLRLRRHILLRPSHLRLRAPHSIADLSRSSSSSSSAPTRAQPLGSRPENGGGVRAVEKDPIKLWERYVEWLYQHKELGLFVDVSRMGFTEDFLRQMEPRMQRAFAAMRELEKGAIANPDEARMVGHYWLRDPALAPNSFLRSKIETTLDRILAFSQDVVSGKVAATFSIFLFAYIPAIASAADFELHGMLGVHHLGGKYSNRHGRYIVQPIDAMYLIETFGTFLFVLMYYNKGFRIRFIDNTDPAGIDHQIAQLGPELATTLVIVISKSGGTPETRNGLLEVQKAFRDAGLQFSKQGVAITQENSLLDNTARIEGWLARFPMFDWVGGRTSEMSAVGLLPAALQGIDIKEMLAGAALMDEETRNTVVKENPAALLALCWYWASEGIGNKDMVVLPYKDSLLLLSRYLQQLVMESLGKEFDLDGNRVNQGLSVYGNKGSTDQHAYIQQLREGVHNFFVTFIEVLRDRPAGHDWELEPGVTCGDYLFGMLQITEVYDILQGTRSALYANDRESISVTVQEVTPRAVGALVALYERAVGLYASLVNINAYHQPGVEAGKKAAGEVLALQKRVLTVLNEATCKDPCEPLTIDEIADRCHCPEDKHNAFPPSITHAQRLLPQIEMIYKIVQHMAANDRAIIAEGSCGSPRSVKVYLGECNVDEDLQAA

SEQ ID NO: 63564 - protein, 404 aa, Zea mays
  Coding DNA Sequence Number=SeqID_20189
MQVACNRTKGAHPFDFDASSMEVQAHTSWTGRGDTPKGILLREGSGPRALLLIRGLKAGPSEGFDNRLRALGLHAHYWSELVTPISTKLQRPDGRDSGQGSVHSRDTISPRPSPALGKDSRPRKIHASPEGLLKQRAHLRLARGPARAGFAEKQPWPDRHANRPYRRSIQCKDRLTPYPDARSSVDKAEEAPPRPTPGLSPRLNLGRRSLPRPSPGLGLNLDLGRQTPPRPTPGLRLNLDLERRTPPRPTPGLGLDLGRRTPPRPTLGLKLDLDLGRRTPPRPTPGLRLNLDSGRRSPPRPTPGLGLSLDLGGVTASPNLGLGLTMSQGLIITLPLASSGYEEQERRPIWLAPVKQVMMAPRMLHDDSGSQPLTEARRRQQGSNSPDNCTSTGLKRSSDGHDIT

SEQ ID NO: 63565 - protein, 146 aa, Zea mays
  Coding DNA Sequence Number=SeqID_20190
  Subcellular localization annotation: CTP_CleavageSite=55; ConfidenceScore=5.41e-01
MVTPEVLHTLAPTSPAAAPAPAPAPCVVVPAPALAPRRRPPRRGPPLPSARPPPRCGLPSPRRGLPGPGAAPASGAQLPARGLGSLRVASQLPMRLAWPRLPPNAIPQTLWFTGGNEMDGSGYDYGTGEDEVVEGDFQEFQDYDEF

SEQ ID NO: 63566 - protein, 53 aa, Zea mays
  Coding DNA Sequence Number=SeqID_20191
  Homolog annotation: Hit_ID=Q10KN8; Match level="QueryCoverage=67%, HitCoverage=7%, E-value=4e-09, Identity=86%"; Hit description =Polypyrimidine tract-binding protein, putative, expressed
MDVLPFDGLAQPAVGADRRKGEAQGNVLLASIENMQYAVTIDVLQTKNGGHKL

SEQ ID NO: 63567 - protein, 220 aa, Zea mays
  Coding DNA Sequence Number=SeqID_20192
MELKGTMSARISELNMLNSQQDECLAALEAEMKQLKEGHEAKIDKLRREVVEVKVEFKLEKVKKEDAIAQKDHLDKLVGNFWSLKDDCFCVATRCCEELERSFSMVGARPRRKNFIDDDIVGVMRHKGQLKRWRPLGKLSNRMSLKVWSIGMIVDGKGEGHAGLYQWTESDERRALGLDRGTGEVGWLAIVANTWDTHRCEDMAERIVSPVRSRTGGTRV

SEQ ID NO: 63568 - protein, 195 aa, Zea mays
  Coding DNA Sequence Number=SeqID_20193
MGALSSFPLPFCDEQVFWVFFFFFASYIKTFGGLRNTYAQMVAEQPVSELALVIASDAPETKGDNSIVVAKATTPQAEDAVVDLAEGSGDDSEDIGIEEDNKIIRPTKPSHVDFRKSTIKGGHIEKKRRLNRVFDAIGFFYPDYPRVIHEVKKKRKQKHVEVTSWCRKFSALKKKPEAKVVQALEEPSFVELPIS

SEQ ID NO: 63569 - protein, 405 aa, Zea mays
  Coding DNA Sequence Number=SeqID_20194
  Subcellular localization annotation: CTP_CleavageSite=41; ConfidenceScore=5.54e-01
MSSHSPHASRPSTLRAPGWGALALPSSCRCWRNATSRKLVPFSHRSASRIFIRQPGCIPSPVVTQDGDHQFDGGEKQTGLRPLPRPQLQGSSSSWLGRRARRAGALPPARVGGPPLLRASGGGNHPPALWRRRPPAMPGKANCCCPARMQHSVLCPRFRGEDESEDLPVRFGAVDARWCGVGGQVDTTVGAEVVAAGESFSAVETVSATCRPTSGSLALMSGSRPLSGDANESLPVAASVLGPSLLLQRSLAGRLEFVVPQALRCGGCSYPREWNRSSVCNGTLSAGAGGSGVSMDGGRVGSKRRLRRPEPGRAVHWRDQRRSRVAEAMSRADPSPVLSSEARSDFAEGGVDTEGAAAPPPSTSEPAGSKAMSEVSVSRRRRSPSAQSALPAYVYSVIFMIPLPK

SEQ ID NO: 63570 - protein, 215 aa, Zea mays
  Coding DNA Sequence Number=SeqID_20195
  Subcellular localization annotation: CTP_CleavageSite=44; ConfidenceScore=5.58e-01
MAVAGGRKQQSSRQQAHAPSWDSERTLSHGVKTTRPCSVPRTARARTTAAPRTTRPIALTLRRDRRHLWQAKQATFHLRHNDRVKKRLAPLKGSTAASEQSGSKPTNGQRLAPERFDSHLRPRRARDDRGYVRYITKALATLPRYPRDISETDGNDFVTESHQREASSPRTPSKGDRGRTDRSHFAAPLTDLTGIQRRLPCSDCRATRQSEVNSG

SEQ ID NO: 63571 - protein, 222 aa, Zea mays
  Coding DNA Sequence Number=SeqID_20196
  Subcellular localization annotation: CTP_CleavageSite=22; ConfidenceScore=5.08e-01
MPTGLNPSFACQGFLSLYSQGRASTAPGCYRRDSAIGTLGSSCGSGYGGANTKWCRSDGGGPYCPDGCHSLNDGDAVEYTVGSSRGGRSCACRRYRGRRGGCIQLQPAAHSKGDGGDFWVATPMEERTKAASRQFAFERRGLMTGPASLPYPKRTSRRRMSPWISGRWISPGGMFERWNKLLADHELEAEEKERMLEEKEWTLGERVRQLEAARAAQTALGP

SEQ ID NO: 63572 - protein, 151 aa, Zea mays
  Coding DNA Sequence Number=SeqID_20197
MGKSKKGGSSSHHFGDKRKREPTPPSEDLSDSEYSEEEFSSESEGSPAPASPPASSDDSDDSQGIAAEVWTYIRAVERAGLEGSDESEYSSDEDNSSDSSEEGGGGDGGDGDDDGGDDDGGDDDGKGGDGGGRGGSGDGGGGSKGSNKASG

SEQ ID NO: 63573 - protein, 102 aa, Zea mays
  Coding DNA Sequence Number=SeqID_20198
  Homolog annotation: Hit_ID=Q6QP51; Match level="QueryCoverage=28%, HitCoverage=13%, E-value=4e-07, Identity=82%"; Hit description =Putative growth-regulating factor 1
  Subcellular localization annotation: CTP_CleavageSite=40; ConfidenceScore=5.15e-01
MTASKKGSGKGIFRKKDPSQRRKRTPSPPTDQGFEGCALRGLATAPEHSGSKPFTDQGFEGWPLERVRQPPRAHRVRDDPGGSGAALAPGYGQIVDHVDKAA

SEQ ID NO: 63574 - protein, 144 aa, Zea mays
  Coding DNA Sequence Number=SeqID_20199
  Gene Ontology: Mol. function=helicase activity
  Homolog annotation: Hit_ID=A2ZVZ4; Match level="QueryCoverage=57%, HitCoverage=7%, E-value=5e-17, Identity=47%"; Hit description =Putative uncharacterized protein
MVEQGVDQTHTKPKFISNGDDDDEGVIFEEDEDDDENDGYLFAGQYNETNEDIKIDGTQDESTATDLPDLYDKVYSNVPEETHMLKSVPNCGYCTAKKFEYEPPGFSCRGGKVELVPLETLPSFEGCGIVQTLMLDTFVITLGF

SEQ ID NO: 63575 - protein, 373 aa, Zea mays
  Coding DNA Sequence Number=SeqID_20200
  Gene Ontology: Mol. function=zinc ion binding; Cellular component =nucleus
  Homolog annotation: Hit_ID=Q6K6K8; Match level="QueryCoverage=95%, HitCoverage=94%, E-value=7e-83, Identity=48%"; Hit description=F-box protein-like
  Pfam annotation: Domain name=F-box; Domain location=49-101; Score =17.1; E_value=0.068; Accession=PF00646.24; Description=F-box domain
  Pfam annotation: Domain name=Sel1; Domain location=130-162; Score =0.5; E_value=16; Accession=PF08238.3; Description=Sel1 repeat
  Pfam annotation: Domain name=Sel1; Domain location=163-201; Score =17.0; E_value=0.073; Accession=PF08238.3; Description=Sel1 repeat
  Pfam annotation: Domain name=Sel1; Domain location=202-237; Score =9.5; E_value=1.1; Accession=PF08238.3; Description=Sel1 repeat
  Pfam annotation: Domain name=zf-MYND; Domain location=307-348; Score =49.1; E_value=1.6e-11; Accession=PF01753.9; Description=MYND finger
  Pfam module annotation: Pfam domain module=F-box::Sel1::Sel1::Sel1::zf -MYND; Domain location=49-101::130-162::163-201::202-237::307-348
MKTRRGACYSCHAAPGEGPEVQRRKRRRTAAEASPAAAEDPGVRLGARDMFEDLPDDLVVSILRDVAASAGSPADLAGAMLTCKRFRELVARSKVVVLARASPRCLSVRAKAWSDEAHRFLQRCADAGNLEACYLLGMIRFYCLGSRGSGAALMAAAAVGGHREALYSLAVIQFNGSGGGKDDRDLRAGAALCARAAARGHVDALRELGHCLQDGYGVRRSVLDGRRLLIQANARELAAASVAHPCLLMSDLGCRAGEAHAANRFLVDWFASRPLGLTPGGNGNGSAGTAGSPEEDGVGGLRLCSQALCGRPETRRHEFRRCSVCGVVNYCSRACQALHWRMAHKAECTPMDRWLDAVQPNAIANADAAAPAP

SEQ ID NO: 63576 - protein, 171 aa, Zea mays
  Coding DNA Sequence Number=SeqID_20201
MEQRITRSTLAGGRVESGDRGLASPARQTPIPRSGSFTEVCTVFSEGRTELGRGLLAGLQWQGDQAAADTPCTGKRRTWIDDSFTGTGHYRQKRYKLSDDGSYDMNARYVFEYNANDVIADAMYYARIQAIKAWYRANADDRPMPNAKAEWSSIYLTEKQYLEVSVPWMAT

SEQ ID NO: 63577 - protein, 82 aa, Zea mays
  Coding DNA Sequence Number=SeqID_20202
  Subcellular localization annotation: CTP_CleavageSite=45; ConfidenceScore=5.46e-01
MQAACNRAKWAHLSDFQRAQHGGPGPRVMQPAHWMLRASNCTATRATATPPRLRNQRAGAAVTSSAKLTSHPGAVTEPSLTA

SEQ ID NO: 63578 - protein, 242 aa, Zea mays
  Coding DNA Sequence Number=SeqID_20203
MGPQIPMGGDPQVPLAHRYEDGGLRDGVGGEVVQLHPIVVQDRPHKAARRHTESPLVEGDEAHDVPRRWGRSGSAHGRNPFRSLLIGERVKQTLVDQILQITRRHRGKRPWIARRDDGHPVGHHRVEGMAAQGAGRAVSSSLAKSLGLRKPKREAGSGAKNRQQALSQGPGKGDTPKRILPREGTGFRASLLIRGSKAGPPKGSTAASDRVGPTPTTGQRFEGRPLEGFHGRLRLLGLRAHY

SEQ ID NO: 63579 - protein, 227 aa, Zea mays
  Coding DNA Sequence Number=SeqID_20204
MAQGHISLSQLEVCYLGTLLREARSSPGERGPQGSQRAPDVDLATDERRLGGAPIRQILREGSGASRRTPWSQKRKGLVLPFIIKNENGVRGLMGPEPEQLAPAPGALPHSDEAAARRDGSRLHAPLFRGTKRRRISRLDVGSNRSLSDWSGGNFGSDMAGTTGRLGTAPASAASPITMVASAEEPASGTCPTATGAARAPEVERLARGTVERQGPERRWPHRPASS

SEQ ID NO: 63580 - protein, 45 aa, Zea mays
  Coding DNA Sequence Number=SeqID_20205
MASARYEALGLSSIDARAVLVEVEQWGGANGAGAEGGIMRCKQEV

SEQ ID NO: 63581 - protein, 183 aa, Zea mays
  Coding DNA Sequence Number=SeqID_20206
MTEWLTLRASANRPNATREERTELTRVKGGRDDASSIGLGKERGRWLRLVWRRRSSGGPFYRRPGGGEGRRDDNADELAMMAVMAQTTTGWIGQAGNPTSEFVGPFSPVLANSGDLGAPVACTRPSSSDFTAVDRSSATRSRQPLAFDLNRLISIARSRSPDTVSGTRPAPGPHLSVACAPWR

SEQ ID NO: 63582 - protein, 242 aa, Zea mays
  Coding DNA Sequence Number=SeqID_20207
  Gene Ontology: Mol. function=glycerol-3-phosphate O-acyltransferase activity; Cellular component=chloroplast; Biological process =metabolic process
  Homolog annotation: Hit_ID=Q9M4V1; Match level="QueryCoverage=47%, HitCoverage=26%, E-value=5e-39, Identity=65%"; Hit description =Glycerol-3-phosphate acyltransferase
MGVAVGGMFTVVGRRRVEKMASGAMDLDGRGQGVSERAEDSSRVDDAFALSESPSVFRVLRSWTRGACPTTASASPSPWLASPRDAIFAAPARPLRSRRGTLRLEAKAAWRAAGGGRGPRVPAKGAVLASYMGAEEVVGPSSLLDEEEFISHIRKELDNGKLPADVASNLEELYYNYRNAVLQNGDPNAYEVMLSNMMTLFDRVLLDVQNPFNFPPYHKALREPFDYYMFGQNYIRPLVDFR

SEQ ID NO: 63583 - protein, 132 aa, Zea mays
  Coding DNA Sequence Number=SeqID_20208
MWRPPRVRYPRYSSTSHREETSASSYPALATASTGAEPSIRRASPPASRQVGEKRACGGGSGGVELAALATDEARPTAIEVPSEVPPARRRRVAIGKRLRCPPTSSKVAGKRKRSSSPSSSSSSIRSTEPDP

SEQ ID NO: 63584 - protein, 274 aa, Zea mays
  Coding DNA Sequence Number=SeqID_20209
  Homolog annotation: Hit_ID=Q9LGH0; Match level="QueryCoverage=37%, HitCoverage=33%, E-value=8e-10, Identity=31%"; Hit description=NAM -like protein-like
MGSDWNQVMSQYGSFLSQIDELPMGTQHSEFPVDGQAEGSRTLAVPKKPTQRTMLANFTADEDTRCSTFAGYMMTVLRQNPSGLTDADKTSLAASRFAAIEKKPFHFLHCWAILKDQPKWMDKHMGQQNQHGNANPTHSNTVDVDAEESVPSSFTSKRPLGRDSSKEKAKRTKSVDTSSSDSEFMTRMGDLSLERLSVYKTAVTTKEKKLDSMNKNERQKLLLEKKKLNLEKLRLERQKLKEDKEEEIMILSMDLSKCNLFSASTMKPSTKDIG

SEQ ID NO: 63585 - protein, 58 aa, Zea mays
  Coding DNA Sequence Number=SeqID_20210
MASPTGEFVGTDLRPKASPSMAPLMDPAMESVKEQMARYPDGSKSGGHHGRIEDAFKA

SEQ ID NO: 63586 - protein, 44 aa, Zea mays
  Coding DNA Sequence Number=SeqID_20211
MGARLYLAQWSEMEEDHYVNWNMENHPRKQCYHKGGMGRPWLNN

SEQ ID NO: 63587 - protein, 42 aa, Zea mays
  Coding DNA Sequence Number=SeqID_20212
MSSSWFLSVLPNIFLSSNLVKCSGGDVGNLEDFEEFQDYDEF

SEQ ID NO: 63588 - protein, 258 aa, Zea mays
  Coding DNA Sequence Number=SeqID_20213
  Gene Ontology: Mol. function=metal ion binding
  Homolog annotation: Hit_ID=Q7XCM8; Match level="QueryCoverage=24%, HitCoverage=24%, E-value=5e-21, Identity=75%"; Hit description=Zinc finger, C3HC4 type family protein, expressed
  Pfam annotation: Domain name=PHD; Domain location=168-213; Score= -4.0; E_value=0.039; Accession=PF00628.20; Description=PHD-finger
  Pfam annotation: Domain name=zf-C3HC4; Domain location=169-210; Score= 38.3; E_value=2.8e-08; Accession=PF00097.16; Description=Zinc finger, C3HC4 type (RING finger)
  Pfam annotation: Domain name=zf-LSD1; Domain location=207-231; Score =11.4; E_value=0.065; Accession=PF06943.3; Description=LSD1 zinc finger
  Pfam module annotation: Pfam domain module=PHD::zf-C3HC4::zf-LSD1; Domain location=168-213::169-210::207-231
MLRLSYSRRLLQSSSDSGGAIPDPNPKRIPGIPPADPPAAVNSDVVVILAALLCALICVVGLAAVARCARSRRNRGAGAGGDGAPASPSSDGGSGHRHHAHHQATGASAAATTTTATASAAAASKGLKKKALKALPRLAYADAVAAAAAARGAAPAAEGEEEQELLAECAICLAEFGEREEVRVMPQCGHGFHVACVDTWLRSNSSCPSCRRPIVLDDPAPPKRCRKCEAVVLEAVLAASSSSSAAASGGRGGGGFLP

SEQ ID NO: 63589 - protein, 145 aa, Zea mays
  Coding DNA Sequence Number=SeqID_20214
MSDDLVVPVHFEVGQELCFRLLDHPLLVLLELELLRSRQKYVDAFSERQTLNKNRGGALCTGADGPRAGAGRSAAWCEARWCSLRKGGLSAAWGRTVRGLVRCWDFCLTAGRSAPWGRTVRTYAGTAENRRRRLDLAPGRDPVGE

SEQ ID NO: 63590 - protein, 102 aa, Zea mays
  Coding DNA Sequence Number=SeqID_20215
MAGDVSTSNIIEPTWETLPAEEKLLFEERQEQLIQEAKTKFLADFKVDRNNKVIRQRVTDLASLRPTTNTPNVHKFFYNYSKSTVRNTVDYSGHEKLFGKTD

SEQ ID NO: 63591 - protein, 162 aa, Zea mays
  Coding DNA Sequence Number=SeqID_20216
MKENKGTLAVRTWKRTDNLSDASLLEAEIERRDGSMVPNFRAESEPALFPCDPAHPSVPGGDGADKVQGRSEGPLSPSARFVEIACPGKTGTGQAARPDATVHGAASPAVAVPATPSVASCARRPWRLERRARLAAPVIRGRTTARRGGAAGAPNALMRVHR

SEQ ID NO: 63592 - protein, 131 aa, Zea mays
  Coding DNA Sequence Number=SeqID_20217
  Subcellular localization annotation: CTP_CleavageSite=77; ConfidenceScore=5.16e-01
MVVKDRANRCWRSVAPVLCSCSFNLWFFLNSTSHREKKKKKKRRSKNSGVTSCRACRYADHAVLGSRLPIPLLFVPLCSVLSASGIRCTGDSPYVGSFCDFLRVPVAAQYRQYELRSLYSSPRVDVSRSFD

SEQ ID NO: 63593 - protein, 131 aa, Zea mays
  Coding DNA Sequence Number=SeqID_20218
MECGIMEPKVQRNHTVVSSFVHGAVNCSKAVEKVQHAELRVPHAFGFGRRLRGEKHRTVCISITSSAVSSKMLSLAFQDRKNNAWSRRFSLAAQLYAMSPFISQLDQKISTRSVNCPSYSVDMCASTHNHQ

SEQ ID NO: 63594 - protein, 619 aa, Zea mays
  Coding DNA Sequence Number=SeqID_20219
  Gene Ontology: Mol. function=binding; Cellular component =mitochondrial inner membrane; Biological process=activation of protein kinase C
  Homolog annotation: Hit_ID=Q336W7; Match level="QueryCoverage=86%, HitCoverage=88%, E-value=0.0, Identity=49%"; Hit description=PPR986 -12, putative, expressed
  Pfam annotation: Domain name=PPR; Domain location=108-142; Score=6.2; E_value=1.4; Accession=PF01535.11; Description=PPR repeat
  Pfam annotation: Domain name=PPR; Domain location=174-208; Score =30.1; E_value=8.1e-06; Accession=PF01535.11; Description=PPR repeat
  Pfam annotation: Domain name=PPR; Domain location=209-243; Score=1.2; E_value=5.6; Accession=PF01535.11; Description=PPR repeat
  Pfam annotation: Domain name=PPR; Domain location=275-309; Score =44.4; E_value=4.1e-10; Accession=PF01535.11; Description=PPR repeat
  Pfam annotation: Domain name=PPR; Domain location=375-409; Score =33.7; E_value=6.8e-07; Accession=PF01535.11; Description=PPR repeat
  Pfam annotation: Domain name=PPR; Domain location=410-444; Score=9.2; E_value=0.62; Accession=PF01535.11; Description=PPR repeat
  Pfam annotation: Domain name=PPR; Domain location=446-480; Score=7.8; E_value=0.92; Accession=PF01535.11; Description=PPR repeat
  Pfam annotation: Domain name=PPR; Domain location=74-107; Score=12.1; E_value=0.29; Accession=PF01535.11; Description=PPR repeat
  Pfam module annotation: Pfam domain module=PPR::PPR::PPR::PPR::PPR::PP R::PPR::PPR; Domain location=108-142::174-208::209-243::275-309::375 -409::410-444::446-480::74-107
MHFPAFLADQRRLRRVLSSSRTTLATLTRLHALLVVSSSQHILSSLAAAYARAGALDAAESTLAASPSSPSSIAAWNGLLSAHSRAGAPGAALRVFRALPSSARPNSTTFTLTLTACARLGDLDAAESVRVRAFAAGYGHDVFVCSALLHLYSRCGAMEEAIRVFDGMPRKDRVAWSTMVAGFVTAGRPVEALAMYSRMREHGVSDDEVVMVGVIQACMSTGNARIGASVHGRLLRHCMRMDVVTTTSLVSMYAKNGHLDVACQVFRMMPYRNDVTWSALISGFAQNGRAVEALDLFRELQADGLQPCSWALVSALLACASVGFLKLGKSIHGFILRRLEWQCILGTAVLDMYSKCGSLESARKLFNKLSSRDLVLWNAIIACCGTHGCGHDALALFQELNETGIKPDHATFASLLSALSHSGLVEEGKFWFDRMIKEFGIEPAEKHYVCIVDLLARSGLVEEANDMLASMQTEPTIAIWVILLSGCLNNKKLELGETIAKKILELRPEDIGVLALVSNLYAAAKKWDKVREIRKLMKDSGSKKVPGYSLIEVKGTRHAFVMEDQSHPQHREILKMVAKLNSEMRKLGYVPRTEFVYHDLDEDVKEQLLSYHRAASQLP

SEQ ID NO: 63595 - protein, 247 aa, Zea mays
  Coding DNA Sequence Number=SeqID_20220
MASSSTLTLMNTVDEQGSEVTFIGFYDYQCLSSLQAYPLHQKEVHATKVAQIGTGGCARFLAANKAEARSRLELGREGSNNGFEGARLGLRRRRSGKGWHVQEVEAGECGRLLTRRLFAERQRRVGRMARLVLGGTEIHGAYLGIEILSKFRKGPLTGTAFDPLPLPTGVPESMCFCGDPCKVDKSEDHDTYRQRYWMCANCAFEQMIFQRWMNLMWIDIEISQKDKKWLENLKKWDAEDKERIEKR

SEQ ID NO: 63596 - protein, 81 aa, Zea mays
  Coding DNA Sequence Number=SeqID_20221
  Subcellular localization annotation: CTP_CleavageSite=45; ConfidenceScore=5.55e-01
MVHGDIGTSPLYTFSSFTMYSFLRQHVNFSGNRLAGVVLRTQGFLAMESRSAADGVSALQISVRPRSRFPVAIATFCSGIR

SEQ ID NO: 63597 - protein, 147 aa, Zea mays
  Coding DNA Sequence Number=SeqID_20222
MGKKRKREPTPPSEDFGDSEYSEEEFSSESEGSPAPIPLRESSDDSDDSQGLAAEVWTYIRAIERSGLAGSDESEDSSDEEDSSEEDGGDGGEGDNDDDDGGGGGDDDGDCGGGGDSSGRGSNSGGGGSSGGRGSGGSGRGGNKASG

SEQ ID NO: 63598 - protein, 100 aa, Zea mays
  Coding DNA Sequence Number=SeqID_20223
MAATTWIRLGRPQRRRNQRRRRRREARGRVGPAGQGPAPDLAGEVDTDNERSLKVRSATGHRRSQGQGGQRDGRGCITQERVGTPIVEGEEIWAMDWRLC

SEQ ID NO: 63599 - protein, 144 aa, Zea mays
  Coding DNA Sequence Number=SeqID_20224
MAAPAPPPTDGEVRIQKVDKIELVYNILSKPKLKTASFTPLRQPCQLSGKGRQQQVTTFPEFGLGRNWELRLAQPQASAPASASGEGLRFARPRPRPRFWSREKVSASPDPGPRPQPRPRRSHRLARPRPRISYATRDPSLPYP

SEQ ID NO: 63600 - protein, 626 aa, Zea mays
  Coding DNA Sequence Number=SeqID_20225
MPSSSSSDDATPPAAASSEETLSDVMVEELRAGDSVEFGVSRMTSARIEDMQRLGYFGGGVARAPGTEEVPESEGELVVFEAFFVAGLRLPAHRVFELNQLPYDGYPGQDEADRRGKKPAVETGGDPALVAATSSKKRKLVMDKDRQGAARKRQATVRVHEARPKRQRGTAKAEASGGGKPPLPTKVGASAPGKAPETTVGAGGPKLSKGRTRAPLALVVPGAAIATAAPAPKAGGETLGAGGEVSALALVRDEAGVATRRLKGATEALSRATEALSQVADFTSRTASGALTAALSAEVERLRTQHADAVREKSASDSKCRKLAEKVAALEKEKADLRRQLAGERREANEAIAKEQAAQAESRLARAEGNIAKELAGELQRRLTAQESRAEGAEAAMRAEAERTRTQLMTSYRELGVRTGDFEVPEREAGLRYLEWVQEELQELPTVLAGLMAFTSLVTCEAAMNALSREGCRHFEALDQVDEDFGRDIFEVEDPVVKESAGALYDRMWGSYGREVVRARAEAARAQAERGERVDDFGALNSALPEPETTLAEAATGVAPGPTPETAEDAPGAPASAAAGEDLPPKVAEGALDAPAAAVPSAEDPAEVGAEAAGEAPAAAGPSLVA

SEQ ID NO: 63601 - protein, 359 aa, Zea mays
  Coding DNA Sequence Number=SeqID_20226
  Homolog annotation: Hit_ID=Q6J9V9; Match level="QueryCoverage=35%, HitCoverage=45%, E-value=2e-54, Identity=82%"; Hit description =Putative uncharacterized protein
MRLGRDPPKASTEPAAEFKLEGETVFLRIARPVALTPWQGKRHLRQEKRALFRLRHDDRVKKGTGKGDIAKRILLGEGNGPRALLLIRGSKVAPSGVRLPQSTRAPCPLLIRGSKAGPSKGFDNRPRACRVRDDPGYVRYMAEARATLSRYPRTFPRPAGTICNGVPPEGGIEPSDPIEWVWVQQITCISPETPCSVPPGEAWGLLSRQATAKLLTKSTNQRENSELDLGKVEVTAVTSPPFTDRSDRKTAPFTLLRQPCQLSGKGRQQQVTTSPEFGLGRNRELRLARPQASAPASALGEGLRFARPRPWPRFRSREKVSALPDPGPRPQPRPRRSRRLARPRPRISYATRDPSLPYP

SEQ ID NO: 63602 - protein, 122 aa, Zea mays
  Coding DNA Sequence Number=SeqID_20227
MTSGALKPPTEGRKREQDPCRIARYASTRLKALLRQPRRYIYEAQDAPPMTTLSSVQGSGHIPASHVSSKLHPHCTAGHLLVSIKGGVQGPTGGGRRGRERETNMQRTDTRTHDADERRRAE

SEQ ID NO: 63603 - protein, 187 aa, Zea mays
  Coding DNA Sequence Number=SeqID_20228
MGLLMDSNGNPTVGMGNPLGTRNPHGYGFGQNFIPVMGMSFLAGVFFLRGYGFGHVIPSGFLPIAIWDSEAWKIGSNGGNHSAAGNLQIIPCSVKGLAASEAGSRGLCAQQPPCLQLVIRAPLPGRGTPQNKTAPPISPSPNPTTSPAFYIPAHPGASYPCQTTRHRASTTPTLTPNSPSQQAKTQQ

SEQ ID NO: 63604 - protein, 81 aa, Zea mays
  Coding DNA Sequence Number=SeqID_20229
MNKNTRDTRFIPRFGHTTKVPYFLIEAPTKSREFLVEPFSTSLELHKFDRQRQKKVTDFETHHHDYIDEWDQQSDLNYVND

SEQ ID NO: 63605 - protein, 122 aa, Zea mays
  Coding DNA Sequence Number=SeqID_20230
MKAKTECDMSPIPALAGDGSTSVKRGHSKLPQSPLQELTCSFMCFLCMLSWSLLHNAMIFPRPQLDLLQLHRAPRVRCGTFADMDDDDDDDDDDTKDEGDEDVVAARHDIIGSSQLQDASTT

SEQ ID NO: 63606 - protein, 251 aa, Zea mays
  Coding DNA Sequence Number=SeqID_20231
  Gene Ontology: Mol. function=nucleic acid binding; Cellular component= cytoplasm; Biological process=RNA processing
  Homolog annotation: Hit_ID=Q2QKB2; Match level="QueryCoverage=58%, HitCoverage=74%, E-value=8e-56, Identity=72%"; Hit description=MRNA transport factor
  Pfam annotation: Domain name=RRM_1; Domain location=96-167; Score =66.8; E_value=7.2e-17; Accession=PF00076.13; Description=RNA recognition motif. (a.k.a. RRM, RBD,
MAAAATNADVEVVDFDLDDDDLMDEDAGPDPAPPPASRLRSTIAGDDAPRRTKGRGFREDPNSSATRDSRFGAGGRADLDSLGGPGPIQSIEGWIVLVTGVHEEAQEDDLQNAFQEFGQVKNLHLNLDRRTGFVKGYALIEYEKFEEAQAAIKELDGAELYKQRMSVDWAFSSGPAKRRNTRKSCVSLLDPNIWVVLVTTKSSFKDPTQEKALMFPQHVLNYLLCVTESKKSGDSKYYLGVCGSPDFDGGY

SEQ ID NO: 63607 - protein, 57 aa, Zea mays
  Coding DNA Sequence Number=SeqID_20232
MAKQTLQAPLLEETEDELSEWIKTTSTESEYVSKALCEDISKHCRSTSATIQIDDEL

SEQ ID NO: 63608 - protein, 290 aa, Zea mays
  Coding DNA Sequence Number=SeqID_20233
  Homolog annotation: Hit_ID=A2GBN7; Match level="QueryCoverage=88%, HitCoverage=33%, E-value=1e-08, Identity=31%"; Hit description =Putative uncharacterized protein
  Subcellular localization annotation: CTP_CleavageSite=99; ConfidenceScore=5.45e-01
MPTLTFNHSALPLKRRSRAQSLGITSKMLTPTFNHLALPLKRRPRAQSLGITSKMPTPTFNHSVLPLKRRPRIQTLSITSKMLTPTFNHLALPLKRRPRAQSLGITSKMPTPTFNHSVLPLKRRPRVQTLSITSKMLMPTFNHSALFLKCQPRILSLGITSKMPTPTFNHSVLPLKRRPRVQTLSITSKMLMPTFNHSALFLKCQPRILSLSITSKMPMPTFYHSALPLKRWSCVRLLSVTSKTLMSIFTSLGVVPTISKRISSTFSKSNDKSSIRGDKRQMLETCSQVL

SEQ ID NO: 63609 - protein, 144 aa, Zea mays
  Coding DNA Sequence Number=SeqID_20234
  Gene Ontology: Mol. function=nucleic acid binding
  Homolog annotation: Hit_ID=Q53QK3; Match level="QueryCoverage=54%, HitCoverage=7%, E-value=2e-07, Identity=40%"; Hit description=PWWP domain, putative
MSLSPVILRATTAYDDNCSTPPPPTAVLPAPHMVRCAVAVAHEQLPPARKDDNGDHEVGVGLVLNFSNAHVVPSARHLATIFLRFGPVKEVWADNSTALVVFDSGAHADEAFSGATEIGSISVSLVSFHVTSSLPAAPGLEIKR

SEQ ID NO: 63610 - protein, 59 aa, Zea mays
  Coding DNA Sequence Number=SeqID_20235
MPRAFDDYYIKDCGVLSVPEVTSPTLSPPSTRKRMPRIRLSAINANPEIHARPASYDTT

SEQ ID NO: 63611 - protein, 295 aa, Zea mays
  Coding DNA Sequence Number=SeqID_20236
SQMEVRCQTSLCQNEDGFPKLLRECTVRLEIRSQPEYDGREFVEHGTEKCVVTVYIGSSPHHVEWSVTAAGHRFKDTCQVVARKALRALCQIYEEEYDFLARHHRQMIARAEDTEKRNRQLHVDLTTAQARATALESREVIAVEALKQAKDEHVQKLMEAYLVTHNQRRALRIQEPASSSPVQPMRDPQILEGHQISTRGEKKAWELPEGAIVLEGIPVFPQAMDKQEHLESSQDPPPELCEPLTMKKIPAPSLEVKEEAASTPPAPPPSEELQEPAPLEEELDPVLPSQSLPEE

SEQ ID NO: 63612 - protein, 527 aa, Zea mays
  Coding DNA Sequence Number=SeqID_20237
  Gene Ontology: Mol. function=extracellular-glutamate-gated ion channel activity; Cellular component=integral to membrane; Biological process=G-protein coupled receptor protein signaling pathway
  Homolog annotation: Hit_ID=Q6ZGL7; Match level="QueryCoverage=99%, HitCoverage=60%, E-value=0.0, Identity=71%"; Hit description =Putative glutamate receptor
  Pfam annotation: Domain name=Lig_chan; Domain location=176-455; Score= 217.7; E_value=2.7e-62; Accession=PF00060.17; Description=Ligand -gated ion channel
  Pfam annotation: Domain name=SBP_bac_3; Domain location=109-413; Score=13.6; E_value=7.2e-09; Accession=PF00497.11; Description =Bacterial extracellular solute-binding proteins, family 3
  Pfam module annotation: Pfam domain module=Lig_chan::SBP_bac_3; Domain location=176-455::109-413
MSVFDMGNKLLNKIRNVNFTGVSGQVQFNAQFELIHPAYDIISIIGNGMRTIGFWSNYTRLLSTVLPEDLYSKPPNTSLANQQLYDVIWPGETAQRPRGWAFPSNAKELKIGVPNRFSFKDFVSKDNATGSMKGYCIDVFTQALALLPYPVTYRFIPFGNGTENPHYSQLVQMVADNDFDAAIGDIVITMSRTKAVDFTQPFIESGLVILSPIKKHITNSWAFLQPFTLGMWFSFSTLFFAHRENTMSTLGRGVLLIWLFVVLIIQSSYTASLTSILTVQQLDTSIRGLDDLKNSDYPIGFQVGSFVEEYMIKELNISQSRLKALGSPEEYAENLKLGPKKGGVMAIVDERPYVELFLSTYCKIAVAGSDFTSGGWGFAFPRDSPLQIDLSTAILTLSENGELQRIHDKWLKTGDCSTDNAEFVDSNQLRLESFMGLFLICGAACVLALLIYLGITIRQYLRHEQPGPAISVDAGSSTSKRSLRKFISFADDKQPPPKKKRAMSLSRSSMPTMPMSNRPGADIDVES

SEQ ID NO: 63613 - protein, 145 aa, Zea mays
  Coding DNA Sequence Number=SeqID_20238
MGKNNKRKREPTPPSEEFGDSEYSEEEFSSEPEGSPAPVSPPASSDDSDDSQGIAAEVWTYIRAVERAGLEGSDESEYSSDEEDSDGGDEGEDDDDDDDDDGDGSGRGGDDGSGRGGGDGSRDSTKGSSRGSTKGGGGGRGRASG

SEQ ID NO: 63614 - protein, 287 aa, Zea mays
  Coding DNA Sequence Number=SeqID_20239
  Subcellular localization annotation: CTP_CleavageSite=99; ConfidenceScore=5.41e-01
MQTLTFNHSALPLKRRPRAQSLGITSKMLTPTFNHLALPLKRRPRAQSLGITSKMPTPTFNHSVLPLKRRPRVQTLNITSKMLTPTFNHLALPLKRRPRAQSLGITSKMPTPTFNHSVLPLKRRPRVQTLSITSKMLMPTFNHSALFLKCQPRILSLGITSKMPTPTFNHSVLPLKRRPRVQTLSITSKMLMPTFNHSALFLKCQPRILSLSITSKMPMPTFYHSALPLKRWSCVRLLSVTSKTLMSIFTSLGVVPTISKRISSTFSKINDKSSIRGDKRQTSLKGS

SEQ ID NO: 63615 - protein, 114 aa, Zea mays
  Coding DNA Sequence Number=SeqID_20240
  Homolog annotation: Hit_ID=A2X048; Match level="QueryCoverage=84%, HitCoverage=23%, E-value=1e-29, Identity=61%"; Hit description =Putative uncharacterized protein
MEPRSAIYRSGAFLLLAAILAEVVIPASAIGDKCAACKAVAAELEIGISSEKPRNHLDLRNRLNSKGQREGKVIDYRLESGEKGWVKVTDWNSFQTGFPPSMEAFRYEPRGAIA

SEQ ID NO: 63616 - protein, 196 aa, Zea mays
  Coding DNA Sequence Number=SeqID_20241
MVLCPALNRCLVSVLALPVNQRWSSSPSCEHQQISQLGHGSLSCSQCKGGGTTAKYSLKLKALQQASTPSIEWQTHTHAQRTTAKYSLKKNKEANGYRHKTVLYWDSINLVFGKDHATGEAAKNPADGARDMSKEEGTGKEFTSSTTSGSLKRQQSSDSFTSMMAEKLDKFTEAKPLGMKHQKARHQKKFLAHWRR

SEQ ID NO: 63617 - protein, 402 aa, Zea mays
  Coding DNA Sequence Number=SeqID_20242
  Homolog annotation: Hit_ID=Q8H4Y5; Match level="QueryCoverage=52%, HitCoverage=58%, E-value=8e-53, Identity=51%"; Hit description =Nuclear inhibitor of PP1-like
MHHRIKTHQSSIIPISSLVIHVSELGDEEGVSVVEAAVRHSLSSTSTFCFSSGAQPLWMTSRSFMVNPASTALGAHSSRAIRHTVHNIDSACCVHTSETLISKRTTLRIVHRQSLRAILSSGTTDRASKMSKADSTHSVTNSSNNSTSCSTAPTNNHTPRWCGGVDELESIYVIDLGSVHGTFVANERLTKDNPVELEVGQSLRFAASTRIYILRKNTAALFPTPSLPSDVSLPSPPDPNDEDAVVAYNTVLNRYGISKSDILSSSKDSSGSASSGANDDKHAVERPLKRSKKRRVSFRDQAGGYCHTEGKRSKASRKDFTSTSPSGVTDKLQEVLKRVKSTTRPGIYDDLYGDSIATKVGSSWAYKSDDLSDKAQPVEEKTLGMDSNLNSADDSDDLFGDT

SEQ ID NO: 63618 - protein, 74 aa, Zea mays
  Coding DNA Sequence Number=SeqID_20243
MEQTSLEEGEGKTKDLGLHMPCEETIMSAPRNNEDPIIEEILTTTSGEELDSQIVGIAMKLDQKDVHQDERGRG

SEQ ID NO: 63619 - protein, 153 aa, Zea mays
  Coding DNA Sequence Number=SeqID_20244
MGKSNKRKREPTPPSEDFGDLEYSEEEFSSESEGSPAPVSPPASSDDSDDSQGIATEEWTYIRTVERSGLEGSDESEYSSNEEDSSDSSEEGNGGDGGDDDDDGGDGDDDDDSSRGGDGGSKGGNGGSKGGNGGSSRGSNGGGSSKGSNKASG

SEQ ID NO: 63620 - protein, 411 aa, Zea mays
  Coding DNA Sequence Number=SeqID_20245
  Gene Ontology: Mol. function=transporter activity; Cellular component= integral to membrane; Biological process=transport
  Homolog annotation: Hit_ID=Q8H6D6; Match level="QueryCoverage=97%, HitCoverage=88%, E-value=1e-143, Identity=64%"; Hit description =Major facilitator superfamily antiporter
  Pfam annotation: Domain name=MFS_1; Domain location=37-397; Score =18.9; E_value=0.0044; Accession=PF07690.7; Description=Major Facilitator Superfamily
  Pfam annotation: Domain name=Sugar_tr; Domain location=37-399; Score=- 184.4; E_value=0.089; Accession=PF00083.15; Description=Sugar (and other) transporter
  Pfam module annotation: Pfam domain module=MFS_1::Sugar_tr; Domain location=37-397::37-399
MASVVGEAPLLSGGGKAAVWRERCPVCRAAGRRGSTAGPVTVPLSILHEKKQVFTFIAIKQIRDLKVAKEEQDIGFYAGFVGATYFLGRAISAVPWGMFADKYGRKPCIVISILSVYGPRSLIVKSALASIQFDRTNLVTSSRAIALVIGPAIGGFLAQPNHQTQNMPAQKYPNLFSEESIFGRFPYFLPCFVISLLAAGSCIACIWLPETLHFHGDDKVEAIEELEAQVRGSESTKDLHKNWQLMSAIILYCVFSMHDTAYLEVFSLWAVSSRKFRGLSLTSQDVGTVLAISGFGVLVYQLAIYPFLAKYFGPIKTFRPAAILSIILLTTYPFMANLHGLELKILINIASVLKNMFAATITIACNILQNTAVTQEQRGVANGISVTLMSVFNSVPPAAAGILKYLPYSLH

SEQ ID NO: 63621 - protein, 238 aa, Zea mays
  Coding DNA Sequence Number=SeqID_20246
  Homolog annotation: Hit_ID=A2YGX3; Match level="QueryCoverage=22%, HitCoverage=6%, E-value=8e-07, Identity=63%"; Hit description =Putative uncharacterized protein
MEEGKRDEAIEVDDPRAIALRNVLLLKNVISLNPDAEVSQQRLLSLVAERLIPTFLDSPNPVHGAGKRAMRVSLTARPPLTGVVAPAVRFPELRTTSVTARWAMRVSSLCSLNREGNAAVTATTLPWVFRLQLASIHSARRYMETRDPRLRSPHPRIPKNPATIREKQREGRIAPPVNPSAPASGPPRVAVKERQGPGGLSLPSGGLSVSKTRGISRRLARKASHRTASRAASPSSSF

SEQ ID NO: 63622 - protein, 183 aa, Zea mays
  Coding DNA Sequence Number=SeqID_20247
MAGAVVGGVRWMAGEVVGGLGTRIAGSDGRRYMASTAGGGWGGRLLVGGADRDGYRRMRPVEVAVRRRRREATTVEVEVVVARQERCVRKAAAMVVVVVGGGEVWRGDRSTTVPQKCFLSDTRQKKSLSNAALGKVMLSVTTALLRSKTLRHRNTLGQRYFFARVSNTWRTATLGKRAVSCRL

SEQ ID NO: 63623 - protein, 156 aa, Zea mays
  Coding DNA Sequence Number=SeqID_20248
MAHRHISLSVFQLQLASIRSARRYMETRDPRLRSPHPRIPKNPATIREKQREGRNSTAGESLCTGVRSSARGREGAPGSGRAVSALGWAECFQNQRNFSSIGKESVTPHGIAGCLTIIVVLGIRRSRYPFANEIRATGFRSDGSRSLPIHTHRDLI

SEQ ID NO: 63624 - protein, 174 aa, Zea mays
  Coding DNA Sequence Number=SeqID_20249
MGYQVGLHQLLDVLILGLLQSFNNNDFTTFQGSCTGLSCEEIRMELTVALLCIFCSSNHLTVVPNQEIILRIQGEQGPQCLASDDLEGVFESVPSSSDTPFHMVQTGSNVYSHDTLLCAMLDEFTTIIHWLAPDSEANCACSQQLGETIFILAKVGLAMDLHLTSERRKEGKHF

SEQ ID NO: 63625 - protein, 67 aa, Zea mays
  Coding DNA Sequence Number=SeqID_20250
MAPPYRAAPPPRPDTIRARRAVDRRSWGEQLRFDDCGPSDDEQATVEFEVQQVEIAEQELIEDKLCP

SEQ ID NO: 63626 - protein, 130 aa, Zea mays
  Coding DNA Sequence Number=SeqID_20251
  Pfam annotation: Domain name=zf-CCHC; Domain location=49-66; Score =25.0; E_value=0.00025; Accession=PF00098.14; Description=Zinc knuckle
MSLSEYRDKFIQLSRYALGEVDDDEKKQELFLEASTPIGPVDHNTSTSRSCFKCGQAGHYANYCHNRAAYTTPAPMKQSQTSGGKSQPLSINRGQVNHVKAEDEPGEPKNPEEVLVEGEEASEEGNEQQD

SEQ ID NO: 63627 - protein, 91 aa, Zea mays
  Coding DNA Sequence Number=SeqID_20252
  Subcellular localization annotation: CTP_CleavageSite=71; ConfidenceScore=5.13e-01
MASSLHCPLVALLLFAVSWKMNGGRPPQTRALSHVDEHAGALLHRTALTTTSFELRRKVRQPVQTPPRSVASSAAASNLGRKKKAYWPWIQ

SEQ ID NO: 63628 - protein, 279 aa, Zea mays
  Coding DNA Sequence Number=SeqID_20253
  Gene Ontology: Mol. function=hydrogen ion transmembrane transporter activity; Cellular component=integral to membrane; Biological process=proton transport
  Homolog annotation: Hit_ID=P21616; Match level="QueryCoverage=81%, HitCoverage=29%, E-value=6e-93, Identity=77%"; Hit description =Pyrophosphate-energized vacuolar membrane proton pump (EC 3.6.1.1) ...
  Homolog annotation: Hit description=(Pyrophosphate-energized inorganic pyrophosphatase) (H(+)-PPase) (Vacuolar H(+) -pyrophosphatase)
  Pfam annotation: Domain name=H_PPase; Domain location=9-277; Score= -350.4; E_value=8.7e-11; Accession=PF03030.7; Description=Inorganic H+ pyrophosphatase
MAAAAILPELATQVLIPVAAAVGIAFAVVQWVLVSKVRVTPERRADGGAVKSGPSDYLIEEEEGLNDHNVVVKCAEIQTAISEGATSFLFTEYKYVGLFMGIFAILIFLFLGSVEGFSTKSQPCHYIKDQTCKPALANAIFSTIAFVLGAVTSLVSGFLGMKIATYANARTTLEARKGVGKAFITAFRAGAVMGFLLAASGLLVLYIAINLFGIYYGDDWEGLFEAITGYGPWWFFYGSFSAALVVVFIPKLQMLVPAFRKGRKKPARKPVMNPSRTEL

SEQ ID NO: 63629 - protein, 40 aa, Zea mays
  Coding DNA Sequence Number=SeqID_20254
MAMMGSTSEKMYLCQIPSWVLIDLDRRYFSDMKTWSLPYM

SEQ ID NO: 63630 - protein, 468 aa, Zea mays
  Coding DNA Sequence Number=SeqID_20255
MKATQALPIRGLGRQKGTVHEESAKATLLTRVLRRHGLSLHQRAPRSSPYDTGLGPTRHANWPRTEEAKPPRAERVTAQRLQALLHLRLNQRVKGRTAMQAACNCTTEMYPFDFNASSVEAQAHTSCNWRAGCYMRKTAPPLTPMSRLLDYGTGAVTRGNLVHGPTVPTKHIGHRSVSRGKRRDGRYGQKWAASNGGGRQAEAAVKSSAGSCPLLGQQGSPLPRREDDGPGKGILQKGSFPAKEAGPEPSYRSEVRRLAPRKGSIAASEHSGSAPTTGWPPEGFDSRLRTRRARDDSRYIRYMAEARTTLPRARTQPRPRKTVSASPDPRARTQPRPRKTVSASPEPRAQTQPQPRKTVSASSDPRGSDSTSTSEESPPRPALGSDRPRYRGDIITLPLASSGYGEQDQCPIWLALGSSAPPTAMTSHEQGTNTSPTATSAWPSYERVAAREDGLTGSLSLSLSLTNA

SEQ ID NO: 63631 - protein, 122 aa, Zea mays
  Coding DNA Sequence Number=SeqID_20256
  Gene Ontology: Mol. function=transferase activity, transferring hexosyl groups; Cellular component=integral to membrane
  Homolog annotation: Hit_ID=Q10MQ0; Match level="QueryCoverage=69%, HitCoverage=18%, E-value=6e-15, Identity=49%"; Hit description =Glycosyltransferase 5, putative, expressed
  Subcellular localization annotation: CTP_CleavageSite=26; ConfidenceScore=5.15e-01
MCSLTVIRGMSHPHRTLAEHHNARSRASTTTTSSSSSSARRDDDPDPPPRSLRDPPYMLGPKIFDWDEQRAAWHRRHLETPPFLNDIKPRVLDKYQLHEAVQEKERGVDSLGRTPCYKGEVT

SEQ ID NO: 63632 - protein, 156 aa, Zea mays
  Coding DNA Sequence Number=SeqID_20257
  Homolog annotation: Hit_ID=A3BAF3; Match level="QueryCoverage=52%, HitCoverage=37%, E-value=3e-22, Identity=52%"; Hit description =Putative uncharacterized protein
MQLCAATPERTPWFVPTPEWGAGAAAFPQTPKRSPRFAATPDWGTGFMMPPDATAVPRTPERWPALPRTPEYAPAPRREQARWGGESKAEAPALYESGAESLRPAFLPTVAFALCFSLALRGSAQRANHRLAEKEIVVVLSSASVVLVDSSVAVVD

SEQ ID NO: 63633 - protein, 245 aa, Zea mays
  Coding DNA Sequence Number=SeqID_20258
  Gene Ontology: Mol. function=carboxyl- or carbamoyltransferase activity; Cellular component=ornithine carbamoyltransferase complex; Biological process=amino acid metabolic process
  Homolog annotation: Hit_ID=Q8SA97; Match level="QueryCoverage=67%, HitCoverage=23%, E-value=3e-18, Identity=41%"; Hit description =Ornithine carbamoyltransferase
MAPLVDVAGLRPRLGDVEAPPKPRSSLSSMAEVESEPLGRARRRPSAEARAESERWGRAKRSSSSSRAEPESEPWVGRSGVRRLPGLSPSPSPGSGGAEFAVFRDLARVRALGRAERSGAVLLSGRSVERRSDGGHFGSAGWGACVRIKLYADGGYLLRIRSLEGHSRESLAVYGYNSPDCPVVHWTVRGKAISLERVEKCCKELEQGLEHIVTLPECCQEDYLSKRRKELKQTPSPGVANSNED

SEQ ID NO: 63634 - protein, 634 aa, Zea mays
  Coding DNA Sequence Number=SeqID_20259
  Gene Ontology: Mol. function=transferase activity, transferring hexosyl groups; Cellular component=soluble fraction; Biological process=carbohydrate biosynthetic process
  Homolog annotation: Hit_ID=Q5NA53; Match level="QueryCoverage=78%, HitCoverage=77%, E-value=1e-154, Identity=53%"; Hit description =Glycogenin-like protein
  Pfam annotation: Domain name=Glyco_transf_8; Domain location=325-536; Score=181.1; E_value=2.9e-51; Accession=PF01501.11; Description =Glycosyl transferase family 8
MTGGAGKKRGFSKLLVLLLFFVGAIVIVALLVRGNGCCVVVQVAVLPRIVPVPSWDARPTTTTPIGEIIIPAITSTRGASSSAHDRQENSEPVAASEEEEPPAAAPYAADSRWDIQWESIASVLSTFSSNGTGIGIVGLLNFNSSEVALWTSTLPAADVRAVRLAPAADAVTWEALYPNWINEESNRSSCPSLPDPDASHHHNYDLVAVKLPCRRQSWSRDVRRLHLQLSAAKLTLHGTSSRSGMVLILSESRCLPLPNLFPCKHLLARRGHAWLYRPDATYLRRRLNLPVGACQLAVPFLRPSPKPPSATATPGTSRIGRQAYATVLHSADAYVCGAIALAQSIRQSGSTRDLVALVDARNVGAEHRAALAAAGWHVRPAPRIRNPHAELHAYNEWNYSKFRLWQLTDYEKVVFLDADLLVLRNLDFLFEEAPELSATVNSGARFNSGLMVLEPCNCTFDLLMSGIHDIESYNGGDQGYLNEVFTWWHRLPRHVNFLKYVWAEGDRAAQARMIAAEPAEVHAVHYLGMKPWLCYRDYDCNWNVAELRRFASDEAHARWWAVHDRIEPAELRDRFCALPASHMAVLEQQRRQAATVNAPDGHWNRTITDPRRRIKSEALTTTVESVTSRRSSID

SEQ ID NO: 63635 - protein, 463 aa, Zea mays
  Coding DNA Sequence Number=SeqID_20260
  Homolog annotation: Hit_ID=Q8H4Y5; Match level="QueryCoverage=41%, HitCoverage=57%, E-value=1e-18, Identity=33%"; Hit description =Nuclear inhibitor of PP1-like
  Pfam annotation: Domain name=F-box; Domain location=274-321; Score =17.3; E_value=0.057; Accession=PF00646.24; Description=F-box domain
  Subcellular localization annotation: CTP_CleavageSite=87; ConfidenceScore=5.71e-01
MAPAPVPPPLLPSSDPLPPPQSPIRPASPNPPLPTQHPPTVFAAPPPCLASVLLVALEGTRPQEARSCPRPPPRNRRHPSPSLPCVRDARHGARFPGHHGGAPLPPCVDGKVILALFVFGCAPNIGMDARQPWPLCKAGMGFQLFLLMKMYCGGLDRFEKAQALEPFSVKSKTGTKKAPAAAGTTKALSLLTLPQNSNFLPGVYYLDVVKDGEVFDRINLQKMRNLFGRRILASDFMLDHQSMSRQHADIPHSPSTEIGMGAGAEPGGKVVRGAGLGDLPELCTVEVLLRLGAPNICRFARLNLAFRGAADADFVWEAKLPLQGSGQEKDLIVLAKTGFGRTGAFVLPILQELLSNREGTTYQFEALGSTIGLRYSVVSVIDANVEENVMGDEENIGEIGGAIGIENGNTGEARKWCGVVTSSYGRIAGSSLVGVAIKAPRIMSKNLIRTGIIKVDRAGLTIS

SEQ ID NO: 63636 - protein, 246 aa, Zea mays
  Coding DNA Sequence Number=SeqID_20261
  Gene Ontology: Mol. function=nucleic acid binding
  Homolog annotation: Hit_ID=Q53MN9; Match level="QueryCoverage=79%, HitCoverage=32%, E-value=1e-11, Identity=26%"; Hit description =Transposable element protein, putative
MARRRSQKNKKTPPTNATQKEVTLEILFDDCSNYDSWSTNVINAFRTIHPQLEQIIDKSIFPSSFNGKINSEEDQRCYRLNYLAFDILNNSLSKEDYRAFISNYDESIPDAHDIWTRIKIKFDESKHNSSFNASTSFSFCDTNPCKEEGENERWRPNDESTSPKANENDSGSTNEDEEEERSFVHLYARLSQEDKAVMLKLLERAREQSKARQRLEDILSIKMQHFDELTKEHEELKCSHVDLVQR

SEQ ID NO: 63637 - protein, 92 aa, Zea mays
  Coding DNA Sequence Number=SeqID_20262
  Homolog annotation: Hit_ID=Q7XH16; Match level="QueryCoverage=53%, HitCoverage=8%, E-value=2e-10, Identity=67%"; Hit description =Protein kinase domain containing protein, expressed
MMNYVIFGVLLLVVGGGLRPSPAAADVFCDNLKQVAATLPQNTSSSPVQFATAIVGQAPDVVYALAFNQGDTTPLPPRMRVHMNNITADYTL

SEQ ID NO: 63638 - protein, 236 aa, Zea mays
  Coding DNA Sequence Number=SeqID_20263
MKRPERERNKNLTVKKNNVNAGFRRDVRASISRGGVVCAYESGPLPSAFYWALGKEDFTERRPRQSPALGKELGYRVQDTRYSEALGKDCFAERDIALGKEPRPGHRYRFFAEYSGPDTRQRTTLCRVPYQALDKVPDRGTPLADSLSSAVRQTLGKVNSLCRVSPGTLGKDSVSVTRRRNGCFFAECPRKSTRQRRLCRCTVCRALFAEYDTRQRICRVFLKLFRGALGTSAKTW

SEQ ID NO: 63639 - protein, 160 aa, Zea mays
  Coding DNA Sequence Number=SeqID_20264
MLSEKTSKNSKPRPPTWHAKWEASCGREDEYSAPLGTGTARLLVRFGPIAYVMGHKQRDPAGFRTYPEAPDLYVYRGPVSFCGGPDLLRCGVFLCHVAPFGLPIWWGQARSSACLGDVARGEVSSGDAETCSRRRFWRALGEGAQLGWRSYGKTREAGLG

SEQ ID NO: 63640 - protein, 76 aa, Zea mays
  Coding DNA Sequence Number=SeqID_20265
MTLGQEHCVNTSQHYGPSDEEASTVRDQARTIQPQARTVRSVKNQKNPKGRTVRTRGADRPRSAEREQWLESGWGL

SEQ ID NO: 63641 - protein, 88 aa, Zea mays
  Coding DNA Sequence Number=SeqID_20266
MAVMEARVSRQEAKLAEFHQQIDMVTQSVRARGATRMQRLLDISSRVQNVMDLGVDRGATIALAVAHLRTEADLHALTGLPQGTPSMA

SEQ ID NO: 63642 - protein, 262 aa, Zea mays
  Coding DNA Sequence Number=SeqID_20267
MACCSLRFKKTASPQSVETPGLLQEIDDAWLAAHFVEHTASVNGALRSSREEASAEGSRPGEEHRGALRCGDEGRSFRQTNDMENREGVAGGKGRAACGHGGKKKGRRRGSFNSGALGCWAAHRGQQRKADAVQKGRSKLLAGARARPWERRGRRKGSRLVEMGELGSMQMWSSPFGAVAGASMAAGRAEASACSQGASAPARTKQRRRKMGRWWSAAGGRRRGAGGTAPLLAEGRKGAAAGRQPEVEEGLGSHGRKRVPAR

SEQ ID NO: 63643 - protein, 137 aa, Zea mays
  Coding DNA Sequence Number=SeqID_20268
MAERAMLPTRSRTGRTRVQDVGTHMRDRVAQRPYIRLRPLAYVMGSRPRGCIGSPPERGAEVYMELAPKEDDSWARAPVAETGLLVSTEVKRRATAGGGVLLAWRFASFAPKNRHARCMTCGPGPPCQRLGRWWRQR

SEQ ID NO: 63644 - protein, 508 aa, Zea mays
  Coding DNA Sequence Number=SeqID_20269
MNYLHISKGRGITSPERLTSRGNRISTDGDGRLCTDDSPTATIIPACASLRVGPRPRLPTTGDNEAIKAKESGTQRQMALMPSPAEATTFARGSLTSDGDHLCTSGQQLHQSARRGLRSRPHYGSEDRTIQERRPHPHGVQRLVRPPSAAGATGEAVDVANPRTARPSPVRWTGSHAPPQWQEAAPEMTTGGGLQPGYVMKILEAEWWKDANPHGVAPLQQQKEEDKIGDTTTSARSPTVRSPEETALMRIPLEDTGAPHLEARKAKGHAVKEANRRARSVQPSHGCALPQLHRNWRSNSGAQAHMPSTRGSPAHGPTVPLSTIVTGQSAVGIGTTVGVAIDGPAVIAATGAQKQRSNCQSDSGPTCRLASSPEVGPGATIGTLNQGYPLLQHEDIAPMRRLLATRRIVLDPTRWAGQRAPRGKERRHTSVSPDPHTRTPDPYIHTGLEPPGGVKVIQQAARLLGLLANSAPVPSGTLYSSSLPQEASPARQGYADLEHQGTRRLPRQ

SEQ ID NO: 63645 - protein, 302 aa, Zea mays
  Coding DNA Sequence Number=SeqID_20270
MVGGAGGRDPLIASEIHGFLTCAGHPAPPPHEGGLFSLRFSLLLLWYSDSVARLGPASLLDVVGLSSGVLGLLPSDAWNSRQRSTEGGGGQQIHDVTDTQEGGCCLSMLLRLKIVVGVHSVVLPVPVRGGFGHGACYAALEPCWRRSRRPALAAAGGLVTRRPRSATVVMALKEEPEGSRRGFVGSGSSWDPGLEIQVPSDPFLLWIRKESLNVGDHIYSWKATSWKRLLALIRQWEVVDAKVIHLGYNNSCIFLSLKDVKVMVETTLGKEELKEAVLMIGTAYRLRARIVDGAAKLNGLFN

SEQ ID NO: 63646 - protein, 301 aa, Zea mays
  Coding DNA Sequence Number=SeqID_20271
LLGLVIVSHLSPRGIGALQVVSELLGWPQDKEVRFQTNFCQNEDGFPKLLRACIVRLRIRSQLEYEGREFIEHGTEKMRALEGQQLLEDDPTFVYLTTYLLTLDAQYDFLARHHSQMIARVEGAEKRNRKLHVDLTTAQARATALESHEVIAVEALKQAKDEHVQKLMHAYLVTHNQHRALRVQEPTSSNPVQPMRAEDPQILEGHSVSTRGEKKAWELPEGAIVLEGMPVSPQAMGKQEHPKSSQDPLPELFEPLTMKNVPAPSLELKEEATSTPPVPPPSKDLQEPVPLEEEFDPILPS

SEQ ID NO: 63647 - protein, 218 aa, Zea mays
  Coding DNA Sequence Number=SeqID_20272
  Gene Ontology: Mol. function=DNA binding; Cellular component=nucleus; Biological process=ribosome biogenesis and assembly
  Homolog annotation: Hit_ID=Q10LH5; Match level="QueryCoverage=36%, HitCoverage=14%, E-value=3e-16, Identity=62%"; Hit description =Nucleolar protein NOP5, putative, expressed
MGNRANAINLDFSDVIVDIYILSDEELETYLKVIAVISMGTEVIEHDLLNIRELYDHVLALLYDYLRSKMNTITAILTALDALGVDEDNSIGTKSRLKDQQTICQRWVPCLEIVVPLGLIYGSDFENPDLNLEVHFIDMLVMVVTVGLESTLVGEDLNDRAFVYGFLSFLDKISCVIVLFVLELYEGWQLIGRAQHILLPLQTRMRCSEMRGHGEQKL

SEQ ID NO: 63648 - protein, 121 aa, Zea mays
  Coding DNA Sequence Number=SeqID_20273
MPISSFFVLLLKELGLQPQHFTPCLILRAAIIAYLCKHSEGRMFTSLVKVDSGPSCGSIPRAQLFGVGTEPCCGSISLALMALVPPAMVTADLAAEDATQEVVQDAVRRGDGGRALPARPY

SEQ ID NO: 63649 - protein, 254 aa, Zea mays
  Coding DNA Sequence Number=SeqID_20274
MEPQHGSVPTPKSWARGMEPQLGPLSTFTRLDEARREVLRLEAELLQQQHEERRDRHRQPAGEVGDEDHKLSGGEIPMRKLTLGRFSSPRPSNLLPTLVHAATRADGWVLVGADFAEALNIVHIYVSRFPSTLHPTRDIYGELSVVALWKVPPRGISPTLVLEIQLVAWGDFTGVCGRHALLHWGDYGSGGREIACRGVVIRRLTAIRCGQHAIVYQLRLDRVQNKRGPSDRIEGLGLMRIFVEYHPLDLDPRL

SEQ ID NO: 63650 - protein, 190 aa, Zea mays
  Coding DNA Sequence Number=SeqID_20275
MAPGPTSGEDTSLQVGPKLDQRLARCFWPCVGCLDTAALVLKIHLLCPLRRPRGGAVLARAVVRLLCTQEPAPKEDDSWAWAPRVRDWAVGFSGGEEAHYRRRWRAPHTAVRLLRTRRPTPEEYDSWARAPVSEARPLLSAEMKGRTAAGGGVLLARRFAFSAHGGRRSKSMTRGPGPPCPRPVRCFRRR

SEQ ID NO: 63651 - protein, 25 aa, Zea mays
  Coding DNA Sequence Number=SeqID_20276
MAPSHGLGAAASAQFSPGNYLRYKN

SEQ ID NO: 63652 - protein, 116 aa, Zea mays
  Coding DNA Sequence Number=SeqID_20277
MAGGNTLAGAKERWLADEGECGAKRGFELGIKVNIPDLWLKEVMALGVAFLRETLGDTGVSQPSPLKGISSRDSGQSPPGVKRRVRLIGKRVMIVIIRAKLLFECHSLCNFRRKSF

SEQ ID NO: 63653 - protein, 37 aa, Zea mays
  Coding DNA Sequence Number=SeqID_20278
MVAYSILPTRTAKGHEHLIAFPMIGGLSVRIGDSPTQ

SEQ ID NO: 63654 - protein, 180 aa, Zea mays
  Coding DNA Sequence Number=SeqID_20279
  Homolog annotation: Hit_ID=Q6QP51; Match level="QueryCoverage=55%, HitCoverage=38%, E-value=9e-08, Identity=45%"; Hit description =Putative growth-regulating factor 1
  Subcellular localization annotation: CTP_CleavageSite=63; ConfidenceScore=5.38e-01
MQDVVDGENSAARPSPTVVPPARVRLTAAEFSLKRNRKLRLARPWASASGGSLRLARPQGSAPASASEGGLRLARPQGSASTSTSEGGLRLARPQGPASTSTSRGIASSPDPGVSASPDLGLGPTTPQRPLTEARRHQQGPNSPDSCASTRLKRSSDGHDTAYTGLKHLSDSHVGMYIGL

SEQ ID NO: 63655 - protein, 51 aa, Zea mays
  Coding DNA Sequence Number=SeqID_20280
MAVMGSTSEKMYLCQVRKRQIFVAFAPRWFLMKRSKSEVREDMDPPYRTFV

SEQ ID NO: 63656 - protein, 99 aa, Zea mays
  Coding DNA Sequence Number=SeqID_20281
MARVACTLRGKRLDGGVYVLSVGVNPVPFLRQGHELWLVDEVTGPLVSDDVDVVLMEELFGGHWSLLEDGLYEDLIMRPPIEVLDHCLITDVEDVIPHR

SEQ ID NO: 63657 - protein, 139 aa, Zea mays
  Coding DNA Sequence Number=SeqID_20282
MADHFKHFLYHLLDGPRVHNLRGGRKPRSPLVGPTSASVSITRKSNDEYMDVNYMSKAQSIIESQAQGEFKSSLFANQVTLDALDVLMIRNLGEDKQGFGKGQDVNEKKLVHSQQEKVKSDSTSSPPRNPRPVCTKTNG

SEQ ID NO: 63658 - protein, 27 aa, Zea mays
  Coding DNA Sequence Number=SeqID_20283
MGGSRPEFIPEDRGKVRAEKEAVTDIF

SEQ ID NO: 63659 - protein, 131 aa, Zea mays
  Coding DNA Sequence Number=SeqID_20284
  Gene Ontology: Mol. function=transferase activity, transferring phosphorus-containing groups; Cellular component=membrane; Biological process=two-component signal transduction system (phosphorelay)
  Homolog annotation: Hit_ID=Q2ACB8; Match level="QueryCoverage=83%, HitCoverage=11%, E-value=4e-38, Identity=73%"; Hit description =Histidine kinase
MGVGGGGEAATVSAPAPAEEAGKDAEDGNDWTLKAKLIAVAVLGATALGVFLHSYFRHAALRKAEEGLVSMCEERARMLQDQFAVSVNHVHALAILVATFHYKKHPPALDHIHLCAAARHLHSAGDQSWRE

SEQ ID NO: 63660 - protein, 55 aa, Zea mays
  Coding DNA Sequence Number=SeqID_20285
MRHVPRQIFLPMRSALLRFVVVAAITGALSKTRVKCDYWIVEQQFVRAASKRRVY

SEQ ID NO: 63661 - protein, 815 aa, Zea mays
  Coding DNA Sequence Number=SeqID_20286
  Gene Ontology: Cellular component=cytoplasm; Biological process =ubiquitin cycle
  Homolog annotation: Hit_ID=Q6ETM2; Match level="QueryCoverage=68%, HitCoverage=86%, E-value=0.0, Identity=89%"; Hit description =Putative dem protein
  Pfam annotation: Domain name=VID27; Domain location=1-758; Score= -415.0; E_value=5.4e-09; Accession=PF08553.1; Description=VID27 cytoplasmic protein
MGVLGWGSKRLRKRQSDEAEANGSSCAAAVVLDSVVTSCYDTVKKTCKRQQRRGQDPPSLIQSRTAQEMKRSLPLVPNLQTAVAAQNGQRAPFLPSPLPNSNSRTLLLPSPNLTSSPKPYQPPPPWGGSHSREDLDLSDSDSDDAESRASDNSSDYGTPTPASASSKLASGAGAAATPASIDAIDRHLRQLHLKYNEPISPNPSPGLTLSANPAALNAVKLYLHIGGSSPSAKWIVSDSLAAASFVRTGDDEDDDAPAGGPWCLVVGSKIQARVGPELQLKTFPAQRRVDFVADGVWALKFRHADGFGDFCAKYHSCMFENSYGVAATDEGRAKVFGKDFAAWARPEDGDESIWEDATDGFFSPGPKGSPMPPRTPVLKPLLEDLREFEEPVEEGSGINSLALGALDNSFLVGDKGIEVVRNFEHGIHGKGMSVKFSGGSTNFSTPKKALLMRAETNMLLMSPATDGKPHAKGVHQFDIETGKVVSEWKFEKDGADINMRDITNDSKGAQLDPSESTFLGLDDNRLCRWDMRDRRGIVQNLASATESPVLQWTQGHQFSRGTNFQCFASTGDGSIVVGSLDGKIRLYSKSSMRMAKTAFPGLGSPITHVDVTYDGKWILGTTDTYLILICTIFIDKDGKEKTGFSGRMGNRIAAPRLLKLNPLDSHLAGANSRFREGRFSWVTENGKQERHLVATVGKYSVVWNFLQVKNSHHECYQYQEGLKTCYCYKVIPKDESIVASRFMHDSSGTQSLSFGSFRTKITYSDCYAASKGTKEFQIYHTTSREEKIRELPFNNTSPKGIALRKSELKTVLPPR

SEQ ID NO: 63662 - protein, 183 aa, Zea mays
  Coding DNA Sequence Number=SeqID_20287
MGRACGRARRGRGEVAGAERETGGSPAAFEFVPRPGQGDVGFPPKPRLSLSSVAVAEPEPRGRARRKSFGRGQGGVRALGSGGAEFAVFRVLARVRALGSGGAEFAVFRVLARVRALGSGGAEFAVFRVLARVRALGSGGAEFAVAPLARPDCLSDSLCRVALQSEWRRRRCPSVRLASGAVE

SEQ ID NO: 63663 - protein, 54 aa, Zea mays
  Coding DNA Sequence Number=SeqID_20288
MDYQKEKRAPSEANPDRPVVKNPENPKGADRMDQGRGPSAVGKKEQQLGSGCRL

SEQ ID NO: 63664 - protein, 240 aa, Zea mays
  Coding DNA Sequence Number=SeqID_20289
MREDLAVRLVGRYVPRTEGQRSFDIRGSNDRLNRVFELNQLSYDGYPGQDEADRRGKKPAEAAAEPTAEAPAASGPSQVQEFGPAYATAATEFLAASTAEGGNEYGGFASEFFDFTDSGSSVEWTEESSEEDLDYFAALDVAAVEASPHAADAPDVPGPSTGRRRRRAVAKLRVSAEEGARLRFGCALRRLLRGVFAIDFGFFRTCCASPAAPLGDFCADSLRDRHRIFSHLLCLVRLHP

SEQ ID NO: 63665 - protein, 222 aa, Zea mays
  Coding DNA Sequence Number=SeqID_20290
MWIYGRDENPARNCGDGARPKSRATPRPAIRDPTTPTLESATAAHFTHLPNTSLLAHPDGRGDGDTAGLGFIAEVRRLVGDATGGEDPRWLQLSAEFARRHIRSYACSVSGVGDDSMARGPRTRGSGRHAQVIAWNRKGGRLELGRWAILSGFHACRSAESVYWVEDEPDDWATHCQRHSEATRRCMADVYADVIVDIDPQPITLNQRSKSDKYHKNKHSSI

SEQ ID NO: 63666 - protein, 151 aa, Zea mays
  Coding DNA Sequence Number=SeqID_20291
MKGHRVGLIRPVTVWAWRTTAAELRQSRIGQDKAELGETEHGNRCLTSGGSSRRLGAASGGLDGQHGGRGTPTKPSGESIARERVSLRDMRQGVSVGAGGAQKGAGMRGQVTWPRISACVHARPRRFAGKAELTGQSHDEMVHHADGQARF

SEQ ID NO: 63667 - protein, 98 aa, Zea mays
  Coding DNA Sequence Number=SeqID_20292
MKIAMAPAELGIRLTMEMTRSAHWSVPQGRWHGCETESWIAADRRGPADSIYKVGVTVPKDPFVPIHICLGFWAKGPTSIPEKLFHFFCQAIIPIGSL

SEQ ID NO: 63668 - protein, 694 aa, Zea mays
  Coding DNA Sequence Number=SeqID_20293
  Gene Ontology: Mol. function=binding; Cellular component=nucleus; Biological process=protein amino acid phosphorylation
  Homolog annotation: Hit_ID=Q60DN6; Match level="QueryCoverage=87%, HitCoverage=98%, E-value=0.0, Identity=74%"; Hit description=PPR repeat containing protein
  Pfam annotation: Domain name=PPR; Domain location=232-266; Score =24.3; E_value=0.00046; Accession=PF01535.11; Description=PPR repeat
  Pfam annotation: Domain name=PPR; Domain location=332-366; Score =43.0; E_value=1e-09; Accession=PF01535.11; Description=PPR repeat
  Pfam annotation: Domain name=PPR; Domain location=433-467; Score =44.3; E_value=4.4e-10; Accession=PF01535.11; Description=PPR repeat
  Pfam annotation: Domain name=PPR; Domain location=534-568; Score =35.5; E_value=1.9e-07; Accession=PF01535.11; Description=PPR repeat
  Pfam annotation: Domain name=PPR; Domain location=635-669; Score =39.0; E_value=1.7e-08; Accession=PF01535.11; Description=PPR repeat
  Pfam module annotation: Pfam domain module=PPR::PPR::PPR::PPR::PPR; Domain location=232-266::332-366::433-467::534-568::635-669
MSGVPPDCPVQLEDKILQRSTASNPNGQLTWHAPDPEHCHVRCTTRLSYWIYGSLNERHHGRQGFRGKPKILKLINNESKGCRRKSRLLTCAPRSSFHPSCLPRSLLSSGEQGRSKKSKLHRVRAHVFKSKNQSLRSQSHLVDSHGGPADKIPRKDFPCSAAPSLPDAEAVAFWLRFCRRELDVRRAHAVALRSLGSLGVFVSNNLISAYVRFDEVANARKVFDEMPERSIVSWTAMMNGYQKLGCHGEVARLLMDMLIAGVQGNSLTFVCLLKSCGERCDARLGQQVHCCVVKGGWSNVIVDSAITHFYAQCGDVAAASTVFDRMASRDVISWTTMITAYVQHGHSDKALQMFPTMVSEGFRPNEFTVCSALKACAEEKALRFGKQLHGAIVKKLYKYDIHVGSALVTMYARCGEVFDAQTVFDKMPRRNTITWTSMISGYAQSGCGEEAVLLFRKMKMRRVFVNHLTIVSLLSACGSMQSIYHGKELHAQIIKNCMEENLQIGSTLVWFYNRRGEHTYATRILEAMPDRDAVAWTAMISGYNNLGHNVEALKSLDEMLWDGVVPNTYTYSSALKACARLEALQDGRRIHGVVNKTQAFSNVFVGCSLIDMYMRCGKVDEARRVFDAMPEHNLVTWKVMITGFTQNGRSEEALKYMFLMQQEGYVVDEFVLSTVLSSCGDFQLKSDRISFIVQ

SEQ ID NO: 63669 - protein, 363 aa, Zea mays
  Coding DNA Sequence Number=SeqID_20294
  Gene Ontology: Mol. function=DNA-directed DNA polymerase activity; Biological process=DNA replication
  Homolog annotation: Hit_ID=A2ZJP6; Match level="QueryCoverage=93%, HitCoverage=16%, E-value=1e-104, Identity=56%"; Hit description =Putative uncharacterized protein
MEKNMEQLGTSSLPNVQEVFRAVRDEGDSGLRRMQFGVAKKIKNGARKIVLEEAEAARVAAFSAFKSLGVEVPQFTAPPLAAIEEYPTHDTIDQAKLNKLASGTHSRDDKNMNTCSDYATPRASTYSLRKDTSPAPSIQMKENAGLSKNVQITRQGASSSLSTEIADGSSRDVAEKGPVHAYNFPGGFDCFLDQWSTASNFFFDVHFIKRSMKPSLNLFEVFGLAVCWEKSPIYYCNFPKDLVTTGNNNIKEMWGNFQRRWEKIADIMKQKSVQKMTWNLKIQIQALKSPYISCQRLERFHLDHKMLDKVEVLNNSYMLLSPVSVYNGLDICLLAWVLWPDEESRAVPNLEKVFDICRVLQYL

SEQ ID NO: 63670 - protein, 185 aa, Zea mays
  Coding DNA Sequence Number=SeqID_20295
MGALSEANKCQTCNHDIGDGGLAQACVGVCWYLKTGLFTCNGSELARELHAVVDDKQLHQDYMSNYVDYTCWCEERSWCKICHCGWTPTPNLYSSLDLPGYLTSTAAFSAASTFGTLPDRLLPAAAPRFHRPPVVDVTWAPPRAVAPSNDSALVAAIATIQAAVAASQERQRVALLPLEQEWAMG

SEQ ID NO: 63671 - protein, 241 aa, Zea mays
  Coding DNA Sequence Number=SeqID_20296
  Homolog annotation: Hit_ID=Q6QP51; Match level="QueryCoverage=29%, HitCoverage=35%, E-value=7e-27, Identity=78%"; Hit description =Putative growth-regulating factor 1
MQEACNRTMVVHPFGFIASGGDRERGYFERDPSPRRKRAPSPPTDQGGSKAGPLEGFDSRPRACRVRDDSGYVCYMAEARATLPSHFALPLTDLTGKQRRSSRSDCCATHQGEADNSQVQPRARQGTPPRPTLGLGLGRRSPPCPTPGLGLGRWSLPRPTPGLSLNLGLRRNRVLTRPRPRPQEESPPRPTLGSDRPRHGGYIITLPLASSGYGGTRPASHLACPGLRHFSDGHVTAYTGL

SEQ ID NO: 63672 - protein, 68 aa, Zea mays
  Coding DNA Sequence Number=SeqID_20297
MSYGLTFGHPIPGYMSAAHEHSCNFLELFGGFLVGNWGVWCAQARLLDAVPEPSSNYLELFRGFLVEN

SEQ ID NO: 63673 - protein, 223 aa, Zea mays
  Coding DNA Sequence Number=SeqID_20298
MMTTSSVVGRSKPGCGLCPALSFKDLHHPCCGGGRAEPGFYLPHGPAGHLFLQHSGERALTGLAEGANFDNAGPVDRKRRQLQRAWLAGSAGSVVASDAASCRLIRAWLSINRTGDSRAARSTVPPRGGWCWSVREDLSGDLPVQAGAAAIRRCGAGAQVDAVVGAEVVAAREGFSVDETVGATCGRTPRLFGFDGLSLPLVWGRGRGPFHSSACPKVIADAV

SEQ ID NO: 63674 - protein, 170 aa, Zea mays
  Coding DNA Sequence Number=SeqID_20299
MAKRWKLWHRGHNCDPLGNSVDSKSHGYYKKFNKDFGVIVAPLMKLLNEGLGGAKKQKMPCRGLNGLLSTAPILQLLAFDKLFTVWKGDSLDFMEGLPRVHEKCDPHSRRPIFLTSIVSDQDPVKGNFWLDLFKMAGYEEAKLFGSELNLYSVLAVGDNSDYSFLLARGF

SEQ ID NO: 63675 - protein, 447 aa, Zea mays
  Coding DNA Sequence Number=SeqID_20300
  Gene Ontology: Mol. function=DNA-directed DNA polymerase activity; Cellular component=intracellular; Biological process=DNA replication
  Homolog annotation: Hit_ID=A2ZJP6; Match level="QueryCoverage=97%, HitCoverage=20%, E-value=0.0, Identity=81%"; Hit description =Putative uncharacterized protein
  Pfam annotation: Domain name=Helicase_C; Domain location=91-171; Score=46.8; E_value=7.6e-11; Accession=PF00271.22; Description =Helicase conserved C-terminal domain
MNVVRVLPKVADHGGKDPDHIVELCNEVVLQGHSVLLFCSSRKGCESTARHVAKFLKLPSVGTTDVSSEFSDAAAAIEALRRCPAGLDPILGETLPFGVAYHHAGLTVEEREIVESCYRKGLVRVLTATSTLAAGVNLPARRVIFRQPKIGRDFIDGTRYRQMAGRAGRTGIDTKGESILVCRPEEVKRVTGIIRSNCPPLESCLSEDKNGMTHAIMEVVAGGIVQTANDIHRYVRCTLLNSTRPFDDVVKSAQDSLRWLCHKSFLEWNHETKIYSATPLGRAAFGSSLNPEESLVAYLSFAPSLFYCIEKGPLAELVVLDDLSRAREGFVLASDLHLVYLVTPINVDLEPDWELYYEKFMQLSSLEQSVGNRVGVIEPFLMHMAHGASIPFRARPERNTGLSNKSAQAAGNTLVSEHTIRVSKRFYVALMLSRLAQNTQESYVSFH

SEQ ID NO: 63676 - protein, 674 aa, Zea mays
  Coding DNA Sequence Number=SeqID_20301
  Gene Ontology: Mol. function=DNA-directed DNA polymerase activity; Cellular component=intracellular; Biological process=DNA replication
  Homolog annotation: Hit_ID=Q2QTK2; Match level="QueryCoverage=98%, HitCoverage=30%, E-value=1e-168, Identity=54%"; Hit description=DNA polymerase I family protein, expressed
  Pfam annotation: Domain name=DEAD; Domain location=543-672; Score= -23.8; E_value=0.0025; Accession=PF00270.20; Description=DEADDEAH box helicase
  Subcellular localization annotation: CTP_CleavageSite=42; ConfidenceScore=5.30e-01
MASGSSRPQIDQFFPAKKRRPSSRKGESPRPGTQHESPGGAKGSLEGYLVRSPCNRAVAAASVVPVGSPRGGDPGARRSLSAAMDVDVGSSASVAAAAGDGADFDLRRSTADFLSHSCSAILPLRGDCDYSEQCQMKQKRSASQSFLVPCDNDYVKKQRVAHCGGFEALKELDDNVASMKQCINHHGGSEAVEESVEGEHVSCVGFSALQRCSFTPSTAQIKVGFSLAPVETLKSVSRNSLTSPGEEFWNAAIELADGISAQADKVRGRPEFDAAEDKSSCAVAAFFKTLPRSGRDELDCQNTVGSNDTHHIEKLSNKVESLAVNCQHIISSPLPVKQLDFFHEDDIKVSGSKFETKGSYETCNAQADRVPLKGSGRLEKENLMDPVDVLKRSAINLHTDSAAMRCQGVFKSTTEGKVHPTQEAERDSNLIRRDLNQPTHNENKSLAAYSNNRKTWIDSKSKVASQEVEASTPTSSIPLKDHSKISSWLPPDLCAIYMKKGISELYPWQGMLIKTSIKCHISVALALRRTHRARRLACLVLGTAAAASFLVSVQCSGHRSAGKSFVAEVLMLRQILSTGNMAILVLPYVSICAEKAEHLEQLLEPLGRHVRSFYGNQGGGSLPKDTAVAVCTIEKANSLVNKLLEDGRLSELGVIVIDELHMQSRFVTALRVLT

SEQ ID NO: 63677 - protein, 229 aa, Zea mays
  Coding DNA Sequence Number=SeqID_20302
MTSHGSSDDRNALTHTDGLAREGFPRILWEVLQGAGYTTPPQYAVQQFEKHRVPRCRVRMTLEPHPLQPGWRSLDSESFGYRAEDTIEAIALHGLTTFCGFHPLELATHPIGLFPAEREDDPMWKDRVEHAKDIWAIYPGQTAHLTVRCMNALYRLQVMRELVDKDLQVDYYPPNISRFGRMVVNMKSLSLSLEDLLINTLQHPCRGYRAPWDLLRNDIQDNRLMKASP

SEQ ID NO: 63678 - protein, 174 aa, Zea mays
  Coding DNA Sequence Number=SeqID_20303
  Gene Ontology: Mol. function=DNA-directed DNA polymerase activity; Cellular component=intracellular; Biological process=DNA replication
  Homolog annotation: Hit_ID=A2ZJP6; Match level="QueryCoverage=58%, HitCoverage=5%, E-value=1e-36, Identity=76%"; Hit description =Putative uncharacterized protein
MWPGPTCGPQDRGGQTPFVETLLGRRRVLTKITAGNSKEKAKAQRQAVNSICQGSAADIIKVAMIRVHSIITNRTSAADSTDEVTRKFSELGGQCHLILQVHDELVLEVDPCMVAQAGRYQRGGRDVEDANITYSDMLADKVEVDFYVLHVLVLHEIGVEGYESVRKADEARMP

SEQ ID NO: 63679 - protein, 343 aa, Zea mays
  Coding DNA Sequence Number=SeqID_20304
  Gene Ontology: Mol. function=DNA-directed DNA polymerase activity; Cellular component=intracellular; Biological process=DNA replication
  Homolog annotation: Hit_ID=Q2QTK2; Match level="QueryCoverage=97%, HitCoverage=16%, E-value=1e-130, Identity=67%"; Hit description=DNA polymerase I family protein, expressed
  Pfam annotation: Domain name=DNA_pol_A; Domain location=80-343; Score= -107.2; E_value=4.3e-08; Accession=PF00476.11; Description=DNA polymerase family A
MFVKRRLHSQEAAAANRDGRWRNQMHKAAHNGCCRRAAQTRALYTVLKKLLTQNLSVLVETIEAPLVNVLADMELWGIGADMDACLRARHIITKKLKELEKEAYRLAGKNFSLNATADIADILYTHLKLPVPKGCEKGKLHPSTDKQSLDHLRYIIHGNWLQTSTATGRLSMEEPNLQCVEHVVEFDTGKSDKDYSSISVDDHHKINARDFFIPTKENWLFITADYSQIELRLMAHFSKDHMLVELLKKPDGDVFTMIASRWAEKEEALISSKERENTKRFIYGILYGMGANSLAEQLQCSTEEAAQKIQSFRRFFPGVSSWLHEVVLSCRQKGLVYLVAISV

SEQ ID NO: 63680 - protein, 182 aa, Zea mays
  Coding DNA Sequence Number=SeqID_20305
MRKWARPSPLLLLLLSCRSNIPLDRPTWWQGGRPSHTINHFLNRTCKNYDTSKAEYTNTQLDLPGYKGSSSLISCEKQTIRIEFYPCKGRGGDLNYNYHIIVGGRPKSSEVDLRLSVKFCQVRGLGKLHGPMAELTEALARLGGDWSGLATVAEALAAMAGRKELAGAKEGCLAGDGERGVK

SEQ ID NO: 63681 - protein, 133 aa, Zea mays
  Coding DNA Sequence Number=SeqID_20306
MEYKGSSSLISCEKQTIRIEFYPCKAGELVGGEESGLSRANLTNQTGGRPKSGEVDLRLPVKFCQVRGLGKLHEPMAELTEALARLGGDWSGLATVAESLAAMAGGKELAGAKEGCLAGGGIKVNTLDLWLKV

SEQ ID NO: 63682 - protein, 122 aa, Zea mays
  Coding DNA Sequence Number=SeqID_20307
MYLIGALEEASLSTVRRFPFPASSPDQDLTQFICRSSHNGRDVMKKLNFVVEMRHQLQPAKANLQVSYVIDPKGTSSGQESLRPLLSTSKVFWTKKSCTLKQEDTRSWSGCLKAFELFEALV

SEQ ID NO: 63683 - protein, 40 aa, Zea mays
  Coding DNA Sequence Number=SeqID_20308
  Homolog annotation: Hit_ID=Q3LRV2; Match level="QueryCoverage=92%, HitCoverage=15%, E-value=3e-07, Identity=78%"; Hit description=Gag
MKKVVYYETDSSSPSTSGFDALSVTSKRHERKKFSTIRGG

SEQ ID NO: 63684 - protein, 61 aa, Zea mays
  Coding DNA Sequence Number=SeqID_20309
  Subcellular localization annotation: CTP_CleavageSite=39; ConfidenceScore=5.18e-01
MGSAAGTGENSGNNPPQKGHVRTVRTLARTVRDYVRTVRCFHRMRRELDQGNEDATPQKKT

SEQ ID NO: 63685 - protein, 150 aa, Zea mays
  Coding DNA Sequence Number=SeqID_20310
  Subcellular localization annotation: CTP_CleavageSite=39; ConfidenceScore=5.19e-01
MAEQQLCSPPPMAPPPPCVLSPRSLAQQQITMPPLCCCRAPALASSHGAEDYLQASSSALLPCAQLFSLRSTSFFYLLPAPSSSSPHGWRPENFSRRPFFFPCSFSLAQQQLAPPPLAAQLLGETPLFLQPRHIPQLPRCYRCAHAKCSA

SEQ ID NO: 63686 - protein, 150 aa, Zea mays
  Coding DNA Sequence Number=SeqID_20311
  Subcellular localization annotation: CTP_CleavageSite=39; ConfidenceScore=5.15e-01
MAEQQLCSPPPMAPPPPCVLFPRSLAQQQITMPPLCCCRAPALASSHGAEDYLQASSSALLPCAQLFSLRSTSFFYLLPAPSSSSPHGWRPENFSRRPFFFPCSFSLAQQQLAPPHLAAQLLGETPLFLQPRHIPQLPRCYRCAHAKCSA

SEQ ID NO: 63687 - protein, 21 aa, Zea mays
  Coding DNA Sequence Number=SeqID_20312
MANEVATNEARTIIIVRRSFV

SEQ ID NO: 63688 - protein, 532 aa, Zea mays
  Coding DNA Sequence Number=SeqID_20313
  Gene Ontology: Mol. function=hydrolase activity; Cellular component =nucleus; Biological process=metabolic process
  Homolog annotation: Hit_ID=Q6ZDG3; Match level="QueryCoverage=57%, HitCoverage=93%, E-value=1e-141, Identity=79%"; Hit description =Putative PrMC3
  Pfam annotation: Domain name=Abhydrolase_3; Domain location=81-306; Score=209.6; E_value=7.3e-60; Accession=PF07859.4; Description =alphabeta hydrolase fold
MATAPAAPPPASADDEIIYESMPCIRVYKDRVERYFGTEFVAASTNDSTGVASRDVVISPNVSARLYLPRLDDGNAKLPIFVYYHGGGFCIGSAFNPIFHDYFNCLVALADILVVSVEYRLAPEHPVPAAYADSWEALAWVISHLGPAGDGARDPWIAGHADFSRLFLGGESAGSNIAHHMAMRAAAEGLAHGARIRGLVMIHPYFLGTDKVPSDDLSPEVRESLGSLWRFMCPTTTGEDDPLINPFVDGAPPLASLPCGRVLVCIGEGDVLRDRGRAYYDRLRASGWPGKAEIWQAPGKGHTFHLLDPCCDEAIAQDKVGLPEPRHHLGSPLPDGVPPGSEIQAPSAIFRRLCVRADRPAPGRGPSGRQAEVPAAHQAADRPAPGRGQSALAQRAPPRLAPGRGPSGPCARTVRPCVEGTATVLVECLALRKGVNILLATPLGTTYLSSSNRPSMAGSRDSFDISPSNIIEPTWETLPADEQLQFEEHKERMIQEAKAKFLANFKVDRNNKVVRHRATDPASLQPTPDIPN

SEQ ID NO: 63689 - protein, 76 aa, Zea mays
  Coding DNA Sequence Number=SeqID_20314
  Subcellular localization annotation: CTP_CleavageSite=48; ConfidenceScore=5.39e-01
MEGATAANRTARGASRGATTANRAGAAAANRMGTARGAGAAGGPGTARARARASDAGASGAGGRRPRRGEGEGEGR

SEQ ID NO: 63690 - protein, 24 aa, Zea mays
  Coding DNA Sequence Number=SeqID_20315
MEWKMDLLAIWQRGFYQFDSGELL

SEQ ID NO: 63691 - protein, 125 aa, Zea mays
  Coding DNA Sequence Number=SeqID_20316
MPKPDKTFPLLILPVLPSLHNPGVRPCEFRLSDCPHSLEWLYLSRVQESYIGNNSIRIYKEELLESEFGSLVRRNLKVKHAQLGETWDGWPDGKFPTRRKIIVTGVHMTGILVWQVLGGLDNMMD

SEQ ID NO: 63692 - protein, 143 aa, Zea mays
  Coding DNA Sequence Number=SeqID_20317
MAQSERAFFIPTNVRMFNWHIRIEKTLFVTENADMLMVTAKVPKVHKKSIKRPRVGSNKESKGQPKAALVWRTGLSGVPPDSVLCTRELDAQLFTFGISQRRFAIIHRTVRCTTGQCPVLQGRATLNSPASGIRSAKIHRTVR

SEQ ID NO: 63693 - protein, 180 aa, Zea mays
  Coding DNA Sequence Number=SeqID_20318
MKEEHLDHREEVVTELSAKVSSMNAVLEEQRTQQTAAMERIQKWEREVEDKANNIALAEENLKAKDASMDKRATDLAFKEEMFERQEKLLAEHELEVEQKEKELKERILGARLEAEGGRLCWAVIEYILTCFQSHDLTISLELVIASPVADTEDAARQGVQDTLEVVAERFQRDPAEMSS

SEQ ID NO: 63694 - protein, 115 aa, Zea mays
  Coding DNA Sequence Number=SeqID_20319
MGGSEAAMCPEKVAYSKASTTLEYIVRAPKVGPGPPRVQARPLEWVPDPPNGVWAARRGVPRSQDRAYLDLEQDPGGGPVPTRVQAQSGADLSAYTSAPRPSGGPMLPRGLLRVT

SEQ ID NO: 63695 - protein, 30 aa, Zea mays
  Coding DNA Sequence Number=SeqID_20320
MALYTLHELPPLPKGGTYKVAEPRHVGLGT

SEQ ID NO: 63696 - protein, 194 aa, Zea mays
  Coding DNA Sequence Number=SeqID_20321
MGVLPANGMDRDATCQRNGQVSLNAEVAHCLPVEWTGTTRWLTSRAVGHVAASGLRLGGEQKRMWRGSHQTGSGHVSAPDPARVLFKVQVCPVLGPWDPSAGGPDPIRGVRDPFQGSSLHTWRSGTNLGARTVYSGVRDQPWGSELYTRGSALSRWGPDSLLMLWSTPPSLDTWRLLIRPFCGVGCCCGPRIAA

SEQ ID NO: 63697 - protein, 111 aa, Zea mays
  Coding DNA Sequence Number=SeqID_20322
MAWWLSDLWRQMDEPWRLYLKIGTIARRSAREDDSFTLQTENLNWRLTSIFMDQMLSNEQQGSEYREDDLVLLAGYYSKVVDLSTDVMMLLGSMHDAARWCCVLVFDFAAD

SEQ ID NO: 63698 - protein, 375 aa, Zea mays
  Coding DNA Sequence Number=SeqID_20323
  Homolog annotation: Hit_ID=Q6QP51; Match level="QueryCoverage=14%, HitCoverage=38%, E-value=6e-13, Identity=54%"; Hit description =Putative growth-regulating factor 1
MPRLLDCGISAATRGNPAHDPTVPNEHNDRGLASRKGSTAAPEHSGSEPITDKGFEGWPLERPPRARIVRDDSGYVRYMAEARATLPSAARPAPTVVPATRARLTTASSASGATGSSTSLDLRPRPREEVSASLDPKTRPREESRPRPTPASASGEATREQDRRPTWLVPVTGLRHFSDGHVIAYAGLKHFSDGHVGIVRLTAAKSGLRCHRKLRLARPQGSNSASAPEDDELRLARPQGSDSASAPEGDELRLARPQGSDSASAPEDDELRLARPQGSDSALASADGLRLARPKGSDSTSTSTSEEPSALPYPGLGPTTSQEGPSLPLPLASSGYGEQDRRPIWLALRSSDGHDITRTGCQNLSGCHDGMYLGH

SEQ ID NO: 63699 - protein, 115 aa, Zea mays
  Coding DNA Sequence Number=SeqID_20324
  Homolog annotation: Hit_ID=A7QAS3; Match level="QueryCoverage=73%, HitCoverage=37%, E-value=1e-34, Identity=80%"; Hit description =Chromosome chr5 scaffold_72, whole genome shotgun sequence
MARGNYPQDCLDVMEMVMIARCSMVPGSRNPMWGEEFNFFVDSLPVKINVTIYDWDIVWKSTILGSVTVPIESEIPSGPVWHTLDSTSGQVCLHIKVIKVHESSSRLKSHSVYLI

SEQ ID NO: 63700 - protein, 313 aa, Zea mays
  Coding DNA Sequence Number=SeqID_20325
MAVVLCGVVPEPNFTLDKENLEESTTAGCPSVGIVQTQSQNRRSRALGEEREGQQNHGAGGRRRRRNRGDANLAAEIRAPSGFFTSSPLSLCGRTEGGKGWLGLEQSRPGSWDTQLRAAATRECRPRAEAARVSRHIQEKQVKGSSPAPRSSLVAPWLWLRWAVVWTVETGGGCPIPIPGGSSNRSTQLTKRTHPDTVVRALQQHRAQAQGSPPVVGGLAWCAIASRCLGGGAWVGWWCGRAVAFLGTRGVWRGGSVPFFIHATVVYLLSPLEKVRRAEKPRKPNPARDFAQPTAVMGMDGFRRVAGPAAATD

SEQ ID NO: 63701 - protein, 746 aa, Zea mays
  Coding DNA Sequence Number=SeqID_20326
  Homolog annotation: Hit_ID=Q6ZIT8; Match level="QueryCoverage=97%, HitCoverage=97%, E-value=1e-128, Identity=54%"; Hit description =Putative uncharacterized protein OJ1211_G06.22
  Pfam annotation: Domain name=DUF936; Domain location=1-734; Score =495.0; E_value=9.1e-146; Accession=PF06075.3; Description=Plant protein of unknown function (DUF936)
MASLVPGVLVKLLQHMNTGVKVGGEHRSSLLQVVSIVPALAGSDLFTNRGFYLKVSDSSHATYVSLPEEQHDLILSDRIQLGQFVHADRLEAATPVPILRGVRPVPGRHACVGTPEDLVLTASSSNSHGGGKNKKARPSNAKTKDASASVLSLDKESSKLEKINASRKPTATGAENKKPTLTRSNSSLPREALDGRIGDDKVAAVKSKKVKPGVTRSTPSSPTSVYSLPASFDRFSNDLKQRNRVKGAENKASSSSRLSLLEKAASVLKATSAAGRVSSAGIPIGSSVLSIGSSGPKALRRSWEGNTDVKGKGKPESRTAKPDRKSDSKIPMTPRRKSPVDEKVAPHKDDNSQKAARKSTTSAPASDDAADKAVKKKHIPTAKRTSGGLGNWSVTNLVKIPPSSRKLADVSASWTSLPPSLAKLGKELLRHRESAQIAAVEAMQEASAAESLLRCLSALLLFHCSRNPLNRNESTMIPGDKPYEAFKASPDCSAASDAGTVCSATDEEAAAITAERRRRATSWVSAALATDLSAFGIYKLKPPPATVSSPLAVVVVDEPAKLAAAAATKSSPSPKSRLSPAKGKARTGAAAAAGALATTPAPPEWERGGGAEERGELATRLGEESRGWFLGFVERFLDADVAATAQWDRERAARMLPQLKRVNDWLGEIGKRSETETSSLPPADADGEATTTSTAPVPSNGGCGVPEETIERLRKKIYEYLLTNVDSAAAMLGGGGLAAPTNGKKG

SEQ ID NO: 63702 - protein, 253 aa, Zea mays
  Coding DNA Sequence Number=SeqID_20327
  Homolog annotation: Hit_ID=Q6J9V9; Match level="QueryCoverage=48%, HitCoverage=42%, E-value=2e-46, Identity=77%"; Hit description =Putative uncharacterized protein
MSRLLDCRTSAATRGSPARDPIVPIKCDDHRSVSRGDRRDSWYDHRRTGRIEKRGYFGRILLSEGSGPRALLLIRGSKVAPCGVRQPPQSTRAPSPLLIRCSKASPSEGFDSRPRARRVRDDPRYVRYMAKARAALPRYPRTFPRPVGTICNGIPSEGGTEPSDPIKWVRVQQITCRKTTLFTPFRLLWQPPSLSIGRRSPPRPTPGLGLSLGLRRRSPPRPTSGLGLRRSLRLARPRPRTDYATWDTLLPYP

SEQ ID NO: 63703 - protein, 151 aa, Zea mays
  Coding DNA Sequence Number=SeqID_20328
MGKGNKRKREPTPPSEEFGDSEYLEEEFSSESEGFSALVSPPASSDDSDDSQGIAVEVWTYIWAVERSGLEGSDESEYSSDDEDSPEEDGDGDDDDDDDDGGDGGDDGDGGGRGGNGDDRGGNGDGKGGNGGSSRGSNGGGSSKGSNKASG

SEQ ID NO: 63704 - protein, 103 aa, Zea mays
  Coding DNA Sequence Number=SeqID_20329
MGVGELKVPDTWSSGHVQPCRGDGALESLWRRCGGVEVEPSALDEPARGGRRLSLPPNPNPILNSVLSRSTTLPWHKKSLISTLQAYQIVPKKFPQNENSVSI

SEQ ID NO: 63705 - protein, 203 aa, Zea mays
  Coding DNA Sequence Number=SeqID_20330
MTIDDLFELFVEHLVNITLLASSSPDSYDFLMTYGTMTRSSLERAGEVWLSRTTAAGEIRAGKTTRAGKLRSGELRTPTSTRAAAGTEQRLSWATARDHGQAQIGAMESSRTRAGEQRRWPCAGSSTASMRTSRGTPESMAGRVSPWPSRQGAPRAEKLRAPGWTQENARAGTSSTELELSVRVMELDVGVPGRTMEDRGELK

SEQ ID NO: 63706 - protein, 53 aa, Zea mays
  Coding DNA Sequence Number=SeqID_20331
MGKTLSTQVLDKTYPTKEKTLKDMLDEKSIIGNFAVRSHHAPKENILAGIAQI

SEQ ID NO: 63707 - protein, 868 aa, Zea mays
  Coding DNA Sequence Number=SeqID_20332
MCSHYYSAYPPFEVAEEDADEGALRCAAGQSSGRDLVEEFVAYGVWPLAHGWALGEVCPRQMPFHGGRVVRSPAFALNLRYRDPAAFVRDAEDLAVRLVGRYVPRTEGQRSFDIRGSNERLNRVFELNQLPYDGYPGQDEKDRRGKKPAVETGGDPALAAAPSSKKRKLGTAMGGLGVSDSFARELMRTCAAPGERMSSPELRESSARMLRVTGGCWPKNVPIPCAAEEDCFTSRMVHRWRVFPYGRNIGAVVWTVMDKDRQGAAQKRQATVRIHEARPKRPRGTAKAVASGGGSDGGQLAMVAPGAEIATAAIVPKARGEALDAGGEVSALAVVRDEAGAATRRLKRVTEALSQATEALSQVADFASRTASGALTAAVSAEVERLRTQHADVVREKSASDSKCRKLTDRVAALEKEKADLRRQLAAERREANEAIAKGQAAQAEAKLARAEGNLAKELVEHLQERLTALESRAKEAEAAMHAEAERTRTQLMDTYRELGARTGDFEVPDREPGLRCLQWAQEELLELPAVVGGLMSYASLVTCEGAMNALSREGCRHFEAFDKVDEDFDRDIYKVEDPVVKESAGALYDRMWGLYGREVVRERAEAARAQAERGERVDDFGALNSALPDPEPTPAEAATGVALETTPGPAEDASSVPTSAVAGEDLPPKVAEGAPDAPAAAAPSTEDSAAVVAETAAEETAEAPAAAGPSQVQDFGPAHATATTGFLAASTAEDGNEYGGSVSEFFDFTDSGSSVEWTEESSEEDLDYFAALDVAAAEASPHAADAPDVLGPSTGRRRRRAVAKRRVSAEEGARLRVSRGGRQELLSLPAATSTGEGELRSLFAGEELRIMLFNYREMGIIPKVEPM

SEQ ID NO: 63708 - protein, 387 aa, Zea mays
  Coding DNA Sequence Number=SeqID_20333
  Gene Ontology: Mol. function=cysteine-type peptidase activity; Biological process=proteolysis
  Homolog annotation: Hit_ID=Q5NKP7; Match level="QueryCoverage=99%, HitCoverage=55%, E-value=1e-143, Identity=78%"; Hit description =Putative uncharacterized protein 9C20.3c
MKQVDRPPNNPKRITIQSSQECFSVDIPSVEQPNPCPEVENPPNVDSQNLTNETVQIDSDEDDFMLALKKCNVSESHTRVLRKVMTKRIKHEELPRQERNSRSQKDIVHLILGVPNHGGGKPLGIDEAVAASNLRAELGVAKDEFNVTFLQDRLRKGEDDDLSIRCFFLILFNRLLFPTASWGITYHEVLLTEEMHRFHEIDWCQLIFNDLCEAAKKWHNRITTNVSTTIYGCSIVVLPLPPKIRLAHLALNFFDKNIIKALTKADKRKPECRTNIFDAPRPAPMPRPTFNIKLPSIKEMMSSKINDLPHRHRSKFTDILAAYDLEVDKSCVAIKDSIDKIIEKQYDIADKFIELIDEVLRAESENLENETDEPHQPGNSADSAGLS

SEQ ID NO: 63709 - protein, 112 aa, Zea mays
  Coding DNA Sequence Number=SeqID_20334
MDYQLERYPLTATNVEDGEERGSSRVGGERRSRSVGREGRVFSGLRTQRREYWSEDWGHRGRAAQMPFATGSTTSGEGLEESSERGAESPGMEESAEIPGVVAGLGFCSYGN

SEQ ID NO: 63710 - protein, 877 aa, Zea mays
  Coding DNA Sequence Number=SeqID_20335
MPFHGGRVVRSPAFALNLRNRDPAAFVRDAEDLAVRLVGRYVPRTEGQRSFDIRGSNERLNRVFELNQLPYDGYPGQDEADRRGKKPAVETGGDPALVAAPSSKKRKLGTAMGGLGVSDSFARELMRTCAAPGERMSSPELRESSARMLRVIGGCWPKNVPIPCAAEEDCFTSRMVHRWRVFPYGRNIGAVVWTVMDKDRQGAAQKRQATVRIHEARPKRQRGTAKAVASGGGKPPLAAKAGASAPSKAPEATAGAGGSKAAKVVPPAGGVAEASKAARALPLAGKRVADFGTDITVDDYLGGSDEGQLAMVAPGAEIATAAIVPKARGEALDAGGEVSALAVVRGEAGAATRRLKGVTEALSQATEALSQVADFASRTASGALTAAVSAEVERLRTQHADAVREKSASDSKCRKLTDRVAALEREKADLRRQLAAERREANEAVAKGQAAQAEAKLARAEGNLAKELAEHLQERLTALESRAKEAEAAVHAEAERTRTQLMDTYRELGARTGDFEVPDREPGLRCLQWVLEELLELPAVVGGLMSYASLVTCEGAMNALSREGCRHFEALDQVDEDFGRDIYEVEDPVVKESAGALYDRMWGLYGREVVRERAEAARAQAERDERVDDFGALNSALPGPEPTPAEAATGVALETTPEPAEDAPSVPTSAVAGEDLPPKVAEGAPDAPAAAAPSAEDSAAVVAETAAEETAEAPAAAGPSQVQDFGPAHATATTGFLAASTAEDGNEYGGSVSEFFDFTDSGSSVEWTEESSEEDLDYFAALDVAAAEASPHAADAPDVLGPSTGRRRRRAVAKRRVSAEEGARLCVSRGGRQELLSLPAATSTGEGELRSLFAGEELRIMLFNYREMGIIPKVEPM

SEQ ID NO: 63711 - protein, 299 aa, Zea mays
  Coding DNA Sequence Number=SeqID_20336
  Homolog annotation: Hit_ID=Q6QP51; Match level="QueryCoverage=73%, HitCoverage=99%, E-value=5e-53, Identity=52%"; Hit description =Putative growth-regulating factor 1
MQVACNHTTRAHPLGFDASSMEAQAYTSCERKRRSNRLQAHVPSWSSRGALSHDGKRHLWQAKRATFHLRHDDRVKKRLAPRKGSTAALEHSGFRLITDQGFEGWPLGRVRQPPQNTRAPRPLLIRGSKAGPTEGFDSRLRACRARDDSGYVRYMAEARATLPRRVQCEDRLTPYPDTRSSVGRAKEEVSASPDSRARPLPRPQEKVSASLDPRARPQPRPRKMVSASLDPRARPPPRPQEEVSASPDPRAWPQPRPQKGSRPHPTPASASASGGVSASPDLELRPTAPRGIHHYPTSS

SEQ ID NO: 63712 - protein, 283 aa, Zea mays
  Coding DNA Sequence Number=SeqID_20337
MVTQDGDHRFDGGEEQAGLRPLPRPQLQGSSSPELGRRAGQVRACLRVGRRPASSSGIRGRKPSSSSAEEASSSHAGEGELLLPGQGAAFRPPVRATVAGCTEGSHNTSYAARAVLVFWDGPILVLAVRTGVRTCRCALGRPTLAGAVLVGRWPPSSVLRWWQPEKVSPPMTPSVPPALRASGSLALMAGSCPPRGDVNEGLPAVAFALGPSLLPSCRLRRRSLSLLQWTAASHPEFVIPQALRCGGCSYPREWNRSSVCNGTLSVGVCSLWLTGPEHLGIWA

SEQ ID NO: 63713 - protein, 415 aa, Zea mays
  Coding DNA Sequence Number=SeqID_20338
MGCYVPRTEGLWSWDIRGSNDRLNRVFELNRLPYSGYPGEDIADRRGKKPMGGTEEGPSQEAAPATKKRKLGTIVGGKGVFDNFDVELMGICAAPGGRMSSPELRESSARMLEKRRAVIRLPDPRREAKRARGSAKAAALGGSQPTPTVKPAAPGSSKVSESAKAIVAGGTKTTPGESAKVRELPSPGKRVADFGTNISVDDYFVGSGEGQMVVVPPAVATTTSTAVVGVNGGAFCASGEISSAAAVKDEAGSMSHWLREVSQQLSQAADFVDRVASGALTADVAAEVERLRAQHTDAIREKSAAESKNRRLAKKVAALEAEKTDLRRQLVEERREANQAIAEVQAAQAEAKVARAEGSLASQRAEEWEVRFNALRGCVDKAEASTRSKVERSLAQLVDSYHELGAWTADFEVPN

SEQ ID NO: 63714 - protein, 270 aa, Zea mays
  Coding DNA Sequence Number=SeqID_20339
  Gene Ontology: Cellular component=integral to membrane; Biological process=positive regulation of gene expression, epigenetic
  Homolog annotation: Hit_ID=A9NZG1; Match level="QueryCoverage=74%, HitCoverage=73%, E-value=1e-43, Identity=44%"; Hit description =Putative uncharacterized protein
  Pfam annotation: Domain name=MtN3_slv; Domain location=132-218; Score= 103.6; E_value=5.9e-28; Accession=PF03083.7; Description=MtN3saliva family
  Pfam annotation: Domain name=MtN3_slv; Domain location=7-98; Score =33.0; E_value=1e-06; Accession=PF03083.7; Description=MtN3saliva family
  Pfam module annotation: Pfam domain module=MtN3_slv::MtN3_slv; Domain location=132-218::7-98
MVTSIRVIVGIIGSVVCVLLYAVPVLTFKRVVKEASVGEFSCVPYILALFSAFTWGWYGFPIVSDGWENLSLFGTCAVGVLFEASFVVVYVWFAPRDKKKSVVLMVSLVVATLCVIVSLSSFVFHTHHMRKQFVGSIGIVTSISMYSAPLVAVKQVILTKSVEFMPFYLSLFSLLTSFTWMLYGILGRDPYLTAPNGAGCLTGLLQIAVYCIYSRCNRPPKAVNGATTSREDANDCKVLVYSKAGQLRELGRRRSSLHHALNVKRVIVGS

SEQ ID NO: 63715 - protein, 112 aa, Zea mays
  Coding DNA Sequence Number=SeqID_20340
  Gene Ontology: Mol. function=catalytic activity
  Homolog annotation: Hit_ID=A3B342; Match level="QueryCoverage=51%, HitCoverage=18%, E-value=5e-13, Identity=65%"; Hit description =Putative uncharacterized protein
MTKMCPPTEAQKLKSYQSLASKSYKIEEIRQMAQAVCQVQSGYYLADEPEVHFVWQPNQESLVLVMSRAFDDYYIEDYGVILASEVTQRRIDNSDQFVILATVRVAFVPTYL

SEQ ID NO: 63716 - protein, 140 aa, Zea mays
  Coding DNA Sequence Number=SeqID_20341
  Subcellular localization annotation: CTP_CleavageSite=32; ConfidenceScore=5.53e-01
MPSAPPSLDLPQDASTPAMFPSILSVTDTSLSSAPPSSPRHPRRHHRIRPNNRRTEASWLEGVMHLDPHLHDTPAQTVARATVKQGGRDRRCREGAMEAKCKHLGLQAALGESKKSESAMSKLMTRSLLLEPSLLKNTPG

SEQ ID NO: 63717 - protein, 354 aa, Zea mays
  Coding DNA Sequence Number=SeqID_20342
MSIRPRTVRPWTADRPHHQEMDSPFSFADRLDTSGRGPSAAPARTVRDRAEKEAVPADLPVVPLLLVLSSSLLTKYSPVSSVRGRGFGGLRKKLAGRFKSKRPRGNDDDYTPTTDSEAQSSAGGTESMDAEDFLHVHPDYPIDIQGWTYPKQRFSMAEYCSRRTVNQYALPSDTNIQFFHTQLQFDVFWGTLVDTNFHKHQVIDWSFLLSQSVMEGLIPKFETCGLYQFMGQRTDFNEMAVKQFLATSEIDIAAESITWMTGFKRYSASFADFAAAQQSGLWHPFLLGWIFILKINFEDFVQFNEPARLGIHQEVWRKQQDSKHHPAVINKIARVTHSFPRVVIRVKFEISSGT

SEQ ID NO: 63718 - protein, 149 aa, Zea mays
  Coding DNA Sequence Number=SeqID_20343
MGKNNKRKREPTPPSEEFGDSEYSEEEFSSEPEGSPAPVSPPASSDDSDDSQGIAAEVWTYIRAVERAGLEGSDESEYSSDEEDSDGGEEGEDDDDDDDDDDDGGSSGGGDGDGRGGTKGGSGGSGDSTRGSSRGSTRGGGGGRGRASG

SEQ ID NO: 63719 - protein, 184 aa, Zea mays
  Coding DNA Sequence Number=SeqID_20344
MNSRLFDLGRRSWAMRVAITAGVWRGRGRKALKPLLESSWRSGLGGHHPNHATLLADGEIETPEADDEQHTEEQHIEEEQHNEAEQHNEEVEHNEEVKHVTWDQAAQHHQPWDQNWEDLFFDGKGHDTQVNLTLGSLYHLHYPGIVKVSNGDTEDELRYRLPDGEDYMGHAERVFQNNAKKLVK

SEQ ID NO: 63720 - protein, 66 aa, Zea mays
  Coding DNA Sequence Number=SeqID_20345
MWPTVGTSEACSTLLDGVLTKRTSYNHGMEDPEPECNGIQFMHATGFLTTMRKLKSSAHYPGVMVI

SEQ ID NO: 63721 - protein, 266 aa, Zea mays
  Coding DNA Sequence Number=SeqID_20346
MSDLENYRKILGCENEEEDVVEEEVVPQAENPPVENNFYFDICGTDPEPPSTQGKPGFALENKMFCLKQGVMLHMGWGFYKEKSGNGESIMTVMGSTLEKMYLCQLASRHEGSSSGSNDPIGDLEARVERLRSELRHGSRERARDSCRIAEFSPEVSRLQQEIAEHDTTIDWAINSRSFTWDCEAKALARVAKLSASLENLQAYCNTLHEKVHVLYDRLHPSVPQEVAAMGVGPSGTADGGPDGELDLFGAPPSMNLADERSPKAD

SEQ ID NO: 63722 - protein, 59 aa, Zea mays
  Coding DNA Sequence Number=SeqID_20347
MEESGDKNDDEEGHDDSKDESISQQGTFFRIASVNDDDRGNETDDVGEEEILQIYTNLN

SEQ ID NO: 63723 - protein, 111 aa, Zea mays
  Coding DNA Sequence Number=SeqID_20348
MEVGWGASCGLASGNLGGGWLQGRRKIYMVKHPPVNKFTDFPSALAPPLSKNSKTRQFHHLQQHGFENPEYGVYFRKSYQTKEKDSQGYAAFRNQGKAYQDSKTFLQKSLL

SEQ ID NO: 63724 - protein, 149 aa, Zea mays
  Coding DNA Sequence Number=SeqID_20349
MGATKSKEQSESNIVTLTGDECAGVRGPRRQLHTETQPKGGVHTGGVFFLWQWKEEESRVRCHSVWPPGRSVGAPAADLLVAISVEGGYRGGGRSTWCAAADTRDPRVEAAADSRARAVTGVQARTVGESRCDSEGEDGPRREFLAHAG

SEQ ID NO: 63725 - protein, 104 aa, Zea mays
  Coding DNA Sequence Number=SeqID_20350
MVFDTTVNTFRYDMLPFDRLRLALCLRQVFEGTNTMRTSPTDRDYNMYVKSPSHDVKDYKPHRKRETVVNSEGEGHAGIMSSMSHYREGCVNGKQLRGECVAVR

SEQ ID NO: 63726 - protein, 102 aa, Zea mays
  Coding DNA Sequence Number=SeqID_20351
MHANKVQLPYDEHERALMLLHVLDRKVWEVKVLAIIESPNYETVTMDELFNKLKSIKIEHEVQSKIENPGAPTMALVSGGGSSSNPLPALFDLSTLLTITEE

SEQ ID NO: 63727 - protein, 105 aa, Zea mays
  Coding DNA Sequence Number=SeqID_20352
MVGGVMRTRRGRRSTRRMAEEAQQDDDVQQLVEQQAAVDATQTVSPTVARWFVPDARETVDNGVQPTHLRLVPLYGAPTWEGRVTVVITARVCWAVWACADPALC

SEQ ID NO: 63728 - protein, 241 aa, Zea mays
  Coding DNA Sequence Number=SeqID_20353
  Gene Ontology: Mol. function=transcription regulator activity; Cellular component=nucleus; Biological process=regulation of transcription
  Homolog annotation: Hit_ID=Q6Z9R3; Match level="QueryCoverage=89%, HitCoverage=86%, E-value=8e-50, Identity=57%"; Hit description=BHLH protein family-like
  Pfam annotation: Domain name=HLH; Domain location=162-209; Score =30.0; E_value=8.7e-06; Accession=PF00010.17; Description=Helix-loop -helix DNA-binding domain
MDFDMLNSHPEAQLELMKAMLQLEQLTAFPLPDHGAMMMVPSTPPSPGMPQATTHHHYFSSVPHHMSAGANGRGVYDDDHQYSQGTAAPCNGSARSSEYVAHAQGPVAGGGNSGESTAATSVGSSSSAMREMIFRVAALQPVNIDPEMVRPPKRRNVRISTDPQSVAARMRRERISERIRILQRLVPGGTKMDTASMLDEAIHYVKFLKTQVQSLERAAAASGRRPAAPAVADNGAMNGQW

SEQ ID NO: 63729 - protein, 215 aa, Zea mays
  Coding DNA Sequence Number=SeqID_20354
  Homolog annotation: Hit_ID=Q7XBD4; Match level="QueryCoverage=32%, HitCoverage=7%, E-value=2e-07, Identity=43%"; Hit description =Cinful1 polyprotein
MKPNTHYFTCGGHLFSAVIESDEPTVDGEARGTCGMGCLRRMGHRAGKDEVGRAECGRGFTGRAPKRAQGGKGVENDSGTCGMGRLWRMGHCAGKDEVGRAKRGRGFAGRASKRAQGGKGEENDRVGRALGAEDVPEPDRELVVFEAFFAAGLRLPVHRFVVDVLRKFEIQIHQLTLNAMVALAKTVSPTVAKWFVPDARGTMDSVYRFGSLRDA

SEQ ID NO: 63730 - protein, 245 aa, Zea mays
  Coding DNA Sequence Number=SeqID_20355
  Gene Ontology: Mol. function=electron carrier activity; Cellular component=mitochondrial respiratory chain; Biological process =electron transport
  Homolog annotation: Hit_ID=P00056; Match level="QueryCoverage=45%, HitCoverage=100%, E-value=1e-57, Identity=95%"; Hit description =Cytochrome c
  Pfam annotation: Domain name=Cytochrom_C; Domain location=12-111; Score=126.6; E_value=7.4e-35; Accession=PF00034.12; Description =Cytochrome c
MASFSEAPPGNPKAGEKIFKTKCAQCHTVEKGAGHKQGPNLNGLFGRQSGTTTGYSYSAGNKNKAVIWEENTLYDYLLNPKKYIPGTKMVFPGLKKPQERADLIAYLKEATAYFEKVTFRRMPESATATEEDGICTTTVTTVIFKAGDCDTVGGADVSIAGGRALCCTRDMARLEACTEGAVTYCAWNGSTGWPMVLTASILLGGLDAAFPDETVAVARTDMYTLLFVHCNASLADQQVATVKVA

SEQ ID NO: 63731 - protein, 128 aa, Zea mays
  Coding DNA Sequence Number=SeqID_20356
  Subcellular localization annotation: CTP_CleavageSite=73; ConfidenceScore=5.42e-01
MGGGLLAAAPALRSVLPLFGPPEQKSSSSPLLEQVTARRLSVFCLLRRPSPMEWGCSYLRRGNRSSVCNGTLNASVFVHCGCRGLNMDVCASESCFSRKVMSEVSVSRRRGSPSARSALLLTRTFTRP

SEQ ID NO: 63732 - protein, 133 aa, Zea mays
  Coding DNA Sequence Number=SeqID_20357
  Gene Ontology: Mol. function=receptor activity; Cellular component =integral to membrane
  Homolog annotation: Hit_ID=A7P6G1; Match level="QueryCoverage=60%, HitCoverage=15%, E-value=2e-15, Identity=45%"; Hit description =Chromosome chr9 scaffold_7, whole genome shotgun sequence
MKHQALIPIESRLEGGGRNDGESSDVPEVEQRLDLMVAVSLGWITFEVHFKSMDEYNERWRATWVIPTVWQLIFSLLCAFCLMWTPSQSATRPGPLSYVDNLAISVYKDATIIILRTDSDVYAKAAGDGGKRV

SEQ ID NO: 63733 - protein, 55 aa, Zea mays
  Coding DNA Sequence Number=SeqID_20358
  Subcellular localization annotation: CTP_CleavageSite=34; ConfidenceScore=5.06e-01
MAPSSHSHRLACPVLVLCAAPPLKPTRPPELKPRAAQPPSPTRRCRDPATRVRPH

SEQ ID NO: 63734 - protein, 137 aa, Zea mays
  Coding DNA Sequence Number=SeqID_20359
MSETGGSHLPMTIAILAKGRLGSEPQYEEAQRTRRNHITFCILFEYSSFFITIMKYNVSSSLISCEKQTIRIEFLSLQVTALVPTITGMGDHVSGRVRGKVHCQVQSGIRTLILIPIPSRRQPIPMDCCPQTNIIMI

SEQ ID NO: 63735 - protein, 229 aa, Zea mays
  Coding DNA Sequence Number=SeqID_20360
MQSLQVTGLTWHRATQQTLRQARRQKGDHRLTCSASDTGHLQKTSDLRVKSKDDGFYSQKAEEVLSKSTTVKGGPGIPGAGWERGRSLVGGVHGSATGTNQVGNGGSLTIGVAGRSGPLVSGGGHAQARYRGRALTDRALQAVTKSGERKGEADGWVLLVRTAVYHGSAHGASAMAGAGDSARGNKARGGCGFSSPNLSRTIIRGTLKTPNSQLVTPISIKLQRPDGCD

SEQ ID NO: 63736 - protein, 236 aa, Zea mays
  Coding DNA Sequence Number=SeqID_20361
MSSIPPPAGGLSAAIVVVARQWKEYHVVTAVEGHELKAPETEHRPGLERLLETAHLELDGKLLVNTQQAPTWRANCRRLETGGSLSRRPESEPWVGRSGVHRLPGLSPSPSPGSGGAEFAVFRVLARVRALGRAERSSPSSGAEPESEPWVGRSGVRRLPGRSPSPSPGSGGASDGAFGRTWLPVSITLSSGAAVEVAQAALSFCQTSQWSGEVTAVTSALPEGACQDKGVRPPLR

SEQ ID NO: 63737 - protein, 93 aa, Zea mays
  Coding DNA Sequence Number=SeqID_20362
MALAPCALPCRRPVDPAHQGAPALPSRTGDTRAAEAWDPPCAVHLYFPNVLNACSLYLDNEQSEVLECVAGDLPEQQPGEGKCPLTYYVLHTL

SEQ ID NO: 63738 - protein, 259 aa, Zea mays
  Coding DNA Sequence Number=SeqID_20363
  Homolog annotation: Hit_ID=A2XFR6; Match level="QueryCoverage=62%, HitCoverage=46%, E-value=3e-11, Identity=30%"; Hit description =Putative uncharacterized protein
MPPTPPQGIPAAGGDPDGDGDDDDAGGSSSHGTELSEEPEPEGWIARPITCDAAHGCHFHDALDTLLCRAFNRHTWSIEYCCVVYQHRCRLYPDQWEATCLVRRPDDDLRGAEAFSEHYSITERDTVKAAMQDAARRALSQYCSLFIGVADGLDLKYYPRRLTGSAGGVIASLVGEGNSRLNSMVNLAVVLNTELDHALDELGKVWAEVAELHAKCAACHYLDGGSPAPIGIQHPYRSPPHGRFDYGTPDCRTRIDLDP

SEQ ID NO: 63739 - protein, 188 aa, Zea mays
  Coding DNA Sequence Number=SeqID_20364
MARAGISRVDDVEVAKSARSTRSADHEQSREDASQKPYSPSPGAGSRRRRVPETCSPDRRCTSAVGTKGTKRRLSYEERRKRTGIWDDLEAGCRAPFIGPSPRPPVLIRPRKSRNQLRFYSDRFSAETIKLNFRLELQATPTHNLDNGLCLELQVLREWVSLEVMTSTWLPVVPFSGGAYTSYSKVSS

SEQ ID NO: 63740 - protein, 369 aa, Zea mays
  Coding DNA Sequence Number=SeqID_20365
MTVAGAREQRSRRQPSSRPIRGQRENPLSRCEDDAPVIRSSNGSRTRNGCPANYSPRRINSAAGQAALLAEAAGDASPSPKQPRQKRLRASLLIRGSKAGPPKGSTAASDRVGPTPTTGQRLAPEGFTVASDAERGMTRGDRVRQIIRRYFWACLWAPSRPPTNGAQTSTRITPLAAHRRHHVRRPSRRLGGCSRKPGSGQTVDSVNIPARELGPRPCTRATASSHEGTTRPAEALRKALRPRRSETTPPRPRGLHPAGALARTHRNKMQPRKAGPLAKKCDESLQASANTPFEARGLLSGTIIRGTLKTPNSQLKDSAACATPTTAPLDRVMLTGSQVLPKAPSEAPPDPGLGLGLRPGRRRTPLHPT

SEQ ID NO: 63741 - protein, 264 aa, Zea mays
  Coding DNA Sequence Number=SeqID_20366
MLACRESEKRVHLARLHAACMAARLFRPLGLGKSGGSLVTAGRLRAPRATVWLLLLGAGLHDMRDPAPAPQGRALERVGEDSARDGWGCKQGELPLKGGSKPGCDLGPTLSFKDVHHPRWGGCRAEPALYLPRGFVGHPLTRHSRERALTGPVGGSDFDNAGLVDGRRRHLQRVGFVGLAPGGPFCRRAAAAPCTREDHPRCRALLGRRSCSRVVLPLHRDGAFTWRPESLGSVGLAVRGSSSLVKETPRPLFDKPRPGVAILV

SEQ ID NO: 63742 - protein, 774 aa, Zea mays
  Coding DNA Sequence Number=SeqID_20367
  Homolog annotation: Hit_ID=A2X4D6; Match level="QueryCoverage=94%, HitCoverage=94%, E-value=0.0, Identity=56%"; Hit description =Putative uncharacterized protein
MSAEEGASASASAPAEAGAMVAEEAAARKRYEALVQVRAKAIKGKGAWYWAHLEPVLVPPPASGQPPKMARLRCTLCAATFSASNPSRTASEHLKRGACHNFTSPLAASAPVSTPPPPPPPLSIVAASSVVPISSFPPSSQRRHSTGGGRRKRHALAAAYAAVEAASSQHVVVGEPAIYSTPPTPPALPAPRHQVLSGGRGDLGALARLEDSVKRLKSPVGSPGSMLPRHQADAALALLADWFLESSGSVSLAAAEHPKLKAFLRQVGIPELSRADLTRGRLEARFAEARADAAARVRDARFFQLAADGWRDRVVTLAVNLPNGTSVFHHAVPMPAPPSSDYAEVVLLDAASSVAASADLRHCASVVADRFGSKALRDLESKHPWMVNLSCQAHCLARVAKDLARELPVVHSAATNCARMAAYFNTTPAVGALLRRHQVQELGHAGLLRVAAPLSNGDTEISAAFAMLDDVLTCARPLQLSVLEEPFKLLCVDDSTAREMVDMVHSAAFWAEVEAAHSLVKLITDMVKEMEAERPLVGQCLPLWEDLRGKVRGWCRKFNVDEGVALSVLERRFGRSYHPAWSAAFILDPLYLIKDVSGRYLPPFKYLTPEQEKDVDRLITRLVSPEEAHLAMMELMKWRSEGLDPLYAQAVQVRQPDPATGKMKIANKQSSRLVWETCLSELKSLGKVAVRLIFLHATARGFRCTPTMARWLTAPGASLRGVARAQRLVFVVANSKLERREPWSDDDRDAELLMEGDDDMLTDPTTAIVVPSSV

SEQ ID NO: 63743 - protein, 86 aa, Zea mays
  Coding DNA Sequence Number=SeqID_20368
MDIVLAFSLHGLRTEPAWTGNEPDYQTLNTNALVAQTRLSATRHYTHSGPEIRTLARRLRPTCFSTKSGFNVSPGDGSVQGFDAAC

SEQ ID NO: 63744 - protein, 264 aa, Zea mays
  Coding DNA Sequence Number=SeqID_20369
  Gene Ontology: Mol. function=drug transporter activity; Cellular component=membrane; Biological process=multidrug transport
  Homolog annotation: Hit_ID=Q5GAV3; Match level="QueryCoverage=71%, HitCoverage=14%, E-value=6e-82, Identity=83%"; Hit description =Putative integral membrane protein
MAAGFCGAQAALWRGRAGGAVEGACGRRYGGDARAALGAVEGACGRRYGGDARAALWRGRAGGALTKVGKNPPWYSATLTLALESQTRALLSELDKRLQLLDSKWESRVSTLESRATEAAQSLSEFSGTLRADVEAHLTAADASTDAKIGQIEADLGYRVAALESTAGIYEFWRPRVDASLEDLHSSVDWLRSEVSKMEIQWSRGARADGFHMPGVLGAHGSAPGRSSVAGDVADGSRFGHRNDSHHRDSGPWHPGADARYPVT

SEQ ID NO: 63745 - protein, 80 aa, Zea mays
  Coding DNA Sequence Number=SeqID_20370
MAEPFPALLRSIQAPSGLYPSRNLRRGLPFRLWWVQVRSLHDDSRGSLEDMVAGVTWSSILPPGWTVEWDPASAEEEHEE

SEQ ID NO: 63746 - protein, 249 aa, Zea mays
  Coding DNA Sequence Number=SeqID_20371
MTSHVSSDEGNAQSHTDGLAREGFPYILWEVLQGAGYTMPPQAEDTMEAIALHGLTTFCGFHPLELSTHPIGLFPAEKEDDPMWKDRVEHAKDIWAIYPGQTAHLTVRCMNALYRLQVMRREAMSHLMALLEATKITLDNREEIVVDLSTEMVEKDLQVEQLSNEIQELEELVGTRENTIEVLEDQLINTQQQLTEANQHLDMHHQEIQDMEANEDVDMEGGEEPASSLDTAGSGRPPSPESSVASFAH

SEQ ID NO: 63747 - protein, 118 aa, Zea mays
  Coding DNA Sequence Number=SeqID_20372
MTLYPLLLFEPLIISITISQPMFLLMIIKYRNRSIIDFGGYGGSVLDVVQSFGPNKCLENFFMQRFIDYIYDDDILYNPDIIINTIILNVNVRTVLNIEKLKQHSTNPQPSQHQFLKI

SEQ ID NO: 63748 - protein, 130 aa, Zea mays
  Coding DNA Sequence Number=SeqID_20373
MPLPVSLRQRRRRPAVFALCLGRRRTKTYGEVAPSHGVARHWSPRAIRPVITGPALSLRSTGLICKALEDNHNFPPGFAPPEGTNATEDGEVIGVSAEEQLQLRALRIKNRNLQKKKEILEAESRLEGGE

SEQ ID NO: 63749 - protein, 303 aa, Zea mays
  Coding DNA Sequence Number=SeqID_20374
MNALSREGCSHYEVFDRSDEDFGREIFKVEDPVVKDSAGALFDRMWGPHGREVVRERSDRARDQAARAEVVEDFGPLNSVRPEAEANPVVAEAEVDPAPPPETAPTATAAIVSGGGSSPTTVPRAEDPPKTATEPAAEDPTAAAGSSQVQGFGPTHATATANFVAASTVDAGNESDESASKFSDFGDSGSSVEWMEESSDEDLDYFAALDVAAAEASPRVADAEVVPSPSAGRRRRRAVAKRRVSEVDGGRLRVDRAGKQELLSSPARASVGEGELRSLFEGEELRIMLFNYREMGIIPKVEP

SEQ ID NO: 63750 - protein, 171 aa, Zea mays
  Coding DNA Sequence Number=SeqID_20375
  Gene Ontology: Mol. function=kinase activity; Cellular component =ornithine carbamoyltransferase complex; Biological process=amino acid metabolic process
  Homolog annotation: Hit_ID=Q6QP54; Match level="QueryCoverage=22%, HitCoverage=13%, E-value=5e-10, Identity=84%"; Hit description =Putative kinase
MALPVDVAGLCPRLGDVEAPPKPGSSLSSMAEAESKPLGRARRRSSAEAESEPLGRARRRSSAEAESEPLGRARRRSSAEAESEPLGRARRRSSAEAESEPLGLGEAEFVVFRGLSPSPSPGSGEAEFVVFRGLSPSLSPGSGEVEFVVFRGLARVRALGRAERSSPSSGA

SEQ ID NO: 63751 - protein, 351 aa, Zea mays
  Coding DNA Sequence Number=SeqID_20376
MPSSSSSAADTPPAGASSEETLSNVAAEELRAGDTVEFGVSRMSSVRVQDMQQLGYFGGGVARVPRTEEVPEPEGELVVFEAFFVAGLRLPTHRFVGEVLRSQPALAAKPAARGSSKMPEGVKAAGAGGTKSASAEAAKARELPSLGKRVADFGTDISVDDYLVGSGEGQLVVVPPVVATTVSATVPGVKGSALSAGGDISALTAVKDEAGTVSRRLRDALQRLSQAADFADRVASGALTADVSAEVERLRAQHADAVREKSAADSKCRKLAEKVAALDGVRTDLRRQLVEERREANQAIAKAQAEANLARVEGSLANQRAEEWEVRFNALQDRMERAEASTCSEVERTRK

SEQ ID NO: 63752 - protein, 294 aa, Zea mays
  Coding DNA Sequence Number=SeqID_20377
  Homolog annotation: Hit_ID=Q6AT34; Match level="QueryCoverage=34%, HitCoverage=32%, E-value=1e-15, Identity=50%"; Hit description =Putative uncharacterized protein OSJNBa0001A14.13
  Subcellular localization annotation: CTP_CleavageSite=64; ConfidenceScore=5.69e-01
MSRAAQTGGAGAGGGGAARLKASPRALFSCGIFSTCTHPALSPTATPNNNVVSGSGGGGSGTPCAEASTALPAPASASSSGGDALLGAEEKFAAGEVVAALRAVEREMEAAARPVPAGVVAGVVAAVREPLTAPARLAAKALLAVLLEEGNREAAVEAGAASAAVEAVAASGPAGATAERALAALELLCTAPGGAPAVRREALAAPVLARAVEGMAGRGRECAIGVLAAIYGAGGEDDRGASSSPPPPPEVVKAVVAAMQGECSARGRRKGAQLLRALQQAGRLGLAWDGVGDQ

SEQ ID NO: 63753 - protein, 79 aa, Zea mays
  Coding DNA Sequence Number=SeqID_20378
  Gene Ontology: Mol. function=iron-sulfur cluster binding; Cellular component=mitochondrion; Biological process=iron-sulfur cluster assembly
  Homolog annotation: Hit_ID=A6N1A2; Match level="QueryCoverage=73%, HitCoverage=63%, E-value=5e-20, Identity=82%"; Hit description=Nifu -like N-terminal domain-containing protein
  Pfam annotation: Domain name=NifU_N; Domain location=3-67; Score=7.8; E_value=3.5e-07; Accession=PF01592.7; Description=NifU-like N terminal domain
MPGSLFISAVTASEWVKGKQVEEVVAIKNTEIVKHLSLPPVKLHCSMLAEDAIKAAVKDYEAKKGKKMAKAEEQDTPCP

SEQ ID NO: 63754 - protein, 244 aa, Zea mays
  Coding DNA Sequence Number=SeqID_20379
  Gene Ontology: Mol. function=transporter activity; Cellular component= integral to membrane; Biological process=transport
  Homolog annotation: Hit_ID=A2WR73; Match level="QueryCoverage=56%, HitCoverage=29%, E-value=2e-51, Identity=72%"; Hit description =Putative uncharacterized protein
  Pfam annotation: Domain name=DUF1084; Domain location=5-242; Score= -79.7; E_value=1.8e-05; Accession=PF06454.2; Description=Protein of unknown function (DUF1084)
MSGIFAPSAVGLANAVTAGWANVGSAAAQLVMPLAYELVLRLGMPITVAWRVTYLLPCALLITMGLAVLAFPYDFPRGAGVGGGAKTGKSLWKVVRGGVGNYRAWVLALTYGYCYGVELIMENVVADFFRKRFHLPMEAAGASLSSSSKRSFGASSDATVSSTPSKLQALRFAEDLSLPSGHFLPMCFNAFDEEADLDVLDHPVLNLFYYLQLVEILPSSLVLYILRRIPAKLRLSQYHPVSSS

SEQ ID NO: 63755 - protein, 289 aa, Zea mays
  Coding DNA Sequence Number=SeqID_20380
  Subcellular localization annotation: CTP_CleavageSite=21; ConfidenceScore=5.01e-01
MTVANAREQRARRQPSSRPIRGQRESPLSRSNGRRFAFAETIASKKAPSLLTDQGFEGWPPEGFNSRLRSRGPYTHYWLAPEGFTVASDAERGMTRGTLGHFRDRRERSCNGIPSEGGIEPSDPVARGPGPADHPQLTGDTMFGAHRGLGGCSRKPGSGRTVDSVNILARELGPRPYTRATASSHEGTTRPAEALRKALRPRRSETTPPRPRGLHPAGALARTHRNQMQPRKAGPLAKKCDESLQASANTPFEARGLLSGTIIRGTLKTPNSQLVTPISIKLQRPDGCD

SEQ ID NO: 63756 - protein, 199 aa, Zea mays
  Coding DNA Sequence Number=SeqID_20381
  Subcellular localization annotation: CTP_CleavageSite=45; ConfidenceScore=5.19e-01
MQPGRAPPPAVTQDGDLRLDGGGKRAGLRPLPLPRPQGFSSSRPRWRMRRVGGLPPWGSVALFFPERLGENGILQLHGDFLQPCRESTRPEATAEAASSLGARVVIAVAGSGGDGPPVGPRSLRGLPNLVGLFVPRGTEPEFRLRRRFECRYFCSLRLSGPEHESLGSVGLAVRGSSSLVKETPRPLFDEPRPGVAISV

SEQ ID NO: 63757 - protein, 621 aa, Zea mays
  Coding DNA Sequence Number=SeqID_20382
  Homolog annotation: Hit_ID=Q6JAD6; Match level="QueryCoverage=95%, HitCoverage=96%, E-value=2e-92, Identity=47%"; Hit description =Putative uncharacterized protein
RQDRMPCTKNVSAPGGGDDEDPPHPFRQVKGKTAYLEQQEGRKKRRLDRAARAALAAAAAAEQAERGDQLRISSYQIAYRVRRLASWPRSSAPTTPTTATTPPPTSPAPDTPVPSTTSAIPTTSTAPASTAPSAPLFAPPTPPALFRERDETEVQPLAAYPRLFDLQRATAAWVRRFRHVPVETWLPAQRDPTTVDLFSTKIQESFFRAQMSTQIALRVHRLLDLPAFLLATGADFEVHLSYLPGLLTLLSTSGKYVEEWVQVFYASVWIDPDHQWMRFRFEREDVTLHASQIRQLFGFNESSTRLHSLCYGTSDPPRVLVALMAELLLLMRRTLLPQMGYREAATHIQLWLLGALVSHSEFDVVDFLICEIEDTVLDAPKDPVPAPAPVIDTQADDTAFHQFETQGAAVADDDDDYDDDDDFGVPPPPPMPPRTHDHEAGSSSAAPAAPPAIDPALAAILQTLTQQQAHLAAVQQQMAFMTLMLQHTGVSIPPVQSAPPPPLQAAIVPAIQAGPPLPIVGPSSSPLRTVTMVFSSPVISSVSTQPLVPPAPVVTTAVVAVSVTSSAPAAPAAQPQSESVLAPASTTDPGSETDSDPQLAFALLPRLRPDAPPPPPSSSGV

SEQ ID NO: 63758 - protein, 405 aa, Zea mays
  Coding DNA Sequence Number=SeqID_20383
  Gene Ontology: Mol. function=cysteine-type peptidase activity; Biological process=proteolysis
  Homolog annotation: Hit_ID=Q8S456; Match level="QueryCoverage=85%, HitCoverage=42%, E-value=1e-169, Identity=82%"; Hit description =Putative uncharacterized protein 163K15.6
MAGDNDQLHGIFRGRDNSRQMYIKENLQEPGMDEDYQKLNIRCIPYDVIVSTWIMSDRQRDAIARLGFQSIFDLRTDALESRSLIRWLMDKLDPDDMTIRPGAGKELKITKETVCLILGLPSAGGGRDFTDWYGEIDATSKLRRDLNICKEEFDVVKLQDKLVFGNDDELSIRCFFLILFNRLIFPSASWGITNNEVLMTTNMDRMAEIDWCQLVYTDLCDAANRWHKRNRTNITATVYGCSLIILIYYLDHLHHPASPENKYGTPRIKYFDNETIRDLARGDRRGPRQTGEPFGRAEMFRSRTETCYVIAPERPISEVFNIYVPRIKHLIGNKLKCLPSQHRPMFESMFDAHDKEVDKYCASLQQIHQMLVSKQIELSETFGGIERITMPKRGVNWAFLKINTN

SEQ ID NO: 63759 - protein, 191 aa, Zea mays
  Coding DNA Sequence Number=SeqID_20384
MRCGSQLVDSYINDRIRDMRRYAKSAHFDSPMRAEQRRLKAANEKRAHDAREWEAARAKKQMLDNLADRLKGKIGYGVNYMADEAHARYEEDTSRLSELIVLAEAGLRAQEEDKFMSQAAEEVEAAYYKQKSNEAEAELFSQAADEAEANYYKRTADKCDAGQCSKWNEVVVEDCAMDDSEDELLIDCDSD

SEQ ID NO: 63760 - protein, 214 aa, Zea mays
  Coding DNA Sequence Number=SeqID_20385
MWRGPRAATRTEAERTRKQLMDSYHELGARTGDFEVSDREPGLCCLEWGCRHFEVFDQADEDFERNIYKVEDPIVKESAGAIYDRMWGPHGREVVRERAKTARAQAARGERVDDFGALNSVLPDPESNPAEAVSEVALEPPPETAEGVPDAPAAAAAGEGPPLETAENVPDAPAAAAAGEGPPPTAVPRVEDPATVAVEAMAEAPATAGSSQVA

SEQ ID NO: 63761 - protein, 38 aa, Zea mays
  Coding DNA Sequence Number=SeqID_20386
MATALCASTLALVWLVLRFCLDGDHARDPTVQRENNIF

SEQ ID NO: 63762 - protein, 267 aa, Zea mays
  Coding DNA Sequence Number=SeqID_20387
  Gene Ontology: Mol. function=transferase activity; Cellular component= membrane
  Homolog annotation: Hit_ID=A2WYG6; Match level="QueryCoverage=88%, HitCoverage=91%, E-value=2e-45, Identity=66%"; Hit description =Putative uncharacterized protein
  Pfam annotation: Domain name=Exostosin; Domain location=58-259; Score= -17.5; E_value=3.4e-08; Accession=PF03016.6; Description=Exostosin family
  Subcellular localization annotation: CTP_CleavageSite=48; ConfidenceScore=5.44e-01
MGAPSSRALALGAAFLLLLVALPSAFLYLTSSAATRATLLDLKPFSARCAPAVAPLRVFMYDLPARFHVAMMGAAAGAGFPAWPPSAGGIRRQHSVEYWMMASLQDGGAGPERGREAVRVRDPDAADAFFVPFFSSLSFNVHGRNMTDPDTEADRLLQVELVDILWKSKYWQRSAGRDHVIPMHHPNAFRFLRAMEGKIRSKLEKILKGKEGVRFEDSIATGDGINIYPPRKGDAVNMIWRQVRHKIPAVNLAIHRNRRLKIPDWWG

SEQ ID NO: 63763 - protein, 65 aa, Zea mays
  Coding DNA Sequence Number=SeqID_20388
MARDVNGNPIPANPWGIPLLGYMYVTKIIPMGMGYGTKSPPLGKRTAVTTMDSQAPMNSDGDQGR

SEQ ID NO: 63764 - protein, 181 aa, Zea mays
  Coding DNA Sequence Number=SeqID_20389
MKQCQVEDANSSSDGHEEEILGGGDNSTPDPSSIVKGKRKVLHDSPKPKKKRDVKEEYMKRLVKAYESRSLCSNMSITSFENDPVRKEVAAQLQQVIEDGSPEGSDLHFFATHLLMEKRYRDLYVFEQCHCVNHIGFQQMSEPDTDSYDDERDGELLVALFAVDIWGSSPSGFSRRTMVVT

SEQ ID NO: 63765 - protein, 88 aa, Zea mays
  Coding DNA Sequence Number=SeqID_20390
MDESCTQLLSSDPMINLNTTVFFFVYSFPFARNLHNLESLALTIRIKVKALDVRCTKGLQAELNTFGNSQRRSAMSGRSVRCSKEERL

SEQ ID NO: 63766 - protein, 251 aa, Zea mays
  Coding DNA Sequence Number=SeqID_20391
  Gene Ontology: Mol. function=mannosyl-oligosaccharide glucosidase activity; Cellular component=endoplasmic reticulum membrane; Biological process=oligosaccharide metabolic process
  Homolog annotation: Hit_ID=Q8RZJ2; Match level="QueryCoverage=97%, HitCoverage=27%, E-value=3e-81, Identity=63%"; Hit description =Putative alpha-glucosidase 1
  Subcellular localization annotation: CTP_CleavageSite=35; ConfidenceScore=5.18e-01
MTGGGSSTRRPAAVARSRGRPSEASEPDPGARRAAAAAAQRRGRGNPGPLRLMDVRPRTLAYFVVASFALVSVTFVVYTGGWWEEVEGEGAATLRKVMRSVTPLPAPRMMDLPQFQNNHKESLYWGTYRPNVYLGIRARTPLSLIAGLMWIGLKNGQYFLRHVCQDSDELRTFGWTAHNGRDYGRQVLVDHGLFLTTSFLKEKGESSGYGGDWAVRLDANNERSGLSDAEESPSHLFFYIADETGNPTNQA

SEQ ID NO: 63767 - protein, 241 aa, Zea mays
  Coding DNA Sequence Number=SeqID_20392
  Gene Ontology: Mol. function=mannosyl-oligosaccharide glucosidase activity; Cellular component=endoplasmic reticulum membrane; Biological process=oligosaccharide metabolic process
  Homolog annotation: Hit_ID=Q8RZJ2; Match level="QueryCoverage=74%, HitCoverage=22%, E-value=8e-93, Identity=82%"; Hit description =Putative alpha-glucosidase 1
  Pfam annotation: Domain name=Glyco_hydro_63; Domain location=1-241; Score=-390.6; E_value=4.5e-07; Accession=PF03200.7; Description =Mannosyl oligosaccharide glucosidase
MQYCSYQQQELVNLQSNEKVSCDLSALKTKCPLMIGTHIPLHLPDIIFDRKILVNNLVDSKELSVGRAALSSLLGGVGYFYGQSKIALPKGFTQKNGDKYISYWPAALYTAVPSRSFFPRGFLWDEGFHQLVIWRWDVHISMDIIGHWLDLLNSDGWIPREQILGAEALSKVPEEFVLQYPSNGNPPTLFLAIRDLASGIHAQQFSDEEAEKISSFLERAYIRLNAWFQWFNSTQSGVVLS

SEQ ID NO: 63768 - protein, 173 aa, Zea mays
  Coding DNA Sequence Number=SeqID_20393
MVDEVQINTKNQRKYKRKKTWLDNQDSVQSGCTGQCSVRQAGVCSIGRSREFIGVVRLKFTGLSGGAPDCPVSQRSAAQSARDGGRANGLMGAPDSVRCANGSKSSTVGCANLERRSAPNSEQGMSGGAPDCPCFHLDPYCKGERLQVVEIPRKWERVKKEEHRGIQVDHWIT

SEQ ID NO: 63769 - protein, 343 aa, Zea mays
  Coding DNA Sequence Number=SeqID_20394
  Gene Ontology: Mol. function=DNA binding; Cellular component=nucleus; Biological process=regulation of transcription
  Homolog annotation: Hit_ID=O04109; Match level="QueryCoverage=100%, HitCoverage=100%, E-value=2e-27, Identity=60%"; Hit description=Myb factor
MGRPPCCDKEGIKKGPWTPEEDIILVSYIQEHGPGNWRSVPINTGLMRCSKSCPPPLGPTTSAPVSGAATFTPHEEAIIRPTSSPCSATGGPPLLLTSRREPTTTSRTTGNTHLKKKLKKQQAIGAIFAPPDSSSSSSSIVVPPAATTTTTTVDHHHRDMLGANLLVSSKDTYYYARPPAEAAAVARRSPFAADGDSSSSSYASSMDNISRLLTGFMKQQHDDAAAAADTKPPAPAAQVNSPPPAAFLSPSFHHHMSAGTGSGTPPAASAAYFNDMMPPPPPQQQAALMGGHGDYDDGPSSRQHLQPSPLSPIEKWLFEEAAEQVGDLMDLSEDCCSSVPMMF

SEQ ID NO: 63770 - protein, 453 aa, Zea mays
  Coding DNA Sequence Number=SeqID_20395
  Gene Ontology: Mol. function=nucleotide binding; Cellular component =intrinsic to membrane; Biological process=defense response
  Homolog annotation: Hit_ID=Q8H6U6; Match level="QueryCoverage=95%, HitCoverage=38%, E-value=1e-104, Identity=46%"; Hit description =Putative rp3 protein
  Pfam annotation: Domain name=NB-ARC; Domain location=129-432; Score =222.7; E_value=8.5e-64; Accession=PF00931.13; Description=NB-ARC domain
ELLAQGTLYRKMTGVEAAAISAVASGILKIVGNKLAPLVIRKYSSIVGVEKDLQKLQLKAERNDASGDGDFVSRYMRRKPESFIFQCKAAKKIKAIKKRFAAIVKQRADINIIATSLTGSGHSISHMKKTAVGLPSVPTMDATLILGREMEKHQLISKLTETNDQQKTMIVSIVGLGGSGKTTLAKLVFNDGTTIAKHFKVRLWVHVSQEFGFESIVGKLFEAIAHGKSESHNLQHMVRRISDELTEKVFLLVLDDVWTKDRMELEQFMVLVRSGASGSRILLTTRNSDVAEAVESSYLINLPLLSLSDSWQLFIQSFGTTVEGLDREFLDVGNAIVNKCGGVPLAIKVIAGVLHDKKRIQEWQAIRDSNLFDAEGKERRVSACLRLSYLNLPSHLKQCFTICSLFPKGHKIDKERLIDQWIAHDMFASADAVDYLEYTGYECFSSLVQMSFL

SEQ ID NO: 63771 - protein, 978 aa, Zea mays
  Coding DNA Sequence Number=SeqID_20396
  Gene Ontology: Mol. function=nucleotide binding; Cellular component =intrinsic to membrane; Biological process=defense response
  Homolog annotation: Hit_ID=Q8GS26; Match level="QueryCoverage=74%, HitCoverage=53%, E-value=2e-97, Identity=34%"; Hit description =Putative rp3 protein
  Pfam annotation: Domain name=LRR_1; Domain location=112-133; Score =12.0; E_value=1.8; Accession=PF00560.24; Description=Leucine Rich Repeat
  Pfam annotation: Domain name=LRR_1; Domain location=135-157; Score =9.0; E_value=6.6; Accession=PF00560.24; Description=Leucine Rich Repeat
  Pfam annotation: Domain name=LRR_1; Domain location=159-181; Score =9.6; E_value=5; Accession=PF00560.24; Description=Leucine Rich Repeat
  Pfam annotation: Domain name=LRR_1; Domain location=18-39; Score=6.2; E_value=22; Accession=PF00560.24; Description=Leucine Rich Repeat
  Pfam annotation: Domain name=LRR_1; Domain location=384-407; Score =3.0; E_value=86; Accession=PF00560.24; Description=Leucine Rich Repeat
  Pfam annotation: Domain name=LRR_1; Domain location=41-62; Score=7.0; E_value=16; Accession=PF00560.24; Description=Leucine Rich Repeat
  Pfam annotation: Domain name=LRR_1; Domain location=457-482; Score =8.6; E_value=7.8; Accession=PF00560.24; Description=Leucine Rich Repeat
  Pfam annotation: Domain name=LRR_1; Domain location=537-559; Score =5.6; E_value=29; Accession=PF00560.24; Description=Leucine Rich Repeat
  Pfam annotation: Domain name=LRR_1; Domain location=585-607; Score =4.7; E_value=42; Accession=PF00560.24; Description=Leucine Rich Repeat
  Pfam annotation: Domain name=LRR_1; Domain location=609-631; Score =4.6; E_value=43; Accession=PF00560.24; Description=Leucine Rich Repeat
  Pfam annotation: Domain name=LRR_1; Domain location=633-654; Score =11.3; E_value=2.5; Accession=PF00560.24; Description=Leucine Rich Repeat
  Pfam annotation: Domain name=LRR_1; Domain location=64-86; Score=7.7; E_value=11; Accession=PF00560.24; Description=Leucine Rich Repeat
  Pfam annotation: Domain name=LRR_1; Domain location=656-679; Score =15.3; E_value=0.24; Accession=PF00560.24; Description=Leucine Rich Repeat
  Pfam annotation: Domain name=LRR_1; Domain location=681-703; Score =13.7; E_value=0.68; Accession=PF00560.24; Description=Leucine Rich Repeat
  Pfam annotation: Domain name=LRR_1; Domain location=705-738; Score =2.3; E_value=1.1e+02; Accession=PF00560.24; Description=Leucine Rich Repeat
  Pfam annotation: Domain name=LRR_1; Domain location=88-110; Score =3.4; E_value=73; Accession=PF00560.24; Description=Leucine Rich Repeat
  Pfam module annotation: Pfam domain module=LRR_1::LRR_1::LRR_1::LRR _1::LRR_1::LRR_1::LRR_1::LRR_1::LRR_1::LRR_1::LRR_1::LRR_1::LRR _1::LRR_1::LRR_1::LRR_1; Domain location=112-133::135-157::159 -181::18-39::384-407::41-62:...
  Pfam module annotation: Domain location=:457-482::537-559::585 -607::609-631::633-654::64-86::656-679::681-703::705-738::88-110
MESMFVATIPNAIFQAKHLKYLEISRLRCEVLPEAISNFWTLQALHLASSDLLDLPESFGKLTRLRTLNLSKSEKFKRLPDSIGDCQMMSTIDLCGCNSLTVLPDTIGRIERLRVLRLSYTKIERLPSNIITLRNLECLDLCTCQELVELPEGIGNLDRLQVLNLKGCKSLGGMPVGVGRLSRLQKLGLFVVGDSEKFAGISELANVPRISEELSIRGIPHGMDPDDAQMACLQQKTSLQSLDLEWMAHKACEVDLEWMAHEAGEANMDLERMAHDAGEVDLDLERMALEAGEVDLDSEWMPLEAGEVDTELEQAVLDGLEPPSQIKELKINGYSGSQHACWMQNQVSGRRGPQELVHFPFLRVVKLSDFPNLKHLDGLVELPCLEDLELRAMPCLESMSGGPFPSLSRLELDTLPSLGEVWLVAETTILPSGEGAGHNVHDTGTPGSGRQVRVGGRLSYLFIQDCPRLRLRPHMPSSLESLHLSESSEQLLQLPADQCLGSSSSYSNFSHLKKLGLWGMTGLGSGRRWELLQHMTALESLEINSSLVLRELPEGLRSLTCLQSLIVFACSDLLVLPEWIGELASLQQLCIWTCDVLSSLPQSLGQLTSLQMLSIEACYELHRLPERIGELCSLRKLRIRDCPRLACLPQMSGLTSLQELLISDCPGLTSLPQGMMSGLASLEKLIVSDCPGIKFLPQDIKGLTTLMELRIRRCPDLERRCETGKGEDWHLISHIPNLRICQADVRPSRKQRQAAALRPCGSAPRRDQAANSLQPAAGWDKTTGQPDKQISGAPERVAGAWSDGAWRIRGSERLEAWRLERRQERPAAERAVVRDAGCAAAILGHTGPSAPVPNGFTARPRVPSGSGRTPGSLEAKLGRTLSYSNLGQIALPPTVSHHCANHRGKTDNSKSPPLPRSASGAAGSSASPDPSLGLGGNRRHARPRPRPQPQPREEVFASPDLGLGLSLGLGRRSSPRPT

SEQ ID NO: 63772 - protein, 382 aa, Zea mays
  Coding DNA Sequence Number=SeqID_20397
  Gene Ontology: Mol. function=zinc ion binding; Cellular component =intracellular; Biological process=positive regulation of I-kappaB kinase/NF-kappaB cascade
  Homolog annotation: Hit_ID=Q2QWV7; Match level="QueryCoverage=100%, HitCoverage=92%, E-value=1e-139, Identity=64%"; Hit description=TRAF- type zinc finger family protein
  Pfam annotation: Domain name=zf-TRAF; Domain location=214-269; Score =46.7; E_value=8.3e-11; Accession=PF02176.9; Description=TRAF-type zinc finger
MDVPAVADPGTERGEGALIQCPYCDSEAMHKLAQILLPGLAAVCVDGTTGDPFRSPSAVAVDLRKEMVDYITQRSDSFIADALIESEANQDAPGAEVPDDPFETVSVFMDDFASTKRNIIGHVSGWLLTDSRDDKIDDFVQEMEATKFWPLERREAVAELLLKNVDLKTRFHCPEKYENEERLEDHKAQCSFRPVACANDGCRAKVSVRCVKDHDAACVYKLLQCEQGCDKRLLRRDMDRHCVTVCPMRPMKCPFGCDSSFPDRDLERHCAEFLQPHLLMVLKAIHKKGRSEQDLKDLAQKLEKVLFFSSPLIDLLFQLDSALTVLFASEIRTVIVMRFSFNREAQFGLFDGDGKLAKALDARPLTNVVKDLEAKMKGGQSS

SEQ ID NO: 63773 - protein, 152 aa, Zea mays
  Coding DNA Sequence Number=SeqID_20398
MGKGNKRKREPTPSSEDFGDSEYSEEEFSSESEGSPAPVSPPASSDDSDDSQGIAAEVWTYIRAVERSGLEGSDESEFSSDEEDSDGGEDEDDDGDDDDGGDGDGDGSNGGGGSGGKGSTRDSSSTGSTRGGSSKGSTRGGGGKGSSSKASG

SEQ ID NO: 63774 - protein, 295 aa, Zea mays
  Coding DNA Sequence Number=SeqID_20399
  Gene Ontology: Mol. function=structural constituent of ribosome; Cellular component=ribonucleoprotein complex; Biological process =translation
  Homolog annotation: Hit_ID=A2ZB00; Match level="QueryCoverage=31%, HitCoverage=59%, E-value=3e-23, Identity=60%"; Hit description=40S ribosomal protein S16
  Pfam annotation: Domain name=Ribosomal_S9; Domain location=178-272; Score=36.2; E_value=3.8e-10; Accession=PF00380.10; Description =Ribosomal protein S9S16
MTNSGRHRIDSPSNPSTDDPPASPRGTAAHHVLPDADRGRDWGSGETEGTACWLYPRSRGSRTVRREVAKRVERSPSSPAKEAVRAVQRRDELLSVEGGATSHRVTGARVEQRKMRLEAGPHAQRGREIRARSEPDPWGPYVSAGGLLLPPSNFHLCFLPVLPAADNFFPCPPPPPASRQIHIANPNAAAAKTQQPPLQQCLAGRSRFKDVDMRVRVRGGGKTSQVFAIRQAVAKGLVAYYQNYVVEAAKKEVKDVFSRYQRTLLVADPRRCVWGMDIPGPTKEIKDLTKGPRTQ

SEQ ID NO: 63775 - protein, 174 aa, Zea mays
  Coding DNA Sequence Number=SeqID_20400
MVRERRTLTNTMSKNTRDTRFIPRFGHTTKVPYFLVEAPTKSRVSFNPNPPFADHKVWEVYIKDPPKAGSRWEKSGKNRLNRFTNRLNRFPPGETRFTNLLSRRLDRIQNRLSREKIRLNRFSQKICNDFSDSSDCQTGQSRDGRGTVPKPVEPVLGPVEPVSKAEKQVLNFLK

SEQ ID NO: 63776 - protein, 754 aa, Zea mays
  Coding DNA Sequence Number=SeqID_20401
  Gene Ontology: Mol. function=catalytic activity; Cellular component =endoplasmic reticulum membrane; Biological process=metabolic process
  Homolog annotation: Hit_ID=Q5W6W7; Match level="QueryCoverage=100%, HitCoverage=100%, E-value=0.0, Identity=82%"; Hit description =Putative long chain acyl-CoA synthetase
  Pfam annotation: Domain name=AMP-binding; Domain location=139-647; Score=258.9; E_value=1.1e-74; Accession=PF00501.19; Description=AMP -binding enzyme
MGEVSDDNSNMSFLKRIATSDVPLLKEYGVNGVVVALLLAVVTPVLLSMMFGKKTKQRAVRADVGGEEGFAMRNNRFSSLVEVPWEGATTMSALFEMASKKYSRQRCLGTRKLIKREFMESSDGRKFEKLHLGEYEWDTYTEAFNRACNFSSGLIKMGHDLDSHAAIFSDTRAEWIIAAQGCFRQNLTVVTIYASLGEDALVHSLNETQVSTLICDSKQLKKIPAISYKLQSLRRIIYIEDEPVEAETLNQVKHLTTLSFTEVEELGKTSHVDARLPSGSDTAVIMYTSGSTGLPKWSKLSLDIAYKICIPNSDASALKCGVMITHGNMVATTAAVMTIVPNLGMNDVYLAYLPLAHVFELAGETVMLASGSAIGYGSALTMTDTSNKIKKGTKGDVSVLNPTLMISVPAILDRIKDAVFKKDHELAENGGLTIKAVLIFSYKRNIAAIEGSWFGSWAPERMLWDHIIYKPIRAMLGGRLRFVLCGGAPLSSDTQRFMNICLGVPVGQGYGLTETCAGAAFTEWDDTSVGRVGPPLPCCYVKLVSWEEGGYKISDSPMPRGEVAVGGHSITKGYFNNEAKTNEVYKVDERGIRWFYTGDIGQFHPDGCLEIIDRKKDIVKLQHGEYVSLGKVESALATSNYVENIMVYADPFHNYCVALVVPAHQALEKWAQNSGMNYEGFGELCQNDRAIKEVQQSLSKAAKAARLEKFEVPAKIVLLPEPWTPESGLVTAALKLKREQIKAKFKGDLDKLYH

SEQ ID NO: 63777 - protein, 117 aa, Zea mays
  Coding DNA Sequence Number=SeqID_20402
MVFTVSCWSVPTTYLAATGARYTLQRCPLWCMPNHGEHPLCKIDSCMKYSELKWVQLEGPTYNVCYTFLQIDVMSKFFKLMMAYCVLEVLRPLYESPKIPAQKITVAICVIDQFRCY

SEQ ID NO: 63778 - protein, 246 aa, Zea mays
  Coding DNA Sequence Number=SeqID_20403
MGKPVPSLLMLLLSRGGVPLDSPTRWQDYNGSSSLISCEKQTIRIEFFYPCKNRAHRLGVQCLTDPDCRRAVTALVPTITGMGDHVSGRVRGKVYCQVLWCRLWCWIWGYLLSSSLLRHEDIFFVSKAGVLVGGECTGQTTAIWFNPRARGVMNSGDRGLASPAKQASIPRSGSFTEARARDRAPAGRWRDAGHAGARAGVLWRAQSASNTWLVASAHVLPSAERPKRTNLTLSPVGDLFPAPRAT

SEQ ID NO: 63779 - protein, 232 aa, Zea mays
  Coding DNA Sequence Number=SeqID_20404
MTNGQVERANVRQAVDERATLGGLESEDDAEPIHGFLATLSSLWGRGRPTHRLRIRFPEDKGVRRPKQPDQPRRFTGPARRSSGRGLTTLGAVSAVYAMLPRPNGSAPRLPGGRLGTSAAARRPRTPQAHSSLGRAVHHRQDFEARDIQAGQRSRRGLQQRLEHPTVQTSAEGAAAPSVSFPPSAESGPASDGDTGGRISTSKEDASTALRPSRPGSPQGFQPEQTPRLAAP

SEQ ID NO: 63780 - protein, 341 aa, Zea mays
  Coding DNA Sequence Number=SeqID_20405
MAGGGELVGTGVFAWGVRRSEVWAAAHQRVISERHNVRSAYSIDILRCFLGNARVMAARLIRNKWGGRAAQRPYVRLHPLVYVTGSRPRGSIGSPPERVAESYTIWSRHVSAPDPRLALIKASVFFVPESWDPAESGPDPTQRGPDPILGVWIAPAVVLDLIRRVPTVAPGPTSGDDTSLQVGPKLDWRLVCRFRAFVDKPTPKEYDSWARAPMSDTGPLFSAEMKRRTSTGGGSLLVWRFAFLALGDSHTSCMTCGLEPPCQRLGCFGAHRARFSAASRGASRRVFLEKGFTPRAAVTLLHSLHSLRPFVFELSAPLCILVPLLSAAVVSMASLGQPDRF

SEQ ID NO: 63781 - protein, 151 aa, Zea mays
  Coding DNA Sequence Number=SeqID_20406
MQKTLEDLQAEQRVGVQRIAAWIGEASTTLVPLGVRPIPVSELPTSISDALLAEGSRLCRAVIEYILTCFRSHDPAISLEPVIASSVADTEDAARESVQAWDPNSIDDRLEESDSSTLGDIDHRGGLWPLCELVNGDKEEPVPADGPGEWS

SEQ ID NO: 63782 - protein, 400 aa, Zea mays
  Coding DNA Sequence Number=SeqID_20407
  Pfam annotation: Domain name=zf-CCHC; Domain location=270-287; Score =15.4; E_value=0.0072; Accession=PF00098.14; Description=Zinc knuckle
  Pfam annotation: Domain name=zf-CCHC; Domain location=31-48; Score =16.2; E_value=0.0053; Accession=PF00098.14; Description=Zinc knuckle
  Pfam module annotation: Pfam domain module=zf-CCHC::zf-CCHC; Domain location=270-287::31-48
MGMIRKINLMGVPLQVEDLLFNIDRKKQRKRGCFACRVMDHFRDRCPNMAEPTKERSKGKALTSIKTWDDSSSEDEPLRTHRHRSSSWSSRKCLMSREKFETFANLNCVLSTKIEQLESSAPSSATDDDLTKKNEKLKAKLASSQEAIENLLGKMEIVSIHNDELTTKLENIGSTLEVSLVEMLEIIKKDASTSCFDLIDDYNACNQVLVKNPVIETCSDEIAMENEQLKQEVARLGKALYDKKSKAKQIQPPQDNTTAGVNKTVEGETMICRLCHKEGHKSYQCKVKIGDKQKQKLKQKPTSKISNTYINKVDKKTATPYLIKKKKNGKVIAIKANKQVYKGKGAKHIWVPKEIISTMKSTKQICVSIVLVSSFYLTCLVLHVIFTFDINYMHIRTIIW

SEQ ID NO: 63783 - protein, 134 aa, Zea mays
  Coding DNA Sequence Number=SeqID_20408
MGLSTAARAYWRSIEHARLGGSDDSEEVSSKEVDSSDSSKEWSSGEGDGGEDDGSSSNNDGKGGGGGDGDGEGGNGEGDGDGEGDDKGDNDDGKGDDDSDSDDKGDSDGSKGHDDSKGDGDKGDGKAGGIMLLV

SEQ ID NO: 63784 - protein, 180 aa, Zea mays
  Coding DNA Sequence Number=SeqID_20409
  Homolog annotation: Hit_ID=Q2QTG7; Match level="QueryCoverage=63%, HitCoverage=5%, E-value=2e-07, Identity=31%"; Hit description =Retrotransposon protein, putative, Ty3-gypsy subclass
MTPLEIRHRNSVWVEDGQRINELRLTSDICKTSLPNGIWHSIGLSTYVALLGTGMPKLEPMPSRTRAHDDAGTSRGQEDTPNPPPVPPTLAEAIAALVTATTYNTRLLCEMAGHQLQQQGGRAYPQGPRETSYLDFSETRPPLFVKDEDPLEADEWVRVIEQKFGLIRCTETQKPFFAAQ

SEQ ID NO: 63785 - protein, 126 aa, Zea mays
  Coding DNA Sequence Number=SeqID_20410
MYQEVLWQKRGRPRELYPDVSKIGCGVNYMADEAHARYVQEKLATVELMEEEDDDTSRLSELITLAEARLHGEEDDTSRLSELIALAESGLRAQEEDEFMSQAAEVVEAENIFQHLTSFALLSCSF

SEQ ID NO: 63786 - protein, 601 aa, Zea mays
  Coding DNA Sequence Number=SeqID_20411
  Homolog annotation: Hit_ID=Q6J9V9; Match level="QueryCoverage=21%, HitCoverage=44%, E-value=4e-49, Identity=79%"; Hit description =Putative uncharacterized protein
MTWPSSSRRCYTSSAWEATCSWADEASFRADTASVRADTATSGFSSSQSGRRYEQPPYQRAYGITNSRWLAGDRSTGSDNDLRLGRLNSSSDDLRANAAVKRPSPTSPHEGQGQASKAKEPEVRPQVVPTVSSAETTSSSCQHLSTDDSGHLRASATPTNGGRPSLHRQIPTQVLADGPTLASARRHRAGVRTRQSKNTNAALAAYDVLYDPPVLLAAREGPQTCPTCARRDSRPCGGRTATPGRSGRRLRRKRRQSQLSQHARHAIADNACGRPGPRYRRTGKGDISKRILLSEGNGPPSPPTDQGFEGWPLGRVRQPPQSTRGPSPLLIRGSKAGPSEGFDSRPRARRVRDDPGYVRYMAEARATLPRYPRTFPRPAGTICNGIPPEGGIEPSDPIERVRVQQITCSHFALSLTDLTGKQRRSPRSDCCATHRGKTDNSRVQPRALQEAPPRPTLGLGLGRRSPPRPTLGLGLSLGLGRNRVLARPRPRPQEKSPPRPTLGSDRPCHRGYIITLPLASSGYKGTRPASHLAHPGLRHFFDDHVIAYTGLKHFSDSHVGMYTGLRHFSARHRQQHILQQVMPRECQNTVVSAMGPTRRHG

SEQ ID NO: 63787 - protein, 210 aa, Zea mays
  Coding DNA Sequence Number=SeqID_20412
  Gene Ontology: Mol. function=kinase activity
  Homolog annotation: Hit_ID=Q6QP54; Match level="QueryCoverage=24%, HitCoverage=20%, E-value=9e-09, Identity=64%"; Hit description =Putative kinase
MEAPPRSRSSLSSKAEVESEPWSGERRPSAEARAESEPWVRRLPGLSPESEPWGRAKRSSSSSGAEPESEPWGRAKRSSPSSGAEPESELWGRAKWSSSSSGAEPESEPWGRAKRSSSSSGAEPESEPWGRAKRSSSSSEAEPESEPWGRAKRSFLWRLRQDLAAVSLTLTSGTAVRAAQAALSSCQAGQWSGEVTTVTSALSTGGRASG

SEQ ID NO: 63788 - protein, 332 aa, Zea mays
  Coding DNA Sequence Number=SeqID_20413
  Homolog annotation: Hit_ID=Q6J9V9; Match level="QueryCoverage=29%, HitCoverage=34%, E-value=2e-10, Identity=42%"; Hit description =Putative uncharacterized protein
MAAPRTTHPVALTPRRDRRHLWQEKRGPRKGDTPKGILLRGGNGPRAPLLIRGSKAGPSEGFNSRLRALGLRAHYWSEAGPRRVHNRLRRRARDDPGYVRYITKARATLPRRHRKLRFARPQGSDSGSASEDDELRFARPQGSDSGSAPEDDELRFARPQGSDSGSAPEDDELHFARPQSSDSGSAPEDGELRFARPQGSDSGSAPEDDELRFARPQGSDSGLSPGRRRTPLRPTPGLGLGLSLGRRRTPLRPTPGLGLSPGLSRRSPLARPGLGLDLGLGRQTRPRPRRSLHLARTRGVGPTTSQETPSLPYPKLTQATGNKTGVPSGSLR

SEQ ID NO: 63789 - protein, 273 aa, Zea mays
  Coding DNA Sequence Number=SeqID_20414
  Subcellular localization annotation: CTP_CleavageSite=68; ConfidenceScore=5.01e-01
MSLHPLMHRVFPPSEPPDGELSQSFRLVIGGTQLRGSWYLSAIVRLQGFSSCSPAASPRRRSPKTVTSSSMAGKGESGCDLDPALSFKDVHHPGWGGGRAEPELYLPRGFVGQPLPQHSRERALSGPAGGSDFDNAGLVDGGASSASARWARWLGTRCPLSPQGRLSRRAHRRTAQDVARCKGGVRVLGLSCLCPGTTPQHGDWCSAHPGGSEWGSAGGQMAPAVGAEAAAGEVLVADKITATIRARGLRLFVLVLAPRASAWARSRLQRRLP

SEQ ID NO: 63790 - protein, 54 aa, Zea mays
  Coding DNA Sequence Number=SeqID_20415
  Gene Ontology: Cellular component=integral to membrane
  Homolog annotation: Hit_ID=Q7X990; Match level="QueryCoverage=94%, HitCoverage=20%, E-value=3e-18, Identity=90%"; Hit description =Putative Mannose-P-dolichol utilization defect 1 protein homolog
MELEILGMNFGCVLAALSDAKIPDKGCLLPLISKLLGYAIVAASTTVKLPQNSA

SEQ ID NO: 63791 - protein, 24 aa, Zea mays
  Coding DNA Sequence Number=SeqID_20416
MAVSSVATEVQSQLASAMGYPQDA

SEQ ID NO: 63792 - protein, 173 aa, Zea mays
  Coding DNA Sequence Number=SeqID_20417
  Gene Ontology: Biological process=protein modification process
  Homolog annotation: Hit_ID=Q84UT7; Match level="QueryCoverage=63%, HitCoverage=11%, E-value=2e-40, Identity=75%"; Hit description =Calreticulin interacted protein
MSMLLSLPMISYKAKTFLFFHVACTLPIEAFMLRISTLLIIAELDILRRRGPDKRFYTSLFSAVNVTGNGGLLDDISRSVRDLLGSLGVAMSGGVTNTAFSVPLTSTPEGPNNVPGRTQPMNPAQPGFSVLNHQIQVTQLHPPGAIPRNMIIPDSLTTLSEYMDRIDRVLQNN

SEQ ID NO: 63793 - protein, 70 aa, Zea mays
  Coding DNA Sequence Number=SeqID_20418
  Gene Ontology: Biological process=protein modification process
  Homolog annotation: Hit_ID=Q84UT7; Match level="QueryCoverage=68%, HitCoverage=4%, E-value=9e-12, Identity=77%"; Hit description =Calreticulin interacted protein
MAEDASHGASSSTVIPADGPESTIEINIKTLDSQVHKLRVDKNVRILLPPSHCLCVSICLSAYLLPNSTP

SEQ ID NO: 63794 - protein, 87 aa, Zea mays
  Coding DNA Sequence Number=SeqID_20419
  Subcellular localization annotation: CTP_CleavageSite=45; ConfidenceScore=5.23e-01
MAATIFFFLPCSPFVSTRRCLGSSDSAFILRGARSEKSESEPKTRAGGLVSEDLSMEEMRAKLLWSFREVKNRYRKIKSMKDVAMSS

SEQ ID NO: 63795 - protein, 141 aa, Zea mays
  Coding DNA Sequence Number=SeqID_20420
  Subcellular localization annotation: CTP_CleavageSite=80; ConfidenceScore=5.22e-01
MARARVTAAPPTTRPVALTPRQDTRRLWREKRATLRLRRNNRVKKRDRERGIPRKGSFSAKEPGSEPPLLIRGSKTGPPKGSTVASDRVGPTPTTGQGFEGQPPEGFHGRLRLLGLRAHTDQGFEGWPPKGSQSPQTPSEG

SEQ ID NO: 63796 - protein, 86 aa, Zea mays
  Coding DNA Sequence Number=SeqID_20421
  Subcellular localization annotation: CTP_CleavageSite=74; ConfidenceScore=5.18e-01
QAPQDEAPQPLPPPPPPMSVEQMFFMQTQAVQAIGQTLAAMRQAQQQPQPQPQVQMPQMPRDKRAKFMRGHPPVFAHSADPMDAED

SEQ ID NO: 63797 - protein, 178 aa, Zea mays
  Coding DNA Sequence Number=SeqID_20422
MDTEPRHVGPGAKQKEVTNAYNAWAISERHNHGRTACQRDGQARRLREGLVAARQRSGQGTLNAEAAHCLPVDWTGLIKCRGGTSPASGMDRRRALSAINAEVAHSIGLTSGSAHWLTSQAVCHVAASGLRLSGKQNQSRDPAGSGPNPTQRGPDPILGVRLAPVEVPDLIRRSGPHI

SEQ ID NO: 63798 - protein, 90 aa, Zea mays
  Coding DNA Sequence Number=SeqID_20423
MALRVRCQIPPMISSLRSSLIKPLNQDQIPQTHLKSSIPLDRLTWWQGGKPSHTINHILKRTCKNYATSKAEYTNTQLDLPGVRSLLLYL

SEQ ID NO: 63799 - protein, 161 aa, Zea mays
  Coding DNA Sequence Number=SeqID_20424
MSIYKHQFGFEIQNQQVDSNWKNEYQAADRPPMDRGPSAASGTGQSDQPRRQSEIIRARTVRRPSADRPRQGSKNRQWPQTLVLVVSARNLQVALNPSALVEMMMTIHQPLIQRPNPQLGALNPWMLKIFLMFIPIIPLIPKAGLIPSRDFLWLSTALDGL

SEQ ID NO: 63800 - protein, 125 aa, Zea mays
  Coding DNA Sequence Number=SeqID_20425
MGFCSIRVWVYFCTHGFVNGFNGNPTVGMGNPLGTRNPHGYGFGQNFIPVMGMGFLAGVFFLRGYGFGQVIPSGFLPVVISTHYDVNVEVDPSHLDQTNVADDALQRGQGPRAGYFGRLRTRSGA

SEQ ID NO: 63801 - protein, 824 aa, Zea mays
  Coding DNA Sequence Number=SeqID_20426
  Homolog annotation: Hit_ID=A7QEX3; Match level="QueryCoverage=96%, HitCoverage=89%, E-value=1e-155, Identity=43%"; Hit description =Chromosome chr16 scaffold_86, whole genome shotgun sequence
MEPAGARKEWRAVPDSSLRSNGAEDAAEHGKLGQSEERAIYEEGAGGLGDFCTITIDGSGGLSEDILQQRLQSVARQREELQQVEIELRAQAIAHPQIIEAQQSFQAAAKEHAAAVAKIKVVPFALSSVFLYQYPAQIRLHPIALGLSGPYLRIILMSCIEQEQLHEREQYILELEMKLNDKDRELNALKIDHQTVWANQDLLREQTKELASVRRERDNSEAERAQHLKQIHDLQELLREKESQFIAIEEQHRAAQENILYKDEQLREAHAWVSQVREMDALQSQSLQVELRERMEQFNQYWISSQQQYAEMQRSLLHTIQQLQQELAEARERSGAQKDGPHVSREGSAESSLVQSIANSVTSNGSATADGSQQLLKNNGSVDVSLKGNNASAVPVPSLLGIGGPAAHIAAMHSFMIHPQGIPQPLASPNSGIPQFGSFQTQPMIQPNSHWPNQQEVQIVSQPQDETNYQTSQSGQTALQQDTINTDELSPKASEGGHPDHLNAQGKQQQSPASAPTESTHELTVVETNIAEHVPYDEQQKTLKEQDSLSNIKSHVGRVEPQEQNAESKVSTVERAASDKQSEPQSRQHKPSNFPPTTQLNLKNSATENPNVVNQVDTMKSVTGGFGSQLPRVPKEPALLDERSLLACIVRAVPAGPEGGIRISSTLPNRLGKMLAPLHWHDYKKQYGKLDDFVASRPELFVIEGDFIHLREGAQQIISATTAAAKIAAATASSAPYSSLLPSVAVTPVAQSTRQKRGPAVDSRSSNAILSGNGFTDQFNIIQGVSDVPVSGKVRNTLDNGFLGLWWKATREVNWDGLPFQKMK

SEQ ID NO: 63802 - protein, 127 aa, Zea mays
  Coding DNA Sequence Number=SeqID_20427
MPEVADAMDMAKAKITSGFEVREGDDLAWAHVDDAIGASSSLQGRNFPRRARYESVYSRRCQAAATQEERVMEEEEQSNKGNEQDDEEYMPNDDEVDDFGESPHDSPTQAGADCEENAMDDLDLGDI

SEQ ID NO: 63803 - protein, 195 aa, Zea mays
  Coding DNA Sequence Number=SeqID_20428
MKAIWFNSCFFWGGGGGGNLLSTSLSDKWPHPSASFFLRMDTQLRWRFPYGSRDHAHQRQKAHARPHGDQGHGQGDSLTLRRLEESPDPTTGEEGASPTEQRMSCFQSNAGLHKRLGQGSSDWGKAAQMTAKRCRCVRRRGRRSSYGQQMVTLWILASVLLLQVPEVLGWAAMLLLYELYGSYVSLGQKYRASLL

SEQ ID NO: 63804 - protein, 280 aa, Zea mays
  Coding DNA Sequence Number=SeqID_20429
MGDTRRLFASSLEERNSVGVGTFQPSFGFKDFHQPARLYPPPPPPRRRSPETVTTSTWVGRSKPGCDLGPTLSFKDVHHPRWGGGRAEPELYLPHEFAGHPLLRRSRERALTDPAGGPDFDNAGLVDGGRRHPQRVELVGLAPGGPSCRRAAAAPCAREDRPRCCALLGRRSCSGVVLPLHRDGAFTRRLESLGSVGLVVWGSFGLVKGTPWPLFDEPRPGPRPRVGLAPLGDGWPRPQGRGDDVVLQKRDPWTALPSEARSDLAEGVVDAEGATASFQR

SEQ ID NO: 63805 - protein, 280 aa, Zea mays
  Coding DNA Sequence Number=SeqID_20430
MTVAGGREQRSRRQPSSRPIRGQQENPLSRREDNAPVIRSSNGSRTHNGRPANRSLRRINSAAGQAALLGPGKGDTPKKILPHEGTRLRASLLIRAHRRHHVRRPSRATWRFPPLLLVERRRRGVCKKAESVPDRPEQRLGGCSRKPGSGRTVDSVNIPARELGPRPYTRATASSHEGTTRPAETLRKALRPRRSETTPPRPRGLHLAGALARTHRNKMQPRKAGPLAKKCDESLQASANTPFEARGLLSGTIIRGTLKTPNSQLVTPISIKLQRPDGCD

SEQ ID NO: 63806 - protein, 63 aa, Zea mays
  Coding DNA Sequence Number=SeqID_20431
MGLKILSTKCTFTSLTRQRKKTLKDMLAFGNQDVEVKVVLYWRILSLGDNFFLYYRFFLVFYT

SEQ ID NO: 63807 - protein, 233 aa, Zea mays
  Coding DNA Sequence Number=SeqID_20432
  Subcellular localization annotation: CTP_CleavageSite=49; ConfidenceScore=5.43e-01
MEGRVTTGQSHAPPLGWSLRHAGLGPRVISPAVVPRRRPPMRMTTSFVVGRSKSGCGFPPALSFKDVHHPRWGGRRVEPGFCLPRGPVAHFFLQHSREERGSPATRRRRTSATRGRPGAGADSCRVPGTWPGWPCRRLRRCLLPFGQGMAIRPPHGRRSRRTWVRHIHGFSRAVGRTGGPSKMSYAAGVAATFLDGLVLAPWEDGSEDLLAEVVVAANAEVVAAAGEAARSSF

SEQ ID NO: 63808 - protein, 98 aa, Zea mays
  Coding DNA Sequence Number=SeqID_20433
  Gene Ontology: Mol. function=carboxyl- or carbamoyltransferase activity; Cellular component=ornithine carbamoyltransferase complex; Biological process=amino acid metabolic process
  Homolog annotation: Hit_ID=Q8SA97; Match level="QueryCoverage=88%, HitCoverage=21%, E-value=8e-15, Identity=47%"; Hit description =Ornithine carbamoyltransferase
MALPIDVAGLRPRPGDVEVPPKPRSSLSSMAEAESEPLGRARRRTFGRGQGGVRALGSGEADPSPSPGSGGVEFAVFRDLARVRALGRAERSSPSSGT

SEQ ID NO: 63809 - protein, 60 aa, Zea mays
  Coding DNA Sequence Number=SeqID_20434
MNAVLHTYSSVYIVLQGGAATRWEIESFLDNELREAFENKSPTISLVFCEIEVAIMLVIY

SEQ ID NO: 63810 - protein, 56 aa, Zea mays
  Coding DNA Sequence Number=SeqID_20435
MGSHDPRAKRESRLMGKVCDLCRGLETGCLWCSLCSGKQGVEADLQEFQDVDEFED

SEQ ID NO: 63811 - protein, 209 aa, Zea mays
  Coding DNA Sequence Number=SeqID_20436
  Gene Ontology: Mol. function=protein-tyrosine kinase activity; Biological process=protein amino acid phosphorylation
  Homolog annotation: Hit_ID=A7P525; Match level="QueryCoverage=64%, HitCoverage=70%, E-value=1e-25, Identity=36%"; Hit description =Chromosome chr4 scaffold_6, whole genome shotgun sequence
MGVICSATVRGSGLPLLFEDLNVNNGVSVCLLLVYVCYSCWISCFIFWDVEIIFVSLDRDEASFRDHFQGMSWLAVPFDAAGLLRQKLCARFAIERIPALIPLSASATSSSGLGCREDAVRLVGEYGVDAYPFSAQRRRELESMDDARREGGRLQELLGCEERDFVISADDINIPIADLTGKTVEKTSEHTGAHLAMSSPNSSRRCITS

SEQ ID NO: 63812 - protein, 168 aa, Zea mays
  Coding DNA Sequence Number=SeqID_20437
  Homolog annotation: Hit_ID=Q6J9V9; Match level="QueryCoverage=33%, HitCoverage=19%, E-value=2e-17, Identity=75%"; Hit description =Putative uncharacterized protein
  Subcellular localization annotation: CTP_CleavageSite=65; ConfidenceScore=5.12e-01
MAKARATLPRYTKTFPRPAGTVCNGIPPKGGTEPSDPIKWVRVQRITRRVRLTTVSHVLSRVQPRAQQGAPPRPTPALASGGVITTPDPGLGLNLGLERRSPPRPTLALASGRVTTSPDLSLDLYLGLRRRSLPRPTSASTSGGVTASPDLGLGPTTLQGIHHYPTPS

SEQ ID NO: 63813 - protein, 131 aa, Zea mays
  Coding DNA Sequence Number=SeqID_20438
  Subcellular localization annotation: CTP_CleavageSite=27; ConfidenceScore=5.26e-01
MQAACNRAKWMPFSDSQHAQPGGPGPRVMQPARRMGPGKGDTPKRIIPREGTRLRASLLIRGSKAGPPEGFDSRLRSRGPYTHYWLEVRRSAPRKGTTAASGYSGSAPITDQGFEGWPPKGSQPPQTPSEG

SEQ ID NO: 63814 - protein, 187 aa, Zea mays
  Coding DNA Sequence Number=SeqID_20439
MGDNPPSFRLIVEERNSVGVGTFQPIVRLQGFSSASPAAPLRRRSPDTATTSPWVGRSKPGCDLGPTLSFKDVDHPRWGGGRAEPELYLPRGFVGHPPLRRSRERALTGPAGGSDFDNAGLVDGGRRQPQRVELVGLAPGVYHRPRFFVSHFPPRHRAAAIFLRSLMGTMPPPMASHVLRDGSDARS

SEQ ID NO: 63815 - protein, 254 aa, Zea mays
  Coding DNA Sequence Number=SeqID_20440
  Gene Ontology: Mol. function=mannosyl-oligosaccharide 1,2-alpha -mannosidase activity; Cellular component=membrane; Biological process=transport
  Homolog annotation: Hit_ID=Q10QV1; Match level="QueryCoverage=76%, HitCoverage=24%, E-value=9e-77, Identity=76%"; Hit description=SacIy domain containing protein, expressed
MKHQARLHSGNHCTSFADYCVSMDKDGGDTWLHDSSFRIDSKIRAFTVVYILQTHEKKPRESLLCAEFAKAIHYINKSLSDDKCLKFLHMDLSNLFRRKGTNVLALLSKVASDVLDLTEFLHCEISTSTKFDDISSEEKTVAKSRDDRSSRDQTECAAKLVPLLLQKGVLRTNCIDCLDRTNVAQFSYGLAALGRQLHALGLAEAHKIELHDPLVDYLMDFYERMGDTLAIQYGGSAAHNKVVLLSFVNIQQQQ

SEQ ID NO: 63816 - protein, 699 aa, Zea mays
  Coding DNA Sequence Number=SeqID_20441
  Gene Ontology: Mol. function=metal ion binding; Biological process =RNA-dependent DNA replication
  Homolog annotation: Hit_ID=A2X443; Match level="QueryCoverage=90%, HitCoverage=92%, E-value=1e-47, Identity=27%"; Hit description =Putative uncharacterized protein
  Pfam annotation: Domain name=DUF594; Domain location=617-674; Score =56.3; E_value=1.1e-13; Accession=PF04578.4; Description=Protein of unknown function, DUF594
  Subcellular localization annotation: CTP_CleavageSite=69; ConfidenceScore=5.05e-01
MDPPGSNPDGAVNMTRAMQALSPWLNHPRRTIAQVEGLVLAAAALLLLQLFLGFYRRRWRSSFASTVLRASSKLMEALIIYTLGTMQSSPIKNSLYPVWAAFLVMASAGTTAVQDYDFCGSFYNKYMEGAVDIIKYVFYWIMFGLLLDPNAYTFKADLNLQRHPKNPRASSNCVVALFYFALFTKLCESMGLAVGGYNKTQKWNLFFRPTKIRFGIQAAETEEYDPQSMKGYGYAVCYRPFGGGLITIDQIWYCLDVRSSACLKDLCLSHALFRQLIVRRFFGLVVQPKIIPEIKDHDFVFKKLLPSGWDFERAFRIIEAELGFCYDFFFTKYCYTFVMTNQLPVPVIQSLVLAKIVLIITVGVFAVRNSLVLETPNPIIEVRISRANYIITLLLLGIALIVELVHVAFYLSSDWAQVSLATMHVKKQWYEISPSIFGTVIAFLRRVTFSGQLMRNRMKQHSLMRNRIEQKDPVEVSDAVKRAVARSLISTYGGKEDDAVETSQWQDQMPFRTYSWALKGLSQLEVILIWHVATEHCDISSGRAPTNRSRTTPRDDDRGVAVHLSRYCAYLIGSVPELLPYHEADIAELAHKVMGEPTEQDDDARNIFHKGIELGKQLERMADGDRWKALQDFWAKTTIHAAKSHYTTKQHMQHLESGGEFLTHIWALLAHAGILYLNSVKNEDQEEQANLGSGPSAVA

SEQ ID NO: 63817 - protein, 92 aa, Zea mays
  Coding DNA Sequence Number=SeqID_20442
MPRAFDDYYIVDCGIISAPEVTQRRADSNDQFVILPNVGVAFCAASVYGGVCLMANDVRGNFFRQAWGVLSYDETMKIVTYIKVRMILMVVM

SEQ ID NO: 63818 - protein, 83 aa, Zea mays
  Coding DNA Sequence Number=SeqID_20443
MGIGCLRDGKIGIRINIALLTRPETWSPILVMVGTSAVTARRQSGSVRHCSLEDMVAGVTWPSILPPGWTVEWDPTSAEEEQE

SEQ ID NO: 63819 - protein, 164 aa, Zea mays
  Coding DNA Sequence Number=SeqID_20444
  Subcellular localization annotation: CTP_CleavageSite=66; ConfidenceScore=5.30e-01
MRTPQLSLLARAVVCLSLLTSVYIAHGSRRDSSSTVRGAIATSYHAPPSSPRICRVVPAVESCEVRAPKSERLQRTEHCARESWAWIGSAAGIRGTAALLAHKPAGLRELHLRASEALTATTYAEFRVGQARTPRATAGYKLARSLHTLATSSLLVLARDIPVL

SEQ ID NO: 63820 - protein, 314 aa, Zea mays
  Coding DNA Sequence Number=SeqID_20445
MAERYQLPRSCVPPTARRKDCEHPPSGGLEGGKARCIREREDVVAFKGVTLLLKATLPTCVPNRRGLSLLQHAPRSSPTAWGLGPTRHASRLRAEEAKPPCAARATAQRLQAALHFCPDQRAKGRAAMQAACNRAKWVHFSDSQHAQHGGQGPRVMQPARRILRARNCTATCATTSPPRLRNQYRDSRRPSARPSSASLARRRSERRFAFAIMTASKKGPGKGDTPKRILPREGTRLRASLLIRGSKAGPSEGFDSCLRSRGLYTHYWSEVRRPAPRKGSTTASGYSGSAPTTDQGFEGWPPKGSQPPQTQSEG

SEQ ID NO: 63821 - protein, 61 aa, Zea mays
  Coding DNA Sequence Number=SeqID_20446
MARVFPSLILLLCAPRNLWETSEGRLGGRNRVPTSSGGDGHCRDNNFSPSAQFRSTPRPAL

SEQ ID NO: 63822 - protein, 113 aa, Zea mays
  Coding DNA Sequence Number=SeqID_20447
MSLRTWAEWLLGRDPQGEIDLVIKHMPSSKALGPHGFNVIKLITKMHANRLQSGIKVNCSKSYLLPINVTNEDAIHLATGFSSQEPSSFEALSPLEYNDLQTKIMKDISTSFQ

SEQ ID NO: 63823 - protein, 358 aa, Zea mays
  Coding DNA Sequence Number=SeqID_20448
  Gene Ontology: Mol. function=catalytic activity; Cellular component =cytoplasm; Biological process=cellular metabolic process
  Homolog annotation: Hit_ID=A7PJY8; Match level="QueryCoverage=84%, HitCoverage=94%, E-value=1e-61, Identity=41%"; Hit description =Chromosome chr12 scaffold_18, whole genome shotgun sequence
  Pfam annotation: Domain name=3Beta_HSD; Domain location=9-253; Score=- 94.7; E_value=0.00029; Accession=PF01073.10; Description=3-beta hydroxysteroid dehydrogenaseisomerase family
  Pfam annotation: Domain name=Epimerase; Domain location=8-247; Score =41.8; E_value=2.9e-10; Accession=PF01370.12; Description=NAD dependent epimerasedehydratase family
  Pfam annotation: Domain name=KR; Domain location=6-136; Score=-87.0; E_value=0.027; Accession=PF08659.1; Description=KR domain
  Pfam annotation: Domain name=NAD_binding_4; Domain location=10-231; Score=-69.1; E_value=0.00026; Accession=PF07993.3; Description=Male sterility protein
  Pfam annotation: Domain name=NmrA; Domain location=8-269; Score= -107.2; E_value=0.046; Accession=PF05368.4; Description=NmrA-like family
  Pfam annotation: Domain name=Polysacc_synt_2; Domain location=8-249; Score=-193.0; E_value=0.057; Accession=PF02719.6; Description =Polysaccharide biosynthesis protein
  Pfam annotation: Domain name=adh_short; Domain location=6-127; Score=- 54.5; E_value=0.048; Accession=PF00106.16; Description=short chain dehydrogenase
  Pfam module annotation: Pfam domain module=3Beta_HSD::Epimerase::KR::N AD_binding_4::NmrA::Polysacc_synt_2::adh_short; Domain location=9 -253::8-247::6-136::10-231::8-269::8-249::6-127
MAGGGATVCVTGAGGFIASWVVKLLLSRGYTVHGTVRHLRRHGISGDEKTGHLKRLENAAGNLRIFKADLLDYDAMAAAVVGCQGKQYNVQLQMLGPAVTGTTNVLKAASSANVQRVVVVSSMVAVEISPKDWPEGKVRDERCWSDREFCRSIESWYPVAKIISEEAALAYGQQTGLDVVTINPGLVFGPMLQPTVNTTIQFLIYFLKGGPDPVKNKLWHIVDVRDVADAMLLLYEVPEATGRHICAPHVISARDLLDLLKSMYPDYPCIANESILDRDHPAPMTSDKLKKIGWSCRPLEETIVDTVECCLRAGFLDHLIGEEEQGKGREDERSVSGLVLDEYDEEAPAPTPSTENEG

SEQ ID NO: 63824 - protein, 119 aa, Zea mays
  Coding DNA Sequence Number=SeqID_20449
MSGAPEDSNSKLVTFGKFQRRLRYNSPDCPVYTGHVRCSKEERPQELASLGNSLQLLRYNSPDCPVYTGLSGVTAGQRLLLAPTATCDALNARQRAQRNFVFQVIEKRKLTRSEGPFER

SEQ ID NO: 63825 - protein, 176 aa, Zea mays
  Coding DNA Sequence Number=SeqID_20450
MAATVYRRERGLRRFGRKTINGDEGAHPRGAGSGSPLARGEGPLLSTELLDQDNELVRDMYSHLNLIINELNSIDINKLGDADIMRKIISLLPQQRYGSIVTILHNIKINLMGVPLRVEDLLFSIDRKSKEKEDASHAGRRATSGTAVQLWPNPKRGGAKARRLQVSKLGMTFKRR

SEQ ID NO: 63826 - protein, 54 aa, Zea mays
  Coding DNA Sequence Number=SeqID_20451
MASTCKNTFLESVHTRESLFLSQVRKQQIFVASVPRWFLMKISKSEVREERILH

SEQ ID NO: 63827 - protein, 686 aa, Zea mays
  Coding DNA Sequence Number=SeqID_20452
  Homolog annotation: Hit_ID=Q6QP51; Match level="QueryCoverage=19%, HitCoverage=75%, E-value=6e-17, Identity=40%"; Hit description =Putative growth-regulating factor 1
MESFDQMRVHVSGKADRAEGLLRLRDTDTSLITFRENTLSVVSTLGGTWPRLGRRPGQKDLHLREDASRCLGQAPAAATTSSSAWEAAISQADEVSFRADSASVRTNTAASGSGSSQSSRGDNDLRLGRPDSYSNGFRANAAVKRPSPTSPHEGRGQAIKAEESEGADRGFEPTDTAPANNGRPKAHRQVLTPVLAEAAPEHEHRPRGVRRAGQPSSAADGARKTWTWPARARHDRRPDEGRKATPCPGSSSSPSPAWLEDASTGLEDAFLPQTLGEEKGYRPTQRQPPTRPPHLHPLASRAKSPLTSSRVLPLRHGGWDPHVIRADPKHEEGEPPHARHVTVPRLQALSHLRRNRWSKGWTATQQASNCTATVRPFGFVHIQRTSAKEAGPHVMTQQCQLKVTAMGRSAPGRGERRFAFAIMIASKKRAPSPPTDQGFEGWPLGRVSTVAPEHSDLKPITDQGFEGWPLGRACPSEGFDSRPKACRVRDDSGYIRYIAEARITLLRAPLGHQPTPNERGTGVHSDHPLAAHWKHHRLGGCSRTRLRPKLLTASTSQLDNLEPDHAPGLRPGRVIERSDWPKHHEKHSDLRGVKPLLRGLGGYTRRTSSRLARGPPQAAGAPSALPRPGSASGGGFRLARPQALASGGGLRLARPSDSASTPVSGGNASSPDPSLGLKRSLRFDRP

SEQ ID NO: 63828 - protein, 87 aa, Zea mays
  Coding DNA Sequence Number=SeqID_20453
  Subcellular localization annotation: CTP_CleavageSite=58; ConfidenceScore=5.29e-01
MTIRSLGAPDCPVVHWTVSGGAPDSVRCARLASGQPAALGSRQWRTAINHRTVRWCTRLSGRFETGSSIPLQPTRRVFSFHCVLVFE

SEQ ID NO: 63829 - protein, 527 aa, Zea mays
  Coding DNA Sequence Number=SeqID_20454
  Gene Ontology: Mol. function=nucleotide binding; Cellular component =Golgi apparatus; Biological process=regulation of transcription, DNA- dependent
  Homolog annotation: Hit_ID=A2YGD8; Match level="QueryCoverage=81%, HitCoverage=35%, E-value=0.0, Identity=89%"; Hit description =Putative uncharacterized protein
  Pfam annotation: Domain name=DUF246; Domain location=112-491; Score =536.6; E_value=2.7e-158; Accession=PF03138.5; Description=Plant protein family
  Subcellular localization annotation: CTP_CleavageSite=23; ConfidenceScore=5.11e-01
MAELRHATAATRATSSPSKRDAEAASASSPLVASPRVDGGKDGLRPQPRWSLPPPLPLPPRARGPQVPHGFRLLPDSRRRNRLLRAHCALLRAFRLDTPHLVSENETSGFIFIHAEGGLNQQRIAICNAVAIAKIMNATLILPVLKQDQIWKDQTKFEDIFDVDHFINYLKEDVRIVRDIPDWFTEKDELFTSIKRTVKNVPKYASAQFYIDNVFPRIKEKKIMSIKPFVDRLGYDNVPMEINRLRCRVNYHALKFLPDIEEMADKLATRMRNRTGSLNPYIIGCLQLRNYYLMLHRTCFQRALHLRFEKGMVGLSFCDFAGTREEKAMMATYRQQQWPRRYKNGSHLWSLALEKRKEGRCPLEPGEIGIILREMGYTKETQIYVASGQVYGGNNRMAPLRNMFPNLVSKEDLASKEEMEPFKKHVTSLAALDFLVCLKSDVFVMTHGGNFAKLIIGYRRYMGRHRLKSIKPDKGLMSKFFGDPYMPWATFVENVMITHETRTGLPESTFPHYDLWENPLTPCMCRA

SEQ ID NO: 63830 - protein, 262 aa, Zea mays
  Coding DNA Sequence Number=SeqID_20455
  Homolog annotation: Hit_ID=Q8H6I2; Match level="QueryCoverage=77%, HitCoverage=97%, E-value=1e-86, Identity=71%"; Hit description =Putative MURBZC
  Pfam annotation: Domain name=Zea_mays_MuDR; Domain location=57-262; Score=-33.9; E_value=0.0032; Accession=PF05928.2; Description=Zea mays MURB-like protein (MuDR)
MATLENFAIMAPPTAGFTNMARPSRQLHSWHYNPTRFEHLASDPGFAELEAAMEPAAELCSQKLSAAVDAARDTMKASSTACMVAGDYCATFSLGNDVVSTLDVLESAVAAEKSAMSSYNQASAVVDCAKETIAKYCEVNQKLAQALRYSMSLMSDTTKKLQDTASLCYTDEDVVDGFKLTQVARSLDELAETLEVTTIDCQVSMMDPTTILEAGYGSEDSAVWEDIFRDREIMNQPLETETLAEHCAKWGLNYNEIRDRSV

SEQ ID NO: 63831 - protein, 100 aa, Zea mays
  Coding DNA Sequence Number=SeqID_20456
  Gene Ontology: Mol. function=protein serine/threonine kinase activity; Biological process=protein amino acid phosphorylation
  Homolog annotation: Hit_ID=Q0QVS5; Match level="QueryCoverage=85%, HitCoverage=22%, E-value=3e-13, Identity=42%"; Hit description=3 -phosphoinositide dependent protein kinase 1
MVIHRGEMMMKWQVVWAKKKNTDCIYALKIMEKKFITTRSHTSRWSAHAQPLGHHEDLLHFLGHKGRLSKDDAQFYAAEIVNILEFLHGIGLIHQDVMVV

SEQ ID NO: 63832 - protein, 84 aa, Zea mays
  Coding DNA Sequence Number=SeqID_20457
  Homolog annotation: Hit_ID=O22106; Match level="QueryCoverage=50%, HitCoverage=10%, E-value=2e-07, Identity=73%"; Hit description =Squalene synthase
MGALTWLEEVPALEKLWVAGVQIKCQIPLEEHWAFAYSMLEKGECVSQEGSPAFIAVVPVAPPGLLTWVEEGLLAVDTQLDGSD

SEQ ID NO: 63833 - protein, 71 aa, Zea mays
  Coding DNA Sequence Number=SeqID_20458
  Subcellular localization annotation: CTP_CleavageSite=43; ConfidenceScore=5.46e-01
MSCSTLEASKSSTSLASSKNPESLNSTTNPMWCLPGTRTGGTLVNHVMREISQVDPKHGLIRMVMLMDEPA

SEQ ID NO: 63834 - protein, 71 aa, Zea mays
  Coding DNA Sequence Number=SeqID_20459
MEDRGDAGTAVRELRVSETRRGRKTMATQRMNEGGRRRRPGIHMEDKSSAPKHASVPTMAAVAKDLPGHGE

SEQ ID NO: 63835 - protein, 445 aa, Zea mays
  Coding DNA Sequence Number=SeqID_20460
  Gene Ontology: Mol. function=protein disulfide oxidoreductase activity; Biological process=intracellular signaling cascade
  Homolog annotation: Hit_ID=Q3HTV1; Match level="QueryCoverage=84%, HitCoverage=86%, E-value=1e-136, Identity=65%"; Hit description =Ternary complex factor MIP1-like
  Pfam annotation: Domain name=DUF547; Domain location=227-362; Score =223.9; E_value=3.7e-64; Accession=PF04784.5; Description=Protein of unknown function, DUF547
MADDTSIGSATAKREGARRCIMQRYRSQLEQEVKKLQRQLQEEIDLHLALADAITYNAALILKSSIKLPDKMQEACSMEKEGEEDQKIDMLPFNLPNLKKGNMSENLWNNPNQLSEEMVLSMKDIFLNLSTSSKMSPEEPFSNSSSSAEHLSGSTLTTLSDSSVIASVQPSPSMYLNHDDGNFDPYNVNGKEAQRDIGSYSSVAEVSWMYIGNEQLEYASGALRKFRFLVEQLSKVDTSCMNCDERLAFWINLYNALIMHAYLAYGVPENDIKLFALMQKACYTICGQPVSAAEIEFVILKSLMLALHKFKTSENLKKYSIDGTEPRVLFALCCGMFSSPAVRIFSAENVRAELQESMRDYIRASVGVNDKGELMVPKLLQSYAKGIVEDSLLADWICRHLTLDQLAAVQDTSSSHTQRLLGVRSFSVIPFDSRFRYLFLFDNSR

SEQ ID NO: 63836 - protein, 105 aa, Zea mays
  Coding DNA Sequence Number=SeqID_20461
  Subcellular localization annotation: CTP_CleavageSite=42; ConfidenceScore=5.16e-01
MEWRPRRWRRLTLSLSPSSSPPRPSPPSLGWVYYYVRSHRVCASEINKTRKSRDGFSYRSADRLGVYCLWAHICSYYCLLVPLSLPVIIVVVYLHWLSMKMFKHA

SEQ ID NO: 63837 - protein, 256 aa, Zea mays
  Coding DNA Sequence Number=SeqID_20462
  Homolog annotation: Hit_ID=Q5JLP8; Match level="QueryCoverage=28%, HitCoverage=51%, E-value=6e-20, Identity=64%"; Hit description =Putative uncharacterized protein B1150F11.14
  Subcellular localization annotation: CTP_CleavageSite=9; ConfidenceScore=5.03e-01
MPSGFTIVSAPTGSAHQRPTRLGNPEMHFSTDQLIGSAFIAFGLTLFVCFFYVAVVSKLLPPHQNGFLAAIQNDCVQLVQIIQEIHAFFVILQHEDVQARMKQSCSFLPVSESWSKSRDAIIYAMQLQKSKPWVLPFYTYLVISMCLPLFRDEGTEKGIKWSVAPISSSDVSLPTSSLDLPDVADLFAPPADNASRKRESNGSALHDSRNKFPRMQSQSQGIGSAAGNALIPPQLRGRSNVVTEDMSKLFVAKRKE

SEQ ID NO: 63838 - protein, 151 aa, Zea mays
  Coding DNA Sequence Number=SeqID_20463
MGILDTLITVVDAGRGEGESKWCEQPGVVVLRKLETLAVQMSLEWVAQLGMPRTSLETDAMQQPWDWLLDGDSPSALTAKPRMVSLSASIECLCRGNFAAALLLANASVSFPSLGDHHRLPCHSNVKSESTPTSATSVSQPWSSPATSTHR

SEQ ID NO: 63839 - protein, 52 aa, Zea mays
  Coding DNA Sequence Number=SeqID_20464
MSWAEARREIPGRRRRANFIVVLNTLEVTKDNKVEAYKVFKDPESLTIDKFS

SEQ ID NO: 63840 - protein, 317 aa, Zea mays
  Coding DNA Sequence Number=SeqID_20465
  Subcellular localization annotation: CTP_CleavageSite=37; ConfidenceScore=5.79e-01
MPSVSPHALRPSAFRAPGWGAPALPSSRCGRSATSLRAVTTSSMVGRSKSGCGLCPALSFKDLHHPCWGGGRAEPELYLPYGPAGHLLLQHSGERALTGLAEGADFDNVGPVGRKRRQLQRVWLAGSASGAPSHRWAECGYLPAVRAAVAPRAPGDRPRRRTPLGRRSCSWVVLPLLRHDASVRRSVLARPGGLEWGSAGGQEAAVIGAEVVSSEKASPPTRPLPPPPPRGLTSGSLPLIACPRPSSGDTGEGLVAAVSALRSLLLLFSRSKRRSLSLLTEWAAASHLEFCRPAGPPMWGVVRTCGSGTGVPFVMAF

SEQ ID NO: 63841 - protein, 142 aa, Zea mays
  Coding DNA Sequence Number=SeqID_20466
MAGGTAVGVGQAALFSCQAILALNAPAIRSVGEAIWPRLLLHEACPSWASGESKVRPLLEEALGRGVNPPGSTVPTRGWARARRDRVPRVDGALTCIAPIKPLQLVLMVVTSRVLGVLGGAEHGVSSELLTGDPSGRPCPVR

SEQ ID NO: 63842 - protein, 176 aa, Zea mays
  Coding DNA Sequence Number=SeqID_20467
MSSLQRLPSGRAAACWAGAGCSCRPAVPALLECWTLGEAESRRRQRRRGQTVSSLHCPVIQSPPASAAVGARSRTADQPAASPPRGQRRPPDRSLETGEPAARAEVSCCRLAAVGSSGQEGDLVPLPYCREPRVTAVGARRLGPYCHTLLTSKQENEEDKNIEIVLLSGSCTFDTN

SEQ ID NO: 63843 - protein, 132 aa, Zea mays
  Coding DNA Sequence Number=SeqID_20468
GESLEAGDRELCTGFQVLRKLETLAVQMSLEWESPSDLAAKPRMVSLSASIECLCRGNFAAAQVLANTSVSFPSLGDHHRLPCHSNVKSESTPASATSVSQPWSSPATSTHRVCLPTPLSAARNRPSQLIVA

SEQ ID NO: 63844 - protein, 1013 aa, Zea mays
  Coding DNA Sequence Number=SeqID_20469
  Gene Ontology: Mol. function=hydrolase activity, acting on acid anhydrides, catalyzing transmembrane movement of substances; Cellular component=integral to membrane; Biological process=calcium ion transport
  Homolog annotation: Hit_ID=Q8RUN1; Match level="QueryCoverage=96%, HitCoverage=93%, E-value=0.0, Identity=83%"; Hit description=Calcium- transporting ATPase 3, plasma membrane-type (EC 3.6.3.8) (Ca(2+) -ATPase isoform 3)
  Pfam annotation: Domain name=Cation_ATPase_C; Domain location=845 -991; Score=29.4; E_value=1.3e-06; Accession=PF00689.12; Description =Cation transporting ATPase, C-terminus
  Pfam annotation: Domain name=Cation_ATPase_N; Domain location=84-162; Score=55.4; E_value=1.9e-13; Accession=PF00690.17; Description=Cation transporterATPase, N-terminus
  Pfam annotation: Domain name=E1-E2_ATPase; Domain location=176-418; Score=213.4; E_value=5.3e-61; Accession=PF00122.11; Description=E1 -E2 ATPase
  Pfam annotation: Domain name=Hydrolase; Domain location=422-749; Score=72.0; E_value=2e-18; Accession=PF00702.17; Description =haloacid dehalogenase-like hydrolase
  Pfam module annotation: Pfam domain module=Cation_ATPase_C::Cation _ATPase_N::E1-E2_ATPase::Hydrolase; Domain location=845-991::84 -162::176-418::422-749
MEDVEVGLEIKLDIRESRVSQVELVFLARWCNKEKLRVALYVQKAALQFIDAARKTEHPLPEMARECGFSVSAEELATVVRNHDAKALRHHMGVDGVARKVNVSLADGVKSDEVGVRAEVYGANQYTEKPPRTFWMFLWDACQDMTLLLLAFCAFVSVAIGLATEGWPSGMYDGLGIVLTILLVVMITAASDYNQSLQFRDLDREKKKIDMQVTRDGYRQKVSIYDIVVGDIVHLSIGDQVPADGLYIDGYSLVVDESSLSGESEPVHMSSAKPFLLGGTKVHDGSARMLVTAVGMRTEWGNLMETLSQGGEDETPLQVKLNGVATIIGKIGLVFAVLTFTVLMARFLVGKAHAPGGLLRWRGADALSILNFFAVAVTIIVVAVPEGLPLAVTLSLAFAMKKLMEERALVRHLSACETMGSASCICTDKTGTLTTNHMVVEKVWASGAAQTVSTAKGFDELRSSVSENFTRVLLEGVFHCSGSEVVTSKDGRTSVMGTPTETAILEFGLEVEKYTKVEHADAKKLKVEPFNSVKKTMAVVIASPNAAGHPRAFLKGASEVVLSRCGSVLDGTGAAEKLTEAKAKRVASAIDAFACEALRTLCLAYQDVGGASDVPGDGYTLIAVFGIKDPLRPGVREAVRTCHDAGINVRMVTGDNINTAKAIARECGILTDDGVAIEGPEFRAKSPNEMRELIPKIQVMARSLPLDKHTLVTNLRGMFNEVVAVTGDGTNDAPALHEADIGLAMGIAGTEVAKENADVIIMDDNFSTIINVAKWGRSVYINIQKFVQFQLTVNVVALMVNFVSASFTGSAPLTIVQLLWVNLIMDTLGALALATEPPNDAMMRRPPVGRGDNFITKVMWRNIIGQSMYQLLMLGVLIFKGKSLLRLGSGGDVSDAQLNTFIFNTFVFCQVFNEVNSRDMEKVNVFSGIFSSWIFPAVAGATAAFQVIIVEFLGTFASTVHLSGRLWLASMMIGSGSLLMGAGLKFIPVDPGSEGSSDRHDGYQPIPTGPNAV

SEQ ID NO: 63845 - protein, 69 aa, Zea mays
  Coding DNA Sequence Number=SeqID_20470
  Gene Ontology: Mol. function=hydrolase activity, acting on acid anhydrides, catalyzing transmembrane movement of substances; Cellular component=integral to membrane; Biological process=calcium ion transport
  Homolog annotation: Hit_ID=A2WYW5; Match level="QueryCoverage=98%, HitCoverage=6%, E-value=2e-26, Identity=82%"; Hit description =Putative uncharacterized protein
MAYLRNKSMEFLKRFEVPAKNPSEDAQRRWREAVGTLVKNRRRRFRMVPDLDKRSQVETERRNIQEEIN

SEQ ID NO: 63846 - protein, 107 aa, Zea mays
  Coding DNA Sequence Number=SeqID_20471
MRHNKWSTRRCEVERRINGLGPTTSVETTCVNLRGFAVWTTRQDVGELQDDVIEVKNIGEIGDRYQVQGTRRAKAGRGECAVRIPEPSACAGSNIERWREIFLERRW

SEQ ID NO: 63847 - protein, 173 aa, Zea mays
  Coding DNA Sequence Number=SeqID_20472
MTSHGSSDEGNALSHTDGLAREGFPRILLEVLQGAGYTTPPQYAVQQFEKDRVEHAKDIWAIYPGQTAHLTVRCMNALYRLQVMRGEAMSHLMALLEATKITLDNREELVVDLSTEMVEKDLQVEQLSNEIQELEELVGTRENTIEVLEDQLINTQQQLAEANEHLDMHHQEI

SEQ ID NO: 63848 - protein, 200 aa, Zea mays
  Coding DNA Sequence Number=SeqID_20473
  Subcellular localization annotation: CTP_CleavageSite=88; ConfidenceScore=5.37e-01
MAHARAYKAHSGVDHTPPHALNLTGAQTHRRLPVHGVSAATRAPAAVDRPTQPFPTPSDPRRRLSTPRLYVTPWSSPCHWIELGRRDLAGTPAADEDSRLRTWTERFRPSPPSSHCNLADGEYVLVPEQGAAQEVAPDPAPEPTPEDLPATALEGKPWNPFEMDTSSLEDMVAGVTWPSILPPGWTVEWDPTSAEEEHEE

SEQ ID NO: 63849 - protein, 177 aa, Zea mays
  Coding DNA Sequence Number=SeqID_20474
MELEQSVDNRASDEADDKGSGEADDKGLGEADNKGSGEANCKGSAEEDEGGSAKVYETGRLSAAQTAGARALGGETERRGRHEERKRRPTDSRPLMAGVTERRVNGEEEREVFRLDLRSFDDWLSAALIIREAATVMVAEVLLRVREGEGKRSRHQWRAEGKGNNIHGAPPLEQAKR

SEQ ID NO: 63850 - protein, 57 aa, Zea mays
  Coding DNA Sequence Number=SeqID_20475
MESHDLRAERESRFVGGNETDGFGYDYGAGCQHCNHCSGKDESVEGDFLDFQDYDEF

SEQ ID NO: 63851 - protein, 185 aa, Zea mays
  Coding DNA Sequence Number=SeqID_20476
MTELGRSVDNRARARRTSGEADDKGSAEVDEGGSTKVYEIGRLDAARTAGAWLSAAEGSVGLDATWRALAPGGRDGEERAPGGEEEAAGGFKAIDGENYRDENKWGRGKEATVMVVEVLLRVGEGEGKRSRHQWRAKGKGNRHPWGSSTPADEEVTRSRGVGGGASEMKRWRRCVNLKENGEEKR

SEQ ID NO: 63852 - protein, 892 aa, Zea mays
  Coding DNA Sequence Number=SeqID_20477
  Pfam annotation: Domain name=TolA; Domain location=295-584; Score= -152.8; E_value=0.073; Accession=PF06519.2; Description=TolA protein
MVRSPAFVLNLRNRDPAAFVREAEDEAVRLVGRYVPRTEGQRSWEIRGSNDRLNRVFELNRLPYDGYPGQDDADRRGKKPMVETKGDPAPAAAPSSKKRKLGTAMGGLGVSDGFARELMRTCAAPGERMSSPELRESSARMLKVTGGCWPRNVPIPHAASGDVFTSRLVRKWRVFPYGRNIAAVVSAVMDKDRQGVAQKRQAAIRIVEARPKRQKRESAKAAAPGGGKPPLAVKSGVPASGKAPEAAAGAGGSKPAKAVPPLSGVAEAAKAARALPSAGKRVADFATNICVEDYLGGSDEGQLAMVVPAAAIVMAGIVPKARGEALGSGGEVSALAVVRDEAGAATRRLKGVTEALSQATEALSQVADFASRAASGALTAAVSAEVERLRTQHADAVREKSASDSKCRKLTDKVAVLEKEKADLRRQLAAERREANEAIAKEQAAQAEAKLARAEGNLAKELAEHLQERLTALESRAKGAEAAMRAEAERTRTQLMDTYRELVGAGGAAGTPRCRGGFMSYASLVTCEGAMNALSREGCRHFEVFDQADEDFDRDVYKVEDLVVKDSAGALYNRLWGPHGREVVRERAETAMAQALRGERVDDLGALNSALPDPEPTPAEAVSGVALEPTPETAAIATAAPTSATAGEDLPPKVAEGAPDAPAAVVPSAEDPAAETAETTAEAAAEPAAEAPAASGPSQVQDFGPAHATATAKFLAASTAEGGKECGGSGSEFSEFFDVADSGSSVEWTEESSEDLDYFAALDVAAAETSPHAADAQDVPGPSTGRRRRRAVAKRRVSTEERSRLRVSRAGRQELLSLQAAANTGEGELRSLFAGEELRIIFATCCASPAAPLGDFCADSLRDRLRVFSHLLCWSGCTLRRLLRGFVAREGG

SEQ ID NO: 63853 - protein, 113 aa, Zea mays
  Coding DNA Sequence Number=SeqID_20478
MACSWQGGELCHDKSREVEGDAAAGRRQEVEERGRAHGSFSHCTREAREEGARREGRRGRCLLLARRRSREGVAGGCCCHEEEEAGKKEGGGWENGGVGVQKCLHLLGEGSYL

SEQ ID NO: 63854 - protein, 93 aa, Zea mays
  Coding DNA Sequence Number=SeqID_20479
MDVAQEASALPPLCFPWAQVQGSCAPFSSIGEEPRVLRGEEGKPLDARRCSERCTNQNRHRPYKHRLGLFMLYALVGSRLRLENKRLFDVCDL

SEQ ID NO: 63855 - protein, 75 aa, Zea mays
  Coding DNA Sequence Number=SeqID_20480
  Subcellular localization annotation: CTP_CleavageSite=68; ConfidenceScore=5.11e-01
MEDRKHKIGGSQAGSSSRPCYSDNSSQQFKQAAQQPPTVNAPARQGAPQQAPGVRGQAYNRGEVNHLEAEAIQDA

SEQ ID NO: 63856 - protein, 98 aa, Zea mays
  Coding DNA Sequence Number=SeqID_20481
MVNLAAVLNTKLDHTLDELGKMSENRRRGARRAQPKQQAPQEDAAQQQQLPPPPPMIIEQMFMMQTQAVQAIGQTLAAMQQVQQQPPPPQPPVQVQMP

SEQ ID NO: 63857 - protein, 125 aa, Zea mays
  Coding DNA Sequence Number=SeqID_20482
MLVDYTTVLNGPSVSVEGPMQQGIESVMEVTPGLLQQPGCPEVLQGTSLAGVQGKAASRTPPPAEARGKSPAAPAPAPGVGAPAPHAGDDAVSPGDWTDLAPYNTVDAPPGEKAKRGSQTYVQCT

SEQ ID NO: 63858 - protein, 213 aa, Zea mays
  Coding DNA Sequence Number=SeqID_20483
  Gene Ontology: Mol. function=thiosulfate sulfurtransferase activity; Cellular component=viral envelope; Biological process=sulfate transport
  Homolog annotation: Hit_ID=A2ZMK4; Match level="QueryCoverage=54%, HitCoverage=21%, E-value=1e-23, Identity=53%"; Hit description =Putative uncharacterized protein
MALGKEPNSGSDDHDRRADDLKILYKAYAIEVLSDGIVDDKKEVLYMFWKEIYRQKLQQFVADGELSKEEVEALMAFQVRLCIPQETVDAAHTEICGQLFKKVGPTTFEAKLQPHLLWSLDQVKENIKTQTHQLIDARSKPRLHAFGSFYDCLKVCSSLFSFERHNNFLSRCNEIIPQCAAAQCILFDGAVPEPRKGIRSGHVPGSKCVPFPQ

SEQ ID NO: 63859 - protein, 228 aa, Zea mays
  Coding DNA Sequence Number=SeqID_20484
  Gene Ontology: Mol. function=structural molecule activity; Cellular component=cytoskeleton; Biological process=phagocytosis, engulfment
  Homolog annotation: Hit_ID=P53496; Match level="QueryCoverage=50%, HitCoverage=37%, E-value=2e-49, Identity=70%"; Hit description=Actin- 11
  Pfam annotation: Domain name=Actin; Domain location=41-228; Score= -10.9; E_value=5.6e-14; Accession=PF00022.10; Description=Actin
  Subcellular localization annotation: CTP_CleavageSite=20; ConfidenceScore=5.48e-01
MPPTAPASSPPPAAPALPTRAARRNLPYFAWYASCRRRNLLLPVTRTGVIPCAIAQIVCMYWSFGVSLSKCCPCVLAMYVAIQADLSLYASGLYHCCSMHIGILFWLTDIVLDSVEKSYELPDGQVITIGTERFRCPEVLFQPSFIGMKAPGIHETTYNSIMKCDVDIRKNLYGNIVFSGGSTMFPGITDRMSKEITTLTPSSMKIKMWISRAEYEESGPAIVHRKCF

SEQ ID NO: 63860 - protein, 78 aa, Zea mays
  Coding DNA Sequence Number=SeqID_20485
MGKGNKRKREPTPPSEDFGDSEYSEEEFSSESEGSPAPVSPPASSDDSDDSQGIAAEAFASSFKEDLLELLIDCLLRI

SEQ ID NO: 63861 - protein, 386 aa, Zea mays
  Coding DNA Sequence Number=SeqID_20486
  Gene Ontology: Mol. function=oxidoreductase activity, acting on paired donors, with incorporation or reduction of molecular oxygen; Cellular component=chloroplast; Biological process=carotenoid biosynthetic process
  Homolog annotation: Hit_ID=Q10AT7; Match level="QueryCoverage=100%, HitCoverage=64%, E-value=0.0, Identity=91%"; Hit description=FAD dependent oxidoreductase family protein, expressed
MALPPLSIRGDLGIISTAVGRYTPSLLKSFIQMGPQGALGATKLLRPFKEIVDSLELKNPFVRNWIDLLCFLLAGVKSDGALSAEMVYMFAEWYKPGCLLEYPLGGTGAIIDALVSGIEKFGGRLALRSHVEKILIENGRAVGVKLQSGQVIRAKKAVVSNASMWDTLDLLPPDAVPKSYEDRVKATPQCESFMHLHLGFDAENAREDLGIHHIVVDDWNKGVDGEQNVVLISVPSVLSKDLAPPGKHILHAYTPGTEPFSLWEGLDRKSAEYRRLKEERSEVMWKAVELALGPKFSREKCDVKLVGTPLTHRRFLRRNRGTYGPAIKAGEATFPGQATPIPQLFCCGDSTFPGIGVPAVAASGAIVANTLVPVSQHSELLDAVGI

SEQ ID NO: 63862 - protein, 188 aa, Zea mays
  Coding DNA Sequence Number=SeqID_20487
  Gene Ontology: Mol. function=RNA binding
  Homolog annotation: Hit_ID=Q338C4; Match level="QueryCoverage=23%, HitCoverage=7%, E-value=2e-13, Identity=79%"; Hit description=KH domain containing protein, expressed
  Pfam annotation: Domain name=KH_1; Domain location=141-187; Score =19.5; E_value=0.0057; Accession=PF00013.20; Description=KH domain
MPGSPTNSPLSFSSPPASVGEEDGEVADDEVHPPHHVQLQQPNEMVQHDLVALVEMAEAAECEEEQDLFADANDDVGIAGSEVADGEVHPPHHAQLQQPDEMVQHEEEKQKVLYWHNEKLTVAFALLSSEPNTVIRIVKNLRMMLIPAQKVGAIIGHKGERVRRLCEETRACVRIIGGHLCAAEQAVR

SEQ ID NO: 63863 - protein, 57 aa, Zea mays
  Coding DNA Sequence Number=SeqID_20488
MAGGINILNTVVPGQPGYLLSPAEESKHILKFFTILITVLGSELSNAKATVSFSLCQ

SEQ ID NO: 63864 - protein, 242 aa, Zea mays
  Coding DNA Sequence Number=SeqID_20489
  Homolog annotation: Hit_ID=Q2QQ41; Match level="QueryCoverage=79%, HitCoverage=66%, E-value=2e-13, Identity=27%"; Hit description =Putative uncharacterized protein
MDRLKRMPMLFDDYREEDFYGLPRKYNIVARGAKIEAITYMYETVKHFDNLLHEKQVYEMHNVKFSLHPGEFNFHHLNGPMELCLDQQTIVEPYTVPIQMAPFPKQILLNLADIAELPNRTLVDIMAIVVHLDTIHHTMWGPFRKIVIMDARGYLHIIKVWGDLLNKNALRWALAKEDYGIIIGTMFRRFRRQDCLESSDHTAIHFNPFHHNTHHFGPIQQALVALNNRQFAVTFLEEQRRR

SEQ ID NO: 63865 - protein, 147 aa, Zea mays
  Coding DNA Sequence Number=SeqID_20490
MGKNNKRKREPTPPSEEFGDSEYSEEEFSSESEGSPAPIPLRESSDDSDDFQGLAAEVWTYIRAVERSGLEGSDESEYSSDEEDSDGGDEGEDDDDDDDDGDGDGSGRGGGDGSRDSTKGDSSRGSTKGSSRGSTKGGGGSRGRASG

SEQ ID NO: 63866 - protein, 98 aa, Zea mays
  Coding DNA Sequence Number=SeqID_20491
MDVEEMELLYAEEYQGEEKGRRLLSCREQAPWTEARLEQARARQKELQRWRARRSLRLPVRRPCGGEDAMGAGAELPAATVRKKGAGKKKVAARGVDE

SEQ ID NO: 63867 - protein, 701 aa, Zea mays
  Coding DNA Sequence Number=SeqID_20492
  Pfam annotation: Domain name=HR1; Domain location=260-330; Score=4.0; E_value=0.087; Accession=PF02185.7; Description=Hr1 repeat
MSSPELRESSARMLRVTEGWWPRNVPIPRAAGEDFFTSRMVRDWKVFPYGRNLAAVVSAVMDKDRQGAAQKRQAVVRLHEARPKRQREAAKAAAPGGSQPLLAAKSSAPASSRAPEAAKAAAAGGSKSAKAAPVSGRVPEAAKVAQELPPPSKRVTDFTTDISVDDYLVGAVLLVPAARYRHSLPVRDEAGAVSRRLKEMKQALSQAADFADHTASGALTAVVSAEVERLRTQHADAVREKSAADSKCHKLADKVAALEGEKTDLRRHLAEERKEANEALAKAQSAQAEANLARAEGSLAKQRAEQLEERLSALQARVERAEASTRSEAERTHKQLMDSYHELGAWTADFEVPDREPGLRCLEWIQEELVALPAIVEGFMSYTSLVTCEGAVNALSREGCWHYEVFDQADEDFERDIYKVEDPVVKESAGALYDRMWGPHGREVVRERAETARGQAARGERVDDFGALNSVLPDPEPNPAVAVSEAALQPPPEIAEGVPDAPAATAAGGGPSPTAAPRAEDPVKVAAEPTAEDPATAGSSQVQDFGPAHATATTNFLAASTVDDGNKSDGSASKFSDFGDSGSSVEWTEESSAKDLDYFAALDVAAAEASPHAADAEVVPGPSTGRNRRRAVAKRRECSKSSPFGVASLYALGDAFVLTMKGPSHLGSSLPLDSIRAVRTSTRSPLLNSLGMTARSRHAFV

SEQ ID NO: 63868 - protein, 66 aa, Zea mays
  Coding DNA Sequence Number=SeqID_20493
MQDEIARWDDLVIGLRPAPCRAKGVGYFSIDMLRFWHSTVDCASFGLLPEISLLMGLLAPFWLLAS

SEQ ID NO: 63869 - protein, 123 aa, Zea mays
  Coding DNA Sequence Number=SeqID_20494
MAFLQQQSECMAAHNAHAQQAMNIPNNIDDFINDFFASRDRLVNFGGHYFGRYDGIPPKIAYFRLNFFGGQMPPKMLSCPVVSGTPVFYHWRVIIEELELIIELELFYTSGSMRLTWDVPYKM

SEQ ID NO: 63870 - protein, 244 aa, Zea mays
  Coding DNA Sequence Number=SeqID_20495
EDNIDAESNTERPGLTGVNDDDDGAAQKQQTTGECRRRAVHCASRNSEPAARGLLHILSSTYDASIWWGCRENLVAGRCAAGRGSRAEALRRAPSMERLTIGAEGRGLPASFPWKKWGHAGEEGLGAMAAVLGHGREMAGRGVSLGKGAMAVEEMELLRAEDYQGEEKGRRLLSCREQAPWTEARLEQAHAREKELQRWRARRSLRLPVRQPCGGEDAMGAGAELPAATVRKKGAGKKKMAARG

SEQ ID NO: 63871 - protein, 124 aa, Zea mays
  Coding DNA Sequence Number=SeqID_20496
MAMNDVVTPHQPVCLYSVAGEEVEPPHRLHWLSGGLFDVWNILIVVRQQAQGRCFLDLWHSKAFVFFTDRARYKKRSSTAKGLLLGVFFSAEGLQGKNTFGKMIQRIAEATFSLDLSPQDEDSI

SEQ ID NO: 63872 - protein, 467 aa, Zea mays
  Coding DNA Sequence Number=SeqID_20497
  Subcellular localization annotation: CTP_CleavageSite=27; ConfidenceScore=5.21e-01
MPDEVARWDDLVIGLRPASCRAKGFFRCRTSSARTSVCGEVLRRFNVQKRKIGNKIAQFGSGTFTPKTGKTSMEVVELVPCARNKWGKWWDFWFYVAEGTVEDHPGLPVAEMCSHCYSTYPQFEVAEEDADEGALRCAAGLSSVRDLVEEFVAYGVWPLARGWALGEVCPHQMPSRGGMLVRSPAFALDLRSRDPVAFVREAEDGAVRIVGRYVPRTEGQRSWDVRGSNDRLNRVFELNRLPYGGYPGQDDVDRRGKKPVAETGDDPAPAVAPSSKKRKLGTAMGGLGVSDSFAMELMGICAAPGGRMSLPELRESSARMLKVTGGWWPKNVLIPRAVGEDFFTSRMVRDFRVFLYGWNIATVVSAVMDKDRQEAAQKRRAVVRLPEARPKRARGIAKAAAPGGSQPTLAAKSTGPGSSKVADVVKAAGASRAKSTSAEATKDRELPLPGKRIADFGTDISVDHYLT

SEQ ID NO: 63873 - protein, 118 aa, Zea mays
  Coding DNA Sequence Number=SeqID_20498
MYLVIRLLHLPESLRENDIHCTACVHQDIMDQKSLDDTRYDQCIVVRIIFKLEVFLREQLEQPMIGSTSFVAEAAAAWLPCEAIVTVVEASSPEVSANVGHLFSNAINQEQGNTIVNG

SEQ ID NO: 63874 - protein, 594 aa, Zea mays
  Coding DNA Sequence Number=SeqID_20499
  Gene Ontology: Mol. function=DNA binding; Cellular component =extrachromosomal circular DNA; Biological process=DNA recombination
  Homolog annotation: Hit_ID=P0A0C5; Match level="QueryCoverage=65%, HitCoverage=93%, E-value=0.0, Identity=93%"; Hit description=Plasmid recombination enzyme type 2
  Pfam annotation: Domain name=Mob_Pre; Domain location=1-175; Score =301.6; E_value=1.5e-87; Accession=PF01076.10; Description=Plasmid recombination enzyme
MQFHNQRERKSRTNDDIDHERTRENYDLKNDKNIDYNERVKEIIESQKTGTRKTRKDAVLVNELLVTSDRDFFEQLDPGEQKRFFEESYKLFSERYGKQNIAYATVHNDEQTPHMHLGVVPMRDGKLQGKNVFNRQELLWLQDKFPEHMKKQGFELKRGERGSDRKHIETAKFKKQTLEKEIDFLEKNLAVKKDEWTAYSDKVKSDLEVPAKRHMKSVEVPTGEKSMFGLGKEIMKTEKKPTKNVVISERDYKNLVTAARDNDRLKQHVRNLMSTDMAREYKKLSKEHGQVKEKYSGLVERFNENVNDYNELLEENKSLKSKISDLKRDVSLIYESTKEFLKERTDGLKAFKNVFKGFVDKDTDFMTDDEEKNLKRLSDLEEGLHRKSVLNEMVLNVSLPDIANDFNKPPASTNWVNTAFMLTFSIGTAVYGKLSDQLGIKSVLSFLIFVKHIRKVTDPFVDPGLGKNIPFMIGVLCGGIIFGTVAGFVSMVPYMMKDVHQLSTAEIGSVIIFPGTMSVIIFGYIGGILVDRRGGLSFTKTVISTIVSSSLKQQEAGAGMSLLNFTSFLSEGTGIIVISWLVTLNVYKHSQRDF

SEQ ID NO: 63875 - protein, 148 aa, Zea mays
  Coding DNA Sequence Number=SeqID_20500
MTDTGLILGQPSSHLLFTIFFSLTLSFSLLFPLGDSIDEYYHHTEEETKDYEPCATVFNPRITKHCDLRGEGVENGVAWDLAEGILSGGVGAVLVRMEAGTRAGARVSGGVNDPDVCGLWFQESLPLCMGSSQSEEKLHYPMHAEDWA

SEQ ID NO: 63876 - protein, 252 aa, Zea mays
  Coding DNA Sequence Number=SeqID_20501
MEVRCQTSFCQNEDGFPKLLRADTIRLGIRSQPEYDGREFVEHGTEKCVVIVYIGSSPHHVEWSVTAAGHRFKDTCQVVARKALRALCQIYEEEVADTPLRFFPPFQRDRPVWMARMRALEGKQLLEDDPQSCTSLHTYSSLMHSMISWLGTTVTWSLPEEKRRLGNSPKGAIVLEGIPVFPQAMDKQEHPESFRDPPPELFELLAMKKIPAPSHEIKKKLQAPRQHRRPLRSYKSQSSLKKSSTPCCHLSC

SEQ ID NO: 63877 - protein, 330 aa, Zea mays
  Coding DNA Sequence Number=SeqID_20502
MAERYQLPWSCIPPTTRRKDCGHPPSGGSEGGKTRCIREREDMVAFQGGHPPFKDDSPYLRPQPSWAESSPTRSKVLPLRRGGWVPRVMQVGPEQKKPYRRARCMQPPSGYKHPSTFAQTSGRKGGRPCRRHATAPSGRTSPTSNAPSMDAHAHATRNRRAGRYVQATAPPLAPPSRLLDCGISTATRGDPARDPVAPAWRDGQCGQKWAGSNGGGRRAGAAVTSSARLMSHPGGPGKGYTPKRILLREGNRLRASLLIRGSKAGPSEGFDSRLRARGLHTHYWSEVRRPAPWKGSTAASGHSGSAPTTDQGFEGWPSKGSQPPQTQSEG

SEQ ID NO: 63878 - protein, 99 aa, Zea mays
  Coding DNA Sequence Number=SeqID_20503
MDYATPAGVTLEAGSGQPHQRRRPPLHRRIAGDSDHLYTSSDNDLRSERLASSSDHLRVLAPVFAKGVRTSKNAAAAPATYDAMYDPLVRPGAWEKPWV

SEQ ID NO: 63879 - protein, 322 aa, Zea mays
  Coding DNA Sequence Number=SeqID_20504
  Homolog annotation: Hit_ID=A2X6T6; Match level="QueryCoverage=19%, HitCoverage=5%, E-value=2e-09, Identity=50%"; Hit description =Putative uncharacterized protein
  Pfam annotation: Domain name=B3; Domain location=97-181; Score=1.1; E_ value=0.061; Accession=PF02362.12; Description=B3 DNA binding domain
MEKEPLDMVESSVRVIETHVDIIRSLVTDGVVDTSEPESVYTLKTTLFQIGDVCDMLEKCALSIKKYAEIIQDEALQYAEDDEAADDLEELPSPDLLTQANILEKYFGIEQRRHGCDVIMLKDPKKRLSPVVYHLPLFVGFTDGWKHLVIANDLRAEDVCELVKGPDDEILVPDLREEKRTDEAGVALNFVTTHPDIVHWLTIVWPLNKLADVPSPKHYNITAMPSLSNCIGKCPSICELASRPDPAPEGDNEQPSMDVVCTGASNKVDEDATKLEWQTTSSSGERSGEDSSSDDNPCTPIPPRKKKTSDELDAEYIPNDEE

SEQ ID NO: 63880 - protein, 137 aa, Zea mays
  Coding DNA Sequence Number=SeqID_20505
MEFFSDTMLDALSCCDIEGFALMDGQGQCLDGDGRGSLSPWPVGLDSLTSMDLISSGHQQSIFEAEEKKEHVQRRERKINEEKSELVGSPHRGQLGDCPTVQLPHGDSGLGSSVSRGVGDNGLIMMVFGSLTKASSI

SEQ ID NO: 63881 - protein, 345 aa, Zea mays
  Coding DNA Sequence Number=SeqID_20506
  Gene Ontology: Mol. function=carboxyl- or carbamoyltransferase activity; Cellular component=ornithine carbamoyltransferase complex; Biological process=amino acid metabolic process
  Homolog annotation: Hit_ID=Q8SA97; Match level="QueryCoverage=27%, HitCoverage=21%, E-value=3e-12, Identity=49%"; Hit description =Ornithine carbamoyltransferase
MALPVDVAGPRPRPGDVGAPPKLGSNMSSVVEAESESLGRARRKSFGRGQGGVRALGSGEAEFVIFRGRARVRALGSGGAEFAVFRVLARVRALGSGGAEFAVFRVRARVRALGSGGAEFAVFRVLARVRALGSGGAEFAVFRVLARVRALGSGGAEFAVLPGLSPSSSPGVGRSGVRHLPGGAVLLSDRSVEQRSDGGLLLSEAKASGEPEMCPPLKGGPRARRKSLELYADGGYQLRIRRLEAIVRLQGFSSHSLVAPLRRWSPKTVTSSSWMGRGKPGCDPVPSIGRVRHPRWGGERGEPGLYLLRGLANHLLFQLLVVAIVLPRCDGGILQSCRGRRTVAV

SEQ ID NO: 63882 - protein, 160 aa, Zea mays
  Coding DNA Sequence Number=SeqID_20507
  Subcellular localization annotation: CTP_CleavageSite=39; ConfidenceScore=5.22e-01
MAQQSSASPDQRNRGQHLKTAASAWPLDVRKGSSACSVDATEAAAHLCFHRPMGRFLFLSISSSTVYGMGAWEEASSSCALAVRTCKEKKEKVFRTNQINPKNVEIRFNIFYRCYSNTVKKMAATAAAADNASEFSLKKFVLADIVGEQTTLKTKKSSEK

SEQ ID NO: 63883 - protein, 219 aa, Zea mays
  Coding DNA Sequence Number=SeqID_20508
  Gene Ontology: Mol. function=ER retention sequence binding; Cellular component=integral to membrane; Biological process=protein retention in ER
  Homolog annotation: Hit_ID=Q69SG3; Match level="QueryCoverage=34%, HitCoverage=27%, E-value=2e-30, Identity=90%"; Hit description=ER lumen protein-retaining receptor-like
  Subcellular localization annotation: CTP_CleavageSite=79; ConfidenceScore=5.65e-01
MTIVATNRNSCNNPTGLDPTQPNPSITPPAPPPRLSQAPQLRSSRHARTSRSRGRAHPDPDRARRRLRLHRSASGREMRGSSRRPVAVVMAWVRRQPPKVKAFLAVVAGMAALVFIRFIVHDHDNLFVAAEAAHALGIAVLIYKLTKEKTCAESDFTLIVRLVGSASQLARRHRVEPTFQRLLLRPRLGSGEDAIPPEAEAEAEPWGRARRRPPPEAEA

SEQ ID NO: 63884 - protein, 208 aa, Zea mays
  Coding DNA Sequence Number=SeqID_20509
  Gene Ontology: Mol. function=transmembrane receptor activity; Cellular component=intrinsic to membrane; Biological process=innate immune response
  Homolog annotation: Hit_ID=Q7XIJ6; Match level="QueryCoverage=72%, HitCoverage=75%, E-value=6e-45, Identity=64%"; Hit description=TIR/P- loop/LRR disease resistance protein-like protein
  Pfam annotation: Domain name=TIR; Domain location=64-187; Score=41.5; E_value=3e-09; Accession=PF01582.11; Description=TIR domain
MASSALPQQRSSAAISDDDDRAIASRLTASLEVATGNAELAARWAGRVDDERPASSSLKKEYDVFINHRGVDTKHTVARLLYDRLDHLSAGRVRSFLDNKSMRPGDRLQESIDEGIRQCKVAVAIFSQRYFDSDYCLRELASIVEARKVLIPIFYGIKPSELVLPQEVADLYTSQDVKRFSLAFQEAKSTVGLTYDPATGGFGLNFGN

SEQ ID NO: 63885 - protein, 236 aa, Zea mays
  Coding DNA Sequence Number=SeqID_20510
  Gene Ontology: Mol. function=carboxyl- or carbamoyltransferase activity; Cellular component=ornithine carbamoyltransferase complex; Biological process=amino acid metabolic process
  Homolog annotation: Hit_ID=Q8SA97; Match level="QueryCoverage=54%, HitCoverage=25%, E-value=1e-14, Identity=41%"; Hit description =Ornithine carbamoyltransferase
MALPVDVAGLCPRSGDVEAPPKPRSSLSSMAEAEPEPLGRARRRLSGRGQGGVRALGSGEAEFVVFRGLARVRALGRAEWIGVAQAALSFCQTGQWSSEVMALYADGGYQLRIRRLEGTPNYGPRHPERLSRLLPAASEVPGVSRAHVRALEIAGEGLDQVVPVGDLPRRQVLQPGASGVGEEQGEVADDECHTRFLEGKPNANHSKGEYTSTYSASILFGCSGLALCGDQSSSCF

SEQ ID NO: 63886 - protein, 162 aa, Zea mays
  Coding DNA Sequence Number=SeqID_20511
MGGPVEQQKIDERHAVTRSSSDDDDDFCSGRPNSGNDDLRADAAARRPPPMPKLVRQGRAEGHRVGGVTLLLKATLPTCVPSRHGLSLLQHSPRSSPTARGLGPTRHASRPRVEEAKPPRAVHATIQRLQASLHFRPDQRVKGWAAMQAACNRAKWAHLSDF

SEQ ID NO: 63887 - protein, 167 aa, Zea mays
  Coding DNA Sequence Number=SeqID_20512
  Pfam annotation: Domain name=NAM; Domain location=114-167; Score= -43.7; E_value=0.0021; Accession=PF02365.6; Description=No apical meristem (NAM) protein
MEGRPGGRPESRPRRVQQAGSGRWRADTQVRAAAGYEYVSSNGVIFLGAMPSAPSHSLFPCPHAPPSPADRPALLHRNISRGPGESTKNPSADHSTAACSIWTLPTDSVRLSATEPGFRFDPTDEELVVHYLKKKAAIIAFTSSIRGSYLGATSGNREKVGVKKALV

SEQ ID NO: 63888 - protein, 159 aa, Zea mays
  Coding DNA Sequence Number=SeqID_20513
  Subcellular localization annotation: CTP_CleavageSite=61; ConfidenceScore=5.08e-01
MANGPKTDFRPRPRKRARGRARDPPVVPPRETWKFGCTRPPLPCGRLPAPVSHRSCGHPVPAALRSACVLLPVPREAVLDTRCLRRAHPPGVRLVGSRAPAAFASCRRQPMAGGTEDTSLALLVSDVAHAEGRRRVGVTRPRIGPPERTTASPARRLRA

SEQ ID NO: 63889 - protein, 269 aa, Zea mays
  Coding DNA Sequence Number=SeqID_20514
  Gene Ontology: Mol. function=oxidoreductase activity; Cellular component=endoplasmic reticulum; Biological process=electron transport
  Homolog annotation: Hit_ID=Q8LGM8; Match level="QueryCoverage=32%, HitCoverage=16%, E-value=9e-43, Identity=96%"; Hit description =Cytochrome P450 monooxygenase CYP72A5
MVASSSKEAYRRLLAGKLFNNQTHIFAFRNKLPEPENMSITNSAERTVNAPELVDDYYLNLLDWGSNNVMSIALGNTGCLRDASSGSTSELVTIDEDSGPITSPRTLRGVHEARTYERHIWDQGSSWPGGVRTQVVWSRAAAGQWRQRQPSAHLGMMPVFSTCCIEMITRWDNSMPSEGSSEIDVWPEFQNLTGDVISRTAFGSNYQEGRRIFELQGELAERLIQSVQTIFIPGYWKLQTEKAPTALGPNSQAIKANTVQLTGHNIFLQ

SEQ ID NO: 63890 - protein, 559 aa, Zea mays
  Coding DNA Sequence Number=SeqID_20515
  Gene Ontology: Mol. function=protein serine/threonine kinase activity; Cellular component=plasma membrane; Biological process =protein amino acid phosphorylation
  Homolog annotation: Hit_ID=A2YMS7; Match level="QueryCoverage=100%, HitCoverage=100%, E-value=0.0, Identity=82%"; Hit description =Putative uncharacterized protein
  Pfam annotation: Domain name=Pkinase; Domain location=64-342; Score =327.0; E_value=3.3e-95; Accession=PF00069.16; Description=Protein kinase domain
  Pfam annotation: Domain name=Pkinase_Tyr; Domain location=64-342; Score=-43.2; E_value=9.3e-10; Accession=PF07714.8; Description =Protein tyrosine kinase
  Pfam annotation: Domain name=efhand; Domain location=389-417; Score =26.4; E_value=0.00011; Accession=PF00036.23; Description=EF hand
  Pfam annotation: Domain name=efhand; Domain location=425-453; Score =22.6; E_value=0.0015; Accession=PF00036.23; Description=EF hand
  Pfam annotation: Domain name=efhand; Domain location=461-489; Score =27.5; E_value=4.9e-05; Accession=PF00036.23; Description=EF hand
  Pfam annotation: Domain name=efhand; Domain location=497-525; Score =39.1; E_value=1.5e-08; Accession=PF00036.23; Description=EF hand
  Pfam module annotation: Pfam domain module=Pkinase::Pkinase _Tyr::efhand::efhand::efhand::efhand; Domain location=64-342::64 -342::389-417::425-453::461-489::497-525
MGNCCVTPNGAADAGGGKKPKEPKQKKGKKPNPFSIEYNRSTPASAPRLVVLREPTGRDIAERYELGAELGRGEFGVTYLCTDRASGEALACKSISKKKLRTPVDVEDVRREVEIMRHLPKHPNIVTLRDTYEDDNAVHLVMELCEGGELFDRIVARGHYTERAAALVTRTIVEVVQFSVTSMIAFSKFDSIGYVLNMCHKHGVMHRDLKPENFLFANKKESAALKAIDFGLSVFFTPGERFTEIVGSPYYMAPEVLKRNYGPEVDVWSAGVILYILLCGVPPFWAESEQGVAQAIIRSVIDFKRDPWPRVSDNAKDLVRGMLNPDPKRRLTAQQVLDHPWLQNIKKAPNVNLGETVKARLQQFSVMNKFKKHALRVIAEHLSVEEAADIKDMFEKMDLNKDQMLNFDELKLGLHKFGHQIPDADVQILMEAADADGNGSLDYGEFVTLSVHLRKIGNDEHLHKAFAYFDRNQSGYIEIDELRESLADDLGQNHEEVINAIIRDVDTDKDGKISYDEFAAMMKAGTDWRKASRQYSRERFTSLSLKLQKDGSLQMESTQ

SEQ ID NO: 63891 - protein, 91 aa, Zea mays
  Coding DNA Sequence Number=SeqID_20516
MSPGAPNTVRCVTGQSGEIYVPLVNVATLRTRGPSAHQAWIVQRKAETQLLLPGHGTSGPMSRNFRVATESPPSETTPRCLASGLAPTHKD

SEQ ID NO: 63892 - protein, 63 aa, Zea mays
  Coding DNA Sequence Number=SeqID_20517
MNVGIQDCIKGTKKLEDDHGWLTPEDIDRYTAHEGFDGLDLKTIGHTVSRIWASKPRWSYDGN

SEQ ID NO: 63893 - protein, 670 aa, Zea mays
  Coding DNA Sequence Number=SeqID_20518
  Gene Ontology: Mol. function=nucleic acid binding; Cellular component= nucleus; Biological process=regulation of transcription
  Homolog annotation: Hit_ID=Q84SL2; Match level="QueryCoverage=90%, HitCoverage=91%, E-value=0.0, Identity=67%"; Hit description=CCCH -type zinc finger protein-like protein
  Pfam annotation: Domain name=Ank; Domain location=108-143; Score =31.2; E_value=3.8e-06; Accession=PF00023.21; Description=Ankyrin repeat
  Pfam annotation: Domain name=Ank; Domain location=73-106; Score=22.0; E_value=0.0022; Accession=PF00023.21; Description=Ankyrin repeat
  Pfam annotation: Domain name=zf-CCCH; Domain location=278-304; Score =33.3; E_value=8.7e-07; Accession=PF00642.15; Description=Zinc finger C-x8-C-x5-C-x3-H type (and similar)
  Pfam annotation: Domain name=zf-CCCH; Domain location=314-336; Score =0.4; E_value=1.2; Accession=PF00642.15; Description=Zinc finger C-x8- C-x5-C-x3-H type (and similar)
  Pfam module annotation: Pfam domain module=Ank::Ank::zf-CCCH::zf -CCCH; Domain location=108-143::73-106::278-304::314-336
MVDLADLEGAGEAARSHPAASGQRDRLAALLELAAADDAAGFREALAGGGGQGDAAELADGVGLWYGRSKAYEPRTPLMVAATYGSVEVVSLLLGLGCVDVNRRPGVDGATPLHCAASGGSRNAVAVVKLLLAAGACPVTPDSAGRLPADVILPPASPDALGDLDMLLGRRRGLAVATSVPSLSSSPPLSTSPDEGNRSPSSRSSSLSPITVDRAKKEYPVDPTLPDIKSSVYASDEFRMFAFKVRPCSRAYSHDWTECPFVHPGENARRRDPRKHPYTAVPCPNFRRPGGCPSGDSCEFSHGVFESWLHPSQYRTRPCKEGAACARRICFFAHDEDELRHVPHNSGAGLLSPRASSSIDMTAAAAALGLLPGSPTRHFVPPPLSPSAANNGGGAAAHWLQGSRLRSSFNARDAQVDDLGVLLEWESQYLGALSLPQSSRSQLSIRPTAIAPSNLEEMYASDMAMSPRFSNDQVHSVYSPAHKSALLNKFHHQQKGLLSPVNTNRIYSPRGLDPSVLHSPFGGMCPRSPRTMEPASPLTVCVGATATQRDMLDQFSSLNKHQVPSAGSPRNLNVSWGNIGTPKSKVDWGVDKDELVRLRHPVQPGNTEEEPDVSWVQSMVNHAELSGKRGEMAGMASRPTNRPELSSQDDSLDESVIASWLEQQMHLEPK

SEQ ID NO: 63894 - protein, 113 aa, Zea mays
  Coding DNA Sequence Number=SeqID_20519
MVIVGPQRSQGQQSNLGAATARLDPPARDELVETEVWKRLARRGHGRSPRLADLLGEDLVVRPTMQTYSGLKLDKWKLSRRNKESTTDGHWVSQVHKGSTQTNKKIKLGFKKK

SEQ ID NO: 63895 - protein, 257 aa, Zea mays
  Coding DNA Sequence Number=SeqID_20520
  Subcellular localization annotation: CTP_CleavageSite=59; ConfidenceScore=5.29e-01
MAFPVPCGRFLGTRPPRTSESPFGSWRAFPKLSAFRDRGVPKPTSECAACPSPDGSSAWASAKGGEARWPESSVREVPSQGVGRGGSRSAEARAESEPWGRARRSFVVFRVLARVRALGSGGAEFAVFRVLARVRALGSGGAEFAVFRVLARVRALGSSGAEFAVFRVLARVRALGSGGAEFAVFRVLARVRALGSGGAEFAVFRVLARVRALGSGGAEFAVARPDCLSDSLCRVALQSEWRRRRCPSVRLASGAVE

SEQ ID NO: 63896 - protein, 226 aa, Zea mays
  Coding DNA Sequence Number=SeqID_20521
  Homolog annotation: Hit_ID=A2XN88; Match level="QueryCoverage=42%, HitCoverage=11%, E-value=8e-17, Identity=52%"; Hit description =Putative uncharacterized protein
  Subcellular localization annotation: CTP_CleavageSite=54; ConfidenceScore=5.58e-01
MPHAPRQPSPPGIPPPSPRPLPSPTRPPPPAARAPTALPQPPRRALPTKHAHARAGSRGSYQILSMPEQARRDLAHAGSGRRGSRPRCAPDARLLAPTVSRPRGHGSRQHAGGSLPSPVVPQALVRESGEASVGSFRIGSSMLLGRGVTLRVLLFSSLWRLRARAYAAISCMRSAALPVAASWLRLRNTHVLLLMVVLFALFLRKLSGARSRATLTRRCRQYEKLT

SEQ ID NO: 63897 - protein, 170 aa, Zea mays
  Coding DNA Sequence Number=SeqID_20522
MVRVWALGKGSGELRVTRRAQPWARHRRRGTREHGPRQSSPTAAQLNSGERLHGQQGSKWEIKGMGGLVTSRDDSRALEQRRGHREGPGGRWRRLGCMVIGPVSEPREIEGLGKTRGCLVLLARRRRSVGQWTRQELDDGHGTDGGLRQCSTAVRSVRERGARGSAVGRY

SEQ ID NO: 63898 - protein, 375 aa, Zea mays
  Coding DNA Sequence Number=SeqID_20523
  Homolog annotation: Hit_ID=Q6JAD6; Match level="QueryCoverage=40%, HitCoverage=29%, E-value=4e-58, Identity=57%"; Hit description =Putative uncharacterized protein
SEMHLTYLLGLLTLLTTSGRYVEEWVRVFNASVWIDPDHQWMSLCYGTSDPPRRPHDGVAPATAHIAALFRPPFSDGSRRSPADFTTVAKYLYQLMRRTLLSWMGYREATTHIQLWLLGALIFHSEFDVVDFLICEIEDTGTLEASRLLFGSYHPAPEDPVPGAAVPDDDDDDDDDDFGIPPLPPVPPRSHDHEARSSRAAPAVPPAIDPALAAILQTLTQQQAHLAADRQDTLQQQLLADKAENRAFMTHILQHTGAQIPPVQSAPPLDLQAAVVLALQAGPPLPSFGPSSSPLLPVTLVFSSPVISSISAQPPVPPAPAVTTAVVAVSVTSSASVAPAAQPPSESVLAPASTVDPGSEADSDPQLAFALLPRS

SEQ ID NO: 63899 - protein, 230 aa, Zea mays
  Coding DNA Sequence Number=SeqID_20524
  Gene Ontology: Mol. function=catalytic activity; Cellular component =cytoplasm
  Homolog annotation: Hit_ID=A2X1L2; Match level="QueryCoverage=67%, HitCoverage=60%, E-value=5e-72, Identity=88%"; Hit description =Putative uncharacterized protein
  Pfam annotation: Domain name=HD; Domain location=98-202; Score=60.2; E_value=6.8e-15; Accession=PF01966.13; Description=HD domain
  Subcellular localization annotation: CTP_CleavageSite=42; ConfidenceScore=5.49e-01
MGGGSRALSLSSLCATTLAAAKPPQHPVPFAPAHRALPHRLAAAMSSSSSPTPAASVDAGAPAPSASNAIDFLTLCYRLKTTKRAGWVKRGVQAPESVADHMYRMGVMALVAADLPGVNRDRCVKMAIVHDIAEAIVGDITPSDNVPKEEKNRREKEALDHMCELLGGGSRAQEIRELWMEYEENASLEAKVVKDFDKVEMILQALEYEKGEACLDLSHLKTPLMWQPPP

SEQ ID NO: 63900 - protein, 143 aa, Zea mays
  Coding DNA Sequence Number=SeqID_20525
MDTASSLQGTPRHGRKAEPSGWGFSQRAEGRWEGAARLRLAAGPDDDGQPDRGKVRGDAVCAKGELEQGTRADDVHDEQDQRHGASGWKLSTGWMQAGDELGQVVGHRGARRVRRAQPAAGCLWMLMDGRNAGRWVRLEERRA

SEQ ID NO: 63901 - protein, 82 aa, Zea mays
  Coding DNA Sequence Number=SeqID_20526
MDESGMKKEIGLLGLVIVSHLSPRGLGTLQAVAEPPKLLGPHAPVLVPKTSDGCACAPDNLTGSVRLPQGHRINHLQPEPQD

SEQ ID NO: 63902 - protein, 35 aa, Zea mays
  Coding DNA Sequence Number=SeqID_20527
MDMMDSTSEKMYLCQDLVDVGLMIEDPLTGHMPRH

SEQ ID NO: 63903 - protein, 142 aa, Zea mays
  Coding DNA Sequence Number=SeqID_20528
MGEKQSRAAGDSASEQRGDGKELLGCGLLPGVRGEETCALEISDDDGQPDRGKVRGDAVCAKGELEQGTRADDVHDEQDQRHGASGWKLSTGWTQAGDELGQVVGHRGARRVRRAQPAAGCLWMLMDGRNAGRWVRLEERRA

SEQ ID NO: 63904 - protein, 102 aa, Zea mays
  Coding DNA Sequence Number=SeqID_20529
  Subcellular localization annotation: CTP_CleavageSite=87; ConfidenceScore=5.27e-01
GPNSISLLRRSPLLPTLAPAAASGMWAMAVKSILPMAILLVRCKLASSLVSSPSASWATLGLPIGREGAITIVDSRRHLVREQRPVHASLVTRGATEQLRGG

SEQ ID NO: 63905 - protein, 187 aa, Zea mays
  Coding DNA Sequence Number=SeqID_20530
MELLLGAMYNREREEWRHGKLELGQGKEERGSASKLLEPKERVGARLLWKMAGAEEAGWSTGQGARPWSRCMGFAAAPWEKNSRGVKDAMAGGAGSREPAGGLAAVKQGRRKAEDATGRASARWREGTPGHGSPCALGKELQLYVLEGAHGWKMVEEEEKGVGGWGGNGKFSECKGGKPIFIEEKLG

SEQ ID NO: 63906 - protein, 133 aa, Zea mays
  Coding DNA Sequence Number=SeqID_20531
MALGRELCLAEGDLGLGTNFASPEPGLVYLLPANTGAGSVVTSGGLLPRPSPTLASISTTERRPTSPYTAELTYYLGTFCHTQYCVNHYGMGNPLVRGARVRDQALSPCLGSQQKSSGHKSPNKYKTMLLEDL

SEQ ID NO: 63907 - protein, 191 aa, Zea mays
  Coding DNA Sequence Number=SeqID_20532
  Subcellular localization annotation: CTP_CleavageSite=64; ConfidenceScore=5.42e-01
MPEGAYKYPGCTMVCPSLRLTPRARTPTPRALPRPPSPPEPRPPRPAPSSHFQAAPVTRLASPVAREAFQVLGPNRVSPETQDRPRWTSVTRSRAPDPSPPTSSPPVHVDQPTPTTTADDPHLDVIARDPGPHPTPHRSNLAADCNLADGEYVLIPEQGAVHEEDQEQAPETAIEDLPAAPSFGGKPRFYA

SEQ ID NO: 63908 - protein, 94 aa, Zea mays
  Coding DNA Sequence Number=SeqID_20533
MAARCLFQALKQWRGRGLRLGKWWLGHGKNREGEAGHRPWARPGKMELLLGTMYNREREEWLHGKLELGQGKEERGSASKLLEPKERVLAAVRK

SEQ ID NO: 63909 - protein, 72 aa, Zea mays
  Coding DNA Sequence Number=SeqID_20534
  Gene Ontology: Mol. function=structural constituent of ribosome; Cellular component=ribonucleoprotein complex; Biological process =translation
  Homolog annotation: Hit_ID=O22453; Match level="QueryCoverage=59%, HitCoverage=16%, E-value=1e-15, Identity=93%"; Hit description =Ribsomal protein S4
  Pfam annotation: Domain name=Ribosomal_S4e; Domain location=11-72; Score=30.0; E_value=8.5e-06; Accession=PF00900.11; Description =Ribosomal family S4e
MGNKTGVPSGSPRSMYLILAILSIYVFMLCKVRSVQFGQKGIPCLNTYDDRTIRYPDPLIKANDTIKIDEIF

SEQ ID NO: 63910 - protein, 143 aa, Zea mays
  Coding DNA Sequence Number=SeqID_20535
MDTASSLQGTPRHGRKAEPSGWGFSQRAEGRWEGAARLRLAAGPDDDGQPDRGKVRGDAVCAKGELEQGTRADDVHDEQDQRHGASGWKLSTGWTQAGDELGQVVGHRGARRVRRAQPAAGCLWMLMDGRNAGRWVRLEERRA

SEQ ID NO: 63911 - protein, 251 aa, Zea mays
  Coding DNA Sequence Number=SeqID_20536
  Homolog annotation: Hit_ID=Q6J9V9; Match level="QueryCoverage=43%, HitCoverage=30%, E-value=1e-11, Identity=46%"; Hit description =Putative uncharacterized protein
MQAACNRTKGVHPFDSDASSTGAQAHTSWTGKEDTPKGILLREGSGPRALLLIRGSKAGPSEGFDSRLRALGLRALLLIRGSKAGPSEGFDSRLRALGFRAHYWLAPEGFASRLRARRARDDSGYVRYMAEARATLPRLGGCSRMREQPNQPENLEPDYAPGLRPLVTPISTKLQRPDGRNSGQGSVHSRDTIPPRPSLASGKGSRPRRIHVLPEGPLKQRTHLRLARGPSFAEKEPWPDRHANQPYRRSI

SEQ ID NO: 63912 - protein, 197 aa, Zea mays
  Coding DNA Sequence Number=SeqID_20537
MDITSKMDIAQSETRVRSSKTTDQAKDGGKKSFEVPNAWEKVKEAEEPKAKGEEEGLQSQGSEQTEEGVEIDSKPRSCSRVKGNFQQQNPRQLAEARSGSSDNDLRSGQPNSSSDDLSADAAATRPSPTSPPSNWWSPSWVTTSEGMQPGRLMKILEAERWLKGTNFREVAFLQRRQDESNAGAPHPGARKLEGRDA

SEQ ID NO: 63913 - protein, 115 aa, Zea mays
  Coding DNA Sequence Number=SeqID_20538
MDITSKMDIAQSETRVRSSETTDQAKDGGKKSFEVPNAREKVKEAEEPKAKGEEEGLQSQGLNSGELAALGNSPAMYGYNSPDCPVCTGLSGEPTVGRANGWPRDLRGTRGRANG

SEQ ID NO: 63914 - protein, 173 aa, Zea mays
  Coding DNA Sequence Number=SeqID_20539
MALLHSARYQQSLRRYHAQGVRSRDLQGKRNAALQHDDGSDISGGAAAPSASTPPSAESDPASDGDTVGGSPSRRNLSAPRLGHRRGVLQEPGPSRRLDRPLCSLSQLSPEDISPAHGLGNPTPASVPPVDGPTRLRPMKLLFEPTPPLSTLTPLTPLPLAPAHRRAAEGFFN

SEQ ID NO: 63915 - protein, 66 aa, Zea mays
  Coding DNA Sequence Number=SeqID_20540
MASASAPVAGAVAGNDDELADLVRRLVDALARYADRLPFDLDRQFTCRLLGVILEETAPEELQVGL

SEQ ID NO: 63916 - protein, 170 aa, Zea mays
  Coding DNA Sequence Number=SeqID_20541
  Subcellular localization annotation: CTP_CleavageSite=41; ConfidenceScore=5.57e-01
GGVAVLGSSSVTAGTVTVDMGTSSEVSETSPGRRSPLAKPAASARKQLSPVKENPKRRLVMEERPLVAQAAACSIGRIGTQAPAPGADEEDEREEGGGGGLSWRRSGSLKRGEESPAPLASLDAGDSSAPQGASRDGWGGGVVERGTRNLPSAAQAEPCTSKLWTSTLCS

SEQ ID NO: 63917 - protein, 506 aa, Zea mays
  Coding DNA Sequence Number=SeqID_20542
  Gene Ontology: Mol. function=transporter activity; Cellular component= integral to membrane; Biological process=transport
  Homolog annotation: Hit_ID=A7P130; Match level="QueryCoverage=94%, HitCoverage=93%, E-value=1e-141, Identity=55%"; Hit description =Chromosome chr19 scaffold_4, whole genome shotgun sequence
  Pfam annotation: Domain name=MFS_1; Domain location=55-454; Score =48.8; E_value=1.9e-11; Accession=PF07690.7; Description=Major Facilitator Superfamily
  Pfam annotation: Domain name=Sugar_tr; Domain location=45-495; Score =27.2; E_value=4.7e-10; Accession=PF00083.15; Description=Sugar (and other) transporter
  Pfam annotation: Domain name=Zip; Domain location=133-462; Score= -105.0; E_value=0.067; Accession=PF02535.13; Description=ZIP Zinc transporter
  Pfam module annotation: Pfam domain module=MFS_1::Sugar_tr::Zip; Domain location=55-454::45-495::133-462
MSTTEPLLSAGAEKKKGGKGPRVGIDEALSAHAGEFGRWQLRHFVAVSAAWALEALHTMVIIFADREPATVPVPCAAAGREWAGGGGSGAAASTVVEWGLVCGQRYKVGLAQAVFFAGCMIGAGVFGHLSDSFLGRKGALQVVCVLNAAFGLLTALSPNYWAYAALRLLTGFSAGSVGVLAFVLATEPVGPARRGAAGMSTFYFFSGGIAALAAVAALFQGSWRALYAVTSLPSLVFAVAVVPFFVSESPRWYLVRRRPDDALRVIRAIAATNGRAVPEDLRLKLDDEEPGNKDVGGSTAHAASSGSIVDVFRSPTTRVRLVLSVLINLLSSVVYYGLSLNVVNLKTNLYVTVVVNSLAEMPAYLLTALLLDHFGRKPLAIGTMLLSGVFCTAGSLVPGAGIMRVACGVVGIFGMAATYNLLFIYTAELFPTVVRNAALGCTAQAAQMGAIVAPLVVMLGERLPFAVFGASGIVGGLLVLYLPETMNKPLYDTMAGLEEGEKNVVK

SEQ ID NO: 63918 - protein, 813 aa, Zea mays
  Coding DNA Sequence Number=SeqID_20543
  Gene Ontology: Mol. function=binding; Cellular component=nucleolus; Biological process=ribosome biogenesis and assembly
  Homolog annotation: Hit_ID=A7P464; Match level="QueryCoverage=96%, HitCoverage=97%, E-value=1e-175, Identity=61%"; Hit description =Chromosome chr1 scaffold_5, whole genome shotgun sequence
  Pfam annotation: Domain name=NUC130_3NT; Domain location=88-139; Score=98.2; E_value=2.6e-26; Accession=PF08158.3; Description =NUC1303NT domain
  Pfam annotation: Domain name=SDA1; Domain location=428-812; Score =334.4; E_value=2e-97; Accession=PF05285.3; Description=SDA1
  Pfam module annotation: Pfam domain module=NUC130_3NT::SDA1; Domain location=88-139::428-812
MPRKHAPAFTPEAASASSSGGAGQPHNLPVLQAKMKRDPEGYEEELRQLHRHFESSVFLFQQQAALATTSSSGGGGEVAKELGDLALFLAHVAPFYPDDLADLPDQIGGLLDTNARGLPPGLRSHLVQALVLLVNRKIVDLEDTMELFMELQVIGDRAVKKLAFSHIVHSIRRMNQKHKNESTNRKLQNVLFKFLQAEEESRAKRAFTILCDLHRRRVWFDERTTNAICDACFHPSSRIMIAAISFLLGYENAPQEDDSDASSSEDEADQNPQILLSKQDVYKANHKGTSASKKKKKAKLQRVIRSMKRQQRKSVEETGSSFYSPLTYLKDAQGFAEKLFSRLQKCNERFEVRMMMLKVIARTIGLHHLVLLNFYPYLQRYVQVPPDAVEPLFKQIVNQFVHDRSRPEAIAVGLNVVREICMRIPLMMNEDLLQDLVLYKKSHEKAVSIAARSLITLFREICPSLLVKKDRGRPVDPKARPKAFGEVTVASNVPGAELLDENISSEGESSDDESDGFHSDDEMDLTPAPPGTEENMEGSSVANKHDADGDTKEEDDASDDEDGTDQDDSNSDSDELDDDSDVDVGTDISDEDEGDDGELKESINGSEDEALDQNEDSEEEDKSKGSGSKAQKRKLNDYIGQLNSADASLRALKRLATAKKAEEPSDETGKILSDEDFKRIKELKAKKEAKLALAQHGLIKGVDTRSVTFKMPSSDQLSRKRVDPLELEAHVRRKMSKEERLALVKAGREDRGPYMARAAVKQKKTGGLSNKQKQHKKRMPLAATRAKAARSRQEKKQQRKRSGNQFRGRKAWK

SEQ ID NO: 63919 - protein, 237 aa, Zea mays
  Coding DNA Sequence Number=SeqID_20544
  Homolog annotation: Hit_ID=A2YVQ0; Match level="QueryCoverage=30%, HitCoverage=8%, E-value=5e-07, Identity=45%"; Hit description =Putative uncharacterized protein
  Subcellular localization annotation: CTP_CleavageSite=9; ConfidenceScore=5.24e-01
MSGVHRTVRCNCGATATSRQRSPATAINARQSAQASGTPILAHRTLYSACTGALAGFCLVVLPSTEPIGITAPPIRLRRGVRCAHPCLVPPLVLNPSVPPIYAHSTSPAPSLARHGRLRADGFFFRLVGKRTRCPLPSPTPLRFPRVMSVASLASPTSPPAPAPPRRVIVSHRLPLRASPDSAAPFEFAFFVDTGTVVYQLRSGLPVNAPVIHIGTLPAAAAEAASDELSDYLLANF

SEQ ID NO: 63920 - protein, 190 aa, Zea mays
  Coding DNA Sequence Number=SeqID_20545
  Gene Ontology: Mol. function=aspartic-type endopeptidase activity; Cellular component=anchored to membrane; Biological process =proteolysis
  Homolog annotation: Hit_ID=Q6Z8K1; Match level="QueryCoverage=63%, HitCoverage=22%, E-value=2e-34, Identity=61%"; Hit description =Aspartyl protease-like
  Subcellular localization annotation: CTP_CleavageSite=30; ConfidenceScore=5.35e-01
MSVASPASPTSPPAPASPRRVIVSHRLPLRASPDPAAPFEFAFSVDTGTVAEDLLGQSKKADDMSRVAGLDNQGIVGLQRQIMKDIGLLCQTYAVNVDKSCIGHKCLEGTSFKALVDSGTSFTSLPLDVYKAFTMEFDKQMNATRVPYEDTTWKYCYSASPLEMPDVPTITLTFAANKSERELGLHLVPI

SEQ ID NO: 63921 - protein, 384 aa, Zea mays
  Coding DNA Sequence Number=SeqID_20546
  Homolog annotation: Hit_ID=A2X075; Match level="QueryCoverage=62%, HitCoverage=45%, E-value=1e-81, Identity=63%"; Hit description =Putative uncharacterized protein
  Pfam annotation: Domain name=PPR; Domain location=157-191; Score =23.9; E_value=0.00061; Accession=PF01535.11; Description=PPR repeat
MGMKIDPNPYPNGVKTHRVSGFGYPLPSLRGSRHGNLLEELRPEWAMVAYKAVPPRALAFTGTLSPESAMAEQSDDGEFANADSSSAVAALLEANGRAGESRSLIADSISQHLQQSTDEVALFYCDLLAAFSSRGLKDRATEFHLELRSMPPLSGRKAYAAMVKSLCLLGMPAEAETALSEMVSRGHRPEAAQFGAVARCYGRVGSPADMERVIASMADAVLSCYSACHARTLAWLKRMRKLRVAVTAKGYNLVLNSCPSLASVVRELGPELPLSTVGLVGRLRSASTTPKAEVEVVRELLASSASVLDRAMEWSEAEAKLNLHGCNLRAGAGAAVGGRWEERAQRYWRRPGKERELGFHRVLIFTSVGDSQRLVEGKIDFYRS

SEQ ID NO: 63922 - protein, 234 aa, Zea mays
  Coding DNA Sequence Number=SeqID_20547
MGGPMEQQKTDERRAVTRSGSGDDDDFCSGGPNSGSDDLRADAAARSPPPMPKLVRQGRAEGRRVGGPPLRCGSWAPHVMQAGLEQKKPNRRARCVQPPSGCKRLSTFAQTNGREGEQPCRRHATAPNGRTSPTPNTPDMETQAHASCDRRAECFVHAAAPPLAPPPRLLDCRTNTATRGDPAHDPAAPAWRDGQYGQKWAGSNGGGRRAGAAVTSSAQPTSHPGAMREPSLTA

SEQ ID NO: 63923 - protein, 155 aa, Zea mays
  Coding DNA Sequence Number=SeqID_20548
MTTAALSPLTEARRRQQGLDSPDSCPSARLQRSSDSHDITRTGCQNLFGCHDGMCQRFIYNYTKSTVRNTVDYSGQEKLFGKTGQARTVRALAADRPRHKDDPRTEPMQKSESALWTVRRISADRLRPRSDRPASGTDRPVGKYPKNPKVTGSEE

SEQ ID NO: 63924 - protein, 150 aa, Zea mays
  Coding DNA Sequence Number=SeqID_20549
  Gene Ontology: Mol. function=carboxyl- or carbamoyltransferase activity; Cellular component=ornithine carbamoyltransferase complex; Biological process=amino acid metabolic process
  Homolog annotation: Hit_ID=Q8SA97; Match level="QueryCoverage=72%, HitCoverage=20%, E-value=2e-14, Identity=42%"; Hit description =Ornithine carbamoyltransferase
MAPPVDVAGLRPRLGDVEAPPKSRSSMSSVAEVESEPLGRARRRPSAEARAESEPWGQAKRSSSSSGAEPKSEPWVGRGGVRRLPGLSPSPSPGSGGAEFAVFRGVRRLPGLSPSPSPGSGEAELPMAGQWSGEVTADTSALSTEGCASG

SEQ ID NO: 63925 - protein, 249 aa, Zea mays
  Coding DNA Sequence Number=SeqID_20550
MVTSSSMAGESKPGHGLCPSLSLKDFHHQGWGGDCRVPGSRTRVASEPLSAPTSATTAGRGSSADEIAGAAYGPTSDSTTFCPSLPHVFGHGRGPPGSSIRPEVIAAAVWPPGAEVVVVAAAGAGDGTPFVGLLLLRRPPLEWGYSPVGCLNRFTKRESPRVKVTSESGDPWTVSPSEARSDLVEGVVDAEGAAAPSIVRIRACGIGFVAIVCASESCFSRKVMSEESLGSVSLGCLRVLRRFQDPLSK

SEQ ID NO: 63926 - protein, 102 aa, Zea mays
  Coding DNA Sequence Number=SeqID_20551
  Subcellular localization annotation: CTP_CleavageSite=37; ConfidenceScore=5.18e-01
MARTRAYKAHSGVDHTPPHALNLTGAQTHRPFPNPVRPSETTEHTSVKLPERRIEVCFAGEASPRSPEFTTPPECVDRVLSILPPGWTVEWDPTSAEEEHEE

SEQ ID NO: 63927 - protein, 191 aa, Zea mays
  Coding DNA Sequence Number=SeqID_20552
  Gene Ontology: Mol. function=carboxyl- or carbamoyltransferase activity; Cellular component=ornithine carbamoyltransferase complex; Biological process=amino acid metabolic process
  Homolog annotation: Hit_ID=Q8SA97; Match level="QueryCoverage=59%, HitCoverage=19%, E-value=5e-12, Identity=44%"; Hit description =Ornithine carbamoyltransferase
MAPPVDVAGPRPRLGDVEAPPRSRSSPSSVAEVESEPPGRARRRPLAEARTESEPWVGRSGPESEPLGRAKRSSSSSGAEPKSEPWVGRSGVRHLPGLSPSPSPGSGGAEFAVFRGLARVRALGRAKRSSSSSGAEPKFEPWVGRSGVCRLPGLSPSPSPGSGGAEFAVFRGLARVRALGRAERSSPSSGA

SEQ ID NO: 63928 - protein, 181 aa, Zea mays
  Coding DNA Sequence Number=SeqID_20553
  Subcellular localization annotation: CTP_CleavageSite=58; ConfidenceScore=5.31e-01
MARARAYKAHSGVDHTPPHALNLTGAQTHRRLPVHACPRPPSPCRRRPASPAFPNPVRPSETTEHTSVKLPEQGIEVCFAGEASPRSPEFTTPPECVDRENKENLEKPYKNDPKTVTLLTESTSSCRSKELLRRLYGYKCGHCTTAVGVSEALYAKAVLSILPPGWTVEWDPTSAEEEHEE

SEQ ID NO: 63929 - protein, 221 aa, Zea mays
  Coding DNA Sequence Number=SeqID_20554
MARLRHTARKSVIPFLPSRLTEHPLRRLVISQSSHLERLHHLLHEEQERRRQELEQQDSSFSLQQEGRVCEELFPYAPAGGAPCTTTERPSRWRRPRRRRWRQQLEPRHRPFLRSRSWKDGLLDPSLTTLLAGVISTMRSTPCYVGHSTGVLGLSSIAVWSSSIVVGFTRTVGRRPAWCAVWRTVSGVRRSAQSTILSLSGTQLRRPCKMSHGVRFRTTAL

SEQ ID NO: 63930 - protein, 57 aa, Zea mays
  Coding DNA Sequence Number=SeqID_20555
MESHDLRAERESRLMGGDEDDGFGYDYGNGCQHCNHCSGEDEVVEEDFQEFQEYDEF

SEQ ID NO: 63931 - protein, 141 aa, Zea mays
  Coding DNA Sequence Number=SeqID_20556
  Subcellular localization annotation: CTP_CleavageSite=62; ConfidenceScore=5.24e-01
AFVKVPSPAKGVPARFASVGPAAAAKASSEGWRLCLRPNNPHRPSGSIGGVIVPPVGEENPRLSSIVNLVAVLNTELDHALDELSRARAEIAQLRAERAEHRHLEDGSLAPVGTQHPFRSPRRGHQTYGDPDYRTRINLEP

SEQ ID NO: 63932 - protein, 340 aa, Zea mays
  Coding DNA Sequence Number=SeqID_20557
MAPDCPVCTGHVRCANGSKTANGRLRHRRKEIGHRTVSGVHRTVRSEQTEEGVEIDSKPSILVDSLSRGAYFAIMTSDNDLIIDAHDLWNRIKVKYCVANCTTSTPYITCDTNHSKGEEQERWHPNDESTAPTGLSSTSYKCLIANNDSGDESDDEEEYEDDSKDESSSPQGTFSCIASTNNNDRENETGDVEEEEIRQFYTHLNKEDKVLLVKLLRRNKEQGETLLRLEETLIKTNDSLEKMTKEHEELKCSHDNLVQRYESILFEQRNNHDVLSDVAQLKTENSMLKSQFVVGHQAILGQDYFFARMIAAPTEGPHDNESTEGPQTPWPTSTGWRRFR

SEQ ID NO: 63933 - protein, 112 aa, Zea mays
  Coding DNA Sequence Number=SeqID_20558
  Pfam annotation: Domain name=zf-CCHC; Domain location=19-36; Score =10.3; E_value=0.042; Accession=PF00098.14; Description=Zinc knuckle
MTLSKENDKHQASCQVERRFCYKCGEQGHISKSLGGKEKISKKWSNQDLGISVSQEIGISSRDETRVRSSEPTDQAKDGGKKSFEVPSAREKVKEAEEPKAKGKEEGLQSQG

SEQ ID NO: 63934 - protein, 47 aa, Zea mays
  Coding DNA Sequence Number=SeqID_20559
MYGLQVVTRMMVLGYDYGNGCQHCNHCSGEDKVVEEDFQEFQEYDEF

SEQ ID NO: 63935 - protein, 59 aa, Zea mays
  Coding DNA Sequence Number=SeqID_20560
MTKVMLAEGVQSSKNGIKLRLDHAFVYPQPDSEDTCSHTWKTLSNYVFEDLRKPKAPNK

SEQ ID NO: 63936 - protein, 151 aa, Zea mays
  Coding DNA Sequence Number=SeqID_20561
MGKSKKGGGPSHHSGDKRKREPTPPSEDFGDSEYSEEEFSSESEGSPAPASPPTTSDDSDDSQGIAAEVWIYIRAVERAGLEGSDESEYSSDEENSSDPSEEGRGGDGGDGDDDGGDGDGGGDSGKGGDGSGKGGSGDGGDGSKGSNKASG

SEQ ID NO: 63937 - protein, 274 aa, Zea mays
  Coding DNA Sequence Number=SeqID_20562
MVVCGVGMWAAVAPPAFAVVRVSVDLARRNDYCQGWPMGGAVVRRVVLPLIGRDRGASRRWWRSALRCDCCGNRHVVGPLDGSMWVGWAASVVAACIVKSKLLRHGMWLGNDDVGANPPFFVGLFASKMRHLAEAGRWIKVLEVSLVKNQSCLEWSISWLGNDGAPQSSFSSAGVRSHRRVSFGLVLPVLGSQSYLSLVLSSATMTHDGHCTPGSEGGDNISEDAIIVLFPKRLGHHCNNFYEKTSVKNILRVLKHVEEVKIKVPLDAYILPTI

SEQ ID NO: 63938 - protein, 70 aa, Zea mays
  Coding DNA Sequence Number=SeqID_20563
MAFGEAVELGGCRSNSLVADNALGAALDGVRDVCAAGGPDAAYQRSGQDAINAEGAHRLSAGWTGDASFP

SEQ ID NO: 63939 - protein, 143 aa, Zea mays
  Coding DNA Sequence Number=SeqID_20564
MVGGGGLGARGAPVTGDGGEHRADFRVLGVRDERRQLICMMDNLLIWIIVSVASEDVIDRSTGYLQNLHLCPRQRSEQWRTNRKRSISMVVIRSIFAAHCSIFMPKLIGHVIMKHKGPMIKILSASLEKGPMIKILSASLEKV

SEQ ID NO: 63940 - protein, 97 aa, Zea mays
  Coding DNA Sequence Number=SeqID_20565
  Homolog annotation: Hit_ID=A7PRY2; Match level="QueryCoverage=75%, HitCoverage=38%, E-value=7e-17, Identity=54%"; Hit description =Chromosome chr14 scaffold_27, whole genome shotgun sequence
  Pfam annotation: Domain name=MtN3_slv; Domain location=1-73; Score =58.7; E_value=2e-14; Accession=PF03083.7; Description=MtN3saliva family
MKFTVPCNKTVITTKSVEFMPFFLSFFLFLNGGVWATYAVLDRDIFLGIPNGIGFVLGTIQLIVYAIYMNSKASQCSKETASSPLLASDRGEASSHV

SEQ ID NO: 63941 - protein, 115 aa, Zea mays
  Coding DNA Sequence Number=SeqID_20566
  Gene Ontology: Mol. function=oxidoreductase activity; Biological process=metabolic process
  Homolog annotation: Hit_ID=A3ACG3; Match level="QueryCoverage=53%, HitCoverage=18%, E-value=2e-22, Identity=80%"; Hit description =Putative uncharacterized protein
MAARHTHRSPTTMNTHGGGGPEVLEAQEVEDPAPLGDDEVCTLLSGGYAEKVVVPAGQMLPVPEGVSLADTAGLPEVACTIWSTIFMTSHLSLGESFLVRSIFYFQENWRTQLAR

SEQ ID NO: 63942 - protein, 437 aa, Zea mays
  Coding DNA Sequence Number=SeqID_20567
  Gene Ontology: Mol. function=protein binding; Cellular component =protein complex; Biological process=proteasomal ubiquitin-dependent protein catabolic process
  Homolog annotation: Hit_ID=A2XP48; Match level="QueryCoverage=46%, HitCoverage=57%, E-value=9e-74, Identity=85%"; Hit description =Putative uncharacterized protein
  Pfam annotation: Domain name=PCI; Domain location=318-421; Score =12.5; E_value=0.0057; Accession=PF01399.18; Description=PCI domain
  Pfam annotation: Domain name=PPR; Domain location=47-81; Score=29.6; E_value=1.2e-05; Accession=PF01535.11; Description=PPR repeat
  Pfam annotation: Domain name=PPR; Domain location=82-116; Score=18.9; E_value=0.019; Accession=PF01535.11; Description=PPR repeat
  Pfam module annotation: Pfam domain module=PCI::PPR::PPR; Domain location=318-421::47-81::82-116
MRAHGRPVSHPQLTLLVCLHIAARRPLRALHALRRFHHEFDVQPQVHACNRVLGALAAAGHVEDALKLFDEMSEGGVQPIPVTFAIMVRALAHAGMVDRLLEIIGRMRNEVCRLMLQHHDEGKLDTKSKSLEKVINVVYEMIEVGCSMEEIVYFAIIYGFCKYASSTEARQMDRLVNGPSRNRKNKLFLDSLVLFSILLLQECRSSKKSHLVIHLFFKKSNASDKLLCYQSHNAFILEQVRLFLDRQDYVRAQILSRKISTRVFDADPSKEKKKPKEGDNIVQDAPADIPSLLELKRIYYELMIRYYLHNNDYLEICRCYKALYDIPATKEDPTKWIPILRKICWYLVLAPHDPMQSSLLNATLEDKNLSEIPNFRVTIKRLADLLCLSLQEAEKHLSDMVNSKSLTAKIDRPMGVVSFRVVQDCNSTLNSWATNLK

SEQ ID NO: 63943 - protein, 122 aa, Zea mays
  Coding DNA Sequence Number=SeqID_20568
MTHFDDIFLNPPITVISLYLENHGLEIPGLNMSEAPKDSMEVDLVQKTEKVKVTGELSSKGVETARQTSQVEAADNTFVSEVVRLEKAGNIDAELIVHVNQIGEGAEAASVSEESSQQVGDI

SEQ ID NO: 63944 - protein, 39 aa, Zea mays
  Coding DNA Sequence Number=SeqID_20569
MAPEKQEPLQVQELEPKILAPQLLRTRLRLLLLFVLASK

SEQ ID NO: 63945 - protein, 76 aa, Zea mays
  Coding DNA Sequence Number=SeqID_20570
  Pfam annotation: Domain name=LEA_3; Domain location=4-58; Score=-1.7; E_value=0.0015; Accession=PF03242.4; Description=Late embryogenesis abundant protein
MWDYSQHKRVMGKKEVNTAAAAAEQKKAWLPNPVTGYYRPAGSPREVDAAELCAKLLTVCIALRSVLLDSRAPSLA

SEQ ID NO: 63946 - protein, 174 aa, Zea mays
  Coding DNA Sequence Number=SeqID_20571
MDKDRQGAAQKRQAAIRIVEARPKRQKRGSAKAAAPGGGKPPLAAKSGVPASSKAPEAPSRVAEAAKAARALPSAGKRVADFATDICVEDYLGGSDEGQLATVAPAAAIATAAPTSAAAGEDLPPKVSEGAPDAPAATVPSAEDPAAEAAETTAEAAAEPAAEAPAASGPSQVA

SEQ ID NO: 63947 - protein, 100 aa, Zea mays
  Coding DNA Sequence Number=SeqID_20572
MELFQGVSGPRPLAGLSLLRILFLLLLLRGNPPRRSVHRVLRDPWPGRLVTPYLLETDEKSRPTPMGRGSEDIREPSKSASGVISQSGNRRSAKGSTLRR

SEQ ID NO: 63948 - protein, 144 aa, Zea mays
  Coding DNA Sequence Number=SeqID_20573
MGVGKGRFDGWECLLNALRLFSDRGWKRLQGIAAEVWTYIRAVERSGLEGSDESEFSSDEKDSDGGEDEDDDDDDGDDDDGGDGDGDGSNGGGGSGGKGSTRGGSSTGSTRGGSSKGSTRAAAARAAAARPVAKRHWSLDISIV

SEQ ID NO: 63949 - protein, 231 aa, Zea mays
  Coding DNA Sequence Number=SeqID_20574
MEVRYQTNFCRNEDGFPKLLRACTVCLEIRSHPEYDGREFIEHGTKNCVMTRDHPVWMARMRTLEGQKLLEYDPTVMYLTAYLLTLDAQYDLLARHNYQMIARAEDAEKRNRQLHVDLIIAQACVALESREVIDVEALKQAKDEHVHKLMETYLVTHNQCRALQIQEPASSNPIQPTRAEGPQILKGLPVSIKEEKKAWEPPEGAIVLEGIQSPLRLWISKSTLNPPKIHR

SEQ ID NO: 63950 - protein, 251 aa, Zea mays
  Coding DNA Sequence Number=SeqID_20575
MTLEPHQHRVPRCRVRMTLELHPLQPGWRSLDSESFGFRAEDTIESTALHVLTTFCGFHPLELSTHPIGLFPAEKEDDPMWKDRVEHAKEVWALYPGHTAHLMVRCMNALYRLQALRGEAMSQLMGLVESTKITLDNREDLVVNLSTELVEKDLQVEHMATQIQELEDQVEARENTIEILEDQLQTTQQQLEEANQHLDLHHQEIQDMEAEGADEDVDIEGGEESEPASSLDTAGSGRPPSPEPSVALFAH

SEQ ID NO: 63951 - protein, 128 aa, Zea mays
  Coding DNA Sequence Number=SeqID_20576
MAHPPSSSPQGEGLRQRPTKKSSHLTSSPDLEALLGFGPSSEGQPQEPPLGFGPLEGADATEDGEVIGVSAEEQLQLQALRIKNRNLQKKKEILEAKRQHVSTQAKVRQMIRDEEQRAQELEQEIALM

SEQ ID NO: 63952 - protein, 136 aa, Zea mays
  Coding DNA Sequence Number=SeqID_20577
MGRVVAHDGLELCVGAALFISVCYVNWCTKHRTLPEEGYDAASYPLVMKTEVILAFADICTHEVMELPLDAQSSGRRLDVDERVEQCRAVAGVLHVLARFVQVLQMQHLRGIHTYREEAPRTELLGSRRRLGEGER

SEQ ID NO: 63953 - protein, 185 aa, Zea mays
  Coding DNA Sequence Number=SeqID_20578
MSTRHRVSQDQSEFTPTESIDTPPFSLLPWRVHATLAISPLPLRVGLSGIGLPEAKLTHDEACDQLKGPRTTTWQGAAQHLEGTRSAEDEKQQCNAQRSDVHGAEEVPRQCHDEKTDRDSTTASTAWALRSGGTARSRRWLDDGTTSAPAGHGELEDELDRDVVEGMESALSECRDAPGVEERTG

SEQ ID NO: 63954 - protein, 136 aa, Zea mays
  Coding DNA Sequence Number=SeqID_20579
MAGGIKLAGAMEKWLAGEEIWSQEIWSVSLPKPEANPRETLGDTGVSQIDADYMSSVLQQVPTIGDARRQNNCAKHIGNKWVSPAIFWYVDGLISRTTVTTIFAKWSDRSEHQKSPVIFLVQKADINIIGHPSPKN

SEQ ID NO: 63955 - protein, 189 aa, Zea mays
  Coding DNA Sequence Number=SeqID_20580
MPQNPIREMLHDVEGREDVMGATIPVIKPRRSPSTMHSGPAAEYPDTMRRRTTPGPPQRQSGHGVEARPCPNLRRHGEDRYPRCACSPAARLKFNGGGDMSSAVAQACKKGLPCLRLVTVEGIELTLRSHPSSSLGANACADCNLADGEYVLIPEQGPVQEEDQEQASEAAIEDLPAAPAIEGKPRFYA

SEQ ID NO: 63956 - protein, 86 aa, Zea mays
  Coding DNA Sequence Number=SeqID_20581
MADSKDLNRASPNSNTRLTNLSAAEHKRLKDDMKKIYEEVQRQKDQVLKVADKWFLSHFRVDCRQKTIQKREIVWQNHPNYSSLSA

SEQ ID NO: 63957 - protein, 259 aa, Zea mays
  Coding DNA Sequence Number=SeqID_20582
  Subcellular localization annotation: CTP_CleavageSite=63; ConfidenceScore=5.15e-01
MAGGNTLAGAKERWLAGEGTGSCSVTKVPVSECLVPRLSCAKTVSNGFGLSSNFPRMCSRETLGDTGVSHSPRSPDFTQPPMNVDRAPRGLYPSRDLRRGLPFRLWWVQVRSLHDGSWGTLQDMVDGVTWPTTLPPGWMVEWDAAPLYEEHRVPRCRVWLTLEAHPLQPGWRSLDSETIRFRTDDTTEAVAMKTMTTFYGYHPLEMVMHPLGLFPAEKKDDPMWCNRVSHVKDVWAMYPDLVGRVTVQCMSALYHLQAL

SEQ ID NO: 63958 - protein, 30 aa, Zea mays
  Coding DNA Sequence Number=SeqID_20583
MVSAVALYSAAAWGQCGVGEIEYRFNLDNF

SEQ ID NO: 63959 - protein, 129 aa, Zea mays
  Coding DNA Sequence Number=SeqID_20584
MVVAPWVKYLSQEYDPMLTWAASTYRSPSCPSFSAARGIALGWRLRARGWLGTGLGVACASLEGAARRMQALARAGQCAQGKASRLGSAVGLAAARPAAQMRRVLGASSRHGKWREKRVGRERSEGERE

SEQ ID NO: 63960 - protein, 117 aa, Zea mays
  Coding DNA Sequence Number=SeqID_20585
  Gene Ontology: Mol. function=hydrolase activity
  Homolog annotation: Hit_ID=Q94D81; Match level="QueryCoverage=85%, HitCoverage=31%, E-value=4e-37, Identity=71%"; Hit description =Phospholipase-like protein
MWPSPPEIAAVSCPPLPALHHQGHDFTEGLQGHLLDINLVLNDCDATFAPFYVDYPPTLPCFLYGESLGGAIALLLHLRNRDLWWYGAMLNDTMCGVSPRIKPPWPLEHLLAAVVPT

SEQ ID NO: 63961 - protein, 54 aa, Zea mays
  Coding DNA Sequence Number=SeqID_20586
  Gene Ontology: Mol. function=hydrolase activity
  Homolog annotation: Hit_ID=Q94D81; Match level="QueryCoverage=98%, HitCoverage=19%, E-value=2e-14, Identity=66%"; Hit description =Phospholipase-like protein
MAPPRATTVLERLRVCYELQHRFEEDTVCDPACVEKLCRRAGSKDKTLRVYLGM

SEQ ID NO: 63962 - protein, 139 aa, Zea mays
  Coding DNA Sequence Number=SeqID_20587
MVVAPWVKYLSQEYDPMLTWAASTYRSPSCPSFSAARGIALGWRLRARGWLGTGLGVACASLEGAARRMQALARVGQCAQGKVSRLGSAVGLAAARPAARMRRARGAGCSARRAGTASGERSECGERGVRERENRGERE

SEQ ID NO: 63963 - protein, 567 aa, Zea mays
  Coding DNA Sequence Number=SeqID_20588
MAGCWAKYALARCPPWAGSECKVQPSRWICVAGIRPHSFVKWRTEAAPATKKRKIGTAVGGLGVSKSFAVELMGTCVALGGRMSSPELRESSTRMLEVTRGRWPKNVPIPRAAGEDFFTSRMARDLKIFPYGRNIAAVVSVVMEKDRQDTAQKRRAVVRLADPFREVKKARAATKSAAPGSSKPLLATKPATLGHSKVSAIMKAAATGASKPPPGSDGGQLVVVPPLVVATSPTVVTRAKGAPRDSWATFYAADFADHVASGALTADFAAEVESLRMQHADAVREKSAAESKIRRLSKKVAAMEAEKVKLQRQLADERREANKAITDAQATHFEVFDQNDKNFEREIFKVEDPVLKQSAGRSLTGCGARTTEKRFGSDGACRRRRGPWWSRRRATRGCGGGSGAAVLCRRGPLVDPAPTVPTGASEDPAPTGEDALKAVAEPAAEDPTTLAGPSQSDDSGSSIAWTEESSDEDLDYFAALDVAAAESSPRVEGSEELPGASTEYRRRRAVVKRKVSELSRSGRRHRSEMESGRLRVDGTSKRELLSSPIGASVGEGELRNLFEGEEL

SEQ ID NO: 63964 - protein, 194 aa, Zea mays
  Coding DNA Sequence Number=SeqID_20589
MSPRTRRTVRKHTGLIGVPCHQLAPRHDNSSSGSNDPIGDLEVEVSRLQAELRHRTDIWVTDGDRINELRRDVRHLRDQLADRDLALDWVVQSCSLAWDKEETAQARVAELNLAVDNLRTYCNTLHEEVHVLYSQLHPSEPADPVESEAGPSHVAGEALGGELDLFRPPPSMRLVDEWSPTPDDEAAKSNRKKE

SEQ ID NO: 63965 - protein, 84 aa, Zea mays
  Coding DNA Sequence Number=SeqID_20590
MPLIKVYNIDSDLYGLKGSTFSKHFCKTESLIIEKPYLDSLNQHTLESLFFSRVRKRQTFVASVLRWYQRKNARNEVREERILH

SEQ ID NO: 63966 - protein, 102 aa, Zea mays
  Coding DNA Sequence Number=SeqID_20591
MSGMVAFSLVMGGSKEKLAQLGLCVSVMDFFVSHARSKFAWDKPEVIGGRGEPEEKEGSHCRLGFGRDGGLVPLNITNMVKSCMGEKSFGIGFYGSGTAEPD

SEQ ID NO: 63967 - protein, 543 aa, Zea mays
  Coding DNA Sequence Number=SeqID_20592
  Gene Ontology: Mol. function=adenylosuccinate lyase activity; Cellular component=extracellular region; Biological process=purine ribonucleotide biosynthetic process
  Homolog annotation: Hit_ID=Q10MD1; Match level="QueryCoverage=93%, HitCoverage=100%, E-value=0.0, Identity=72%"; Hit description =Adenylosuccinate lyase, putative, expressed
  Pfam annotation: Domain name=ASL_C; Domain location=371-485; Score =291.5; E_value=1.6e-84; Accession=PF08328.2; Description =Adenylosuccinate lyase C-terminal
  Pfam annotation: Domain name=Lyase_1; Domain location=89-361; Score =41.1; E_value=7.6e-13; Accession=PF00206.11; Description=Lyase
  Pfam module annotation: Pfam domain module=ASL_C::Lyase_1; Domain location=371-485::89-361
  Subcellular localization annotation: CTP_CleavageSite=43; ConfidenceScore=5.68e-01
MSAPPSLKTPATAVAVSRRSVATPRATGLRGACAPPTRRLRCSASAAVAGASTEMADAPLDWAERSLEELHSLPDHDTFCLMALSPLDGRYDRFVKELMPFFSEFGLIRYRVLIEIKWLLKLSQIPEITEVPQFSKEAQSLLNAIIENFCIDDAKEVKKIEKVTNHDVKAVEYFLKQRCSSNPEIAKVSEFFHFGCTSEDINNLSHALALKEGPASPTTVGKEMANFAARLSDIGKSFSEVKILGKFAGAVGNYNADVVAYPEVDWPKVAEEFVRSLGLQFNPYVTQIEPHDYISKLFNLFTQFNNVLTDFDRDMWSYISLGYFKQIPKAGEVGSSTMPHKINPIDFENSDGNLCQANSILSGISMKLPISRLQRDLTDSTVLRNLGMGLGHSLLAYKATMRGISKVQLNESRLAEDLEQTWEVLAEPIQTVMRRYGIPEPYEKLKELTRGQAVTKDSMQQFINGLDIPEEVRSKLSKLTPHSYTGLAEDLARDIEKWVDLESGFQIKEEGKGYTGGRCRISPVPLDGILCYCVKPCPSTTTE

SEQ ID NO: 63968 - protein, 118 aa, Zea mays
  Coding DNA Sequence Number=SeqID_20593
MKRKKRVDDLIDSQRGAIDKFFKSNASASTNPNDTFALAIVPVGTEEPTNENSREEEHVDINVDDNNMHMHSLVALMNNLTCTTLNQIQGMVQYFEAYRNEGFPSSLIISKGIGMKWF

SEQ ID NO: 63969 - protein, 212 aa, Zea mays
  Coding DNA Sequence Number=SeqID_20594
MDKVGSNVELYRTSVASSPQSRGTPCHNMKALRWRRGLWLRGDQFAATPHQLPRGRYVARERNVLQDTRSGSEPTARRASDPRTWRTDLRDGPQTLLSGVRTTHRRILGFRGKEYPDPAQEGFRGRYVSRPSLVRTCPHNVAKRRSGAAKRSAVRDDAPPDYPADRRCAPSTFNAPRSLNWQAAPKPSCRRRVQLFPLANSTPVSWHAPHPS

SEQ ID NO: 63970 - protein, 148 aa, Zea mays
  Coding DNA Sequence Number=SeqID_20595
MGSRHSACSAEAECRGSFVLLLLVTLLLGEYFLSEEFAFGLPSETGCDTRVGARRSSSSSGAEAESEPWGRARRSSSSSGAEAESESWGRARRSSSSSRAEAESEPWGQARQSFLWRPKPDLAAVSLTLSSGTVVGATQAALSSCQAG

SEQ ID NO: 63971 - protein, 134 aa, Zea mays
  Coding DNA Sequence Number=SeqID_20596
MPRRRWWCPSPLVWSSFGDPWDRRKNLPSQGLDTPAGDELPASAVHYIHLLAAIVVIAGVRVSSEDVLKVPFGRLVVEVSSIHNRGFFVGPLLARPVVRRRDVLGGLLAPLADTSREFDNFTAVGGTVATVGVH

SEQ ID NO: 63972 - protein, 103 aa, Zea mays
  Coding DNA Sequence Number=SeqID_20597
  Homolog annotation: Hit_ID=A3B0Z6; Match level="QueryCoverage=49%, HitCoverage=17%, E-value=4e-07, Identity=50%"; Hit description =Putative uncharacterized protein
MSLTQLKGKCIAQPSQDNRDHMVKKLETGTTVACTKSLEENVKDLRIAKSRKQKKKINTSSKSLNHASIKGNIQGNKELIPCRRVKTYNMEESQRMLHGKGRT

SEQ ID NO: 63973 - protein, 349 aa, Zea mays
  Coding DNA Sequence Number=SeqID_20598
MRPIGANPNGPHRRANNRNRDPIFPRGSPHAAEPCEDKSARITQDKLESTNHFATVVDTVLLLENTLRGSPGPAASPRRWSPKMVTSSSMAGRSEPGCDLGPALSFKDVHHPGWGGGRAEPELYLPRGFVGQPLPQHSRERALSGPAGGSDFDNAGLVDGGRHQLQRIGLAGSARGAPSRRKGGCRAARTGGPPKTSRASRAAFVFGAVLPLPRYDTSARRSVLLSSGRIRVGICRWADGSCRRCGGGGGWRSPRRRRDHRHHPRSGPPALCTCPRPSSVDVGEDKVAAASALRPSLLQFGHPERGSLSLLLERATASDQGPCRPAGPPMWGVVRTRGGGTGVPFVMAP

SEQ ID NO: 63974 - protein, 412 aa, Zea mays
  Coding DNA Sequence Number=SeqID_20599
  Homolog annotation: Hit_ID=Q6BTJ4; Match level="QueryCoverage=44%, HitCoverage=19%, E-value=2e-07, Identity=30%"; Hit description =Similar to CA1621|CaIFF6 Candida albicans CaIFF6 unknown function
  Subcellular localization annotation: CTP_CleavageSite=28; ConfidenceScore=5.46e-01
MQSACNRAKRAHPFDSNTPSMKTQAHTSCNRRAGCYVRATAPPLAPLPRLLDCGTSTATQGNPAYDPTVPARRVGHGSASYGRRRDGQYGQKWADSNGGGRRAEAAVTSTGGTFGRGSGRRFAFAIMTASKKGTGKGDTPKGILLREGNGPRASLLIRGLKAGPSEGFNSRLRALGLRAHYWSEVRGPAPRKGSTAASGHSGSAPTTDQGFVGWPSKADPGGFTSRPRTPSSNGHTFGSPEAQSSPRSNLGQVATPTDRIAGAFNAKGSDSGSAPEDDEFRIARPQGSDSGSAPEDDELRFARPQGSDPGSAPEDDELRFARPQGSDSALASADGLRLARPRGSDSTSALEDRLDLDLGGASTSPNPGLGPTTSQEAPSLPYPKLTQAMGNKTGVPSGSLRQTSNDGAPHAL

SEQ ID NO: 63975 - protein, 153 aa, Zea mays
  Coding DNA Sequence Number=SeqID_20600
MGKGNKCKREPTPPSEDFGDSEYSEEEFSSESEGSPAPVSPPASSDDSDDSQGIAAEVWTYIQAVERSGLEGSDESEFSSDEEDSDGGEDEDDDDDDGDDDDGGDGDGSNGGGGSGGQGSTRGGSSTGSTRGGSSKGSTKGGGGKGSSGKASG

SEQ ID NO: 63976 - protein, 679 aa, Zea mays
  Coding DNA Sequence Number=SeqID_20601
  Gene Ontology: Mol. function=nucleoside-triphosphatase activity; Cellular component=nucleus; Biological process=ribosome biogenesis and assembly
  Homolog annotation: Hit_ID=Q10MC7; Match level="QueryCoverage=99%, HitCoverage=99%, E-value=0.0, Identity=86%"; Hit description=Pre -mRNA splicing factor ATP-dependent RNA helicase, putative, expressed
  Pfam annotation: Domain name=ABC_tran; Domain location=81-220; Score=- 61.8; E_value=0.089; Accession=PF00005.18; Description=ABC transporter
  Pfam annotation: Domain name=DEAD; Domain location=49-226; Score= -8.1; E_value=0.00017; Accession=PF00270.20; Description=DEADDEAH box helicase
  Pfam annotation: Domain name=DUF1605; Domain location=545-648; Score =101.0; E_value=3.8e-27; Accession=PF07717.7; Description=Domain of unknown function (DUF1605)
  Pfam annotation: Domain name=Flavi_DEAD; Domain location=78-231; Score=-50.2; E_value=0.098; Accession=PF07652.5; Description =Flavivirus DEAD domain
  Pfam annotation: Domain name=Helicase_C; Domain location=303-403; Score=51.4; E_value=3.1e-12; Accession=PF00271.22; Description =Helicase conserved C-terminal domain
  Pfam module annotation: Pfam domain module=ABC_tran::DEAD::DUF1605::Fl avi_DEAD::Helicase_C; Domain location=81-220::49-226::545-648::78 -231::303-403
MGTERKRKVSLFDVVDETSVSGKLGRAASNGAAATAAGTNPSVNRWNGRPYTARYFEILEKRRTLPVWQQKEEFLRRLRDNQTLILVGETGSGKTTQIPQFVLETEGLGNRSMVACTQPRRVAAMSVSRRVAEEMDVTIGEEVGYSIRFEDCSSHKTVLKYLTDGMLLREAMADPLLEKYKVIVLDEAHERTLATDVLFGLLKEVLKNRPDLKLVVMSATLEAEKFQGYFSDAPLMKVPGRLHPVEIFYTQEPERDYLEAAIRTVVQIHMCEPAGDILVFLTGEEEIEDACRKINKEINNMGDQVGPVKVVPLYSTLPPAMQQKIFEPAPAPLKERGPPGRKIVVSTNIAETSLTIDGIVYVIDPGFSKQKVYNPRIRVESLLVSPISKASAHQRAGRAGRTQPGKCFRLYTEKSFNEDLQPQTYPEILRSNLANTVLTLKKLGIDDLVHFDFMDPPAPETLMRALEVLNYLAALDDEAPNCFLRPREAQKAADEAKARFGHIDGDHLTLLNVYHAYKQNNEDPQWCYENFINSRALKSADNVRQQLVRIMTRFNLKMCSTDFNSREYYVNIRKTLLAGYFMQVAHLERTGHYLTVKDNQVVHLHPSNCMDHKPEWVIYNEYVLTTRNFIRTVTDIRGEWLIDIAPHYYDLSNFPSCEAKRVLERLYNKRERERAANRG

SEQ ID NO: 63977 - protein, 572 aa, Zea mays
  Coding DNA Sequence Number=SeqID_20602
  Gene Ontology: Mol. function=transferase activity; Cellular component= integral to membrane
  Homolog annotation: Hit_ID=Q10MC5; Match level="QueryCoverage=100%, HitCoverage=100%, E-value=0.0, Identity=70%"; Hit description=O -acetyltransferase, putative, expressed
  Pfam annotation: Domain name=Cas1p; Domain location=167-390; Score =465.0; E_value=9.9e-137; Accession=PF07779.3; Description=Cas1p-like protein
MAEAVASAGRLAMDSSTSVSPGQVSAILGFLWVFAAWAYAEVLFHRKNTASIKTILSAIMVLPPASITCFLQPNATDYKLIWLPETLSNTDRSRHSDVNLAVMDDSSVKAEDQTMLLEEGGQAMAAKPAYTSLTSQILRLIFMDQLLLLENRLTLRALSEFGGYLLYFYICDRTNLLGESAKNYSRDLFLFLYFLLIIVAAMTSFKVHQDKSSFTGKSVLYLNRHQTEEWKGWMQVLFLMYHYFNAKEIYNAIRVFIAAYVWMTGFGNFSYYYVRKDFSLGRFAQMMWRLNFFVIFCCIVLNNDYTLYYICPMHTLFTLMVYGALGILNKYNEIRSVMAMKFVACFLVVVLVWEVPGYTDPSKPDLPRLHEWQFRSGLDRYIWIVGMIYAYYHPTIHRPLGGNHMIVSKSVEKWLEKLEETEMRTKLYIKTSIVTVSMMAGYLWYEYIYKLDKITYNKLHPYTSWIPITWLGKITLETYISQFHIWLRSSVPNGQPKWLLSIIPNYPLLNFMLTTAIYVAVSHRLFELTNTLKMVFVPNRDNKRLSYNFVAGTAISAALYFVSFVLIGIAGY

SEQ ID NO: 63978 - protein, 128 aa, Zea mays
  Coding DNA Sequence Number=SeqID_20603
MEPGGGIAVGAVESLLASSCFRKGAESRRRHGVRGAPSLPIWRSEPNGTPVLAMMASPVDVAGLRPRLGDVEAPPKPRSSLSSVAEVESEPPGRARRRPSAEARAESEPWGRAERSSSSSGAEPESEP

SEQ ID NO: 63979 - protein, 124 aa, Zea mays
  Coding DNA Sequence Number=SeqID_20604
MAVVGALQRWGWLEAGHAWGERVSGGVNDPDVCGLCFQESLPLYMLIQCFKGKLSGIFLGKRKPFLKERKHTSSAMISTNKSNVLNKERIEFFQSTDYSDSGAKHNYYCLAPELRIMLNATYEH

SEQ ID NO: 63980 - protein, 382 aa, Zea mays
  Coding DNA Sequence Number=SeqID_20605
  Gene Ontology: Mol. function=helicase activity; Biological process =viral genome replication
  Homolog annotation: Hit_ID=A3ASR7; Match level="QueryCoverage=92%, HitCoverage=28%, E-value=6e-98, Identity=50%"; Hit description =Putative uncharacterized protein
MGHVENLDDYRITLNLDQTLNQKTYNKPLTLEQFAVDTYIKIESSRLDFICKNQDRLRADLYQGLVDSMLDGDIRAEKVGKRTVMSTSFIGGPRDMRRRYMDAMALVWKFVCVFHAKLQELKHRLTKQNILGKVQAYVYVMEFQKRAEIPSNKYPELRKMVIKHMMHGPYVVTMTVKKRSEGANWTIDGLSLITHASKADDDVDEIKQYRDARWVTPPEALWRIYGFELSQISPPVMQLQLHLPNMHMVAFHERQMVERVVNRPGVDRSMLTTYFEANRLHEEARGILYRDFPEWYTWQSGKDKVWQRRKRYTGGQVGRIVSAHPAEGERYYLCVLLNHVTGAASYVDLRIVDGVTLPTFREAAEKRGLLESDNTLDECLIE

SEQ ID NO: 63981 - protein, 62 aa, Zea mays
  Coding DNA Sequence Number=SeqID_20606
MEPGRGPAVGAVGSLLTSSCFRKGAESCRHHRACGMPSLPILWKLGRWEPGLVPCGPSQLGA

SEQ ID NO: 63982 - protein, 119 aa, Zea mays
  Coding DNA Sequence Number=SeqID_20607
MVSLWRDIHYLLPIMRVGSMHTSISRSQGKLDPAVALRSQSTADALLNPVCSPCAVMWWSTDSREGRSQEADLPGIFIPRARGRFHPIPPVKEVAATTTARFIREESVDEPGPRFKNFF

SEQ ID NO: 63983 - protein, 213 aa, Zea mays
  Coding DNA Sequence Number=SeqID_20608
MGRAGHFPGGPKMGYGAQELVRASTPSPRPRPDVAQTPLPAWPRKFRPHHDAPPARPEISPAPRCPDRKFRPHRDAPTASAAVTAASTSSPRLPALAMPPTASPAVGDDWTRCSPPASNTTLASPWIQAAAGVLDATLSARPWLIPLLLPREGAGHYGLLITTSLLLVLLFTFHLLCASLLGRRRCGWYPGHLGADAGEVIIKGPRNVILKTL

SEQ ID NO: 63984 - protein, 51 aa, Zea mays
  Coding DNA Sequence Number=SeqID_20609
MAFAAGGMARMRSVIGGREAPSCGDSSQAGYRETKKNTMVFKWVFGSLERG

SEQ ID NO: 63985 - protein, 114 aa, Zea mays
  Coding DNA Sequence Number=SeqID_20610
MAPKKATLNATTSIDDTAKAALLIEKKGKATLVSNVPHEALEDGAVNSKPLRQASPPEADDIIEDVEVLGISAEDQLKLGDDTTMAKSFIIALEGPALTWQYTEALAELSLYRQ

SEQ ID NO: 63986 - protein, 51 aa, Zea mays
  Coding DNA Sequence Number=SeqID_20611
MALFSQKSALSGCTGQCPCKGERLQVVEIPRKRDIVKQAKHRGIQVGLWTA

SEQ ID NO: 63987 - protein, 460 aa, Zea mays
  Coding DNA Sequence Number=SeqID_20612
  Homolog annotation: Hit_ID=Q2QWI3; Match level="QueryCoverage=16%, HitCoverage=29%, E-value=7e-11, Identity=48%"; Hit description =Expressed protein
  Pfam annotation: Domain name=MAP7; Domain location=71-236; Score= -68.3; E_value=0.013; Accession=PF05672.2; Description=MAP7 (E-MAP -115) family
MNKDRQDAAQKRRPVIRLPDARREAKRARGSAKAAVPGGSQPMLAAKPAAPGSSKVPESMKAVGAGGTKSAPDGAAKGGAFSAGAADFTDHVASGALTADVSAEVERLRVQHADAVREKSAAESKSRRLAEKVAALEGERTDLRRQLVEERREANQAIAEAQAVQAEAKLARAEGSLASQRAEEWEVRFNALHGRMERAEASTRSEVERTRKQLVDSYCEMGARTADFEVPDREAGLRFLEWLQEELLALPTIVEGFMSFASLVTYEGAMNALSREGCNHYEGFDRSDEDFGREIFKVEDPVVKDSAGPLFDRMWGPHGRDAVRERSDRARDQMARAKDVEDLGDLNGARPEAEVNPVLPEADATMVASGGDNGAECFLADVQPSWLDNLLDGPKTPARSHGWPNHRGSSSNSFKLFVGGSAAGGATKLFTTNGEPAYHDSPVKNRYRRTRRLEDAAVCS

SEQ ID NO: 63988 - protein, 131 aa, Zea mays
  Coding DNA Sequence Number=SeqID_20613
  Homolog annotation: Hit_ID=Q2QWI3; Match level="QueryCoverage=34%, HitCoverage=17%, E-value=2e-07, Identity=62%"; Hit description =Expressed protein
MVASGGDNGAECFLADVQPSWLDNLLDGPKTPAWSHGWPNHRGSSSDSFKLFVGAHLVIVRARVLVPQNPGVTEAEVNPEAAEGSYAGPVPTVSGEGSLPAPAPTAEGPPKAVVELAAEDPKAAAGPSQVA

SEQ ID NO: 63989 - protein, 118 aa, Zea mays
  Coding DNA Sequence Number=SeqID_20614
MGTVGMASISERVATITIARLRHDRNARDGKRSDGGGGVSSGEPTGPYHFVKKRLDRNPLSPLIAVSTTKHAGKEKTNGTKPPQMRPRKYFGDESTRQWKAMRHPHQGADCKVQTGVY

SEQ ID NO: 63990 - protein, 130 aa, Zea mays
  Coding DNA Sequence Number=SeqID_20615
MASFHHPLRLGTVIGFGSLEFMSLRIEYDMEPLPPGPLANTQECPSVRPRPSRRRRQRWSNRNHSTHGTMCPDEAPELANDADSLARDLANVSVTPRASSATHASPATTLLAPPPTVCGASVPPAPHAMG

SEQ ID NO: 63991 - protein, 210 aa, Zea mays
  Coding DNA Sequence Number=SeqID_20616
  Homolog annotation: Hit_ID=A2YV47; Match level="QueryCoverage=89%, HitCoverage=59%, E-value=2e-34, Identity=46%"; Hit description =Putative uncharacterized protein
  Pfam annotation: Domain name=DUF581; Domain location=116-174; Score =85.1; E_value=2.2e-22; Accession=PF04570.5; Description=Protein of unknown function (DUF581)
  Subcellular localization annotation: CTP_CleavageSite=56; ConfidenceScore=5.52e-01
METTSPASSPGHTSLPAAAGDMMLGKRSGRPSPAARQHMRRTTSMTEFAAPHVLVDVAEEEEDEELQLLPAHAEATGEAAEQEDPYGWAIGGAAAAGRADWLAAYRARAAPALAGLRRNSADFSAAETAAFLRACGLCNRRLGPGRDTFMYRGDTAFCSLECRQQHITIEEWKEKCALATPPTAPASDPVVPLPPSGAGSDKPGTLAAAS

SEQ ID NO: 63992 - protein, 164 aa, Zea mays
  Coding DNA Sequence Number=SeqID_20617
MGALRMHKCGRGRVSGALEARSGRGWGSCRLGARRGRGDLGLRVGCVCGWLKGMMLIGGARASVVEGRVLHMDPPSGAKSISPDIELALRTNSASLEPNLGYLLPPRIMRKATPSTEAHVIETQDRLSHNLGHASASPEPSSALNICDGGCPQRHQIQWSSHIP

SEQ ID NO: 63993 - protein, 161 aa, Zea mays
  Coding DNA Sequence Number=SeqID_20618
MAPKRASSKADEAAKAALLAEKKGKVLVDTTHQEACEDDALSKRQRNEQPTPEGSPRTCSSGGQQQLPPGFAPPEGADATEDGEVIGVSAEEQLQLCALRIKNRNLQKQKEILEAKRQRVSAQAKVRQMIRDEEQKAQELEQEITLMQREGQLGLQHGPPL

SEQ ID NO: 63994 - protein, 324 aa, Zea mays
  Coding DNA Sequence Number=SeqID_20619
MPPSCGASGIREETGGTDQELSVDDYLVGGVTMFGAQTGLPPAKKSPPHLRPKGWRRLLHDSYVMALVNVATSQLRSERRRVEGKIERLQMQHTKAVKDKLAAENRSRNLLGKVTTLENENEDLGRQLNDEKKATAEAKTEGKSARAEAQAARKRVGELELELELESLLSIVTSLMSYASLVSCEGVVNALAREGCMHFEAFARSNKDFNAGVFQVEDDTTRDKEVEDLAGLESSVARKDVEVEAGAEEQSSLAKVDVEDPTAVLVPGPTQTDFDDIGNDKSSMCQSLIVLSSGESHVDLWSLESEELLSPFARMDDESSEDDL

SEQ ID NO: 63995 - protein, 97 aa, Zea mays
  Coding DNA Sequence Number=SeqID_20620
MAVMGSTSDKMYLCQVRKQQTFVVFVQRWYPRMSPISEVRHGLMLASHFINNTLLCGRFCLPGLSKVLRTGTTIGGPNTLGGSVTAAFVREVESEAV

SEQ ID NO: 63996 - protein, 76 aa, Zea mays
  Coding DNA Sequence Number=SeqID_20621
MDELATRVHRDVLNLPGTWRTIGKRPTPVKIIPAGHRPSGSTAVAGSLIVFFDDDAFEDAVAADDDKEEDDNITYR

SEQ ID NO: 63997 - protein, 98 aa, Zea mays
  Coding DNA Sequence Number=SeqID_20622
  Subcellular localization annotation: CTP_CleavageSite=85; ConfidenceScore=5.25e-01
MAVMGSTSDKMYLFQVRKKQTFAVFVQRWYPRMSPAVKFVEGGCWPPTLKTILFLCGRFCLPGLSKVLRTRTTVGGPNTLGGSVTAGIGVKPISPDIT

SEQ ID NO: 63998 - protein, 203 aa, Zea mays
  Coding DNA Sequence Number=SeqID_20623
MNKLTGIRNAVTNGTPVPPPQVRTTPLRGGRPAEQRKADEWRAVTCPSSGDDDDFCSGGSNSGSTDLRADAAARRPPPTTKLVRQGRAEGRRVGGQSVGGPGYRAGGRTSSSCRGGRRRRERLRSHSRLKTGHAATASATDNNRSSPPSLSEGAGRHPRGGRPQLGALPSPALVMKILEAEGGAEAAARLAFPHHQAGGHHLG

SEQ ID NO: 63999 - protein, 188 aa, Zea mays
  Coding DNA Sequence Number=SeqID_20624
MEYTRGDRWARLGGRQARQGHGEPCQSTVHHASTYAQGRADVSRTSRAHAGAEQRTRRATQGHNGRASRSHAGPGPRCAGAGHAKTGGAEPPWPVNRAAPRPGELHGEGAAPSGARPGRHGDVTDCRAGEPPEPDRVGPRAEGGQGGCAGSPEGGGATAERRRAGAAPGRHGEDGDRVGDAGGARCRA

SEQ ID NO: 64000 - protein, 133 aa, Zea mays
  Coding DNA Sequence Number=SeqID_20625
MNKNRNLQNGIGIQMGQIQAIEIKETVEERRNGQSKSADKKRNVKDGFMGVFCRNSDPTANSPRAELLRRKNPDGNEMKKVGFGDNRHMVTCEGQLTVGIDGGNDCDGRTRSFPLGRHLNLAGERSRSDIAGK

SEQ ID NO: 64001 - protein, 148 aa, Zea mays
  Coding DNA Sequence Number=SeqID_20626
MGKSKRGGSSSHHSGDKRKRETTPPSEDFGDSEYSEEEFSSESEGSLAPASPPASSDDSDDSQGIAAEVWTYIRAVERAGLEGSDESEYSSDEDNSSDSSEEGSGGDDDDDGGDSDRGGGSGKGGDDNDKGGNGDGGGGSKGSNKASG

SEQ ID NO: 64002 - protein, 473 aa, Zea mays
  Coding DNA Sequence Number=SeqID_20627
MPLARCLPMVGKLVRSLAFVLDLHSRDPAAFVREAKDGAVRIVGRVPEAAKAARGLPPPGKRVADFATDISVDDYLVGSDEGQLVVVPPAAAAAVVPRAKGSALSAGGEIPALTVVRDEAGAASRRLREMKEALSQAADFTDRAASGALTAVVSAEVERLQTQHADVVREKSSTDSKCRKLADKVAALEGEKTDLRRQLAEERKEANEAIAKAQAAQAEANLARAKGSLARQRAEQLEERLSALQSRVERAEASTRSEAERTRKQLMDSYHELGARTADFEVPDREPGLRCLEWIQEELQALPTIVEGFMSYASLVTYEGAMNALSREGCRHFEVFDQADEDFERDIYKVEDPIVKESAGALYDRMWGPHGREVVRERAETARGQAARGERVEDFGALNSAQPESESNPVVAAPETAPELPPETVEGVPDAPAATAVGGGLSPTAAPRADDPVQMAVEPAAEDPATAGSLQVT

SEQ ID NO: 64003 - protein, 292 aa, Zea mays
  Coding DNA Sequence Number=SeqID_20628
  Gene Ontology: Mol. function=cysteine-type peptidase activity; Biological process=proteolysis
  Homolog annotation: Hit_ID=Q8S456; Match level="QueryCoverage=67%, HitCoverage=26%, E-value=4e-61, Identity=59%"; Hit description =Putative uncharacterized protein 163K15.6
RAPREQNKHTPTIYGCSLIGPIYYLDHLHHPASPENKYDGTIPITANSYNLDLYSFVAVQKHVMSLHQNDMFLSYSTYVPRKKHLIGNKLKCVPSQHRPMFESMFDAHDKEVDKYCDSLQQSHQMLVSKQIELSETFGEMIDEVLRAATQRDTQQEDVPPTTSMPPTNARVSTPHVRTPDHQQHDQEIHVPTDDNKVSEQIGFRGLREIDDVDALPAKMEVMLLLPSFREDQRARGRVPLQSEDVKLITVDDPFITTDYMVPECPAPCVKDACALRHLGYPRNIPIKRGYRP

SEQ ID NO: 64004 - protein, 257 aa, Zea mays
  Coding DNA Sequence Number=SeqID_20629
  Homolog annotation: Hit_ID=A2Z5Q4; Match level="QueryCoverage=28%, HitCoverage=16%, E-value=1e-16, Identity=54%"; Hit description =Putative uncharacterized protein
AALDPQELYRSNLAKKSSCQLAGDFGQLRNLPPQLKKLQLQLTSFLGSLKRKDYLEIPEAKWSALNGKPDAAFKKKDSDPCSMLMDVALYDDQNPIMDWLNNSMSDSAPTLDEYDDSDLDWSTPSSFVTESLQMGIEEVAGFKRDLYMGKKVVKTNRECNGMEKMLKVPQKTMKLILHKNKAAQFMLSQVTVVPMMKVMAIMMLVPMEVVALGLLMVLPKVRDMGNQLLCVQDQQEKGSQLSRALLNYKWLDYPFTY

SEQ ID NO: 64005 - protein, 301 aa, Zea mays
  Coding DNA Sequence Number=SeqID_20630
MVSGSPRCHIVLMWAVVAVPTKASSHPKELQGGKGDETSGGSTLSVHLTEDKVVPVICPDDARGRLTCGPYPSGSPSTPSHTQDWVFARRGPLLIYSCARGGWSLTDAWASALVPLHARDLTDVWDPLPPLFLFSAARLGTGCCAARLISYGSVLSDLPINWSCEHLLTPPLGTVTALLRLDFDRKRRGHGEEHVTEDPGAQQIEVAEQELIEDIINGHLSMYHHKMVYTRKGGGIDLPPNRHTQRIFRQPQQQQPEMDPPQPPPVGVDPAVAAQMRIMKQMTDTMANMHAQMRQERQEMR

SEQ ID NO: 64006 - protein, 83 aa, Zea mays
  Coding DNA Sequence Number=SeqID_20631
  Homolog annotation: Hit_ID=Q7G2S6; Match level="QueryCoverage=72%, HitCoverage=55%, E-value=4e-08, Identity=45%"; Hit description =Retrotransposon protein, putative, Ty1-copia subclass
MSETHPSASAESSGIKESSLINYEAMEIWEVIDPGTIVKRSQDRQTMGTLMRFVPKEMWGTLGAKKTVKEAWETVKTMRIKAD

SEQ ID NO: 64007 - protein, 340 aa, Zea mays
  Coding DNA Sequence Number=SeqID_20632
  Homolog annotation: Hit_ID=Q6AU54; Match level="QueryCoverage=92%, HitCoverage=56%, E-value=9e-71, Identity=51%"; Hit description =Expressed protein
MLDEVAVMGRPRHRSSSDDVWDEGSMLKCSHSAPLKRPRARFARLSAEIEAAGKAPAEPKPRVERICAMRASPIRTKTARVECPSERKKALTTPRSKAVRPRQELFHSVKHQKEPLAAAARKGTVVKSLFMSTTPKKELVQTPAADKSKGAVSEVCSKLRKLNLACREVPSKYMSQPQPKNTKTAKKSEETTVAKSEKRGLESKTNAKKKILGRSMKRANAGPDGENRNGCSTAVDENSLVETAGSHQERKVVLQELRIEVDASRCGNSDDNKENVSSAPSEEALDNSSHYGSENRLLENNDNVPLKENVALKVAKLQKKVHQEQAGKLKKTTNPRVLWD

SEQ ID NO: 64008 - protein, 336 aa, Zea mays
  Coding DNA Sequence Number=SeqID_20633
  Gene Ontology: Mol. function=cysteine-type peptidase activity; Biological process=proteolysis
  Homolog annotation: Hit_ID=Q5NKP7; Match level="QueryCoverage=96%, HitCoverage=49%, E-value=2e-88, Identity=83%"; Hit description =Putative uncharacterized protein 9C20.3c
QLDSDEDDFMPALKKRNVSESHTRVLRKVVTKRIKHEDLPRQRLNVMCNPQDVIASINILNERQCEAIRRKGFSNILDMTVDALCSRSHLQWLMNKLDHKDMTIRLGPGKELKITKDIVHLILGVPNHGGGKPLGIDEAVAASNLRAELGLAKDEFNVTFLQDRLRKGEDDDLTIRSAAPQNKIGTPRIKFFDKNIIKALTKADKRKPECRTNIFDAPRPAPMPRPTFNIQLPSIKEMMSSKINDLPPRHRSKFTEILAAYDLEVDKSCIAIKDNIDKIIEKQYDIADKFIELIDEVLRAESDNLENETDEPQHPRNSADSAGQSYNYPLSYIQNL

SEQ ID NO: 64009 - protein, 294 aa, Zea mays
  Coding DNA Sequence Number=SeqID_20634
  Gene Ontology: Mol. function=nucleic acid binding
  Homolog annotation: Hit_ID=Q5NKP8; Match level="QueryCoverage=79%, HitCoverage=37%, E-value=6e-94, Identity=78%"; Hit description =Putative uncharacterized protein 9C20.4c
MPESILVNANIGNIQIKRIPKEYILQRYTYSARQDVPFSRDDRNLKGKDGETKSYRQKMLLKKAMKVVHHASLSKAGNDRALAVMDELLEVLLRMETDIEVEETCGTSGGDGIQDDDEDNRDIEKDGELDERNNKEIQDVSNILERGVDNVQIPIPIRPVEEVQVNLQDHANMNESGDNEQNDYARKKLDFAVDGISLGRPNNSKPKGRTIKGSEQKVIKLGAKGTKKMTRNARSVELLMVTTVGHVCQWRKIDYGWLALLDVREDDLLDLGTSVEVMFLIGMRQQHQKNTQLI

SEQ ID NO: 64010 - protein, 128 aa, Zea mays
  Coding DNA Sequence Number=SeqID_20635
MRRPRASPASSAYYGPTVLRPARFLAWKFCSRACEDVPAGTVYGEFLMDPQCNFIVVEDVALPPSHSFAIVEAEDQIGGAAPDDKFSSLRGSEWEEAAQSELWISSGSGVRHILRNTNTLYNLPEVIP

SEQ ID NO: 64011 - protein, 689 aa, Zea mays
  Coding DNA Sequence Number=SeqID_20636
  Homolog annotation: Hit_ID=Q2R9D1; Match level="QueryCoverage=100%, HitCoverage=100%, E-value=0.0, Identity=67%"; Hit description =Expressed protein
  Pfam annotation: Domain name=DUF616; Domain location=334-676; Score =641.0; E_value=1e-189; Accession=PF04765.4; Description=Protein of unknown function (DUF616)
  Subcellular localization annotation: CTP_CleavageSite=55; ConfidenceScore=5.17e-01
MAQYRQQYGVGFSDSRGHHHQVLPDWHRPHHASAKSSSRIRRPGKPAPRRRSPAAAAAVAAALLLAAVFLLSRRISRSPAEISQDSSARETLPDWNQSKSWKELKFGHGGGGRSARDSRYWDRDDRRRDEDYTEDEKEKISGGSGTSGDAGGSSDKGTTSEGGGEDKGLTTGSDAKDVPEVSEGGKGGTLYNEGGRKELEQYEAAAMGATGTGVKEVDPDDEYDDGIDTQDEMEDAHLHSSDGGRKLGGGSHEGAEKKDEVATERHTEAGGGIAGSHDISSPDKKKVSGTGDKKHGPKKKPKRKKSGSICQMKFLNSTAQLVEPVRNEKFASFKLEYVEVEERPIGSEFWEPRFAGHQSLQEREESYKAHDQQLTCAFVKGPNGTSTGFDISDDDRKYMSKCHIAVSSCIFGNSDRLRTPFGKTNPVTSLRNVFVITPSQITSLSKKTVCFAMFLDEVTLHTLESEGQKMDSMGFIGIWKIILIKNMPYNDMRRVGKIPKFLAHRLFPSSRSVVFFWMFSIWLDSKLRLQTDPILILEYFLWRHGYEYAISNHYDRHCVWEEVAQNKKLNKFNHTIIDQQFEFYQADGLTRFNPSDPNKLLPSYVPEGSFIVREHTPMSNLFSCLWYNEVDRFTPRDQLSFAYTYLKLRRINPDRPFRLNMFKDCERRSIAKLFHHRSEESHSGAQLTR

SEQ ID NO: 64012 - protein, 531 aa, Zea mays
  Coding DNA Sequence Number=SeqID_20637
  Gene Ontology: Mol. function=protein disulfide isomerase activity; Cellular component=endoplasmic reticulum lumen; Biological process =cell redox homeostasis
  Homolog annotation: Hit_ID=P52588; Match level="QueryCoverage=94%, HitCoverage=95%, E-value=0.0, Identity=80%"; Hit description=Protein disulfide-isomerase precursor
  Pfam annotation: Domain name=AhpC-TSA; Domain location=368-484; Score= -23.9; E_value=0.1; Accession=PF00578.12; Description=AhpCTSA family
  Pfam annotation: Domain name=ERp29_N; Domain location=29-147; Score= -26.5; E_value=0.0012; Accession=PF07912.4; Description=ERp29, N -terminal domain
  Pfam annotation: Domain name=Redoxin; Domain location=367-501; Score=- 15.4; E_value=0.06; Accession=PF08534.1; Description=Redoxin
  Pfam annotation: Domain name=Thioredoxin; Domain location=35-143; Score=176.4; E_value=7.6e-50; Accession=PF00085.11; Description =Thioredoxin
  Pfam annotation: Domain name=Thioredoxin; Domain location=379-500; Score=141.9; E_value=1.7e-39; Accession=PF00085.11; Description =Thioredoxin
  Pfam module annotation: Pfam domain module=AhpC-TSA::ERp29 _N::Redoxin::Thioredoxin::Thioredoxin; Domain location=368-484::29 -147::367-501::35-143::379-500
MAIRSKAWISLLLALAVALSARAEEEPAAAAEGEAVLTLDVDSFDEAVAKHPFMVVEFYAPWCGHCKKLAPEYENAAKALSKHDPPIVLAKVDANEEKNRPLATKYEIQGFPTIKIFRDQGKNIQEYKGPREADGIVDYLKKQVGPASKEIKSPEDATALIDDKKIYIVGIFAEFSGTEFTNFMEVAEKLRSDYDFGHTLHANHLPRGDAAVERPLVRLLKPFDELVVDSKDFDVAALMKFIDASTIPRVVTFDKNPDNHPYLMKFFQSSAPKAMLFLNFSTGPFDSFKSAYSAAAEEFKDKEIKFLIGDIEASQGAFQYFGLKEDQTPLILIQDGDSKKFLKVHVEADQIVAWLKEYFDGKLTPFRKSEPIPEVNNEPVKVVVADNVHDFVFKSGKNVLIEFYAPWCGHCKKLAPILDEAATTLQSDEEVVIAKMYAPTTPFYKTLTPLRSQDATANDVPSEFDVQGYPTLYFVTPSGKVTSYDSGRTADDIVDFIKKSKETAGAATTTTTQAPPASEKAAAAEPVKDEL

SEQ ID NO: 64013 - protein, 68 aa, Zea mays
  Coding DNA Sequence Number=SeqID_20638
MASQGHRRKAPKLDNSSTFFLPRVCVLDSYWYDLVETEVRRDRAKTLLTFELKPLYCSLVLSLFSRNI

SEQ ID NO: 64014 - protein, 314 aa, Zea mays
  Coding DNA Sequence Number=SeqID_20639
  Gene Ontology: Mol. function=nucleic acid binding; Cellular component= lysosome; Biological process=lipid metabolic process
  Homolog annotation: Hit_ID=A2ZAR1; Match level="QueryCoverage=51%, HitCoverage=24%, E-value=2e-51, Identity=61%"; Hit description =Putative uncharacterized protein
  Pfam annotation: Domain name=SapB_1; Domain location=151-189; Score =27.0; E_value=6.8e-05; Accession=PF05184.6; Description=Saposin-like type B, region 1
  Pfam annotation: Domain name=SapB_1; Domain location=55-94; Score =28.5; E_value=2.5e-05; Accession=PF05184.6; Description=Saposin-like type B, region 1
  Pfam annotation: Domain name=SapB_2; Domain location=106-139; Score =17.2; E_value=0.034; Accession=PF03489.8; Description=Saposin-like type B, region 2
  Pfam module annotation: Pfam domain module=SapB_1::SapB_1::SapB_2; Domain location=151-189::55-94::106-139
MGSKAPFCLTLLLLLAAACGPAAHAHDAVELPHHGLALKEQISSTKIPARLKSGSGLCSACENFTSEAVTYLGKEQTQDRIMEFLHDACSQSFSFEQKFFSNNFPISQCVELMDSYATLLFAKITEIRPEAFCKRYGLCRDTALLSGVGSDSTCVFCHHLLDEIMSKLKDPDAEFEIIQILVKECNKIEGHVQQVEQIVVERSEGWHCGYFCYHAWIPRQCEDEPEGRVLGGDPLSEKYVSSANELPCQAEEVFAQLPNPCQGQPDGQMLHIMEDDKGEVSLTYRKAPRNVGDLIEIVEKEYEDYKLDTQRRVL

SEQ ID NO: 64015 - protein, 109 aa, Zea mays
  Coding DNA Sequence Number=SeqID_20640
MLCLCGVQVLAPPAGSHPPLRWARGHCRYLETGVRSSQEGMPDPPGGSQVPPSEVRTLARSRDGEDPGTGKEEWDFVVESENDASLTDGEDLNLLLGEDWEESDNDLFP

SEQ ID NO: 64016 - protein, 65 aa, Zea mays
  Coding DNA Sequence Number=SeqID_20641
MKLWKETSRSSKTTTSSRCELAATPSRLPVKAAFIYVSFPHFDLFNIDNPTYETIGVITAINMTI

SEQ ID NO: 64017 - protein, 156 aa, Zea mays
  Coding DNA Sequence Number=SeqID_20642
  Gene Ontology: Mol. function=small conjugating protein ligase activity; Cellular component=intracellular; Biological process =regulation of protein metabolic process
  Homolog annotation: Hit_ID=Q5NAX2; Match level="QueryCoverage=87%, HitCoverage=36%, E-value=2e-38, Identity=59%"; Hit description =Ubiquitin-conjugating enzyme-like
MLQVLVSIQGLVLNDRPYFNEPGYKNSAETTGGERCSLAYNQTAFVRSCKTMLYSLRKPPMHFETLVLWHFHEHERAILDACRAYMSGTVVGSSAGTGSNRRYVHDKCFAEFHKSLTLYTEHLRAEFAANRRRVIELETNRAVTLMVEQQNLAHNK

SEQ ID NO: 64018 - protein, 33 aa, Zea mays
  Coding DNA Sequence Number=SeqID_20643
MAGSAAAALGQFGRPLPRAPAGSAAPCPAPPAG

SEQ ID NO: 64019 - protein, 287 aa, Zea mays
  Coding DNA Sequence Number=SeqID_20644
  Homolog annotation: Hit_ID=A2YGC2; Match level="QueryCoverage=50%, HitCoverage=65%, E-value=1e-08, Identity=32%"; Hit description =Putative uncharacterized protein
MDPLLTPIKGRSRALYEEVGRAGEWADAWLVLNALHGIPAAGGDPDGDNDDDAGGSSSHNTELSEEQEPEGWITRPITRDASLGCHFHDALDTLLHRAFDRHTWYIVYRCVVYQHRRGLYPDQWEATCLVRRLDDDLRGAEAFLEHYSITERDTVEATMQDAARRALLQYCSLFSGVADDLALKYYPRRSTGSAGGVIVSPIGEGNPRLNSMVNLVTVLNTKLDHALDELGKVRAEVAELLAERAARHYQDDGSPAPVGIQHPYRSPPRCRFDYGTPDYRTQIDLEP

SEQ ID NO: 64020 - protein, 79 aa, Zea mays
  Coding DNA Sequence Number=SeqID_20645
MAHFLSGFVELLLKREIVSWFVSSGCSAAPSTAVFFGGMTKVDSLPKDVEVSTPEVGANVGHLFSNAIDQEQDNMIVNC

SEQ ID NO: 64021 - protein, 46 aa, Zea mays
  Coding DNA Sequence Number=SeqID_20646
MAMMGSTSEKMYLYQVKKQQIFVVSVPRWCLKRKTKTEAVGGRVLR

SEQ ID NO: 64022 - protein, 46 aa, Zea mays
  Coding DNA Sequence Number=SeqID_20647
MAMMGSTLEKMYLCQVKKQQIFVVSVPRWCLKRKTKTKAAGGRVLR

SEQ ID NO: 64023 - protein, 44 aa, Zea mays
  Coding DNA Sequence Number=SeqID_20648
MAGAAWKTSLRYDDGRRPTLLRLGAVNQDFSERDSFDSYLTKMT

SEQ ID NO: 64024 - protein, 104 aa, Zea mays
  Coding DNA Sequence Number=SeqID_20649
  Gene Ontology: Mol. function=transposase activity; Biological process= transposition, DNA-mediated
  Homolog annotation: Hit_ID=A2Y663; Match level="QueryCoverage=83%, HitCoverage=39%, E-value=3e-21, Identity=54%"; Hit description =Putative uncharacterized protein
MEKKMIEEAKEKFQHRSIDGEVPRFRSKQAEDESIQLTREREARGGDDFSIKNCIAVLNTLEVTKEEKVKAYKVFKDPNNRQIFLSACNDDREAALMWLRDEMA

SEQ ID NO: 64025 - protein, 59 aa, Zea mays
  Coding DNA Sequence Number=SeqID_20650
MKLYMKNLWYYMIAIAILLMSHFVPLVDQGSIQQNADITHDSQFQAMVTVYHQVGPKGF

SEQ ID NO: 64026 - protein, 163 aa, Zea mays
  Coding DNA Sequence Number=SeqID_20651
MAGKGEGKGQKKTKGKKQKRPLTPPLEDFRNSKLSNEGALLHSLGSPSFNCMDNSMGLSLQERAYLHGLERTDLSDLKESEEEDEEDEYDVDDEGGVVGKDGRDDGKGDSGGGEGGSGCSEGDRSGNSSRAATTAMATSVASEISTKAHLKDLLWPGQHPRLI

SEQ ID NO: 64027 - protein, 58 aa, Zea mays
  Coding DNA Sequence Number=SeqID_20652
MYCSLSGVPVWARLTSARAARAINAPQVEKEVEGSFKMVEKEVQGSFELAEALKGSFD

SEQ ID NO: 64028 - protein, 181 aa, Zea mays
  Coding DNA Sequence Number=SeqID_20653
MEAAMAIVESEVESSYGRRILKIAVTPRLRPTSGGRRTYDSPEVGRRSHHSLEANPRRARQPRSHGSPEDGLRRETRSWLAKNAVTPRPRPPKDGRHSHGLLEAVTPRPGLLSVGRTHSQLARGRPRARDAVTACTRPSSGGRCSHDSAEATAGDVVTPRQRPTSGGRRSHLGQEMQSRLA

SEQ ID NO: 64029 - protein, 98 aa, Zea mays
  Coding DNA Sequence Number=SeqID_20654
  Subcellular localization annotation: CTP_CleavageSite=39; ConfidenceScore=5.06e-01
MSSPLATTRMRASSGTSCHMTIRFKRCHAFPMAPTPETAAPAKGEKPINHFLLLRHPLNAHCDVELIPLDVSIIDDLDNGDDELMVACNITGPKREPE

SEQ ID NO: 64030 - protein, 215 aa, Zea mays
  Coding DNA Sequence Number=SeqID_20655
MTTQHNQSIKSNKSTTPYVHTHVVASPGPPWETWDDEESDRSPAQVTHEIRILIEPIVVPITRILQGRQLYTGAPRGRTHSSIVSRSSHVSGAQGWDRGKSVDPGEEVVGRAIACHPCSAGFEGGAVGARSGAEDITAEAEVDRNEATKKDADARRWAREAGQQRLAQRGREAGCRRLWKEERELGCSRGQGNDAHRACASDDEDRGVDMTDGGD

SEQ ID NO: 64031 - protein, 369 aa, Zea mays
  Coding DNA Sequence Number=SeqID_20656
  Gene Ontology: Mol. function=DNA binding
  Homolog annotation: Hit_ID=A7PT71; Match level="QueryCoverage=94%, HitCoverage=94%, E-value=2e-61, Identity=40%"; Hit description =Chromosome chr8 scaffold_29, whole genome shotgun sequence
  Pfam annotation: Domain name=Bromo_TP; Domain location=23-97; Score =64.3; E_value=4e-16; Accession=PF07524.4; Description=Bromodomain associated
MAPHTLYDDSGSQPPYGSKRTRDEFGRAVARAAVAQALQAAGFDCAHRSAVDAVVDTVLRYITHLGRSAAFHANLAGRAHANELDVIQALEEVGADTYGFAGAATTGHCLVGSGVVKDLMAFVHSKDEVPFARPLPRFPIQRVEPQPSASFTVTGRETGMKHVPEWLPAFPDPHTYVTTEVWVEPPATKDRVDKVEQVRQRRKAEKSLLSLQRRLAMAGADRFRPAVAHDNALKGKEIQAAGTKRNPFLEPALLPGQKDVSEVDMPPEKKKFSVLEAFAPAIQARTIREIDASAGLDQNQRNIVPKERAPVHLKIGFSNKSLAAAQNSRALDLRDDLFFLKEETKDDKKRRAGMILRASMENPQELPQL

SEQ ID NO: 64032 - protein, 97 aa, Zea mays
  Coding DNA Sequence Number=SeqID_20657
MERKQALEVDSHRFLDPSPDLCRLVQRVTGGRLCEGGVGKQARGRVGASVRTFRGNGARSQERRGVGPRSREWRGRLLRERSKAGRGGYEGSELGLS

SEQ ID NO: 64033 - protein, 169 aa, Zea mays
  Coding DNA Sequence Number=SeqID_20658
  Gene Ontology: Mol. function=kinase activity; Cellular component =ornithine carbamoyltransferase complex; Biological process=amino acid metabolic process
  Homolog annotation: Hit_ID=Q6QP54; Match level="QueryCoverage=43%, HitCoverage=25%, E-value=9e-25, Identity=80%"; Hit description =Putative kinase
MAPPVDVVGPCPGLGEVEAPPRSRSSLSFEAKVESEPLGRVRRRPLAEARAESEPWGRAKRSSLSFGAEPESEPWGRAKRSSSSSGAEPESEPWGRAERSSSSSGAEPESEPCGDAVLLSDGSVERQSDYGHFGSVNWRARVKIKLCADGGYQLRFRSLEGTPNYGPQQ

SEQ ID NO: 64034 - protein, 254 aa, Zea mays
  Coding DNA Sequence Number=SeqID_20659
MNKTPAFKVPSQTELRFRPRGYEQPPHRGACGATSSGRPANDLCSSSYGPRTDAATGRLSFASPLKGREPDIKAKEPCGVRLFTNAAPANAGRSKAHRQVLAPVLAGQQQFAFPGMAGGRLLRRAGGWGWWSPSWVTTGEGMQPGRVMKILEAERWLKDQRVKGRTATQSACNRARWAHPFDSNAPSMEAQAHTSCNRRAGCYVRATAPPLAPLPRLLDCGTSTATRGNPAYDPTVPARRIGHGPIGRGRGHDG

SEQ ID NO: 64035 - protein, 150 aa, Zea mays
  Coding DNA Sequence Number=SeqID_20660
  Gene Ontology: Mol. function=catalytic activity
  Homolog annotation: Hit_ID=Q5NKP3; Match level="QueryCoverage=39%, HitCoverage=23%, E-value=3e-18, Identity=76%"; Hit description =Putative uncharacterized protein 9C20.7
MPPAPPAATPLLVLSIRRGLGGAQCSEGERGRRDLCGARERGAIGGGLGPFVIDQTKSMEALALASLIDDEKKLDNCQFDLWKQSYLAACVAMFGKLRRSRRLDAVQSGYTAVHIQTRDLIVVANAGDSRVVLGTASDDGAVTPSSSSST

SEQ ID NO: 64036 - protein, 337 aa, Zea mays
  Coding DNA Sequence Number=SeqID_20661
  Gene Ontology: Mol. function=hydrolase activity; Cellular component =mitochondrion
  Homolog annotation: Hit_ID=Q6ATR4; Match level="QueryCoverage=43%, HitCoverage=80%, E-value=6e-69, Identity=82%"; Hit description =Putative NUDIX hydrolase
  Pfam annotation: Domain name=NUDIX; Domain location=69-212; Score =55.2; E_value=2.3e-13; Accession=PF00293.19; Description=NUDIX domain
MDSGVAALDRVQATAAPELAEHSDACGQVGLLPEVELAVVKLLLIVDERRQRERLLPVVFVRGFQVRNMDSSLACIPFRYRANNDETSGDKTKKVVEVLMINSQSGPGLLFPKGGWENDETVEEAAAREAIEEAGVRGDIVHFLGSYDFKSKTHQDACCPEGMCRAAVFALHVKEELNSWPEQSTRQRTWLTVPEAASRCRYQWMEEALLTGFSDWHDKWSIGDGGGGGANCQLQPAGRHAPCALCNSAPDSGDAHPVYELNCETTPGAQAKWPIAAAHGPVSLSSEQVFQRRPQAAGTPPPAADCSFRLRRALSSTAPSLQLSLHCFNAWAITKVE

SEQ ID NO: 64037 - protein, 167 aa, Zea mays
  Coding DNA Sequence Number=SeqID_20662
  Gene Ontology: Mol. function=phosphoprotein phosphatase activity
  Homolog annotation: Hit_ID=Q6ATQ2; Match level="QueryCoverage=82%, HitCoverage=29%, E-value=2e-47, Identity=71%"; Hit description =Expressed protein
EATRELVALEILASAPETIGSIAIAVVGLLQRGGIVMAACGYALGRAELGAAKRQQPDKDPSAGTRSSNVAATGSLGSAARPDVSFRYRGADSCKKVAASLKSSEPWGNRAFWTNAAGPGWKLSFAVEPWTKGFSTSCAAPYSAGATEHQLSLDEKVDNSTVASDSD

SEQ ID NO: 64038 - protein, 493 aa, Zea mays
  Coding DNA Sequence Number=SeqID_20663
  Gene Ontology: Mol. function=catalytic activity; Cellular component =integral to membrane
  Homolog annotation: Hit_ID=A3AS94; Match level="QueryCoverage=82%, HitCoverage=76%, E-value=1e-106, Identity=53%"; Hit description =Putative uncharacterized protein
  Pfam annotation: Domain name=Peptidase_C12; Domain location=59-392; Score=54.4; E_value=4e-13; Accession=PF01088.12; Description =Ubiquitin carboxyl-terminal hydrolase, family 1
  Subcellular localization annotation: CTP_CleavageSite=43; ConfidenceScore=5.59e-01
MVVVVSTSLCSFLPAHPFSLARPRRPHPTNPTAKPLSRTLSIRCIATTAAGPPPLPPPKLVRCPALDRQAARASRLRFARKLLTLLLSKPRHFLPLRVLNRCRRFLGLPRRGRPLIPMVLRYPTLFRLFQAHTSLPLSPSLSTLAVALTPAAEALAADLAALRATGTGAGALAAKIHRLLLMTPRRNIPVNRLVHLAPDLGFSMDFRATLCPRHPDLFRLVNTSRGHALQLADPPPTPPPPPLSLRPAAPPDRLMDRPRRFPHLPLRRGLNLRRVHRDYLLRFHSLPEVSPFEPLDEGASLEMLERRACAVVREVLAMTVEKRTLVDHLTHFRKDLGLPNRLRAMLVRHPELFYVSVKGVRHSVFLVEAFDDDGRLLVEDEMLVGRDRLEELVREGKRMRRARKKGVLTFDGDSDEDEDDDAAEEEGSLKVDDEFGDLFEDGVIGEDWEEVGDGGGSDAYEEYDAESGDMEEFWVKKAVAQGLVGNGNEQDVW

SEQ ID NO: 64039 - protein, 110 aa, Zea mays
  Coding DNA Sequence Number=SeqID_20664
  Homolog annotation: Hit_ID=Q7XCT4; Match level="QueryCoverage=39%, HitCoverage=15%, E-value=1e-10, Identity=62%"; Hit description =Expressed protein
  Subcellular localization annotation: CTP_CleavageSite=18; ConfidenceScore=5.27e-01
MGQTASRDAERATRVPPSATGRRSIGRPGLPFRSCPSPGTWTSSSAIHYTSGGPWFQRYRDCEFADLIWLKEAEELRVEKDKRRLLEDKKGRRQHQARRGGSAGAGEGYA

SEQ ID NO: 64040 - protein, 285 aa, Zea mays
  Coding DNA Sequence Number=SeqID_20665
LGSGGAEFAVFRVLARVRALGSGGAEFAVFRVLARVRALGSGGAEFAVFRVLARVRALGSGGAEFAVFRVLARALGSGGAEFAVFRAALSFCQTGQWSGGVTAVTSALPGARVRIEVSGHLCVKCPCNLVSRCGDSVKVASERSQGLGQAGDVSAIKRGPRARRKSLELYADGGYQLRIRRLEAPEPLHRARGRSGTDSAFYIRPYVAFPQGGGGECAMLPSMGTEHGVSGELQAATGVPVARRVGLGPRLACQKLEKRVHLARLHAACMAARPFCPLVWAEMGG

SEQ ID NO: 64041 - protein, 282 aa, Zea mays
  Coding DNA Sequence Number=SeqID_20666
MEEEAPPMELVREKKLSEKIRLCKMEVLKKSHTSVEDSDHIFLESSGLQDGLSCKKDLHSCGTKASDEEISDRLQENHDNTQPSDNHNYSVDQTQLPFLQALLRVQMKRSHRFLDKLPVVHWHLLTDKSIDPTYLVVMTATAAVGAATLLQRVIQIRTKPTPPNPRRPSSVQAFHSSTSCAGHQSRAIRKAVAQSAVHRFSAFKLLKRFSRILNSDHWPGSSRRKLSRKRLQARLVKKERRGWLLVAIHLRAVSAVRFGLPLSSLTVDVPELNVEAWPCCRF

SEQ ID NO: 64042 - protein, 301 aa, Zea mays
  Coding DNA Sequence Number=SeqID_20667
  Gene Ontology: Mol. function=metal ion binding
  Homolog annotation: Hit_ID=Q10BN7; Match level="QueryCoverage=79%, HitCoverage=94%, E-value=4e-98, Identity=68%"; Hit description=RING zinc finger protein, putative, expressed
  Pfam annotation: Domain name=zf-C3HC4; Domain location=37-96; Score =11.5; E_value=0.0044; Accession=PF00097.16; Description=Zinc finger, C3HC4 type (RING finger)
  Subcellular localization annotation: CTP_CleavageSite=22; ConfidenceScore=5.08e-01
MAAASSPAASAASPGRGAGDPPAAAAAATARTAGCPCPICLEAFKDEAYLDTCFRSFLKLLAASADSFCYRCICQWVRIVASKHAEPLSSVRCPLCKTENLSVIHAFDGESFERWYINQEPRKRRLSDAHELVSQFYNMKETTSNISGVQQYWEQQRYLRKKIWLQTWLRREIQALTRDENVEVIVHHIHGVMGSFMKRLEKEHTSSRWTTSPEKRREEFRRLVSDAARPFLLGRTERFVAEVELFLASDLNMEAYNKLRVQRFRESSSHLTREQDALPRDRSLEEHYMYFLCNDTDCDEM

SEQ ID NO: 64043 - protein, 181 aa, Zea mays
  Coding DNA Sequence Number=SeqID_20668
  Gene Ontology: Cellular component=nuclear pore; Biological process =poly(A)+ mRNA export from nucleus
  Homolog annotation: Hit_ID=A2X6R4; Match level="QueryCoverage=93%, HitCoverage=19%, E-value=2e-16, Identity=74%"; Hit description =Putative uncharacterized protein
MCAEVLDKHLSMVQRDHEQKSQIVERRIRDDAALEEAKRKEQAVKEEKLRQERAQQEAEARQKEAAKLAAEARKTAFEAAKKEAAEKEAAEKEAAKLRDAAASQPSPNSQNNTAEGIKVFGDKYALEAESRRHALVQNQVPENIHHSKEFSKYDRQIAKSISKLMPTTDSVSPITMKQNKG

SEQ ID NO: 64044 - protein, 215 aa, Zea mays
  Coding DNA Sequence Number=SeqID_20669
  Gene Ontology: Cellular component=nuclear pore; Biological process =poly(A)+ mRNA export from nucleus
  Homolog annotation: Hit_ID=A2X6R4; Match level="QueryCoverage=33%, HitCoverage=8%, E-value=3e-10, Identity=54%"; Hit description =Putative uncharacterized protein
MATPCRSRGFERVELRCPRELDPRPSWTLGDVLAELDALDATRRAAPPTPLKQPPDWANGGGEKAFVMRVDDDDEDDTEDEDDGTSGGKSRALVAKGARFSCNDLASSDSEDELDGQVAPYHLMEKRDLAKSILLELEHEHHLKVQEEVRSKLASLEDDDTITNMATASSDRASCKISRRTQSLLGALDPDTRESPLTRHTAVTNLTATAGFVTL

SEQ ID NO: 64045 - protein, 900 aa, Zea mays
  Coding DNA Sequence Number=SeqID_20670
  Gene Ontology: Mol. function=oxidoreductase activity; Cellular component=cytoplasm; Biological process=metabolic process
  Homolog annotation: Hit_ID=Q6H7C9; Match level="QueryCoverage=30%, HitCoverage=88%, E-value=6e-68, Identity=51%"; Hit description=Short- chain dehydrogenase/reductase protein-like
  Pfam annotation: Domain name=TPP_enzyme_N; Domain location=199-319; Score=-42.7; E_value=2.3e-05; Accession=PF02776.9; Description =Thiamine pyrophosphate enzyme, N-term
  Pfam annotation: Domain name=adh_short; Domain location=611-784; Score=-11.2; E_value=6.8e-05; Accession=PF00106.16; Description =short chain dehydrogenase
  Pfam module annotation: Pfam domain module=TPP_enzyme_N::adh_short; Domain location=199-319::611-784
MEERLTAALAGSTSSYLASTSEAVNKLRLDLDPCCASQDSSQHHRVEDPSREENLQPQVETVESFESDHVPPPVVYDRYDEPNHSEIVEVLVLLYRTAALEPVEHHRCQVLTAAGKAEQEPTKGITNEVEAEEACELPGDATDFSDHKDTPTSPTIQALADTFVDSNKLDHPSKYREEVQLPRAVHVELDLYSFTPLIFSVEQVIEEEVPVDMPTRCSRMDPNCDAYSVLNLHVVCIVGGRNSNEYGTNRVLHHTIGLPDFSQELRGFQAITYYQAIINNLDDAQEQMDMAIATALRKSKQVFVSVSCNMVDLFHSTFNWERSMSYNMVGLSHSTFGLVPLFISTRLINKANLEYAGEAQLRLYDLYTISIATEGPYTTPQSYVLKRDRPDLASDTYTVQNAATGALSLRLYARALLLWELGGADHALAVSRDVLINNSLVDLYDKCDTVELTRHVFDRMPERHLASWNTMALTLANHDRVQGSLDLFNRMTRVENVATNAITFVAGINACNHGGLVDEWMRYSAAMVSAHAIKPRIDHFGRMVDILAQAGFIEQVLYVVVGLNCRPDSSIWRSRLDASCKRNAGLTLSEAVAKLALVENVQQNCSDGDTDRDLAAASTSGLAVVVVLTARDEARGAAAVGKLRGLGLSNVFFHQLDITDAPSIARLADFLKSRFGKLDILVNNAGFVGLEYIQDRIDGTSTTSEEFCGMDMDKRLELLLKWCLRETCDAGKECMRINYHGTKQVTRALLPLLLASDSGRIVNVSSVLGQLRFFGSEALKRELDDVASLTEERLDEVAGAFVADLEAGAVEARGWWPAGFSPAYMVSKAALNAYSRVLARRHPALRVNCVHPGFVRTDMTVNFGMLTPEEGGSRVVAVALLPDGGPTGAYFQERQQAPFV

SEQ ID NO: 64046 - protein, 97 aa, Zea mays
  Coding DNA Sequence Number=SeqID_20671
  Subcellular localization annotation: CTP_CleavageSite=63; ConfidenceScore=5.48e-01
MAPSPSLPNFGDPGATLACACLNFGDLTAAERSGAASRTSVTQGNVNLFSNKVKTTSSSWFLSVAEDPPEQQPGEGKCPQTYHVLLYFIIHCPALLY

SEQ ID NO: 64047 - protein, 32 aa, Zea mays; identical to SEQ ID NO: 48815
  Coding DNA Sequence Number=SeqID_20672

SEQ ID NO: 64048 - protein, 81 aa, Zea mays
  Coding DNA Sequence Number=SeqID_20673
MAGMAHRSCSGLPKDFSPPFYPLCPWIHGLFPAIEFVVAPSPSLPNSGDPRATLACACLNSGDLTVVERSGAASRMFVSLV

SEQ ID NO: 64049 - protein, 371 aa, Zea mays
  Coding DNA Sequence Number=SeqID_20674
  Homolog annotation: Hit_ID=Q6K8M0; Match level="QueryCoverage=100%, HitCoverage=100%, E-value=0.0, Identity=78%"; Hit description =Putative uncharacterized protein OJ1654_A02.17
  Pfam annotation: Domain name=DUF707; Domain location=94-364; Score =521.8; E_value=7.8e-154; Accession=PF05212.3; Description=Protein of unknown function (DUF707)
MAKPLNGSGRSMPRSNEGMRLIFSAVVGVMLGYLFGISFPTVNITKLHFPSSIISYIEDRNSGITTQTLLNHAWASANNHKKNSSESNTDEIPEIYVPTNPKGAERLPPGIVVSETDLYPRRLWGDPSEDLTSEPRYLVTFTVGIGQKANIDAAVRKTNSPLCCSIMMVGLQSGMNLSGLKEQSMWYAKRFLHPDVVARYDYIFIWDEDLGVEHFNAEKYIELVRKHGLEISQPGLQPDRGLTWQMTKRRGDQEVHKFVEIMATVFSRNAWRCVWHMIQNDLVHGWGLDFALRKCVEPAHEKIGVVDAQWIVHQSVPSLGNQGKSDNGRPPWEGVRARCRKEWGIFQTRLADAEKAYYLERGITPPNSTSV

SEQ ID NO: 64050 - protein, 521 aa, Zea mays
  Coding DNA Sequence Number=SeqID_20675
MAALVKYIWAISSYGGQPSVELVRSPAFTVDLCGRDAAAFVCEVEAEAVKIVGKYATKTETLRSWDIHSSNVRFNRMFELNNLSYGSYPEGDSGDTADRRGKQVRSSADEGPSRDKAPGVAGNVHGSRGIDVFARAPGNLFANAEGLVDPCRKVKLARPSAKAVALGAAMPPPAVPRPPSPPRVVETAVAGSGGVAMGLSVDDYLVGRVNMFDAQTGLLPSGAESDQLAIVAQASAADLVVAATEHAAKGDTGTSEDPWSRFYAGCEITSAVVAAGVAASVVQQLKYRRWLEGRIERLRTQHMGAVRDKSAAENKSRNLLEKLSAAEKEREDHGRRLAEEREDAEKAHAEAQATRAKAQTVRMEAQAMRAEAEIARKRAVDMELRNICSHCEKTEASTRTDVEWAHTLFVEAHFEVFDQANEEFDCGVFQVEDDVLKRSAGALYDRMWGSHGHGIVRERANRALAHMLNEEEVDDLAGLGSSMTWMDVTVEAGVEGHSAPPGGSGEDPAAASALAQVEEMH

SEQ ID NO: 64051 - protein, 271 aa, Zea mays
  Coding DNA Sequence Number=SeqID_20676
MGRRETEHEGGKREDRCKGETRGLRVCPTPRLGALAVGGYKRPRGREREACTRRPVLSARPTFSYECPGPSFYRRKERAQGNDGSLCDVVGPSPGSGEMVAPPRSGSSLSSEVEVESEPWGRARRSPSSSGAEAESEPWGRARRSSSSSRAEAESEPWGRARRSSSSSGAEPESEPWGRARRKFVVFRGRARVRALGSGEAEFVVFRGRARVRALRSGEAELPMAPEAGLGRCQPHSVEWHSSRSNAGGAVFLSGWSVERRSDCGHFGSVD

SEQ ID NO: 64052 - protein, 178 aa, Zea mays
  Coding DNA Sequence Number=SeqID_20677
  Subcellular localization annotation: CTP_CleavageSite=53; ConfidenceScore=5.42e-01
MGKKHAAGGGWFAAVRKVFRPSGSGGSSATTTTSSSSSKDKDKDAVQHGKQATAAAAAEEPEVLLLEHFPASETSAEASNEGGDAEAELAAVAATTKGRRRRDDEVGDEDGEMEEELADDMERARALAAAAEAAVAAAEAAARVVRLAALRRLSREERAAVRIQAYYRGYLFHIGGGS

SEQ ID NO: 64053 - protein, 413 aa, Zea mays
  Coding DNA Sequence Number=SeqID_20678
  Homolog annotation: Hit_ID=Q6QP51; Match level="QueryCoverage=56%, HitCoverage=79%, E-value=2e-09, Identity=32%"; Hit description =Putative growth-regulating factor 1
MGPQVPVRVNPQVSFTNRRKDGGLRDGVGTEVVQLHPVVMQNRPHKTACRHSEPPLVKGDEAHDIPRRRGRGGSARRGHPLRLRVTGERAKQTISNKGLQVIRRDGGERPRIARRNNGHPVDHHQAEEVAVEGTGCADGRHLWRAKQATLHLHHNDRVKKGTGKGDTPKGILLHEGSGPRAPLLIRGSKAGPSEGFNSRLRALGLRAHYWSEVRRLAPRKGSTAASGHSGSAPTIDQGFVGWPPKGSTAASDTERGMTLAAKSGLGRHRKLRLARPQGSDSGSAPEDDELRLARPQGSDSGSAPEDDELHLARPQGSDSASAPKDDELHLARPQGSDSASAPEDDELRLVRPQGSDSALAPEDDGLRLAQPQGSDSTSTSEDRLDPNLGGATVSPDPGLGPTTSQGEPSLPYP

SEQ ID NO: 64054 - protein, 149 aa, Zea mays
  Coding DNA Sequence Number=SeqID_20679
  Homolog annotation: Hit_ID=A3A5V2; Match level="QueryCoverage=88%, HitCoverage=30%, E-value=5e-22, Identity=45%"; Hit description =Putative uncharacterized protein
  Subcellular localization annotation: CTP_CleavageSite=33; ConfidenceScore=5.39e-01
MAATTQAQQQEHAPDHAKTHQSTPTRTTSSYVTAAAAFANGMSEKTVETETTSRSPLNQASAAAHGRPPAIPGYMAATRSARAKARPAPPSATPTHARSRSGGGLAGDTSSSGQNGSAVAGYSPDSSCTGDWTPPRLGVSTRTSRVAYT

SEQ ID NO: 64055 - protein, 115 aa, Zea mays
  Coding DNA Sequence Number=SeqID_20680
MWWSQEEGMCSRTKGGEGYNKRVLEAGWREGVWGSGEYTPGPRQQKTGGSSSDVGSNDSTMGRWSSGSDVSRESKEWGGWIRKERMERSEWRRTSNGGMGQETRGQGGSGRTNTI

SEQ ID NO: 64056 - protein, 125 aa, Zea mays
  Coding DNA Sequence Number=SeqID_20681
MAGDTLAVDEEEDGKVTYRQQRRAVYLMRAISPVEREQRGQVMELPLDAQSSGRRLDVDERVEQCRAVAGVLHVLARFVQVLQMQHLRGIHMYREEAPRTELLGSRRRLGEGERRAAAAGLQVAN

SEQ ID NO: 64057 - protein, 89 aa, Zea mays
  Coding DNA Sequence Number=SeqID_20682
  Gene Ontology: Mol. function=RNA-directed DNA polymerase activity; Biological process=RNA-dependent DNA replication
  Homolog annotation: Hit_ID=Q8S472; Match level="QueryCoverage=51%, HitCoverage=3%, E-value=9e-09, Identity=65%"; Hit description =Putative gypsy-type retrotransposon RIRE2
MALSGAYQQQALRDDERSSALSLMWRDGKRIERKKVDLDHERLPLHSDERDHLFTPPLGALNFSGLGNPSAMRDFMAACDYCLSDCSDG

SEQ ID NO: 64058 - protein, 261 aa, Zea mays
  Coding DNA Sequence Number=SeqID_20683
  Gene Ontology: Mol. function=kinase activity; Cellular component =ornithine carbamoyltransferase complex; Biological process=amino acid metabolic process
  Homolog annotation: Hit_ID=Q6QP54; Match level="QueryCoverage=46%, HitCoverage=36%, E-value=3e-10, Identity=38%"; Hit description =Putative kinase
MAPPVDVAGPRPRLGDVEAPPRSRSSLSSVAEVESEPLGRARRRPSAEARAESEPLGRARRRPSAEARAESEPWGRAKRCSSSSGAEPKFEPWVGRSGVHRLPGLSPSPSPGSGGAEFAVFRGLARVRALGRAERSSPSSGAEPESEPWVGRSGVRRLPGLSPSPSPGSGGAEFPMVPEARPDCPSASLCRVAQQSERRRRRCPSVRSGCFLAKTGPRLSRKYARRWREASGETEILRGRLPLPEAGLRRGVIGSLEWTDP

SEQ ID NO: 64059 - protein, 245 aa, Zea mays
  Coding DNA Sequence Number=SeqID_20684
  Subcellular localization annotation: CTP_CleavageSite=74; ConfidenceScore=5.59e-01
MQAACNRAKWAHFSDFQHAQHGGPGPRVMQPARRMLRASNCTATRATAMPPRLRNQYRDSRRPSARPSSASLARRATGGAPGRRSKRRFAFAIMTASKMGPGKGDTPKRILLREGTRLRASLLIRGSKAGPSEGFNSRLRVHGLHTHYWSEVRRPAPRKGSTTASGYSGSAPTTDQGGNDLVTESHQREASSPRTPSIGDRVRQITRRLGGCSRKPGSGQTVDSVNIPARELGDPTVHPGYGQLA

SEQ ID NO: 64060 - protein, 218 aa, Zea mays
  Coding DNA Sequence Number=SeqID_20685
MSSGDSWLRLRGGRPSRLLEPDSWRRPGRRWPGRGADVVLRSGDPPTVSPSEARSDLAEGVDDAEGAAAPFNYQGFCYRCSQEGPKNRFGRRGFEREDLFGPRNHLSERELLIAEGDRWREVVVAPQLHRTCPVNYSGAAIAKSRGYQVPEPRPLGAPDTVRCTPDSPVNYSAPAPKIPEAEEFSAKSPGAPDTVRWHTGQSGAPDQGAFRDAFSSLF

SEQ ID NO: 64061 - protein, 640 aa, Zea mays
  Coding DNA Sequence Number=SeqID_20686
  Gene Ontology: Mol. function=metalloendopeptidase activity; Cellular component=mitochondrial intermembrane space; Biological process =proteolysis
  Homolog annotation: Hit_ID=A2WY13; Match level="QueryCoverage=100%, HitCoverage=100%, E-value=0.0, Identity=76%"; Hit description =Putative uncharacterized protein
  Pfam annotation: Domain name=Peptidase_M3; Domain location=227-637; Score=236.3; E_value=6.7e-68; Accession=PF01432.11; Description =Peptidase family M3
MEPRRRERRVIAIAGAAALVAVGLNIAFSAVVAHRRRKRRELPGFTAQVNLSAAAIKRTTDRIISKSRETYDSVAAVPLDKVSFANVIAPLAELDALQFPLVQACVLPRMVSPSEDVRKASAEAEKLLDSHFVLCRYNLAPEWSRKVKEFERNGVKLSQSKRKEMEKLKSHIDALNLKYLQNLNDFTKFLLLGEDELAGMPFEFLKDLEKADGKFKVPLTSYHVTPVLEHCKVGSTRKQIAVAYGQKGGKDNVAILENLVQLRHKFAKLLGYTNYADFAIEPRMPKTSRKILEFLEEMSEQLSDVANRELNILKDLKIKEEGNAQFGMEDLLYYIKRAEEFKVDLDVGEIKQYFPVGLVISGMLKIFQDLFALRFDEIKDVDVWHDTVRVFSVWDASSSDLLGYFFLDIFSREGKYAHTCVVTLQNGCLCSNGTRKVPAAVILSQCPKEFDGNSALLRFPEVVRLFHEFSHVVHHVSNRATFSRFSGLRLEGDFAEIPSLLLENWCYESISLKMMSGFHQDITKSISSEACQSLKRRRDLFAGLKMKQEILLCLVDQIIHSSENVDIDDLIKDLHPKVFAADLFVSKFKDDLLNQHAGLRFRNKVLAPGGSKDPLEIITDYLGREPSLQPFIQSRTRNSL

SEQ ID NO: 64062 - protein, 418 aa, Zea mays
  Coding DNA Sequence Number=SeqID_20687
  Gene Ontology: Mol. function=hydrolase activity; Cellular component =nucleus; Biological process=metabolic process
  Homolog annotation: Hit_ID=A7PLV3; Match level="QueryCoverage=100%, HitCoverage=100%, E-value=1e-149, Identity=65%"; Hit description =Chromosome chr14 scaffold_21, whole genome shotgun sequence
  Pfam annotation: Domain name=Abhydrolase_3; Domain location=143-384; Score=260.9; E_value=2.8e-75; Accession=PF07859.4; Description =alphabeta hydrolase fold
MPSVGVKIYSVFFKLFLRHRLQSLAAAAAGDPDNAAFGVSCRPDEATAPPNPAFSAAADGVASKDLHIDPNSSLSVRIFLPTPPPPSPHAHLLAHAHPRRASDPTPTTPAPAPANGAPYRGYLPHAVSSPRAAASARRRLPIVVQFHGGGFVTGSNTAAANDAFCRRVAKLCDAIVVAVGYRLAPESRYPAAFDDGVKVLKWIAKQANLAMMTKVGGGVDTFGASTVEPWIAAHGDPARCVLLGASCGANIADYVTRKVVEDGKPFDPVKVVAQVLMYPFFIGSVPTHSEIRLANSYFYDKSTCLLAWRLFLSEKEFNLDHPAANPLAPSRRAPPLKCMPPTLTVIAEHDWMRDRAIAYSEELRKVNVDSPVLDYKDTVHEFATLDVFLKTPQAQACAEDIAIWMKKYISLRGHEFSY

SEQ ID NO: 64063 - protein, 259 aa, Zea mays
  Coding DNA Sequence Number=SeqID_20688
  Subcellular localization annotation: CTP_CleavageSite=22; ConfidenceScore=5.03e-01
MQAACNRAKWAHPFDSNAPSMEAQAHKSCNRRAGCYVRATAPPLAPLPRLLDCGTSTATRGNPAYDPTVPARHVGHGSVSRGRRRDGQYGQKWAGSNGGGRRAVRLTAAKSGLRRHRKLRLARPRSRTRAQPQKTTNSTSPDPGLGLGLSPGRRRTPPRPTQGSDSGSAPEDDELRLARPQGSESGLAPEDDELRLARPQGSDSALASADGLRLARPRGLDSTSASEDRLDLDLGGASTSPNPGLRPTTSQEGPSLPYP

SEQ ID NO: 64064 - protein, 239 aa, Zea mays
  Coding DNA Sequence Number=SeqID_20689
MYCSVRCATTRVPDFCALWRALIAVAESRPFGAPDTVRCTPDSPATFALNAPAIRSVGTAIGPRMLLGEDWASGEPKARTLIVEGSSSTLGVIYTFGEESGSSRRLGRPPRSLSQLSPEDISPARGLGDSTPASVPPADDTTRLRPTKSSFRANSAPVHADTATSGFGSSKSGRGYEQPHTIGEPAEQQKADRWLAAARSNSDDDDDFCSEGPNCSSNDLRADAAAIKPSPTSSLERRG

SEQ ID NO: 64065 - protein, 91 aa, Zea mays
  Coding DNA Sequence Number=SeqID_20690
MAEALATMASGIELAGAKERWLADEGECGAKREIWSQEIWSVSLPKPEANPRKTLGDTGVSQPSPLKGISSRDSGQSPPRVKRRVRLIGNG

SEQ ID NO: 64066 - protein, 53 aa, Zea mays
  Coding DNA Sequence Number=SeqID_20691
MVDTSAVTARRQPGSVEHCTMQELVDGVTWPTTLPSGWTVKWDVAPAGEEPEE

SEQ ID NO: 64067 - protein, 619 aa, Zea mays
  Coding DNA Sequence Number=SeqID_20692
  Gene Ontology: Mol. function=transporter activity; Cellular component= membrane; Biological process=oligopeptide transport
  Homolog annotation: Hit_ID=A2WKJ2; Match level="QueryCoverage=84%, HitCoverage=91%, E-value=1e-149, Identity=52%"; Hit description =Putative uncharacterized protein
  Pfam annotation: Domain name=MFS_1; Domain location=68-530; Score =26.6; E_value=9.4e-05; Accession=PF07690.7; Description=Major Facilitator Superfamily
  Pfam annotation: Domain name=PTR2; Domain location=130-522; Score =405.3; E_value=8.9e-119; Accession=PF00854.12; Description=POT family
  Pfam module annotation: Pfam domain module=MFS_1::PTR2; Domain location=68-530::130-522
MEMEAVESHGGAGRRTPKRDRGISWACVFILALYMASLALKPSGCGLCTACTRTCIHGGDGGTRPDITPASNCFQFIAYFAVSTNLVNYLKDRLHQGSKAAANGVTNWMGTSAITPLVAAFLADAFLGRYWTIALFLVISVLAYVVLTVSAAAALESAAFYAGLYLLALGGALQPVLSSFGADQFDEEERGRQSSFFNWFYLSINVGSLVGGTVLVWVQSSVSWGLGYGIPALFSALAVAAFLAGTATYRRHQPPAGSPLTRVAQVVVAACRKCGVQVPEDASTLHECEDVGGMSAIQGSRRLAHTDQFRFLDKAASVEPSDDKSRPASAWRLCTVTQVEELKCVLRLLPVWASGIVFAAAYTQMTTTFVLQGDTLDPYVGGFRVPAAVLSVFDTLSVMLWVPLYDRLVVPLARRATGHDRGFTQLARMGVGLVVLTAAMLAAGALEVARRRVIARHDMYDTNTGAGGDGEYLPLSIFWQVPQYVVVGASEVFTFIGQMEFFYDQAPDAMRSLCSGLSMTSFALGNYVSSALVTVVARATARGGRDGWIPDDINRAHLDNFFWLLAMLCAGNFGVYLLIARWYTYKKTVDYNPNIEMSTILNEGATAKTRPKEHILKSS

SEQ ID NO: 64068 - protein, 45 aa, Zea mays
  Coding DNA Sequence Number=SeqID_20693
MAVNYLTDELIILLQTQAEVALAAADGDPNVAIEILMSQQGRLSH

SEQ ID NO: 64069 - protein, 28 aa, Zea mays
  Coding DNA Sequence Number=SeqID_20694
MDYMVFEVAELDETAMICHTNNKMKGES

SEQ ID NO: 64070 - protein, 344 aa, Zea mays
  Coding DNA Sequence Number=SeqID_20695
  Gene Ontology: Mol. function=cysteine-type peptidase activity; Biological process=proteolysis
  Homolog annotation: Hit_ID=Q8S456; Match level="QueryCoverage=95%, HitCoverage=35%, E-value=8e-83, Identity=54%"; Hit description =Putative uncharacterized protein 163K15.6
MPPTNDPVSTPTVPTPDKQQHDQESHVPTDHIKISDDAPTTDKPAAPKLTPDINSEGQKFVTHDTPVSGAPLFDKTPLTDATTDLVAKDSSCKAAVAEHPHVSREDCARNLLKFILSGKLDPSMSIINFGGFGGSVLDVVQSFGPNKCLENTFMQGFIDCIRQDDVLYNPDSVINTLILNVNVGTVLNIEEFEQHCSNPQPFTTSLLKEQLEPTLPSDDVLNQIKLIPWSRLIMRRLSIALHEARPESTVPKFGNYKIGLLPNCPTMTPGSNDCGFFVANFLRYYDFDDGDLSEFYTPDEPLDQCAFVLHYLTFHRNNMVAPLPAELLPFKYAPRRCRCLKAKT

SEQ ID NO: 64071 - protein, 131 aa, Zea mays
  Coding DNA Sequence Number=SeqID_20696
  Gene Ontology: Mol. function=deoxyribodipyrimidine photo-lyase activity; Biological process=response to DNA damage stimulus
  Homolog annotation: Hit_ID=P00914; Match level="QueryCoverage=71%, HitCoverage=19%, E-value=1e-43, Identity=94%"; Hit description =Deoxyribodipyrimidine photo-lyase
  Pfam annotation: Domain name=DNA_photolyase; Domain location=1-123; Score=29.0; E_value=2.9e-08; Accession=PF00875.9; Description=DNA photolyase
AELINAQLNGLQIALAEKGIPLLFREVDDFVASVEIVKQVCAENSVTHLFYNYQYEVNERARDVEVERALRNVVCEGFDDSVILPPGAAESREHWVAELAGICQYAAGSREQVRKAAAPKWFSYKRQLKIL

SEQ ID NO: 64072 - protein, 420 aa, Zea mays
  Coding DNA Sequence Number=SeqID_20697
MYCRVSGAPVWACLTSARRTCPVNYSGLAVANSQSWRVPEAPFLGAPDTVWCTPDSPVNYSGAPLDFPEGDEFELESSGAPDTVRWCTGQSAIVWLQGFSSGSPAASPRRWSPKTVTTSSMVGRSEPGCDLGPALSFKDLHHPGWGGGRAEPELYLPRGFVGHLLPQHSRERALTGLVGGSDFDNAGLVSGERRQLQRVGLAGSVGSGSAPGAPSRRKSGCRAARTGGLPKTSRAARAAFVFWVCPAFAPVRRFCVEVGAPLVREDPSGDLPVGGWLPSSALRWWRLKKSSSPTGSPPPSALRASGSLALIACPRPSSGDVGEGVVAAASALRPSPLQFGHLERRLLLLLLERAAVGNLEPYRPAGPPMKSRPLFDEPKPEAAVSAWTEAELARKEDFVGRSLAGPSTGGTDAGVELPKP

SEQ ID NO: 64073 - protein, 326 aa, Zea mays
  Coding DNA Sequence Number=SeqID_20698
  Homolog annotation: Hit_ID=Q6QP51; Match level="QueryCoverage=12%, HitCoverage=19%, E-value=3e-11, Identity=76%"; Hit description =Putative growth-regulating factor 1
MDAATRRLSFASPLKGREPDIKAKDCHHVSTDGGVRLSTNAAPASAGAPKRTGSNSSPSPAWLEDASSAELDDGFHHQKLEEEVASRPVREVEPRLTSLSAPARMMKILEAEGGAEIAARLASPHPGAGDQRVKGRTAVQAACDHIKGAHPFDFDASNMEAQAHTSCNQFAGRYVQETAPPLAPLPCLLDCGTSTTTRGNPAHDPTVPTRHIGHGPVSHGRRRDGRYGQKWARSNGSGRQAEAAVKSSAKLTDRERGYPERDPSPRRKRAPSPPTDQRFEGWPLGGVQQPPQSARAPCPLLVRGSKAGPSEGFNGRLMPLGLRAHY

SEQ ID NO: 64074 - protein, 26 aa, Zea mays
  Coding DNA Sequence Number=SeqID_20699
MARRRGIGGGSIYMYHFGTILKCFYS

SEQ ID NO: 64075 - protein, 356 aa, Zea mays
  Coding DNA Sequence Number=SeqID_20700
  Gene Ontology: Mol. function=oxidoreductase activity, acting on the CH-OH group of donors, NAD or NADP as acceptor; Cellular component =cytoplasm; Biological process=metabolic process
  Homolog annotation: Hit_ID=A2XPL4; Match level="QueryCoverage=74%, HitCoverage=82%, E-value=4e-71, Identity=54%"; Hit description =Putative uncharacterized protein
  Pfam annotation: Domain name=2-Hacid_dh; Domain location=8-312; Score= 69.8; E_value=9.2e-18; Accession=PF00389.21; Description=D-isomer specific 2-hydroxyacid dehyd
  Pfam annotation: Domain name=2-Hacid_dh_C; Domain location=105-280; Score=214.6; E_value=2.3e-61; Accession=PF02826.10; Description=D -isomer specific 2-hydroxyacid dehyd
  Pfam annotation: Domain name=ADH_zinc_N; Domain location=140-296; Score=-18.6; E_value=0.027; Accession=PF00107.17; Description=Zinc -binding dehydrogenase
  Pfam annotation: Domain name=ThiF; Domain location=140-232; Score= -53.4; E_value=0.07; Accession=PF00899.12; Description=ThiF family
  Pfam module annotation: Pfam domain module=2-Hacid_dh::2-Hacid_dh _C::ADH_zinc_N::ThiF; Domain location=8-312::105-280::140-296::140-232
MPPPPPLVLLAKPLFPNFAAALEGRYRLVLAGDADAATAAEARVLLVPGLVAVTAELVDRLPALELVAATSVGLDHVDLRACRRRGLAVTNAGAAFSVDSADYAVGLVVAVLRRVAAAEAHLRRGGWATDGEYPLTTKVSGKRVGIVGLGSIGSLVARRLAAMGCRVAYHSRAPKPSCSCPYAFFPTARALALASDVLVLSCALTEETRRVVGREVLEALGQGGVLVNVGRGGLVDEPELVRCLREGVIGGAGLDVFEDEPDVPAELLAMDNVVLSPHRAVLTPESMRGLLDVVAGNLDAFFAGRPLLSPVSLPQMGKLADPSGYRRQRSEEGAAACGAPSLTLRQRHVLTCPDIR

SEQ ID NO: 64076 - protein, 258 aa, Zea mays
  Coding DNA Sequence Number=SeqID_20701
  Homolog annotation: Hit_ID=A3C4A1; Match level="QueryCoverage=39%, HitCoverage=27%, E-value=2e-07, Identity=35%"; Hit description =Putative uncharacterized protein
MARRRSHRNKKTPPSNVTQKEEEEENERWRPNDESTSPKGLSSHFDSHMCCVANANDSGRTNEDEEEERSFLHLYARLSQEDKAVMLKLLERAREQSEARQRLESILSMKMQCFDELTKEHEELKCSHVDLVQSKSSFELEFAGTNDDSYQKLKEENERLKKSLTQLKGKCVAQPSQDNRDHMVKKLETGTTVACTTSLEENVKDLRIAKRKKQKMKFNTSSKSLNHASTKGNIQGSKQTSYAKNQGLQHGGKPKDVT

SEQ ID NO: 64077 - protein, 367 aa, Zea mays
  Coding DNA Sequence Number=SeqID_20702
MRTQCQWSRRMVSSSLLSFLVWVNLCRLWAEILISRQKAMSKLNQQTTFKEIGTNGLLMIHLCSSLIWTCHLTSNKSATRIRTCPQIVLLVTFMVLCCRMGRFRMGRFLMIWWLRGRCPTLMPPPPALGDIPMIGPQEVDGPPIQGVLHVPGDIVIPDAQPVEPNVNGHNNANYFAPAGNSVTSVQVPKKWAPFFLSNLLHEDSFSWSKTFLSSDIPSALMEPDTETHPFVIPRKCPDDKFLDSVLSEESADDASAPSDSASSPPKLAVVESDLRRSKRLRDARAGFRQSSCHKKNCLMCQHKFEGPPSLSAKTIRRLGESFCNLSEEELADKVLKKKKNSPGCVGSNKSGKKDKGDKNQDSSDDDN

SEQ ID NO: 64078 - protein, 81 aa, Zea mays
  Coding DNA Sequence Number=SeqID_20703
MARRPASDSRPPGSVEILAGPVSAHAARSSRGGVGKLAAATAMAWCDRLVSAAWAALPVVEKSCRGAGDDDDDDYDVAPAA

SEQ ID NO: 64079 - protein, 74 aa, Zea mays
  Coding DNA Sequence Number=SeqID_20704
MARRRARGLRRERAPRRDTTCRRPLAMSTASAPMGVGRRWPARTDKLRRWPTGAGDCRGTGDDDDDDYDVAPAA

SEQ ID NO: 64080 - protein, 338 aa, Zea mays
  Coding DNA Sequence Number=SeqID_20705
  Gene Ontology: Cellular component=endoplasmic reticulum
  Homolog annotation: Hit_ID=A2YI28; Match level="QueryCoverage=75%, HitCoverage=100%, E-value=4e-77, Identity=60%"; Hit description =Putative uncharacterized protein
  Pfam annotation: Domain name=Reticulon; Domain location=149-335; Score=132.8; E_value=9.7e-37; Accession=PF02453.8; Description =Reticulon
MKRRGAKHRAMNGEGIVVLAFKLWSAARIPTEIPRFTDAVARRRRSRSRRRGAAHAIAADSVPVPRRELTQAAPRRRAGSSRMPEHSENAAADLMGNIMETIAENLPRQKSVRFDDGDGSSISEQAKKLFGGGESRKKSVHHVLGGGKSADVLLWRNKKISSSVLGVATLVWVFFEWLDYHFLTILCFMLALGMAVQFAWSIFSSSVPRVQLPEELFASAGAAAGAQVNRALGFLQDVACGRDLKRLVIVSDAVSRYSFFAERLLQNCSSYSWLYCSSECSGYGSGFVCAHTLPVLYERYQDQVDEFLYNMLGLVQSQYSKLDSKGILKGGVKFRKSD

SEQ ID NO: 64081 - protein, 50 aa, Zea mays
  Coding DNA Sequence Number=SeqID_20706
MARRWQQVVELRPRALDVGPPGETWKEGRGVANLNLFFPCRLSYKGFLKG

SEQ ID NO: 64082 - protein, 357 aa, Zea mays
  Coding DNA Sequence Number=SeqID_20707
RLSVRATAQRLRAFLHFRPDQRVKGWTAIQAACDRTKGAHPFDFDASSMEVQAHTSCNQFAGRYVQETAPPLAPLPCLLDCGTSIVTRGNNAHDPTVPTRHIGHRPVSRERRRDGRYGQKWACSNGSGRRAEAAVKSSAKLTDRERGYPERDPSPRRKRAPSPLLIRGSKASPSEGFNSRLRALGLRAHYWSEVRRPAPRKGSTATSGHSGSAPTTDQGFVGWPSKAKSGFGRHRKLRLARPQGSDSAPEDDELRLARPQGSDSASAPEDDELRLARPQGSNSASAPKDDELHLARPQGSDSALASADGLCLARPRGSDSTLTSEDRLDLDLGGASASPDLGLGPTTSQEGPSLPYP

SEQ ID NO: 64083 - protein, 528 aa, Zea mays
  Coding DNA Sequence Number=SeqID_20708
  Gene Ontology: Mol. function=ATP-dependent helicase activity; Cellular component=mitochondrion
  Homolog annotation: Hit_ID=A2YI39; Match level="QueryCoverage=30%, HitCoverage=66%, E-value=1e-53, Identity=66%"; Hit description =Putative uncharacterized protein
QGRTARAGKKGSAILIYTYEQTRAVRVIEQDIGCRFTELPKMPVSDEAADMFNVMRDTRSRSVGSRRTGGPFSREGYGDFEDHRSRGFGDFERFGGSSDRGGGFRDSGSRYHGGSGGFRRSSSDFGRPSFSRSDRFGDFGDSDFSRRGNADFGRSRSSDDSGSSRYPRGYGGSGTSDSGNFGGFKGSKPVGFFQNFCTSDTRLFQNLHHYCTNGGVHESRGAQRLLHSSSGRSADARLPPAPPTASPSRAAAGQRNTSRASGSKCATQAGTPLPPTIASSILLFRGGKKSRIFDEAFAAACIVPFVQTAVKLRMIIKGVLGRYQRWNPVHPTAGTFWGVGLGVGCGVGWGPGFGPEVIGYVGAGCGVGFSVGFTLAGVGIGLPQHSLIRNHDHGGFASSVPVDSARFYALTIIRGLVWDAISYVGNAAAMRKESRQKLPRFQDSPQVPGGVDLPKLGKGVSSSIRSTLLIVFGGERMMEIALKDFGTLKACMRSGSQGPGVGCRLRMSAHADWSVYRSRLPQQNQQDG

SEQ ID NO: 64084 - protein, 78 aa, Zea mays
  Coding DNA Sequence Number=SeqID_20709
MAQGHISLSRSKRRFAFAIMTASKKGPGKGDTPKGILLREGNRPRASLLIRGSKAGPSEGFNGHLRALGFCAHYWSEV

SEQ ID NO: 64085 - protein, 333 aa, Zea mays
  Coding DNA Sequence Number=SeqID_20710
  Gene Ontology: Mol. function=DNA binding; Cellular component=nucleus; Biological process=regulation of transcription
  Homolog annotation: Hit_ID=A2ZCI8; Match level="QueryCoverage=98%, HitCoverage=81%, E-value=7e-81, Identity=51%"; Hit description =Putative uncharacterized protein
  Pfam annotation: Domain name=NAM; Domain location=10-132; Score =179.2; E_value=1.1e-50; Accession=PF02365.6; Description=No apical meristem (NAM) protein
MAAFSSSNGVPPGFRFHPTDEELLLYYLKKKVGFEKFELEVIREVDLNKIEPWELQETCRIGSAPQNEWYFFSHKDRKYPTGSRTNRATTAGLWKATGRDKCIRTSYRKIGHAKDARLLPRPRPSRPEDRLDHAREDGWVVCRVFKKKCFFKIGGGEGSTTSSQGADAGGHLATMSPPLGGHHDLAYMHPHPYYHHAASYYSQMQAPGPHATAYSHHVQVQDLLTNHRPTDDDGAGTGYDFSGLPVENQPGGGLDVGSSDGVATDDGGQLAGERRDQTTGTAADHQWQAMDGFSNGGSAEVQQMTGAQRGGEMDLWGYGRLCGHAEETNKHKD

SEQ ID NO: 64086 - protein, 203 aa, Zea mays
  Coding DNA Sequence Number=SeqID_20711
  Gene Ontology: Mol. function=protein binding
  Homolog annotation: Hit_ID=A7Q1F2; Match level="QueryCoverage=54%, HitCoverage=25%, E-value=5e-14, Identity=45%"; Hit description =Chromosome chr7 scaffold_44, whole genome shotgun sequence
MASSPSPQQLTVENCELSSIGVIILLDCLTNAKQLLDVLSIADNHLGSPVAAALARFLGSHVRALNATDIGLGTVGFQILEETLPTEVALSHINIRPNLATRPNQNNLTLAAVRSAPRLQAATSQLAQHQADTLLPPAAHRPSLHDPSVYHCHLPRSPLPRQEEDFKADFEEFDVKADILELVLKDEAKTFVAPGAHSLEVYN

SEQ ID NO: 64087 - protein, 341 aa, Zea mays
  Coding DNA Sequence Number=SeqID_20712
MVCLGFGGRKKHKLQDNTILQARILTVEGSSSTLGVNYTFGEESGSSRRLGRSPRGLGQLSPEDISPARGLGNSIPATVPPVDDPARLWPTKPSFRANSASDRADTATPGFGSSKSGQGVPLTKQEKPRTARPTEPRDSYASEIRIPHSSPLHGAAHAWTDAATGRLSFASPLKGREPDIKAKEPEAGPNSSPSPAWLEDASSAELGDGFHHQKLGEEVASRPVREVEPRLASLSALARMPGCMMKILEAERWLKGTNFHEVAFLQRQGGRIAGVPHLGARKPSWAESSPTCSKVIPLWRGGWVPRVMQTGLGQKKPNRRARCMQPPSGYKHSSTFAQTSG

SEQ ID NO: 64088 - protein, 143 aa, Zea mays
  Coding DNA Sequence Number=SeqID_20713
MGKNNKRKREPTPPSEDFGDSEYSEEEFSSESEGSPAPVSPPASSDDSDDSQGIAAEVWTYIRAIERSGLEGSDESEYSSDEEDSPEEDGDDDDNDDDDGGDGGGDGDDGGRGDNGDDKGGNGGSSRGGSGGGSSKDSNKASG

SEQ ID NO: 64089 - protein, 93 aa, Zea mays
  Coding DNA Sequence Number=SeqID_20714
MALNNLRSEAEAQKVEIEDLRRQLAEAKEKCVLAEAVGVLGPTAHPGLPLKVRAALRCVTPYVLASVLYVTGYKWTRGISVPHKPPIFGLILR

SEQ ID NO: 64090 - protein, 204 aa, Zea mays
  Coding DNA Sequence Number=SeqID_20715
MTNVQVSRSHGFNLNESRLAAWAVHAARHFVERRAACCAFAEQPAGTTENREEGFNSTTTPAAMGEQRQGASAMAASGHEQREKGEKNGAGRGAEMDIPRDEGRPGNTLRAHHGWGRSLGRRWREGTPWTGARRPWEVPAHKPEGGAPMGAWSCCWAPARRSFCAASKAGKVELASMEGEGQGAPAALRATEKKPAESFAASSS

SEQ ID NO: 64091 - protein, 1105 aa, Zea mays
  Coding DNA Sequence Number=SeqID_20716
  Gene Ontology: Mol. function=potassium ion transmembrane transporter activity; Cellular component=membrane; Biological process=potassium ion transport
  Homolog annotation: Hit_ID=Q69L87; Match level="QueryCoverage=76%, HitCoverage=96%, E-value=0.0, Identity=62%"; Hit description =Putative high-affinity potassium transporter
  Pfam annotation: Domain name=K_trans; Domain location=300-1105; Score= 808.1; E_value=5.2e-240; Accession=PF02705.7; Description=K+ potassium transporter
  Subcellular localization annotation: CTP_CleavageSite=41; ConfidenceScore=5.11e-01
MGKGGISKKDPSQRRKRAPSPPTNQGGSKTGPSEGFDSRPRACRVRDDPGYVRYMAEARATLPRSSASGATRSSASPDPKPRPRPQPQPRKKISASPEPSLGLKRSLRLARAQPRPQEKAQGTSPTATLARVQGSRRFSDGHAQTAAGGRATPSVSFSPSAESGPAPGGDTGGRTSTSKEEASAALGPSTAASSLWTSAKAASSSSDEKLHAMPQQAVLVGLTAGMVAAEGKAAGNKTMMQKQQASSCCSDRDQDMADLELALEAVVPVSVQRQDSLYRDATRAGGGGQQQHEGWARTLRLAFQCVGVLYGDIGTSPLYVYSSTFAGGIRDTDDLLGVLSLIIYSFLLFTIIKYVYIALRANDDGDGMYVLLSSIHPYMADASSHSHLNVLAYGNLGGTLALYSLISRHAKVSLVPNHQPEDELQTTDAAAAVLGKHGSVRRRTVQLAASHGREQRAVWVKELLETSKPVRISLFFLTIVATAMVISDACLTPAISVLSAVGGLKEKAPNLTTALRHPQGGLPVRPRLLLWLLLIGGVGVYNLLRHDVTVLRAFNPKYILDYFRRNGRDAWVSLGGVLLCFTGTEALFADLGYFSIRSIQLSFGFGLVPAVLLAYIGQAAFLRRYPEQAMISCAFATISHSQALGCFPRVKVLHTSRQYRGQLYIPEVNLLLALVACVVTLASKTTAVIAEAHGICVVLVMLITTLLLTLVMLLVWRVNAACVALFFAVFAAAESVYLSSVLYRFAHGGYIPVAMSAVLVAVMVLWHYVHVKRYKYELERTVSHESVVRDLLPRCRTVPGVGLFYTDLVQGIPPVFPHLVDKIPSIHAVLLFVSVKHLPVPHVDATERFLFRQVASSSESDTAAGPRVFRCVARYGYRDLLEEASDFAGSLVERLQYYIRDVNLYGVEHQQPGAKVSYPSSRCDSMILMARQRSSVMMLRQSSAASYYSSYAAAAETQQLQLARARSTSGAGGILLHSASERAEQLARARSTGIFAEEMLTPAESFSELSRMGSIGGGGMQAVKISLEEMARIEEEQRFIEREMEKGVVYILGESEVVARPHSSLLKKLLVNYAYAFLRNNCRQGEKMLAIPKSQLLKVGMSYEI

SEQ ID NO: 64092 - protein, 80 aa, Zea mays
  Coding DNA Sequence Number=SeqID_20717
MNFPSKKKKKKKDRSDKKKKKLYPKKDGEAYVVEWDSDASADDDDSSSKLNVNITIKEAPSLFSSPHCLMVKRDAKLNFR

SEQ ID NO: 64093 - protein, 209 aa, Zea mays
  Coding DNA Sequence Number=SeqID_20718
MPSIARRAFSTTVVPPRHRGQRHRRHPFRYELPQLIRNYLNFVTIDSPTGRSGLVSGDRCPQSLIIDRADEQATKDPSVQQVETVEQKLVEECKTGISAMLTVMRSSIVETTGSVQEEPEAEHHLCVEKARDSLRSYSTKLGDVDIIRKIISLLPQQRYGSIITIHHNMEDLSTMTPTIVIGKIAVFEMSQKMCQVLQEETASAEAVRM

SEQ ID NO: 64094 - protein, 324 aa, Zea mays
  Coding DNA Sequence Number=SeqID_20719
  Gene Ontology: Cellular component=integral to membrane
  Homolog annotation: Hit_ID=Q69L84; Match level="QueryCoverage=82%, HitCoverage=84%, E-value=1e-100, Identity=70%"; Hit description =Putative transmembrane protein
  Pfam annotation: Domain name=DUF1084; Domain location=9-306; Score =551.2; E_value=1.1e-162; Accession=PF06454.2; Description=Protein of unknown function (DUF1084)
MRRDLASSFATAASSSSAADALRGWWDDVNESPQCQDAAFFSLAAAYALVSAVALIQLVRIQRRVPEFGWTTQKVFHLMNFLVNGVRALVFGFHVHVFLLRAKVYKLVLLDLPGLLFFSTYTLLVLFWAEIYHQARSLPTDKLRPAYIAVNTIIYVVQVCIWIYLGINDNAVVELASKIFIVAVSFVALLGFSVYGGRLFVLLRRFPIESKGRQKKLYEVIATQQQLPLLFNGHSVQTRKQIVDVGTVTAICVTCFLIRCVVVALSAFDADVSLEVLDHPVLDFFYYMPAVVGCFCLCCYVYGSISVGDEYNDDHSIWGSGANE

SEQ ID NO: 64095 - protein, 434 aa, Zea mays
  Coding DNA Sequence Number=SeqID_20720
  Gene Ontology: Mol. function=oxidoreductase activity, acting on paired donors, with incorporation or reduction of molecular oxygen, NADH or NADPH as one donor, and incorporation of one atom of oxygen; Cellular component=...
  Gene Ontology: Cellular component=mitochondrion; Biological process =aromatic compound metabolic process
  Homolog annotation: Hit_ID=Q2V3S9; Match level="QueryCoverage=95%, HitCoverage=76%, E-value=1e-131, Identity=57%"; Hit description =Uncharacterized protein At3g24200.2
  Pfam annotation: Domain name=FAD_binding_3; Domain location=46-383; Score=-124.1; E_value=0.00024; Accession=PF01494.10; Description=FAD binding domain
MSQKNSSFLQEHYDLWFHFFSYIGAWEHVQQQRHAFFGKMQVWDYTGLGYTRYNARDVGKEHLGGHIFLFVFVSLRCVVENKVLCNSLLLRLQLQEELDDIENVIYPTRLVSLTFPLKTRQAGMKPTSREPLSVGHTTEEFHRSHLVKLDLSDGRSLYSKLVIGADGSKSNVRQIAGIKTTSWNYPQSAIICTVEHVVENDCAWQRFLPSGPIALLPIGNNFSNIVWTMSPEESLRHKSMSPEEFVNSVNHALDFGYGPHPHSTALDHYMEQFFSGIGSSAASTKECFEVPPKATRVVSERMAFPLSLMHSHDYVSKRLALVGDAAHTVHPLAGQGVNLGFGDAAALAKVIAEGVSVGSDVGDLTLLQRYEKERKAANVAMAAVLDGFQKMYSVDLGPLNVVRAAAFHGAQYISPLKKNIISYATGDTKWSLFQ

SEQ ID NO: 64096 - protein, 117 aa, Zea mays
  Coding DNA Sequence Number=SeqID_20721
  Homolog annotation: Hit_ID=A2XNU2; Match level="QueryCoverage=76%, HitCoverage=76%, E-value=3e-22, Identity=60%"; Hit description =Putative uncharacterized protein
  Pfam annotation: Domain name=Subtilisin_N; Domain location=31-109; Score=46.2; E_value=1.1e-10; Accession=PF05922.7; Description =Subtilisin N-terminal Region
MKRSAASTVPLALVLIAVATTAAAADMTGASNYLVYVEPHPPGVDCQAYQLGILAAALGGEAQAKAAMLYNYRNVMSGFSARLTPPELEAVKKQPQVSRVLPSATLSLMSSKFDGVS

SEQ ID NO: 64097 - protein, 125 aa, Zea mays
  Coding DNA Sequence Number=SeqID_20722
  Gene Ontology: Mol. function=translation elongation factor activity; Cellular component=cytoplasm; Biological process=translation
  Homolog annotation: Hit_ID=Q9FEL2; Match level="QueryCoverage=48%, HitCoverage=68%, E-value=1e-14, Identity=49%"; Hit description =Elongation factor 2
MTDESLKNYKGERDGIYGQAKVAGASVENALVGIYGVLKQKRGHVFEEMQRPANMMGSDPLEAGSQAAQLVLDIRKRKGLKEQMTPLSALRLVWFVANCVTLCLKLVIRIEQLTLSRKVRQSVTS

SEQ ID NO: 64098 - protein, 211 aa, Zea mays
  Coding DNA Sequence Number=SeqID_20723
  Gene Ontology: Mol. function=ligase activity; Biological process =protein modification process
  Homolog annotation: Hit_ID=Q6YWJ8; Match level="QueryCoverage=87%, HitCoverage=65%, E-value=2e-77, Identity=75%"; Hit description =Lipoate-protein ligase A-like
MSRMPILQQLHLEEQLLRRTSDNWCIINDGTAPATIVMGVSGRVSELVNIQLVLRDKVPIVRRFSGGGTVIVDQGTVFVTFICNKNVVAGLQPFPRDIMSWSGQLYGKVFDRFGEFHLRENGMDNQHQDYAFSHRKFGGNAQSITKNRWVHHTSFLWDYDVKNMDYLKIPKRAPEYRLEKFNSDFQTKELSITSTELGELNRFYYETKGAG

SEQ ID NO: 64099 - protein, 115 aa, Zea mays
  Coding DNA Sequence Number=SeqID_20724
MAGMYCNARDCLNKRMQPPARTAARILLSPVDKAKGSAKKKDRGRGIPREGSFSAKEPGSAPPITDQGFEGWPPEGSTVASDRVGPTPTTGQGFEGRPSEGLHGRLRLLGLRAHY

SEQ ID NO: 64100 - protein, 453 aa, Zea mays
  Coding DNA Sequence Number=SeqID_20725
  Gene Ontology: Mol. function=drug transporter activity; Cellular component=membrane; Biological process=multidrug transport
  Homolog annotation: Hit_ID=A3APJ6; Match level="QueryCoverage=97%, HitCoverage=88%, E-value=1e-101, Identity=62%"; Hit description =Putative uncharacterized protein
  Pfam annotation: Domain name=MatE; Domain location=215-378; Score =150.4; E_value=5e-42; Accession=PF01554.9; Description=MatE
  Pfam annotation: Domain name=MatE; Domain location=4-152; Score=17.6; E_value=0.00022; Accession=PF01554.9; Description=MatE
  Pfam annotation: Domain name=Voltage_CLC; Domain location=32-275; Score=-180.5; E_value=0.056; Accession=PF00654.11; Description =Voltage gated chloride channel
  Pfam module annotation: Pfam domain module=MatE::MatE::Voltage_CLC; Domain location=215-378::4-152::32-275
MAAPVTALNCVVYLRAMVSVLCLGRLGPLDLAGGALAIGLTNITGHSVLRSGPRNPRAADAVPPARPCCCFSWRRCPIALLWLNVGPILVALGQDPTISAHAASYAAFALPDLAAGAVLQPLRVYLRSQGITRPMAACSAAAVALHVPLNVGLVFGLGLGVRGVAAAQALTNANMLLFLLAYVRWARACEHTWKGWARPADVAAGLPALAGLAVPSCVGVCLEWWWYEVVTVLAGYLPNPAAAVGAAGVLIQTTSLMYTVPMALAASVSTRVGNELGAGKPRRARMAALVALWCALAVGVLHVAWTVALSRRWVELFTADPGVVRLASAAMPVVGLCELGNCPQTAGCGVLRGTARPAVGARINLLSFYLVGTPVAVYLAFGARAGFRGLWYGLLSAQATCVALVLVAVVWRTDWRVEAMRAKKLAGLELTNDAEEESRRLVAATGEQAEDTS

SEQ ID NO: 64101 - protein, 648 aa, Zea mays
  Coding DNA Sequence Number=SeqID_20726
  Gene Ontology: Mol. function=two-component response regulator activity; Cellular component=periplasmic space; Biological process =protein transport
  Homolog annotation: Hit_ID=A3APK3; Match level="QueryCoverage=96%, HitCoverage=96%, E-value=0.0, Identity=74%"; Hit description =Putative uncharacterized protein
  Pfam annotation: Domain name=PD40; Domain location=121-165; Score =0.4; E_value=16; Accession=PF07676.3; Description=WD40-like Beta Propeller Repeat
  Pfam annotation: Domain name=PD40; Domain location=222-261; Score =2.4; E_value=8.8; Accession=PF07676.3; Description=WD40-like Beta Propeller Repeat
  Pfam annotation: Domain name=PD40; Domain location=338-371; Score =9.7; E_value=1.1; Accession=PF07676.3; Description=WD40-like Beta Propeller Repeat
  Pfam annotation: Domain name=PD40; Domain location=436-471; Score =24.6; E_value=0.00036; Accession=PF07676.3; Description=WD40-like Beta Propeller Repeat
  Pfam annotation: Domain name=PD40; Domain location=483-522; Score =37.2; E_value=6e-08; Accession=PF07676.3; Description=WD40-like Beta Propeller Repeat
  Pfam annotation: Domain name=PD40; Domain location=531-582; Score =1.6; E_value=11; Accession=PF07676.3; Description=WD40-like Beta Propeller Repeat
  Pfam module annotation: Pfam domain module=PD40::PD40::PD40::PD40::PD4 0::PD40; Domain location=121-165::222-261::338-371::436-471::483 -522::531-582
MACRATLLPLFLFLLVAPEPALATSGTIVFTTLGRSRYAFDVFALTIAPLSAASAELRLTDGASVNYNGNFAPSSSGPPSLLFVSERNGSLNLYLTPVPTSASARRRDALEEEEEDSAPPTPLLPWDPIALKDRPSLTPDGAHLVYVSTAEPAGAPRRSWAAVYSTSLAPGRATRRLTPRGVADFSPAVSPSGVWTAAASPGPRGWAGEVEDLRTDIYVFRTSDGSRRALAVPDGGWPTWADDTTVFFHRRDADGWYGVYRARLTFTDDDVASVVDRITPPGFHAFTPAASPGAPGLVAVATRRPGSDYRHIEVIDLSGGGGGANNRSAYYESIKGPAPDTFSLFRIDGSFPSFSHDGKRIAFVGLPGLYVVNSDGSGGRRRVFSGNAFPTTWDWKRKGVIYTSVGPDFASESTEVDVVAVSLGDGDGDDPSVSIKKLTVGGENNAFPSPSPDGKWVVFRSGRSGHKNLYIMDAEDGEAGGIRRLTEGPWSDTMCNWSPDGEWIAFASDRHNPGGGSFAIYMVHPNGTGLRRVVHSADGGRTNHPWFSPDSKTLVFTSDYAAVSAEPISNPHHYQPYGEIFTVNIDGSGIRRLTHNSFEDGTPSWTPYHLKAEDVGETLQASGTCAFEDCHWLNIAARPDGLMCGKHA

SEQ ID NO: 64102 - protein, 260 aa, Zea mays
  Coding DNA Sequence Number=SeqID_20727
  Gene Ontology: Mol. function=protein binding
  Homolog annotation: Hit_ID=A3ARV9; Match level="QueryCoverage=99%, HitCoverage=56%, E-value=9e-85, Identity=55%"; Hit description =Putative uncharacterized protein
MVCSSIAFDKGVESCLKYIEAVPWSESEEEKLKHVFARCTFGESVSKDVLARLQQQCASGSEDLAVQLVESITSGANNGARKEMQSLDSDGGQAMAPSGRRPMVERISQQTENLNWLLDILLNNDMAEEYVELWGTQEELIRMHERASPMFRYELSRVSASVFMALGRGRIQCPSDTRSQLFRGWFRPMLVDFGWLQRCSKGLDVRVLEENLGQALLTLPLHLQQSLFVEWFQCFASRGTGGCPNLSRAFQVWWRRSFVN

SEQ ID NO: 64103 - protein, 87 aa, Zea mays
  Coding DNA Sequence Number=SeqID_20728
MSLTVNILLEDYFRPPGDKLDSEARHFVASRSLPHGKLSSWANGATTNEDNWPRLPLSDLCLTIRPLTAHGLNGTYWRAFAGLANFH

SEQ ID NO: 64104 - protein, 181 aa, Zea mays
  Coding DNA Sequence Number=SeqID_20729
  Subcellular localization annotation: CTP_CleavageSite=51; ConfidenceScore=5.07e-01
MIKLWLWLNFWQQNSAITMNDVVTSHLPVCLYSAAAFENKSPTAGVTNFVAAATVVPADYNVPSSESESFSFDDEFGSPFSWSEESSSEDLDYFVALDAVATESSPRAEVGEVSDLPGARTEGRRRRVVSKHSVGEFSRSGRRQWLGMERDRRRVDRFGKRELLSSPIGMSIDEGDLWKLF

SEQ ID NO: 64105 - protein, 101 aa, Zea mays
  Coding DNA Sequence Number=SeqID_20730
  Subcellular localization annotation: CTP_CleavageSite=15; ConfidenceScore=5.37e-01
MATMGSTSGKDVPLPGSTLVNLCNRFRMFVSPMICNVCVTGKTLLGKSLYERPDGKSAMYRRLNQLRPIVILYMMKFMYCTHNYTAVYLRILSGQKPDLLK

SEQ ID NO: 64106 - protein, 142 aa, Zea mays
  Coding DNA Sequence Number=SeqID_20731
MEMGAELHRCRASRRNGEEDAGRERCDERRGSTAGIPALVLGGDYGGVDLGGAEVEAGWEDLYFLAMLVHVVGWVLDVVVISLHRGTGSRICAAAASVPGLSLLFCWTAEGPWASYEIQPFVDVTLRTWRTSRIAGIALGNF

SEQ ID NO: 64107 - protein, 96 aa, Zea mays
  Coding DNA Sequence Number=SeqID_20732
FEESTIKHGDQVIELFEFYEIKDPEHLFGEGNDTLPDHLGSDQWGVMIPGQNGNHGSWVKDGWFTDDDDDGYDYGNGKQGVEVDLQEFQDVDEFED

SEQ ID NO: 64108 - protein, 106 aa, Zea mays
  Coding DNA Sequence Number=SeqID_20733
  Subcellular localization annotation: CTP_CleavageSite=78; ConfidenceScore=5.69e-01
MQAACNRAKWTRFFDSQRAQPGGPGPRVMQPARRMLHASNCTATCTATSPPRLRNQYRDSSSRTRNGRPANNSPRRINSAAGQAALLGPGKGDTPKRILPREGTGL

SEQ ID NO: 64109 - protein, 46 aa, Zea mays
  Coding DNA Sequence Number=SeqID_20734
MGSHDPRAEWESRLMDDDDDGYDYGNGKQGVEVDLQEFQDIDEFED

SEQ ID NO: 64110 - protein, 304 aa, Zea mays
  Coding DNA Sequence Number=SeqID_20735
  Subcellular localization annotation: CTP_CleavageSite=2; ConfidenceScore=5.28e-01
MSSSSLMRRVFPSSKPPDGWYPPPFRLLVGGTQLHGSWYLSAIVRLQGFSSAGPAAPLCRRSPRMVTTSFWVGKSKPGCDLGPTLSFKDVHHPRWGGGHAEPALYLPRGSAGHPFPRRLGVEALASPADGADLDSVGLTDGGRRHLQRVGVVGRASGGPSCRRATAVPCAREDHPRCRALLGRAFVFWGWSCFCNGTAPSNRGRAFPIEWGCSYLRRGNRSSVRNGTSNATSPVDYLNRFPKQESPRVKVTSEYEQRRSWLENGNLIGRSLVVLSVSGADTKVDQPRPRVGMAPLEAGRPRPQG

SEQ ID NO: 64111 - protein, 596 aa, Zea mays
  Coding DNA Sequence Number=SeqID_20736
  Gene Ontology: Mol. function=helicase activity; Cellular component =chromatin; Biological process=protein amino acid phosphorylation
  Homolog annotation: Hit_ID=Q1EPC6; Match level="QueryCoverage=46%, HitCoverage=29%, E-value=7e-76, Identity=63%"; Hit description=DNA helicase homolog, putative
  Pfam annotation: Domain name=Peptidase_C48; Domain location=320-508; Score=-4.6; E_value=0.00038; Accession=PF02902.10; Description=Ulp1 protease family, C-terminal catalytic domain
MGKDIKTFPLPAIIDRYDDSQGIDREIYEEESIEATTEDVALQETLNEEQKSAYEKILSVVDTSNGGVFFVDGPGGTGNTYLYKALLAVLRSQDKIAVAIATSRVAASIMPGGRTAHSRFKIPLTIDDGAICTFTKQSGTSKLLQKASLIIWDEASMAKRQSIEALHNSMCDIMGRLLVRNMRAKSDPWFAEYLLCVGGGTEEVNNDGDVRLLDEHAGMRVFLPRIPLCPSDDEMFPFHFKRKQFPVRLSFAMTVNKSQGQTIPNVVVYLPEPVFSHGQGDLALIDWIKEIPCEPRVEVVLIDDAFVERKWMECLFQPDAYLGDEVIDCYINLIKAQEHLKCRSRGRVYIENAFQFNFLKRDSYVETKTDELYPIKDMAQISSAERRVLLYLDHDMVFIPINIREMHWYVVVINARNMEIQVLNSLGTSSGRNDLIDTGMNYLIILPRMTCHTLGKKLVAILISSYINKRKGCPLYKYDKEVDAGSSSDVQILDSPTNPKKRKLLCVSEDSEVLMEDDDGPITQADLERWFVHDWDKRTPIKLSTDECTNEFLLSGLSTKDMPVTKADLIDVLCDYIMTIQDDRTLESVLIVLSIL

SEQ ID NO: 64112 - protein, 419 aa, Zea mays
  Coding DNA Sequence Number=SeqID_20737
  Gene Ontology: Mol. function=DNA-directed RNA polymerase activity; Cellular component=DNA-directed RNA polymerase II, core complex; Biological process=regulation of transcription
  Homolog annotation: Hit_ID=Q2QNM4; Match level="QueryCoverage=12%, HitCoverage=46%, E-value=6e-19, Identity=83%"; Hit description=DNA -directed RNA polymerase II 14.5 kDa polypeptide, putative, expressed
MVDYPLPSEFLLPLSGNPIKEFLQFTDTSNPDKPSTPRFKTNPQQKIAQTLQLDNHNPQSTNRRSIQKQHWKDIIQQEGLLISPISNLSMLDYNDYHRTIDCILQIAVKKLNPESVQGLQSGRITWRTSTLSVTIECSGLFSTPVLTTVRIGASFTIPWFYYIDHLGWAGGVEIGIVSTVISSSKDWSRSAETCFKKKCLFLFDYFDSRTVILVRLLRFWDYQNTDRGYTVYFDSRTAKCLYCLKAVFILVYYLLDVSVCLIMQVDYSAYVHNSSSLHMTASFFSLLDSFHFCPLGYKDFPDLGNTTSSLLSTCCHVVLELWYNWSWVKATWSLEVEVSDNNCVYRNEVHHTAGERTQVLQDVASDPTLPRTKTVRCNLCGHGEVVFFQQSDICISVVAIDGRGKRGGGDDPVLCVLQP

SEQ ID NO: 64113 - protein, 103 aa, Zea mays
  Coding DNA Sequence Number=SeqID_20738
  Homolog annotation: Hit_ID=Q6J9V9; Match level="QueryCoverage=63%, HitCoverage=22%, E-value=6e-21, Identity=78%"; Hit description =Putative uncharacterized protein
MALRLLAIKESHMSKDEMIKDKKTLYGHALLVGQTLFYKVNTSYFVLQAMVMWGSARRMEFDRDAKILRRNFAIDLLSYEDNSCRYAILANIQQRLINIAKKD

SEQ ID NO: 64114 - protein, 453 aa, Zea mays
  Coding DNA Sequence Number=SeqID_20739
MPPVALPGKKAGYLGDYRRSIMAPDEAGAATSALDVVGGPPNAGGGCCLGAAAELMIVETFDTRLLGMVLLQIDFALQCRCPHYSILPPAAAPQPPPSLRAEASIAVAPVVPTPATPAESAAPATLAVPAAPAVPKSVVPSKLRASSSAPRPSRRRVRPLPHRRNPHGLRPVSPPRLPRMRSSLPQSPLPQPRSPPSLSILVTPSDDPLSFAPTHRPTPALQGLMMRGSSWCAARACARISVARSDSRGNGRTWKRVEGAASAAARISGATCASLPSQSTFPTYDDRRGWVSLEAAAAAIGADGALGDAGALGLHQRHTQLPQQGAGAPPRREWTPYFTHSFSALTQEDYSQLTLNVPSGETSLTFDDRILDEKCLEGKEEQVELEVFNFTGSSIFSSWFTISNPICAWASDDATVIKAICPVNKKMAFVGCARHELVHVGQDTRLNYKVIEL

SEQ ID NO: 64115 - protein, 336 aa, Zea mays
  Coding DNA Sequence Number=SeqID_20740
  Gene Ontology: Mol. function=protein disulfide oxidoreductase activity; Cellular component=chloroplast; Biological process =glycerol ether metabolic process
  Homolog annotation: Hit_ID=Q41864; Match level="QueryCoverage=54%, HitCoverage=89%, E-value=1e-64, Identity=74%"; Hit description =Thioredoxin M-type, chloroplast precursor
  Pfam annotation: Domain name=Thioredoxin; Domain location=229-332; Score=159.5; E_value=9.1e-45; Accession=PF00085.11; Description =Thioredoxin
MTPDKMYGPLILWPSHMNGENLNPKVKGHHHAYFGPPTASLTRCPNIAILYSRFLARQRCRAILTLECAQDIEKLLERNRSARHSPGNADNGLLWFYLTPIRSASGRRTGVLPVKGGRQLRSQSFARTMLRLDNNGHGDVLQSVGAARPRWAAKDRLLVGNLVLPSKRALAPLSVGPRRHAPAAARLPVQERSGRKVIIGYTVASCQYICIYESELTDDDPRRYMLVGAVVVADEKNWDGLVMACETPVLVEFWAPWCGPCRMIAPVIDELAKDYAGKITCCKVNTDDSPNVASTYGIRSIPTVLIFKGGEKKESVIGAVPKSTLTTLIDKYIGSS

SEQ ID NO: 64116 - protein, 89 aa, Zea mays
  Coding DNA Sequence Number=SeqID_20741
MAMMGSTSRKDVPLPESLIIGQPYLDSLITSIPLRVFSLVGTSKLLGPHGPVLVPKTSDGYACAPDNLTGSVRLPQGHRINHLQPEPQD

SEQ ID NO: 64117 - protein, 378 aa, Zea mays
  Coding DNA Sequence Number=SeqID_20742
MCSHYYSAYPQFEVAEEGADEGALRCAAGLSSGRDLVEEFVAYGVWPLAHGWALGEVCPRQMPSHGGMLVRSPAFALDLHGRDPAAFMREAEDGAARIIGRYVPKTEGQRSWDIRGSNDRLNRVFELNRLPYGGYPRQDDVDRRGTKPAAETEDDPAPAAAPSTKKRKLGTVMGGLGVSGSFAVELMGTCTAPGGRMSSPELWESLARMLKVTGGWWPENVPIPRAAGEDFFISRMVRDLRVFPYGRKYYCYCVGSDGQGSSGSCAKAPGGSGEGQLVVVPPAVATTVSATVPGAKGSALSAGVERLWAQHADAVREKSAADSKCRKLTEKVAALEGERTDLRRQLAEERREANQALAKAQSAQAETNLARVEGSLAS

SEQ ID NO: 64118 - protein, 684 aa, Zea mays
  Coding DNA Sequence Number=SeqID_20743
  Gene Ontology: Mol. function=helicase activity
  Homolog annotation: Hit_ID=Q1EPC6; Match level="QueryCoverage=33%, HitCoverage=14%, E-value=5e-92, Identity=69%"; Hit description=DNA helicase homolog, putative
MPNICHSSINKDTPRKYCLQDQGTKGAIPVVSVNFCFDGFHFLNTKSKSALSVLNKGTLVMDQIGYNAGRTPFTDISNTIITGNQNESNSLGPIVDAKERKRQRDRERYVAMTVEEKNEKNRKRREARQRNKGLSMEPLSSRAFCKWVTYEEDVNTDQACEVVSFPDDSSTIDFTNLSTQDIAGGDEQVNLDAYDDSNWLHRNETFQANNIAASKDLLTPGCVHETVDNIPKHTMKRAAYFSERYKNMTPIERESRRVRLRLYNKTPRRKDANKECSRKRRALQGDTLNQESIAMENPLYTPKVVRPTTYGIEPYGSSVTTCDWVIPEFVMTSFLPTSTQTKDVGSLDMSTEPLRRRHHVLSETRPATLGRRNQQFEAGIARNVATVTEDTICDAMEEDDWTQPHLNAEIHNNGDDDEGVIFEEDEDDDENDGYLFVGQYDEIDEDIEIDGTQDESTATDLPDPYDKVYSNVPEETHMLKSVSNCGYCTAKKFEYEPPGFCCRGGKVELAPLETPPQLRRLWDSTDSDARHFRDNIRFFNGHFSFTSLYCCLDSMTTNVRDSGIYTFRAQGMMYHNIMSFGREGGAEHKHLELYFYDDDPNLEHRYRKCREECQQKDKDVIKQLVGILRENLYSEHLRSMCHIENLDDYRITLNLDQTLNQKTYNTPLTSEVAAVWIEGSERRG

SEQ ID NO: 64119 - protein, 26 aa, Zea mays
  Coding DNA Sequence Number=SeqID_20744
MENGIDDIMVSLAEKDGKANKVQYLQ

SEQ ID NO: 64120 - protein, 273 aa, Zea mays
  Coding DNA Sequence Number=SeqID_20745
  Gene Ontology: Mol. function=hydrolase activity; Cellular component =cytoplasm; Biological process=purine base metabolic process
  Homolog annotation: Hit_ID=A2XNQ9; Match level="QueryCoverage=62%, HitCoverage=66%, E-value=6e-68, Identity=73%"; Hit description =Putative uncharacterized protein
  Pfam annotation: Domain name=dCMP_cyt_deam_1; Domain location=122 -224; Score=134.6; E_value=2.8e-37; Accession=PF00383.13; Description= Cytidine and deoxycytidylate deaminas
  Subcellular localization annotation: CTP_CleavageSite=54; ConfidenceScore=5.61e-01
MQPAGMPQRDRSMGMSRRKMTASGAGSRRSATGTCGTTCLSPNTCKQGLLHRCVAGREGRQRGSVQGAPVFPAKPYNYKKELAQAYEVLSDPENQEIYDVVESKDGTISVASAFAGYQEAVQDRDHKFLTKAVEEAYRGVDCGDGGPFGAVVVCNDEVVVSCHNMVLKHTDPTAHAEVTAIREACKKLGKIELSDCEIYASCEPCPMCFGAVHLSRIKRLVYGAKAEAAIAIGFDDFIADALRGTGFYQKANLEIKKADGNGTIVFEEFQVPL

SEQ ID NO: 64121 - protein, 130 aa, Zea mays
  Coding DNA Sequence Number=SeqID_20746
  Subcellular localization annotation: CTP_CleavageSite=66; ConfidenceScore=5.81e-01
MGTVSIPTFYPPLKQSSSLFPASTHGAANGRSATIVLFVTTPRASFRSRSPSPLTGDSRCQGAFVVSQLEVESPAIIGVEREEHERDSDGEERIKLPCSVATIPIRDNTSPEEPVVPQMVACGKRDLSTV

SEQ ID NO: 64122 - protein, 106 aa, Zea mays
  Coding DNA Sequence Number=SeqID_20747
MLRISTKDERVRSRNRKEKVRQNETNKQSRKPYQQRETMLEQRISADRRQGEGSQRSLRRGEKLSAAPRQGGTRTPVGVGVRWTEVERWPDLVFDAEGAGQKAANG

SEQ ID NO: 64123 - protein, 266 aa, Zea mays
  Coding DNA Sequence Number=SeqID_20748
MAPPVDVVGPCPRLGDVEAPPRLRSSLSSEAEVESEPLGQARRRPSAEARAESEPWGRAKQRAEPESEPWGRAERSSPSSGAEPESEPWVGRSGVRRLQGLSPSPSPGVGRSGVRRLPGLSPSPSPGSGGAEFPMVPEAGPGCLSASLCRVAHQSERRRRRCPSVSRSVERRSDCGHFGSVDWRTCVRIKVSGHLCIKCPCDLVGWRGDLARVASWRRLGLERAGSMFVAGGGPRARHRSSGLCADGGYQLRIRSLEGTPNYGPRQ

SEQ ID NO: 64124 - protein, 38 aa, Zea mays
  Coding DNA Sequence Number=SeqID_20749
RYFGTSGYEIDGFGYDYGAGEDEAVEGDFQEFQDYDEF

SEQ ID NO: 64125 - protein, 139 aa, Zea mays
  Coding DNA Sequence Number=SeqID_20750
MFLGAGPGVMMGMGAIQMCTRGLVQELARHLRWDLCPCMLARVPRGIAMRRGQSCGLCDSRLEIQRPGLGGVMDGVCTVDRGSIDSGCLPVGFNAKSNLERWFLIVRPWLAYTPSPKPFYKRDPTIVLKQPAVHVRIRN

SEQ ID NO: 64126 - protein, 332 aa, Zea mays
  Coding DNA Sequence Number=SeqID_20751
  Subcellular localization annotation: CTP_CleavageSite=54; ConfidenceScore=5.01e-01
MAPTPWSHCAVALGDSSLILTGGPKSLGRPILARGAVIWDPTGRSLAARLLNTSLKMSWGRAGDCSPSLRMGPGGRKIHGEHGGHATGRFSHRTHGRPGISPLASDSPLASKSIAHFSSHPLFSHPLFLQPPSIHANAAAGESLICRRQDYNLGSGRFRDDLLTVPCAAIATTPGLPPKSGEKGTAAGHGSHCRQPEVASQLRPRIWAVAPRGDTLMVHRVIPGAIGGQGEAEFLIGNQDLGLCRHLPWACAFAAARPDCFCTNLVGGNMHGGAKSGISGEITVSVAAPPPPGRIGEEESGPPLDRIGLVQIRCWNDAPGVVCFGSDGGGCS

SEQ ID NO: 64127 - protein, 37 aa, Zea mays
  Coding DNA Sequence Number=SeqID_20752
MAHLHRYPFADEQATVDSEVQQVEIAEQELIEGKLCP

SEQ ID NO: 64128 - protein, 232 aa, Zea mays
  Coding DNA Sequence Number=SeqID_20753
  Subcellular localization annotation: CTP_CleavageSite=46; ConfidenceScore=5.53e-01
MTTVALSPLRKQGDVSKVPTAPTTVLLQGSNAPPTAMTPHMPPHTRKTTRKSTRPIGVPWHQLAPRHEESSSGNNDPIGVLKAQVEQLRTELRHRNRVWVKDGQRINELRVDVRHLQDELAERDLAIDWAVNSRSIAWDREAKARARVEELSTAVDNLQVYCNTLHEEVHVLYSRLHPDIPADPVGMGAGPSGTADEALGGELDLFKPPSSMNLADEWSPTTDSEATKDDKY

SEQ ID NO: 64129 - protein, 390 aa, Zea mays
  Coding DNA Sequence Number=SeqID_20754
  Subcellular localization annotation: CTP_CleavageSite=77; ConfidenceScore=5.09e-01
MVTQDGDHQFDGGAKQAGLRPLPRPQLQGSSSSLLGRGASRAGVLPPSWAAEGADFDNAGSAGCKRRQLQRAWLASSADSGAASGATSHRWGGAWLSAHCGAAIALCAPGDRPRRRMPLGRRSCSWIVLSPLRHNASARRSVPARPGGLEWGSTGALWGGAGGQVAAVVGAEVVAAGEGFSADETVGATRGLTSGSLALIACPRPSSGDVGEGLVAAASALRSSLLLFSRPERRSLSLLLQWSAASHLEFVVPQAFRCGGCSYPREWNRSFVCNGTLSAGVCSLWLSRPEHLAGVRGSGVSVDRGRVGSRRGFVGPGHVASLAEKAQQRRLEPGQVIRERDQLRSHAAEAVSRADVLEGQLAEATEWPVEMFARAGTLEETLAAMAQARC

SEQ ID NO: 64130 - protein, 278 aa, Zea mays
  Coding DNA Sequence Number=SeqID_20755
  Homolog annotation: Hit_ID=Q6J9V9; Match level="QueryCoverage=28%, HitCoverage=32%, E-value=2e-13, Identity=52%"; Hit description =Putative uncharacterized protein
MQVACNRTTRTHPFDFNASSMEAQAHTSCNRRAGYYVRKTAPPLVPMSRLLDCGTGAATRGNPAHGPTVPTEHIGHGSVSRGRGRDGRYGQKWASSNGGNRQAEAAVKSSAGSRTLLEQQGSPLPRREDDAPVFCPSNGSRNDRPAKQALFHLRHDDHVKEGTGKGNISKGILLREGSGPRALLLIRGSKVGPSEGGSKAGPSEGFDSRPRARRARDDSGYVRYMAEAWATLPSLRRNRKLRLARPWASALGGSLRLARPQGSAPASASRDGLRLARP

SEQ ID NO: 64131 - protein, 173 aa, Zea mays
  Coding DNA Sequence Number=SeqID_20756
  Subcellular localization annotation: CTP_CleavageSite=46; ConfidenceScore=5.06e-01
MFGGDDGARVLRRAGSFPRAPPPPATARHILSRSESIKKKSGAAKRARVRAGLAAALQELRLAGREARGHKPGEAGRCQKPVNAGSRNPNPPRALGSNHRTPKEEAAAPLLPLHMSLRRRPFAAAPVRHGCAAALVRFGLDGRAPPEQRALCCSAVQRQMPVAVSLTLDMYEQ

SEQ ID NO: 64132 - protein, 261 aa, Zea mays
  Coding DNA Sequence Number=SeqID_20757
  Gene Ontology: Mol. function=metal ion binding; Cellular component =actin cytoskeleton; Biological process=negative regulation of actin filament depolymerization
  Homolog annotation: Hit_ID=Q2QQ10; Match level="QueryCoverage=38%, HitCoverage=100%, E-value=4e-51, Identity=69%"; Hit description =Pollen-specific protein SF3, putative, expressed
  Pfam annotation: Domain name=LIM; Domain location=176-232; Score =73.8; E_value=5.6e-19; Accession=PF00412.13; Description=LIM domain
MATSLPGDDHQVHRLRQDGVPCGQAHRRQPHLPQGLLPLPPLQGHPQARQLQLLRGSALLQASLRPAVQEDRELGQELRRYHRFPPFPLQYEIDPVVFLRVSSPTNGFRNSEVPTKFAFFSFTFSVQSSTGNKYIQSLMHKQLLKHDVRCLDLECTAIPMNATKVSSAFAGTREKCVGCSKTVYPTERVTVNNTMYHKSCFKCCHGGCTISPSNYIAHEGKLYCKHHHIQLIKEKGNFSQLENDHEKTSQAGSLEEDEQEY

SEQ ID NO: 64133 - protein, 106 aa, Zea mays
  Coding DNA Sequence Number=SeqID_20758
MRVEWDTLSSLIRGTRGVVGLAVGPSMGFGHSTCSAEAGCRGGDAGNMDDFEEFQDYDEFYHLERLLRRLHEEQERRCQEQEQEQQDSSPSPQQEVEAGRQPSHAP

SEQ ID NO: 64134 - protein, 68 aa, Zea mays
  Coding DNA Sequence Number=SeqID_20759
MVVLWPLLGVSTLTTDGLDLKYYPRHLTNSAGGVIVSPVGEGNPKLNSMVNLAAVLNTNLDHALDELD

SEQ ID NO: 64135 - protein, 66 aa, Zea mays
  Coding DNA Sequence Number=SeqID_20760
MGLGVCGSLCQVWVRPLGRSAVHLGNLMGGYSPGGNEIDGSGYDYGTGEDEAVEGDFQEFQDYDEF

SEQ ID NO: 64136 - protein, 425 aa, Zea mays
  Coding DNA Sequence Number=SeqID_20761
MAEEGGAGGHPHEHLAEVDEDGRLEDGVGREVLKLEPELLHQCCARLAGPCSDALDPGTMLRLEIFKYFLRRLHRLGADVACASWNYRIRSTSFFSFSSASSSCSASNLSRLSNISSLKARSFSRQARSVSRLSRDASFSLRFSSARAMFLALSSNSRSHFWILYGLHLLDPLGLQGLVQGLQLGSELCCKGLPFAQGLLPPGQFLLPLGCLQLPGIHLLEVPFVILVVPLKLGPLGGELAGRRLGALLQLGAPVTEALVFGLKHLPLPQYRRLSLMKSLMGMRQHPGEGNWRCFWLGAGPEHPPKNHLCLLRSGRRDGAGHAPASPSMTGVGAVGTSSAAANGVLDGIAVVEAAVAVGAVGTPSTAAMPLDIAAAAARPPAGAWEPGGTVSAAAAGGGGGTTLGAEGEEALTSKGWVKTCRHNR

SEQ ID NO: 64137 - protein, 342 aa, Zea mays
  Coding DNA Sequence Number=SeqID_20762
  Pfam annotation: Domain name=Transposase_28; Domain location=198-342; Score=-33.7; E_value=0.00034; Accession=PF04195.3; Description =Putative gypsy type transposon
MKAPNTWVFSVLESWYPAVSGPDPTQRGPDPILGVRFAPVGVLDLTRRPGLYIQGSDTFLWGSGLTVDTLEYIIFSGHVAAPEPPTWWGQVLLLAQSSHPRLGRAMGTDIGPRAHLMGGCEPAGGANRLIGDWRAASVRLLTLALQLYDLWARTPVSETGPPGRQQLGFRILSQSLRLFAFELSAPLCIHALLLYTHAAADAMTLLGHLEHFQSEGALNLVCHLLGWSTPVHAGRIHAGTTPLGDLAAGEFVLFVSYLFCGLALPISPFFLLLLEELELQLQHLMPHSILQEAIFVHLSEMFVGSGKAKDHLGAYYFQTRLDSAVAYIPTLGGARWENWRGD

SEQ ID NO: 64138 - protein, 110 aa, Zea mays
  Coding DNA Sequence Number=SeqID_20763
  Gene Ontology: Mol. function=FMN binding; Biological process =pyridoxine biosynthetic process
  Homolog annotation: Hit_ID=A7QWG3; Match level="QueryCoverage=56%, HitCoverage=31%, E-value=7e-22, Identity=70%"; Hit description =Chromosome undetermined scaffold_203, whole genome shotgun sequence
MVHLFPNGQVSVELQLLREKWGLLLAGLIFQSCSVCWYFTDSWEQFRISGSIDVIDASTTDPAKLQHKEKAWFSSSLKSRLQYLGPQPGIPVLDDEHVMMSMLRAFISIL

SEQ ID NO: 64139 - protein, 131 aa, Zea mays
  Coding DNA Sequence Number=SeqID_20764
MEATFGGVGAGGRHNVALAAWGRGRTQSCISAGQGAAVTVAGPGHLRVRRRRVGGEWEVAHGSRMRLAVLDMCGMWRVRMGREVGLRGIRLLAADADGARGRMRLVALMPLGVSGGVRRMGLVADGVDLMI

SEQ ID NO: 64140 - protein, 243 aa, Zea mays
  Coding DNA Sequence Number=SeqID_20765
MTAQPPSPRPCSPTHTGLHVLNSIDNPTFTPLGERAEWRCDDLVVYRRCPSRGADLFVGEEHPPSAPFPLCLTGLLHQRAESFPPCTRSPTRCTVGPPCQLRLPRDPSWTSSTHACTPRSPATSPAHAPQLPFEHRPHPHSLPRPISHRFALSRALPSLLDLAGDPRLPCRSPSPPEAAPSDPELRPEVRHSFPCSVSPIMLCRWPISASSVFGRGGPPRPRGDQSGGPASVPNVPLTLLKLV

SEQ ID NO: 64141 - protein, 344 aa, Zea mays
  Coding DNA Sequence Number=SeqID_20766
  Gene Ontology: Mol. function=ribonuclease H activity; Biological process=RNA-dependent DNA replication
  Homolog annotation: Hit_ID=O48967; Match level="QueryCoverage=96%, HitCoverage=99%, E-value=4e-50, Identity=45%"; Hit description =Putative uncharacterized protein
MVQIVEHHDFVPEDFPMEEEAASSTPRASSRPALGAAAVCSARQHTPAQTSRASRAAPGALSAAKELLRHPPSSTASPGAMKQWRDDVVRLLGMAHSGSARPRPRSSQRQHEASASVHSPSVKASPTEDLRVELNRRRAVEDAPASLERPDDLRAKLNHRLMGEDARLSLERAPERQQNIEGRNLDLDFTVVALQTPRATWPSKFRPHLPEKYDGTSNPSEFLLRISPVLISSGVEAHLHAVRQEPEETLRAFISHFTKDGKKKKKKNCGHERSPSAAPVIAAATGGRNERNKRPRPQGGNSGSCPVHPNNRHSASECREIIKLAKRVSEQREQTSKDGSPPRR

SEQ ID NO: 64142 - protein, 188 aa, Zea mays
  Coding DNA Sequence Number=SeqID_20767
MDLTWREKDLAFREEMFERRDKLLAEHELEAEKEKKLEERIRQFQAAQAAPGPKAVEATKKALEDLQAEHRAGVQRIAAWAGKASTALVPLRMSPIPVSELSTSISDALPVLDSAADRLRRLDQILSARLEAEGGRLCRAVIEYIRTCFRRHDLTISLEPVIAGPVADTKDAAQEGVQDTVELVAERV

SEQ ID NO: 64143 - protein, 192 aa, Zea mays
  Coding DNA Sequence Number=SeqID_20768
MVVRQTGGQDPHHGIRIFDAPVGGPQSAGVAPGAPAVAPSAPATPPPPLGQGQTGCKQFLRPRWHRGGRMKRGDAGCAAPTGHLFRTPKSIRGLLVGPRRPTPRLTLGLPPPLLPRSCLLRPGCCCRDSTTGLPCSSWGSGSSDVNIKRRRSGGGSPNCSDGYRSLNDGNDVEYTVGSGRGGLDYAHPHHRG

SEQ ID NO: 64144 - protein, 62 aa, Zea mays
  Coding DNA Sequence Number=SeqID_20769
MADHPKFEPRPYYSDPNGLHAEGSQENVMVYVDAIVDITPQLTTLNQRSKSDKYHKNKHSNS

SEQ ID NO: 64145 - protein, 107 aa, Zea mays
  Coding DNA Sequence Number=SeqID_20770
MADHPKFEPRPYYSDPNGLHAEDSQENQIPMAATPSDPKSGEIHTPRHLLSLDTDTDVHPSSAPSEIPPERPVEVYVDAIVDITPQLTTLNQRSKSDKYHKNKHSNS

SEQ ID NO: 64146 - protein, 52 aa, Zea mays
  Coding DNA Sequence Number=SeqID_20771
MDPNMQLCENVANYVCLSTREHLKSSQKKPNEFGLELNKHGSVWAASDMFDA

SEQ ID NO: 64147 - protein, 78 aa, Zea mays
  Coding DNA Sequence Number=SeqID_20772
MEARMMAEREAERATRLADQQRMAEMFQYMHAEPCAHRGQSRAVSNNPHEVLSPSQHQSNRPPRSELETYVLILLNLC

SEQ ID NO: 64148 - protein, 121 aa, Zea mays
  Coding DNA Sequence Number=SeqID_20773
MADHPKFEPRPYYSDPNGLHAEGSQENQIPMAATPSDPKSGEIHTPRHLLSLDTDTDVHPSSAPSEIPPERPVEVSWLHKQAAAHGFSLSLLISLGVAFSQLSHGPKEKRDHIYVARRPSL

SEQ ID NO: 64149 - protein, 133 aa, Zea mays
  Coding DNA Sequence Number=SeqID_20774
  Gene Ontology: Mol. function=subtilase activity; Biological process =proteolysis
  Homolog annotation: Hit_ID=B0JCV8; Match level="QueryCoverage=39%, HitCoverage=7%, E-value=5e-14, Identity=69%"; Hit description=Misfit TNP1-like protein
MWASSVGIDAISVHVPKKCFYGLHDKAFIAFEDLWLMMNLQRLDVQLITVFALMQHDQQEILYGTNLDTSAAKRVGYLNPIQISEQNHTSIIGKDNEELKGKSDEEVEKHIQCWGLVLKCYELKNKATQNIKC

SEQ ID NO: 64150 - protein, 109 aa, Zea mays
  Coding DNA Sequence Number=SeqID_20775
MHTFISKSKPPVTAPSWIKERVKESGSAWRSTRWRLAPNCAEKMIPCSSIVVHEHDGDAAGYLLAAAARSTTQGRRRPERPQVPLPLCARCRSQFLLLLAGERSPRIFL

SEQ ID NO: 64151 - protein, 150 aa, Zea mays
  Coding DNA Sequence Number=SeqID_20776
MGKDKKGQGSPRRSGDKRKREPSPSSEDFGDSEYSEEEFSSKSEGSPVYASPPASSDDSDDSQGIVVEVWTYIRSVERAGLEGPDESEVSSNEENSFGSCEEGSGGDSDDEGDDSDGGGGNDDGDGDGSGGDDGKGGSRSSKASGKAPLA

SEQ ID NO: 64152 - protein, 231 aa, Zea mays
  Coding DNA Sequence Number=SeqID_20777
MEAQAHASRNRRARCCMQATAPPLAPPPRLFGCGTNTATRGGPAHDPTAPAWRDGQYGRKRSRRRFAFAAITVPKKGPGKGDTPKRILPCEGTGLRAPPTDQRFEGWPSEGFNSRLRSRGPYTHYWSEVRRPAPRRAPRPPQATRAPRPLLIRGSKAGPRRVHSRLRRRARDDHGYVRYITKARAALPRARTRAKPRKTANSAPPDPGLGLGLSPGRRRTPLRPTQGSDSG

SEQ ID NO: 64153 - protein, 266 aa, Zea mays
  Coding DNA Sequence Number=SeqID_20778
  Subcellular localization annotation: CTP_CleavageSite=39; ConfidenceScore=5.79e-01
MNKNTGIQSATTNGTPDPSPRVRTTPRNRGTRGAIASRRAARRRPIRQQRQPPPPRAAKQLRQRLRGRCYDRRALTHRGREPAIQAGRRRPRATGGVGNLIGREAISGCRRLEARRQVFALVRTAQSVGAALAVRSTTVVRTEGAVLRPSRVMAAHLSRHGWRKSPRNWRMPFFPRRQGKKRAADPRGGSPPTRLILHLGLDDENPRGRGRGRGRSPARFPPPSSWRSPSWVTAGGGVQPGCMMKILEAERWLKGTNSHGVAFLQR

SEQ ID NO: 64154 - protein, 72 aa, Zea mays
  Coding DNA Sequence Number=SeqID_20779
MGMRDLVIRLLAYYGPPFSGCGRLFSGCERLDNLPSHLQHYINRRRAPLTKVRMLPKLNKQILKRFILVKKR

SEQ ID NO: 64155 - protein, 221 aa, Zea mays
  Coding DNA Sequence Number=SeqID_20780
  Subcellular localization annotation: CTP_CleavageSite=32; ConfidenceScore=5.19e-01
MPAVKPIAPRSGKSSASAKTAAAGGTKPPPVEAAKGRELPSPGKRVADFGMNISVEDYFVGSGEGQMVVVPPSVATTSPSAVVRAKGTAQDPWVAFCASGEILTAAAAKDVAGTMSQRLREASQRLSQQLSQHLSQLDLMCFCLAADFAVRVASGVLTADVAAKVERLRAQHTDVVQEKSAAESKNRRLAKKVAALEAEKTDLRRQLVEERREVNQAIAEA

SEQ ID NO: 64156 - protein, 70 aa, Zea mays
  Coding DNA Sequence Number=SeqID_20781
MYSSSSVDRATDVCFFELQDTRDLLLELALLGKLIQQGNENSVNRVTARDGNGSVNPASQGHCAGVFKCA

SEQ ID NO: 64157 - protein, 1134 aa, Zea mays
  Coding DNA Sequence Number=SeqID_20782
MLLFAGDLARVKQTARHRRRYVAMPTSSSSAAATPPADASSEETLSSLEAEELRAGDSVDFGVSRMSSVRVQDMQRLGYFGGGVARVPGDGGSPRAGRRVGLCSRHSSPPATTSYGGQPSVEVFAKYHCLHWQKRMIGDEVAQFGSCTFTPKTGKTTMQVVKLFPCDRNKWGNWNEFWFYVAEGTVEDHEGLPVSEMCSHFYSAYPPFEVAEDDADEGALRRAVGLSSGRDLVEEFVAYGVLPLALVWALGEVCPRQMPSHGGKMVRSPAFALNLQNRDPAAFVREAEDGAVRLVGRYVPRTEGQSSWDIRGSNDRLTGELMRTCAVPGGRMSSPKLREYSARMLRVTGGWWPRNVPIPRATGEDFFTSRMVREWRVFPYGRNIAAVVSAVMDKDRQGAAQKRQAVVRLHEARPKRQQRATKAVAPGGGKPPLVAKSGVPASSKALEAAAGAGGSKSTKAVPPSSRVSEAAKAARVLPSAGKRVADFATDISVDDYLGGSDEGQLAIVAPAVATTTAAVVPKAKGGALSAGGEMSALAAVRDEAGAVSRRLKEPRQGPTQQSNPVARWTAKLSQQPSPPENLSGLTALAYNAPLTPTGRRAVAALVPTITGMGDLVSGRVRGYVCGQARVLDLGLPPEQLLAPARGCTLRQQDYSLSKCNEHAGVLVGGEYTGQTTANWFNPRRDWAAADSLRTGKRRRANSGEVWRAADFADRTASGALTAVVSAEVKRLRTQHADAVREKSAADSKCRKLADKERLTALESRVERAEAASRAEAERTRKQLMDSYHELGARTSDFEVPDREPGLRCLEWVQEELQALPTIVEGFMSYASLVTCEGAMNALSREGCRHFEVFDQADEDFERDIYKVEDPIVKESAGAIYDRMWGPHGREVVRERAETARAQITFGAARGERVDDFGALNSALPDPEPIPAEAVSGAALEPPPETADDAPDAPASATVVGDLPPETAEGAPDAPAAAAPSAEDPATVAEEATAEATAEATAEAPATAGSSQVHDFGPAHATATTKFLAASTVDGGNKCDGSASEFSDFADSGSSIEWTEESSEEDLDYFAALDVAAAEASPHAADTEDVSGPSTGRRQRRAVAKRRVSEAEGGRLRVSRAGRQELLSLPAADST

SEQ ID NO: 64158 - protein, 255 aa, Zea mays
  Coding DNA Sequence Number=SeqID_20783
MPPRTRLTARKSTGPIGVPRHQLAPRHESSSSGSNDPIGDLEARVSRLQAALQHRTNAWVADGDRINELRRDIRHLQDQLADRDLALDWAVQSRLLACAKEARAQARIKEEEILLSLPVTNPAKASARLSIKIFFVKRVIKEDFQSATEKEKRKGFYSTGPIPAQTAQQHRESGRAHACGGNFTERPLGFSLTGNGFLHCYSESLTVCTKALEVLFLYTVRSPTASSTAELQRARRPADWGKYWRPRVADIKFKS

SEQ ID NO: 64159 - protein, 141 aa, Zea mays
  Coding DNA Sequence Number=SeqID_20784
MDYSAPAGSRWKLAPGSLTSGGDHLCTKRLASGGNHLCTERLASGGDHLCTRQPHQRRRPPLHRRLASDGGHLSTCPMAKRPSPPPSYGGEDKTIQAMELGARRQAVLAVWPRPRSRSSPPTFTRLVIILFLRMLEEEAGH

SEQ ID NO: 64160 - protein, 453 aa, Zea mays
  Coding DNA Sequence Number=SeqID_20785
  Homolog annotation: Hit_ID=A2Z3J4; Match level="QueryCoverage=84%, HitCoverage=54%, E-value=1e-141, Identity=71%"; Hit description =Putative uncharacterized protein
  Pfam annotation: Domain name=DUF632; Domain location=7-337; Score =207.2; E_value=3.9e-59; Accession=PF04782.3; Description=Protein of unknown function (DUF632)
MGWAWGGGGYGKGNDGFTRFGRGDGGMPMGNGGGGGMLSHSSTVEKLYAWEKKLFLEVKVLLLCWFVHLWSVMGNAANNDSAVVAIDFAEETRKSYEGYKQEHDKKVSLLRKQEVKGVDYLKMEKNKMEIESLESKMLVANQSIETTTSEIIRLRESELFPQLLELIAGYFHLYLSFCIAYEHGSKVGHMVHGLRPSTHAQVLMSMWRGMYECHQVQTHIVQQLEYLNNARNTNPTSNVHRQAALQLEIEVDRWYSAFCSLVKSQRDYVYSLTGWLRLSLFCHHDPLTKAQNSDIYGLCEEWQLAIDRIPDKVASEGIKTLLTVIHAVVIQQAEEHKQKKRSESAFKEFEKKAEELRALESKYVGAEGYREMSRKSSVADKRAKVEALRSRADEEKIKYEKSIGVTRAMTLNNLQTGFPNVFQAMTGFASVCMEAFESVYNFKRSSDPKRLLT

SEQ ID NO: 64161 - protein, 230 aa, Zea mays
  Coding DNA Sequence Number=SeqID_20786
  Subcellular localization annotation: CTP_CleavageSite=42; ConfidenceScore=5.74e-01
MASSSALAVPSIPLPLPGAYKRSRPSPVLSTPAPAISFASPRANRANAAALPRRSAEEGFDPPEVVAPEEGQEPDPSEINLLCQESFDEGKSILPLMHYLPISLYHYLSLECGMESNCMMESSWVIRTSYCSEEEGFPHLLRSCGLRMGIRKKPEYVWKEYNENGIEKCSMAVYLGESRSYPNHPPSKSPSSGTASQTLAKVLPERPLNSYAKTTTERSLKPPSLFPTQQ

SEQ ID NO: 64162 - protein, 143 aa, Zea mays
  Coding DNA Sequence Number=SeqID_20787
MENGTRPHRMGRSKGTTWQGKIIRPRMHHWVWTSTEGHRTPALARSRDGEDPGVSKGPVLTLRPCRVAHCARHPFYKKLSLHAEDMQISDVKHKKIAPAANSCGSKAGALRHPAGDFLSDTSRSQKHRVMLAKPDEPKLTLTI

SEQ ID NO: 64163 - protein, 289 aa, Zea mays
  Coding DNA Sequence Number=SeqID_20788
MPRSSCIHRALPPFGPRDGVRRCSLEGSASEPPPPAISPPESSCSWWCCQSYILLGAARGAQPCGGWRFYAIAQLQGFSSCSPAAISCQWSSKGMTTSLVAERSEPDCGLPPALSFKDVHHPRWGGGRAELGSRLPHGLAACFFLQHSGEKGVHQPCEGGELQVRHIHNFSRAAGRTGGPYKASCAAGAAAAFLDGLVLTPLVRTGARTSSRVLRQPPPTDAEVTAVVGAEVVAAAGEAARCRGGCLRWRDHQRHLSPSLQLFGFNGLVVAPRRKTGGEDLFAMAHVLG

SEQ ID NO: 64164 - protein, 152 aa, Zea mays
  Coding DNA Sequence Number=SeqID_20789
MSSLEAPTPVETTRQTLEGPRAPRSTGLKPAFPQKPFWTPHGPRLPTDGDPGSGPSPMASTKPRRAPQLSPSWEGPFKVTGMHRPKGNHLATTEGVPYPDAGTSLSRSRRGCLPRVVDNLFRYAGIQPQHMKPASQAGGPGMNYLHTYRAAG

SEQ ID NO: 64165 - protein, 115 aa, Zea mays
  Coding DNA Sequence Number=SeqID_20790
MAGMYCNARDCLNKRMQPPARTAARILLSPVDKAKGSARKKDRERGIPRKGSFSAKEPGSEPPITDQGFEGWPPEGSTVASDRVGPTPTTGQGFKGQPPEGLHGRLRLLGLRAHY

SEQ ID NO: 64166 - protein, 158 aa, Zea mays
  Coding DNA Sequence Number=SeqID_20791
MEVATASRAMTPTFLLTRSQKDGLLDPLLATLLAVFQHSRGVYPDRWEATCLVRRPENSLWGAEPRWVERVGEREGGRGEAAGAERERGGSPAAFVFVPRPGQGDVGFPPKPRLSLPSVAVAEPEPRGRARRKSFGRGQGGVRALGSGEAEFSSSSGS

SEQ ID NO: 64167 - protein, 46 aa, Zea mays
  Coding DNA Sequence Number=SeqID_20792
MVLSVAHRTLSGAQAEHLLELATLGFLRKPLCYNSPDCPGLSDPSD

SEQ ID NO: 64168 - protein, 151 aa, Zea mays
  Coding DNA Sequence Number=SeqID_20793
  Homolog annotation: Hit_ID=Q6QP51; Match level="QueryCoverage=32%, HitCoverage=22%, E-value=2e-15, Identity=77%"; Hit description =Putative growth-regulating factor 1
MQAACNCTKGMHLFDFDASSMEAQAHTSCNRHAGYYVRETAPLLAPIPCLLDYGTGAATRGDPAHGSTVPTEHIGHGDRERGYSERDPSPQRKRAPSPPTDQRFEGWPLGRVRQPPQSTRAPRPLLVRGSKVGPSKGFDSRLRPLGLRVHY

SEQ ID NO: 64169 - protein, 332 aa, Zea mays
  Coding DNA Sequence Number=SeqID_20794
  Subcellular localization annotation: CTP_CleavageSite=45; ConfidenceScore=5.51e-01
MSSRSLMRRVFPPSKPPDGGPAAPLHRRSPKMVTSSLMVGESEPSCSLSPSLSLKDFHHQGWGGDCSVPGFRTRVASEPLAAPASATAAGRGSSAGVIAKAGHGLTSNSTAFCPSLPYEFWHGRGPPSSSTRPEVSAAAVRPPGAEVVVVAAAGAGDGAPFVGLPLLRRPSPMEWGCSYLRRGNRSSICNGTLNADSPVDYLNRFTKHESPRVKVTSEHEQRRSWLENENLVGWSLAGLSVSGTDAGVDQPRPRTGLAPSEDGWPRPLGDVCASESCFSQKVMSEKVMSEKARKAFWQKRSFFEENFNAEGVSPLLAPEGGSGFAEARPTLP

SEQ ID NO: 64170 - protein, 68 aa, Zea mays
  Coding DNA Sequence Number=SeqID_20795
  Subcellular localization annotation: CTP_CleavageSite=47; ConfidenceScore=5.58e-01
MPRCLPACVVASPTAHAQPRSAATPRRLPAHAAASPPRLVVPCHRCSASGPASSSPLPRSSAPPRHRF

SEQ ID NO: 64171 - protein, 223 aa, Zea mays
  Coding DNA Sequence Number=SeqID_20796
MEVRCQTSFCQNEDGFPKLLRACTIRLGITSQPEYDGREFIKHGTEKCVVTVYIGSSLHHVEWSVTAAGHRFKDTCQVVARKALRALCQIYEEEKDAEKSNCQLHVDITSTQAHATALESREVIFVQALKQAKDEHVQKLMEAYLVTHNQHRAIWIQEPTSSNPVQPMSAEDPQILEGHLVSVRGEKKTWELPDGAIVLEGFPVFPKDMDKQEHPESSQDPPP

SEQ ID NO: 64172 - protein, 224 aa, Zea mays
  Coding DNA Sequence Number=SeqID_20797
LVRARGVSGGVWFGAEARGGGSRRNWLGAGLLYSGEELSQQRAKQRSIGPGEVPYLKAGSGTPRRRQWCDGGPGRQWRTSAAARGTTGERGQREIGRGRGNWGASRVADTGAKLTVATDTAELRRRPRNELGTAGFTAAALCVRAARGEEGLLERKWGRGRGRVGLGAQVARGGSVASSTRDVGAEKAGARSSAAVTRGRRADSPGPRAEREGRAEAGAREALR

SEQ ID NO: 64173 - protein, 324 aa, Zea mays
  Coding DNA Sequence Number=SeqID_20798
MARLRHTARKSVIPFLPSRLAERPLHRTVSGQSSHLERLHHRLREEQERRRQHREQQGSSSPPQQEVESVRPRSSVAQLEAPPVPQRDVPAVGGATGGGSGGDPDDDDSDHSTESSEPQEAEGWVARPITRDAARGCHFHDALDTLLRQAFRPAHLVDRVSLCSLPAQSREDDLRGAEAVSEHYSISERDTAEAAMQDAAWRALSQYCSLFGGVADGLNLRYYPRRPTGSTESVVVSPVGEANPRLSSTVNLVAVLNTELDHSLDELSRARTEIAELRAELAERHHQEGGSPAPVGTQHPYRSPPRGHHTYGSPVCKTRIDLDP

SEQ ID NO: 64174 - protein, 258 aa, Zea mays
  Coding DNA Sequence Number=SeqID_20799
MARLRHTARKSVIPFLPSRLAERPLRRPVAGQSSHLERLHHRLHEEQERRRQEQQGSSFSLQQEIESVRSCSPVLPLEAPPAPPLGAPASGVAAGGDPDDGGGDDSSSHDTDFSADQEPEGWVARPITRDAARGRGVYPDRWEATCLVRRPENSLQGAEACLEHYSISERDSTEAAMQDVARRGVIVSPVGEDNPRLSSTVNLAAVLNTELDHALDELSARSIVTWMMVPPLPSGLSTHTAHLGVDTSLMAIPTARLR

SEQ ID NO: 64175 - protein, 156 aa, Zea mays
  Coding DNA Sequence Number=SeqID_20800
MGKGKRGRGSPHRAGDKRKHDPSPPSEDFGDSEYSEEEVSSESEGSLALASPPTSFDDSDDSQVLAAEVWTYICSVKRVGLKGSDESEVSSDEEDSFGSSEERSGDDNNDEGGDGGDDSNGGEGNDDGGNGGKGDDGGNGGSGSGGGKASCKAPLV

SEQ ID NO: 64176 - protein, 185 aa, Zea mays
  Coding DNA Sequence Number=SeqID_20801
ALSDPLVYHHQARLMESIPIGQDSVESASARVLMAVLELQLTRGHSRQKWQQLYTGSYAAFKMMEKAKNSACTQAQERLEETKVQAEQVIGLEHQVTELQMQHQADQNRIKELEHQLTNAHSKSKILSQQLEEIHVYAVAVREDLKETLRFINHQDQAVKEFESCSSHGVSRFLGRMATNIWQMV

SEQ ID NO: 64177 - protein, 59 aa, Zea mays
  Coding DNA Sequence Number=SeqID_20802
MAALSFLRKQGDVSRDSTGGYENDGFGYDYGAGKWEFFLVWKGYIGVITWVNAKTLPFY

SEQ ID NO: 64178 - protein, 236 aa, Zea mays
  Coding DNA Sequence Number=SeqID_20803
  Gene Ontology: Mol. function=cysteine-type peptidase activity; Biological process=proteolysis
  Homolog annotation: Hit_ID=Q5NKQ2; Match level="QueryCoverage=97%, HitCoverage=27%, E-value=1e-76, Identity=57%"; Hit description =Putative uncharacterized protein 9C20.3a
MDRFDQMDWCQLIFNDLCQAAKKWHTMSVTNVSTTIYGCSIVILLYYLDRLHDSAAPQNKRGTPHIKYFDRNIIQALTRADKGKIRKGEEPFGHCSHKTRTNTFDVPRPNPSGQHTIHIELPLIRDLISSKLNQLPSRHCLGFIEKLSHFDTEVGKACSVIKQTLQQIVEKQYNLSDVFGELIDEVLRAESGDNEDGYDVQKTTTKSDDILPHTVVHRMRRELDQGNEDATPQKKT

SEQ ID NO: 64179 - protein, 399 aa, Zea mays
  Coding DNA Sequence Number=SeqID_20804
  Gene Ontology: Mol. function=triacylglycerol lipase activity; Cellular component=chloroplast stroma; Biological process=lipid metabolic process
  Homolog annotation: Hit_ID=A2Y7R2; Match level="QueryCoverage=92%, HitCoverage=97%, E-value=1e-124, Identity=61%"; Hit description =Putative uncharacterized protein
  Pfam annotation: Domain name=Lipase_3; Domain location=160-299; Score= 102.1; E_value=1.7e-27; Accession=PF01764.16; Description=Lipase (class 3)
  Subcellular localization annotation: CTP_CleavageSite=18; ConfidenceScore=5.12e-01
MLLLVAFFTHFLVSSLSSAEAGPPSSSATATRWRELQGNNSWNGLLDPLDMDLRRSIISYGELVQATYDGFNRERRSPHAGACLYGRADLLPGVGVAAAGRYAVTRFVYATSALPVPGSDFPLLPLPETREAWSRESNWIGYVAVATDEGAAELGRRDVVVAWRGTVKGPGVGQRLHLHARKFFLLIFKIITSIELVLEEVRRLMELYKGEATSITVVGHSLGAALATLNAVDIAANGLNEGSGSSQQLPCPVTAILFACPHVGDRFFRAAFVGSFRDLRALHVRNAGDVVPLVPPLAYVDVAVAVLPIDTSRSPYLRSPGPAGTLHNLECYLHGVAGKQSSAAGGFRLEVDRDVALVNKGADALRDEYPVPANWWVPENRWMVRGSEGHWMLKDFEEI

SEQ ID NO: 64180 - protein, 115 aa, Zea mays
  Coding DNA Sequence Number=SeqID_20805
  Gene Ontology: Cellular component=nucleus; Biological process =regulation of transcription, DNA-dependent
  Homolog annotation: Hit_ID=A2ZNE9; Match level="QueryCoverage=51%, HitCoverage=3%, E-value=2e-08, Identity=50%"; Hit description =Putative uncharacterized protein
MGRVARSSSSGIGKSVRTACVITRIKTLFHAYPDLILSIRAFLPKRHAIRPQDLRKDKEPVDYPRAISLVNRIKVTLLFHGHPPIPPPQAGTTSKVRHDDKNVIMHSAMRDETVQ

SEQ ID NO: 64181 - protein, 134 aa, Zea mays
  Coding DNA Sequence Number=SeqID_20806
  Gene Ontology: Mol. function=transferase activity, transferring phosphorus-containing groups; Cellular component=chloroplast; Biological process=phosphorylation
  Homolog annotation: Hit_ID=A3B3X0; Match level="QueryCoverage=59%, HitCoverage=10%, E-value=3e-21, Identity=62%"; Hit description =Putative uncharacterized protein
  Pfam annotation: Domain name=U-box; Domain location=52-109; Score= -9.4; E_value=0.0055; Accession=PF04564.6; Description=U-box domain
MQARAIFEAAIGMTNQGVQELGHQVALIRQVANKVFTGMGKTIGYKIGTMIEIPRVALVADEIDAIRGWLDGGNDTSPVTGQPLAHRELAPNLALGAVIQDYTVMRRWQCRFCDSHDDVAPALQIFPSPVGCER

SEQ ID NO: 64182 - protein, 318 aa, Zea mays
  Coding DNA Sequence Number=SeqID_20807
RYSGTGGYEIDGFGYDYGAGKWYSFRLERMARLRHTARKSVIPFLPSRLAERPLRRPVAGQSSHLERLHRRLREEQERRRQEQQSSSFSLQQEIESVRSCSPVLPLEPPPAPPLGVPASGVAAGGDPDDGDGDDSSSHDTDFSANPEPEGWVARPITRDAARGCHFHDALDTLLRRAFDRHTWSVEYRCVVYQPSRGVYPDRWEATCLVRCPEDSLQGAEACSEHYSISERDSAEAAMQDAARLNLAAVLNTELDHALDELSRARAEIALLRAERAERRYLDGGSPAPVGTQHPYRSPQRGHQPYGNPDCKTKITLEP

SEQ ID NO: 64183 - protein, 93 aa, Zea mays
  Coding DNA Sequence Number=SeqID_20808
  Homolog annotation: Hit_ID=Q9AYP0; Match level="QueryCoverage=39%, HitCoverage=63%, E-value=3e-11, Identity=86%"; Hit description =Mitochondrial ATP synthase 6 KD subunit
MAHSNPNPRWVQCRSSQRRYEGEGIELEGEFPFDPIHFSPQSREKRSRRRRWKRNWPFLTGFAITGFIITKMTANFTEEDLKNSKFVQEHKKR

SEQ ID NO: 64184 - protein, 135 aa, Zea mays
  Coding DNA Sequence Number=SeqID_20809
MPLQMGLWFRSRGYEQPPHRRAYGTTTSRWLAAAHSCSSDNDLRSGRPNSSSDDLRANAAATRPSPTSPLEGRGQAIKAKEPEARSADGADDLVDDEDFSSCHHLSTDDGSHLPTGRSPLKSSQTGEHRPSRRAS

SEQ ID NO: 64185 - protein, 395 aa, Zea mays
  Coding DNA Sequence Number=SeqID_20810
  Homolog annotation: Hit_ID=Q6QP51; Match level="QueryCoverage=10%, HitCoverage=18%, E-value=2e-07, Identity=67%"; Hit description =Putative growth-regulating factor 1
  Subcellular localization annotation: CTP_CleavageSite=36; ConfidenceScore=5.00e-01
MQAACNRAMGMHPFDFNASSMESQAHTSSAGEGATVDMARSGPTVMAAAGEWKRRSNRLQAHVPSWSSRRALSHGVKTTRPCSVPRTARACTTAAPRTTRPVALTPRQGMRHLWQAKRATLHLRHNDRVKKGTGKGNTPKGILLREGSRLQDLLPIRGSKASPSEGFDNRLRAFGLHAHYWSEVRRLAPRKGSTAASGHSGSAPTTDQGFVGWPPEGFDSRLRTCRVRDDSGYVRYITKARATLPRKATKGHMKKAELVPDRPLALCRGSGAALANPAPAKPLTASTYQPENSEPDYAPGQRPGLLSGTIIRGTPKTPKTRLENSAACTAPTAVPPARVRLTAAKSSLGRHRKLRLARPQGSDSTSTPEDGLRLARPQGSDSTSTSDDGLRLARP

SEQ ID NO: 64186 - protein, 536 aa, Zea mays
  Coding DNA Sequence Number=SeqID_20811
  Gene Ontology: Mol. function=endonuclease activity; Cellular component=chloroplast thylakoid membrane; Biological process =ribosome biogenesis and assembly
  Homolog annotation: Hit_ID=Q10A81; Match level="QueryCoverage=42%, HitCoverage=26%, E-value=6e-71, Identity=60%"; Hit description =Expressed protein
MIVQSLLKETLSTRSKLSIGVVCPYNAQVRAIQEKVGKACRRNDYFSVKVKSVDGFQGAEEDIIIISTVRSNGAGTVGFLSNLQRTNVALTRAKLGKTYIRQLYYIPFFVKGFDDKPMVKRAVIVTPTSLVSNWESEIIKWLKGRVQVLALCESTHADVLSRIESFLKPLSRLQLVVNYKLCVPRRVYLYFRFGFISEGVLDTEELAIVNNTFRKAQGSRLPGIIEETRRSGESTTSTLESETWAMESLETELFDNVRASIQRSLGKPDKLSGRPVAASTPPKATSNAPRVAVWSHFSFVLFHILHTFKNILVRGRAAVESEMEVLLKLRSEVEEQLQNVLSKKVEVSFKKSRIENLQKEFESDNSAVVQLQAWAEEEAKKAREHARALEEARNQWERQGIRVVVEGELKDDASAGVTWANAGKEHAVDESINRAEALLEKLKTMSGEMEVRSQGAVERVMQHVRSFIAILKQQAADARQWCTEFGACAASRANEVSAQVKGSVSAFGATLGDKSKRAMEECKDGLERISHRFKTD

SEQ ID NO: 64187 - protein, 143 aa, Zea mays
  Coding DNA Sequence Number=SeqID_20812
MGKGTKRKREPTPPSDEFGDSEYSEEEFSSESEGSPAPVSPPASSDDSDDSQGIAAEVWTYIRAVERSGLEGSDESEYSSDEEDSDGGDEGEGDDDDDDDDDDDGDGSGSGRGDGDGSRDSTKGGSSKGNTKGGGGGRGRASG

SEQ ID NO: 64188 - protein, 249 aa, Zea mays
  Coding DNA Sequence Number=SeqID_20813
NKGLTSKRSRRGLAIVLGMRKAAVLPAADALTPGEGMRGEERRCRACWWLGLSAQGIGCGAAPPHARKQTIGRGNRGHGPSARTAGMERHVKLATPTRKKAKSKVRERRRRELTSADEQWRRGPTIQGWRGDGAGARARTWRRLKPLGNCPAPARRMSASTLCALVVGPSWALRAGLQTLPGDWVRCRAAARNEADDRTREPQPWPLGAHGGNGEARQIGYPNEEEGKIEGTNGFEFMGRSRTCVVEGG

SEQ ID NO: 64189 - protein, 693 aa, Zea mays
  Coding DNA Sequence Number=SeqID_20814
  Gene Ontology: Mol. function=hydrolase activity; Cellular component =nucleus; Biological process=protein amino acid phosphorylation
  Homolog annotation: Hit_ID=Q9LHZ4; Match level="QueryCoverage=98%, HitCoverage=95%, E-value=0.0, Identity=63%"; Hit description =Pentatricopeptide (PPR) repeat-containing protein-like
  Pfam annotation: Domain name=PPR; Domain location=186-220; Score =42.5; E_value=1.5e-09; Accession=PF01535.11; Description=PPR repeat
  Pfam annotation: Domain name=PPR; Domain location=221-255; Score=7.6; E_value=0.99; Accession=PF01535.11; Description=PPR repeat
  Pfam annotation: Domain name=PPR; Domain location=288-322; Score =38.9; E_value=1.9e-08; Accession=PF01535.11; Description=PPR repeat
  Pfam annotation: Domain name=PPR; Domain location=389-423; Score =47.0; E_value=6.5e-11; Accession=PF01535.11; Description=PPR repeat
  Pfam annotation: Domain name=PPR; Domain location=424-458; Score=9.6; E_value=0.57; Accession=PF01535.11; Description=PPR repeat
  Pfam annotation: Domain name=PPR; Domain location=460-493; Score =11.1; E_value=0.37; Accession=PF01535.11; Description=PPR repeat
  Pfam annotation: Domain name=PPR; Domain location=526-560; Score=0.9; E_value=6.1; Accession=PF01535.11; Description=PPR repeat
  Pfam annotation: Domain name=PPR; Domain location=83-117; Score=17.0; E_value=0.073; Accession=PF01535.11; Description=PPR repeat
  Pfam module annotation: Pfam domain module=PPR::PPR::PPR::PPR::PPR::PP R::PPR::PPR; Domain location=186-220::221-255::288-322::389-423::424 -458::460-493::526-560::83-117
  Subcellular localization annotation: CTP_CleavageSite=29; ConfidenceScore=5.15e-01
MSSPSSAAHAAAGPVLRTFTALLKLCAARADLATGRAVHAQLEARGLASESIASTALANMYFKCRRPADARRVFDRMPSRDRVAWNAVVAGYARNGLPSSAMEAVVRMQGEEGGERPDSVTLVSVLPACADARALHACREVHAFALRAGLDELVNVSTAVLDAYCKCGAVEAARAVFDCMPVRNSVSWNAMIDGYADNGNATEAMALFWRMVQEGVDVTDASVLAALQACGELGYLDEVRRVHELLVRVGLSSNVSVTNALITTYAKCKRADLAAQVFNELGNKKTRISWNAMILGFTQNECPEDAERLFARMQLENVRPDSFTLVSVIPAVADISDPLQARWIHGYSIRHQLDQDVYVLTALIDMYSKCGRVSIARRLFDSARDRHVITWNAMIHGYGSHGFGQAAVELFEEMKGTGSLPNETTFLSVLAACSHAGLVDEGQKYFASMKKDYGLEPGMEHYGTMVDLLGRAGKLDEAWSFIKNMPIEPGISVYGAMLGACKLHKNVELAEESAQIIFELGPEEGVYHVLLANIYANASMWKDVARVRTAMEKKGLQKTPGWSIIQLKNEVHTFYSGSTNHQHAKDIYARLAKLIEEIKDMGYVPDTDSIHDVEDDVKAQLLNTHSEKLAIAYGLIRTAPGTTIQIKKNLRVCNDCHNATKLISLLTGREIIMRDIQRFHHFKDGKCSCGDYW

SEQ ID NO: 64190 - protein, 43 aa, Zea mays
  Coding DNA Sequence Number=SeqID_20815
MGLGGYERRHSQRIDNAWKRNCKCSMKKNRHWVHLQIVTKSTP

SEQ ID NO: 64191 - protein, 101 aa, Zea mays
  Coding DNA Sequence Number=SeqID_20816
MNCSLSGASVWARLPTARAERALNALAGVVAAIHRRRVLPLEERRLRLSEMKSEVDLEGSRMSSTSLSADELLKRVAGTVGRLDVGALSQPVMRPVLLIVP

SEQ ID NO: 64192 - protein, 662 aa, Zea mays
  Coding DNA Sequence Number=SeqID_20817
  Gene Ontology: Mol. function=signal transducer activity; Cellular component=nucleus; Biological process=G-protein coupled receptor protein signaling pathway
  Homolog annotation: Hit_ID=A2Y8G4; Match level="QueryCoverage=99%, HitCoverage=76%, E-value=0.0, Identity=75%"; Hit description =Putative uncharacterized protein
  Pfam annotation: Domain name=G-alpha; Domain location=421-661; Score=- 181.8; E_value=1.2e-07; Accession=PF00503.11; Description=G-protein alpha subunit
MAAGRGDWEDMVRRMFPPGTTIPEPLPDMDYSFALTYNGPDVSYELPRIQPVCVPAIPTAEPASGPLGLGSGVVPVAPVVGPAAARARANPPAASRAGAADRRAARMTPSDSSDDEEDDAGSSGSRSTKASRPAVPEGRRPQVVTFGVPEEDSGGRYESSEMDGGHDAASAEQHVAVTRPAERKGRTCCRRCGKSKWESKESCIVCDARYCGHCLLRAMGSMPEGRKCVTCIGQPIDEAKRSRLGKGSRILSRLLGPLEVRQILKVEKECQANQLRPEQLLVNGFPLDDEEMTDLLSCQRPPGNLKPGRYWYDKESGLWGKEGEKPDSIISTNLNFNGKLQPDASNGTAQVFINGREITKIELRILKIAKVQCPRDTHFWVYHDGGYEEEGQNNIKGKIWESPLTRFACALVSLPVPPTNFDATKDEAPYSSKTVPDYLDHKRIQKLLILGSPGAGTSTIFKQAKLLYGNRFTDEELENIKLMIQSNMFKYLGILLEGRERFEEEALAVPNHPSSVGDDPQQDESKSSSSNSCIYSINAKLKKFSDWLLDIIATGDLDTFFPAATREYAPVVDELWKDPAIQATYKRKDELHFLPDAAEYFLSRAVEVSSNEYEPSEKDVIYAEGVTQGNGLAFIDFTLDDRSPMSESFGDNHDAYPQQPVN

SEQ ID NO: 64193 - protein, 155 aa, Zea mays
  Coding DNA Sequence Number=SeqID_20818
MENLIRDPQVAGLATRDVDIAELNAISAEESSTFAEAKRCYRRIVKSSCCPLDTKGDAVVLHTKPAILKAVKTAVRIPVVLKAVKTIVRIPAGLKAVKTAVRNPNVLNPQTTRLIPTLLPLSLVRHLVGQLAIPDLEQSSKNLILPRGLVSRSAS

SEQ ID NO: 64194 - protein, 555 aa, Zea mays
  Coding DNA Sequence Number=SeqID_20819
  Gene Ontology: Mol. function=transporter activity; Cellular component= membrane; Biological process=transport
  Homolog annotation: Hit_ID=A2XNI2; Match level="QueryCoverage=100%, HitCoverage=100%, E-value=0.0, Identity=84%"; Hit description =Putative uncharacterized protein
  Pfam annotation: Domain name=Xan_ur_permease; Domain location=34-467; Score=166.4; E_value=7.8e-47; Accession=PF00860.11; Description =Permease family
MAAPAPKQEELQPHAVRDQLPSVSYCLTSPPPWPEAVLLGFQHYLVMLGTTVIIPTALVPQMGGGNEEKARVVQTLLFVAGINTLIQSFLGTRLPAVMGGSYTFVAPTISIILAGRYSGIADPHEARLAKFVRIMRGTQGALIVASTLQIIIGFSGLWRIVVRLLSPLSAAPLVALVGFGLYELGFPSVAKCVEIGLPQILLLVALSQYVPHLVPLLSTAFERFAVIMSVVLIWLYAFFLTVGGAYKNAAPKTQFHCRTDRSGLVGGAPWISVPYPFQWGAPTFDAGEAFAMMAASFVALVELCYPSPKWDCMSIFIEANTPVQSTGAFIAVSRYASATPCPPSVMSRGIGWQGVGILLGGLFGTANGTTVSVENAGLLALTRVGSRRVVQISAGFMIFFSILGKFGAVFASIPGPVIAAVYCLLFAYVGMAGVGFLQFCNLNSFRTKFILGFSLFMGLSVPQYFNEYTSVAGFGPVHTRARWFNDMINVVFSSKALVGGAVAYFLDNTLHRRDGVARKDRGHHFWDRFRSFKTDPRSEEFYSLPFNLNKFFPSF

SEQ ID NO: 64195 - protein, 75 aa, Zea mays
  Coding DNA Sequence Number=SeqID_20820
MARQPARRGGSRPTAIRFQALGNRRSSAGDQVIWLFEFYEIEDFVPLFGEGKCPLSDFLFILNSPPALYIYGRIS

SEQ ID NO: 64196 - protein, 78 aa, Zea mays
  Coding DNA Sequence Number=SeqID_20821
MVELFHGMLETGVEPDMATRENLMAVCGRSGFHGDATEPYFQGSQLDDAVKAYMDMRKSRFDPDELGCSTEAIREWAV

SEQ ID NO: 64197 - protein, 248 aa, Zea mays
  Coding DNA Sequence Number=SeqID_20822
  Gene Ontology: Mol. function=carboxyl- or carbamoyltransferase activity; Cellular component=ornithine carbamoyltransferase complex; Biological process=amino acid metabolic process
  Homolog annotation: Hit_ID=Q8SA97; Match level="QueryCoverage=44%, HitCoverage=21%, E-value=3e-22, Identity=54%"; Hit description =Ornithine carbamoyltransferase
MAPPIDVAGLRPRLGDVEAPPKLRSSLSSVAEVESEPLGRARRRPSAGAESEPWGRAERSSSSSGAEPKSEPWVGRSGVHRLPGLSPSPSPGSGGAEFAVFWDFARVRALGRAERSSPSSGTLPESEPWVGRSGVRRLPGLSSSPSPGSGEAELPMVPSAGPDCLSVSLCQVAPQSEWRRRRCPSVRPLYADGGYQLRIRSLEGTPNYGPRQYCNDEDLLAVISTSQKPNFYWDVHEALPRKLIRRHP

SEQ ID NO: 64198 - protein, 299 aa, Zea mays
  Coding DNA Sequence Number=SeqID_20823
  Gene Ontology: Mol. function=transcription factor binding; Cellular component=intracellular; Biological process=regulation of transcription, DNA-dependent
  Homolog annotation: Hit_ID=A2XNI1; Match level="QueryCoverage=100%, HitCoverage=97%, E-value=5e-98, Identity=67%"; Hit description =Putative uncharacterized protein
  Pfam annotation: Domain name=GTP_EFTU; Domain location=88-267; Score=- 86.7; E_value=0.1; Accession=PF00009.18; Description=Elongation factor Tu GTP binding domain
  Pfam annotation: Domain name=MMR_HSR1; Domain location=13-217; Score=- 13.6; E_value=0.019; Accession=PF01926.14; Description=GTPase of unknown function
  Pfam annotation: Domain name=Miro; Domain location=14-217; Score =33.7; E_value=6.8e-07; Accession=PF08477.4; Description=Miro-like protein
  Pfam annotation: Domain name=Ras; Domain location=14-264; Score =277.7; E_value=2.4e-80; Accession=PF00071.13; Description=Ras family
  Pfam module annotation: Pfam domain module=GTP_EFTU::MMR _HSR1::Miro::Ras; Domain location=88-267::13-217::14-217::14-264
MAHRMDNEYDYLFKIVLIGDSGVGKSNILSRFTRNEFCLESKSTIGVEFATRTLQTYGYDKLMFAGQLVKCNLIASFIVMREGAWLLAPLVGSITKQHNNFACRMCEHGAPRRKLFCGSWLELRGFPSSKLKAVWDSFFVVSVGVEGKTIKAQIWDTAGQERYRAITSAYYRGAVGALLVYDITKKQTFENIQRWLRELRDHADSNIVIMMVGNKSDLNHLRSVAEEDGQALAEKEGLSFLETSALEALNVEKAFQTVLSDIHQIISKKALAAQEAAGSGPPGQGTTINIADPSANTKR

SEQ ID NO: 64199 - protein, 64 aa, Zea mays
  Coding DNA Sequence Number=SeqID_20824
MASSEWARGRSGEEGIGPERQQLRRGAVGNGAADAHLRAVQRGSWGKRKEKQGKERVTPEFGGY

SEQ ID NO: 64200 - protein, 71 aa, Zea mays
  Coding DNA Sequence Number=SeqID_20825
MRLLRISGDLTWGQLLTLKELLLMWNLPWSKKSAEGQIGEARIQEIKDLITKGIFGLESVSQREKLKAYEG

SEQ ID NO: 64201 - protein, 192 aa, Zea mays
  Coding DNA Sequence Number=SeqID_20826
MTWSVRAGGRVSGGSSEVEAEPEPEPCGRARRRPSSEVEVESEPWGRARRSPSSEVEVESEPWGRARRSPSSGVEVESEPWGRARRSFLWSPRPDLAAVSLTLSSGTAAGAGQATLFSCQLCADGGYQLRLGVLGVPLIMVPDIIKTGNCNAHASRSNHERISTPLAVLLRSELVLPPLALGFCAAARSDSR

SEQ ID NO: 64202 - protein, 503 aa, Zea mays
  Coding DNA Sequence Number=SeqID_20827
MGAGVVERGERREREDDGRNGGRGAATLFPPGLGGGYGRGAGALGAGITTAGEWGLGGGERERKHAEVTTGGVEGGGRTRSHAWGHGGGEIRDDCSGVGEILARAWSRIWQEPQLTARAWGEGHYQNVSGQQGAHAVRRSPRVENKRKQLDKNELKERKKRLRLKVPPIQDAESDDEKDTEFVPGGDGSGDDNVGIVGGDENKGITKTRAIRYSPGKFIKLVNSLSDELKSEVVAKGFGGLLRFKPHLLSRKLLSWLMRKLNPETMKLEIGGGKEIQITRTQCLVCFWSLPNVGSDPPTMSDADARALRDELGVQFVGNLIDAYLASIYLLSLIDCRRGLSMMLYVDNLQHGLDTSPFSIPRCAFLDSKMIDAIANMDLRGDVPPGTTEFGHLRLRSITDTCYGVPIGALAILHAPVPAPAPVAVPNPTAAPNPVAAASVPVTTVKVPFDPGTGSGCRLEGGLSTQWNVKTLRVGRSGMEDPVSKCPALQIKLIPQISIEVQI

SEQ ID NO: 64203 - protein, 170 aa, Zea mays
  Coding DNA Sequence Number=SeqID_20828
MEQLGLGYLCKSRNWYLKLWQQEKVRRKNLAQVWRSSQEINYFQDGKYTTSCVIDSHVVNDALRLSIGFYSVIDSHVVVNDALRLSIGFYSVIDSHVVLKAKTTGFNTGEQCDGPRTELWINDGHHNSETTDQAKDGGKKSFEVPSAREKVKEAEEPKAKGEEEGLQSQG

SEQ ID NO: 64204 - protein, 486 aa, Zea mays
  Coding DNA Sequence Number=SeqID_20829
  Gene Ontology: Mol. function=translation release factor activity, codon specific; Cellular component=cytoplasm; Biological process =translational termination
  Homolog annotation: Hit_ID=A1Y2B7; Match level="QueryCoverage=48%, HitCoverage=45%, E-value=1e-105, Identity=72%"; Hit description =Leafbladeless1
  Pfam annotation: Domain name=eRF1_2; Domain location=177-299; Score= -18.2; E_value=0.014; Accession=PF03464.6; Description=eRF1 domain 2
  Pfam annotation: Domain name=eRF1_3; Domain location=273-383; Score =10.8; E_value=1.7e-05; Accession=PF03465.6; Description=eRF1 domain 3
  Pfam annotation: Domain name=zf-XS; Domain location=142-180; Score =51.5; E_value=3e-12; Accession=PF03470.5; Description=XS zinc finger domain
  Pfam module annotation: Pfam domain module=eRF1_2::eRF1_3::zf-XS; Domain location=177-299::273-383::142-180
  Subcellular localization annotation: CTP_CleavageSite=58; ConfidenceScore=5.36e-01
MGKKLKKPGQAGGRYWAQAPDHGAATRGNPRPPSQTSRHVLTPPLANGWQWQSRPRPSGSEVKKDDAPPSSSVPEVENFDGNNTSDDDDDDLSDDISDDYDSDASEKSFETRKTNKWFKEFFEVLNTLSLEQINEQTRQWHCPACKNGPRAIDWYKGLQPLVTHARTKGSTRVKLHRELAALLEEELSRRGTSVLPAGEQFGKWKGLQESTDREIVWPPMVIVMNTFLEKDEDDKFFINPATSQPNVVGLILADSANFKTELSQSDMFDQRLEAKILNAVDSSQYTGKYVFGVDDTLKALEMGVVETLVVWEILDINRYILKNSYTREITIKHMNKEQEAERSQSPEYMPTWQLERCCCPIHVMSWPSEERLSPEGAQLSKLSESKPYGRARQSPSSEVEVESEPWGRARRSPSSGVEVESEPWGRVRRSFLWRPRLDLAAVSLTLSSGTTAGAGQATLFSCQVGQWSGEVTAVTSVMSTEERASG

SEQ ID NO: 64205 - protein, 193 aa, Zea mays
  Coding DNA Sequence Number=SeqID_20830
  Subcellular localization annotation: CTP_CleavageSite=44; ConfidenceScore=5.52e-01
MAAAGGRKQQSSRLQAHVPSWDSERALSNGVKTTHPCSVPQTVRARTTAAPPTTRLIALTLQQDMDRERGCSERDPSPRRKQAPSPPTDQRLAPEGFDSRLRALGLRAHYWLAPEGFDSRLRARRARDDSGYVRYMVEARATLLRAVLANPAPAKPLTASTYQPENLEPDYAPGLRLVRMREQPDQLKHHETH

SEQ ID NO: 64206 - protein, 260 aa, Zea mays
  Coding DNA Sequence Number=SeqID_20831
  Gene Ontology: Mol. function=helicase activity
  Homolog annotation: Hit_ID=Q1EPC6; Match level="QueryCoverage=59%, HitCoverage=9%, E-value=5e-61, Identity=69%"; Hit description=DNA helicase homolog, putative
MEDPIYTPEVVCPTTYGIEPYGSSVTTCDWVIPEFVMTPFLPTSTQTKNILSPTKRVSAGMVKQGVDHTHTKPKFISNDDETDEDIEIDGTQDESTATDLPDLYDKVYSNVPEETHMLKSVPKCGYCTAKKFEYEPPGFCCRGGKVELAPLETPPQLRRLWDSTDSDARHFHDSIRFFNGHFSFTSLYCCLDSMTTNVRDSGIYTFRAQGMMYHNIKSFGREGGAEHKHLELYFYDDDPNLEHRYRKCRERMSTKRQICY

SEQ ID NO: 64207 - protein, 157 aa, Zea mays
  Coding DNA Sequence Number=SeqID_20832
  Homolog annotation: Hit_ID=Q6J9V9; Match level="QueryCoverage=33%, HitCoverage=18%, E-value=3e-11, Identity=62%"; Hit description =Putative uncharacterized protein
MVSQPLSVCRVPLCRGTLLVMDQIGYNAGRTPFTDISNTIITGNQNESNSLGPIVDAKERKRQKDRERYAAMTVEEKNEKNRKRHEAHQRNKGLLIEPLSSREDVNTDQTCEVVSFPDDCSTIDFTNFSTQDIADGDRQVNLDQDDDNDWLHRNETF

SEQ ID NO: 64208 - protein, 355 aa, Zea mays
  Coding DNA Sequence Number=SeqID_20833
MHRALPPFEPPDGERSRCFRLVVVGGTQLRGSWYLSAIVRLQGFSSGSLAASPRRWSPKTVTTSLMVGRSKSGCGLCPALSFKDLHHPGWGGGRAEPELYLPHGFVGHLLPQHSRERALTGLAEGADFDNAGPSGRKRRQLPRARFTGSAGSGAASGATFHHWAGYGYLPVVQAAVAPRAPGDRPRRCALLGRRSCSWAVLPLLRYDAPARRSVFARPGGPEWGSADGQTAAVVGAEVVAAEEVLVADEIAATIRAPGLWLFGFDSLSSPLEWGRGRGPYRSSVCPEVITAAVWPPGAEVVVAAAGAGVGEPPGVLSPRRPSNVGGCSYLRGWNRSSVCNGTLSAGVLFIAAVGA

SEQ ID NO: 64209 - protein, 249 aa, Zea mays
  Coding DNA Sequence Number=SeqID_20834
  Homolog annotation: Hit_ID=A2WKT6; Match level="QueryCoverage=93%, HitCoverage=93%, E-value=3e-46, Identity=48%"; Hit description =Putative uncharacterized protein
MELMPLTYPSSMKLLIDRKARRLLFAEASKDVVDFLFSLLVLPVGAAVKLLGKDGVAGSVGSLYGSVEGLDYAYVQPGAAKDALLRPAVLCSLLDGSSLLRLLPPPPGHHPTTTSSRSLLLYRCTSIFNSSCRTYITDAYGKACPTCGNLMTAAAQYLPPAAQMPAAAAGFVQGVVTYTVMDNLTVMPMSAISSFTLLHAFAVTDLAALQEKTVQLGYNEGFRDFSRASLQSKTVLSDVFLGRKDRGDA

SEQ ID NO: 64210 - protein, 414 aa, Zea mays
  Coding DNA Sequence Number=SeqID_20835
  Gene Ontology: Mol. function=aspartate-tRNA ligase activity; Cellular component=cytoplasm; Biological process=tRNA aminoacylation for protein translation
  Homolog annotation: Hit_ID=A2ZPD7; Match level="QueryCoverage=93%, HitCoverage=58%, E-value=0.0, Identity=81%"; Hit description =Putative uncharacterized protein
  Pfam annotation: Domain name=GAD; Domain location=263-362; Score =81.5; E_value=2.7e-21; Accession=PF02938.5; Description=GAD domain
  Pfam annotation: Domain name=tRNA-synt_2; Domain location=96-414; Score=244.0; E_value=3.3e-70; Accession=PF00152.11; Description=tRNA synthetases class II (D, K and N)
  Pfam annotation: Domain name=tRNA-synt_2b; Domain location=119-272; Score=-31.6; E_value=0.0049; Accession=PF00587.16; Description=tRNA synthetase class II core domain (G, H, P, S and T)
  Pfam module annotation: Pfam domain module=GAD::tRNA-synt_2::tRNA -synt_2b; Domain location=263-362::96-414::119-272
CLPFVITGIYDSWNAWLMVTVLPEYPEVYNIVNKLRVESVVAVEGVIRPRPVDAINADMRTGTIEVVAHHVLVLNSVTRSLPFPVTTSDTVKEKFPEEIRLRFRVLDLRRPQMQSNLRLRHNVVKLIRRYLEDEHEFVEIETPVLSKSTPEGARDYLVPSRVQPGTFYALPQSPQLFKQMLMVSGFEKYYQIARCFRDEDLRADRQPEFTQLDMEVAFTSMEDMLKLNEDLMRHVFQAVGDIKAAKPFSKVSDVFLGSSFKVFADTLESGGVIKALCVPGGATVFSNTDLKKGTVYTEASKAGAKGLPFLKVMENGELEGIGPLLSSLKPEKKDQLMELLDTKTGDLILFALGEQSSANQILGRLRLFIAHKLEVIDTSAHSVLWVTDFPMFQWNSDEQRYEVQENTIRRAIKR

SEQ ID NO: 64211 - protein, 236 aa, Zea mays
  Coding DNA Sequence Number=SeqID_20836
MLFFRHVGKTSSIPPPAGGLSAAIVAVTRRGKEYHVVAAVEGHELETPETEHRPGLERLLETAPLELDGKLFVNTQQSPTWRANCRRFDPGGSLDRRVNCRRVPQPRWVGARRSAKGGDRRKKGKPTTFVFVLRPGRKQQKSATSSPKNNEGINPEYGILSKSYPTKEKTLKGMLVIWESSKAKHQKAFVKQVIKEGNQIQGRFGSTDIEVETIPGLGFRRWWCPVFGDFYLFFTF

SEQ ID NO: 64212 - protein, 267 aa, Zea mays
  Coding DNA Sequence Number=SeqID_20837
MGRSEPGCDLGPTLSFKDLHHPCWGGGRAEPELYLPRGFVGHLLPQHSRERALTGLAGGSDFDNAGLIGGERRQLQRVGLAGSAGSGSALGAPSYRKSGCRADRTGGPPKTSCAARATFVFWGCPAFAPVRRLYMEVGAPLVREDPSGDLPVGRRLPSSVLRWWRLKKSSSPTGSPPPSALRASGSLALIACPRPSGGDVGEGIVAAASALRPSLLQFGHLERRLLSLLLERAAVGHLEPYRPAGPPMWGVVRTHGGGTRVPFVMAP

SEQ ID NO: 64213 - protein, 130 aa, Zea mays
  Coding DNA Sequence Number=SeqID_20838
MQAACNRTKEAHPFDFDASSMEAQAHTSCNRRAGYYVRETAPPLAPLPCLLDCGTGTGKGDTPKGILLREGNGPQAPLTDQRFEGWPLGGVQQPPQSARAPRPLLVRGSKAVPSEGFNSRLRPLGLRAHY

SEQ ID NO: 64214 - protein, 684 aa, Zea mays
  Coding DNA Sequence Number=SeqID_20839
  Pfam annotation: Domain name=TolA; Domain location=175-497; Score= -113.7; E_value=0.0016; Accession=PF06519.2; Description=TolA protein
MDSNGSLIRRYLHAKIGRMKDCFEGIKSFSKYDVSCTACIDQDIVNQKSFDNTRDNHGIVVWVIFELKVLLREAGSEDEPPVIGSTSFGSEVTPAWLLNEAISSKSGSEFTGGLGTTSNVPEDQPGGGDSEEIQLDCSGGDLDDSLDFTRTPSCGDDIDLEEGNLNRTPPDLRGSTRSIDDILEMIYSPEHFASIDGESPPNSQPTRAPRIAVRKRKASSNPPGNDQPPVHPTAQDHITYSRRSDRSIQVANTQKAEAEKKKAEIEMKNAEAEEAEKRKAEAEQADKKKAEEAENKRKAEAEVAEIKRKAAAEEAEKKKEVEAENKRKAEAEVAEMKRKAAAEEAEKKKEEEAEDKRKAEAEKAEIKRKAEAEEAEIKRKAEAEEAEIKRMAAAEEVVAIQKQLKDNIKALKKPVPAAKLKKMFQLQMSKEYAEQRQQYEDRLNMLRQEAKAEIDSLEKSIDGQAGPSSSFDDIQFPAESDDDINNLTQPIRLSQDEVSVGQADFSEFQRMIFKRLGDRVLKKPREYISPFKIPRNRPEIPLAKAVALRRKIASDPELKRRILLEFGLLVGLTGEEILTSFSNDTLGESGIIDFFVHCMRHDDIVHKEERHKAVFAKIPIIDAAFQKVSNLKLPRFKGPIYRCELLHYEIFHPLNQAEIPGSLDKFRIGGRPLPIEWDSSQSNN

SEQ ID NO: 64215 - protein, 225 aa, Zea mays
  Coding DNA Sequence Number=SeqID_20840
  Subcellular localization annotation: CTP_CleavageSite=20; ConfidenceScore=5.15e-01
MKGTTVASATRSCRRSQRPRQTAESSRSTSLPLDGSWQRGREGATRRRIWRRKADSEPVEVGADDDHVLLLTSEVRSPRKRKRPQIPLRFAAHLIMASSKEDNMKALLKVLVDCAEDATKTLGGLVDHALDHMHDEEILARTLYAIKDKLELLQQDALEAKVQAFPEIVKYDGDDISVEPTSPSTPPTVTEPSVDEEEFYCPDVSDEWYFSDSDRSTRNSYWNIY

SEQ ID NO: 64216 - protein, 124 aa, Zea mays
  Coding DNA Sequence Number=SeqID_20841
  Homolog annotation: Hit_ID=Q9M587; Match level="QueryCoverage=49%, HitCoverage=18%, E-value=4e-08, Identity=55%"; Hit description =Prohibitin
MSRLRSGTSFYLYQMVGDSEVQIGEPRGPDNLLNDWHKVDVSSSLNYSPLQNPRRRSRPLDPVSQRLRLCLDPVIATQLLQLGDHLPTIFTSLIFEYDDKVLPSIGNEVLKVVVAQFLSELPLG

SEQ ID NO: 64217 - protein, 55 aa, Zea mays
  Coding DNA Sequence Number=SeqID_20842
MAQWLTRSMLAGGRRESGDRGLASPAKQTSIPRSGSFTENLSGFGAIFKVNTVDL

SEQ ID NO: 64218 - protein, 62 aa, Zea mays
  Coding DNA Sequence Number=SeqID_20843
MAVSPFLLPGNRWGRLMCVGTECPPTCRSLEDMVAGVTWPSILPPGWTVEWDPTSVEEEHEE

SEQ ID NO: 64219 - protein, 120 aa, Zea mays
  Coding DNA Sequence Number=SeqID_20844
MVKNFGSKTVQIAVNAVVTSHLLVCLYSAAVDRKDQTVTLQGGTDTISGNGSFLGNELREETTDQAKDGGKKSFEVSSAREKVKETRNPKPGVKKKTCKVKVDCNTRVLGVQSPGVNIIT

SEQ ID NO: 64220 - protein, 140 aa, Zea mays
  Coding DNA Sequence Number=SeqID_20845
MTSPTPASGGDTRFSSDFLSHDGFPSILWEVLNSAGYPMPPLYTVQLYEEHQPGWRYLDPETIGFRTDDTTEAAAMKTLTTFCGYHPLEMVMHHLGLFPAEKKDDPMWCNRVSHVKGVWEMYPNLVGRVTIQCMSALYRL

SEQ ID NO: 64221 - protein, 95 aa, Zea mays
  Coding DNA Sequence Number=SeqID_20846
  Homolog annotation: Hit_ID=Q8SA85; Match level="QueryCoverage=100%, HitCoverage=3%, E-value=9e-09, Identity=80%"; Hit description=Prpol
  Subcellular localization annotation: CTP_CleavageSite=66; ConfidenceScore=5.48e-01
MASQGDQVMAPSSMKLVLPITGGSSSEPANKKQKKESQRRSPTLAPTSGELTSTIELMASFNNQVVAPSATKLVLPITSGSSSEPANKKQKKEAQ

SEQ ID NO: 64222 - protein, 889 aa, Zea mays
  Coding DNA Sequence Number=SeqID_20847
  Homolog annotation: Hit_ID=A2XE49; Match level="QueryCoverage=81%, HitCoverage=61%, E-value=1e-163, Identity=45%"; Hit description =Putative uncharacterized protein
MAASTWIRPGRPRQRRNQRRREGGGVGPAGQGPAPDLARGVDDTGDGRSSKGRGCTRPGDGSTAVAAQHERGEEDLRVGAQTPGRALRWGRAWRGSVLRGDDPRRVLACGSIERGPVRLEVSLDSRDGGGERVVPGAGRGGGGEHAVEQREERSLFTASVHVKVEKAFREGTAQQNAHSIFVSLALKLLEQRVHVACKEIITLEKQNKLLEEEEKEKREEQERRLKRRTREREKKNRRKERLKEKENNKGKKLVESKSRNDILSSAPSNSTTSINDYSTNTLDSRDSVKEDEDSAEVVNLCSPDSCMNQSSCTKINGENSVHFNAVTEFSPMDSSDLCTSDQSKSSRRGPRSREDFPQDQSCWYDDCGDESGRIGELQWKSRERTRSINRSRNAASTSNNRTRERQSYNSCSCGHLEDYGVMDSCFLPTARSGKETKIARKSGVEKPRVQYHRCYTLDSFIVSKGNRAGSTQKNAIPKQIWEPMDARRKTKLHNTVHDSGSVNDVDSLKHVVFDNSGSQNFGVGCESQPQASESSRDECNSDQPCANGGRNQTISCASSTLMVNQQNCCAGNDEGSRHDEELMMNSAGSDSSSSCMSEGDRESSSSSTTSSSAQNPESSSESEESPERINSTVGTQSSRAAASRSLLEACAGNGFREYQPKATGLAHNDMFGYNVSPVQDQLLHYQSMYPPQHRPITMGFHDGSWAAPTNGNFQYARPSHLYSSPLVFGIPGNHFIDYPYMAPAFSHIPPEPIHKAASSFRAMPLSLPFQNGHRQAASLTQRDMNLERRPAKLTKPTGKDPPENKNKSGLKDLPEDKSKSWDADASFSLFQFNLPIASPVTPSSKDKSGELAARTPLAQVQAQLCSREQADVKEYSLFSSKDNGIFSFM

SEQ ID NO: 64223 - protein, 99 aa, Zea mays
  Coding DNA Sequence Number=SeqID_20848
MKAKTHHQPIKEYNGSSSLISCEKQTIRIEFYPCKYVQKLDTGIRTLILIPILSHRERIPMDPCPQTIIILLSKWIQPIPDLARVLEKSLDFYRDPDLA

SEQ ID NO: 64224 - protein, 199 aa, Zea mays; identical to SEQ ID NO: 54908
  Coding DNA Sequence Number=SeqID_20849

SEQ ID NO: 64225 - protein, 208 aa, Zea mays
  Coding DNA Sequence Number=SeqID_20850
MGKKSACCSRTCGRSAERHRSRGEEGENCRGRRHGEFTARARTRGGPRHGWSRGVCSAYSHHGWVLVKPRHAPVRAGHFQSPRGVFLQEKNARGAQIRCSMVGKKIDRARRWLHEPGCGQVHGNYGLRPGVQGWCLEGRSSSRQEQGRGRTRLGAQGEECHGGRCGGRGRDLRIGHEREGTKLTCRTREGEHRRLSFTHGESPLDLRV

SEQ ID NO: 64226 - protein, 348 aa, Zea mays
  Coding DNA Sequence Number=SeqID_20851
  Subcellular localization annotation: CTP_CleavageSite=2; ConfidenceScore=5.18e-01
MSSSSLMRRVFPPSKPPDGGYPPSFRLIIGGTQLRGSWYLSAIVRLQGFSSHSPVAPLRWWSPKTVTSSSWMGRGKPGCDPALSIGGVRHPRWGGERGEPGLYLLRGSADHLLFQLLVVAIVLPRCDGDVLQSCRGRRTVAAQLGCNIPSFPSHSRRGRQRGSAGALGSGPLFGFDGWFASLERDHERSPPVAASTRDHGCCCRGRWRASRCSLSRRLEVAHTRGDGTGVPFDPFFEVVKKHERYSGKRDLFSRKISTQRGSPPLLAPEGGSGFAENFGDDEWPLPGGRELVPPLGVLPAAEAPGRPPGGLGTGPLGRGSVAGTAGTAPSVVRPCPELLPAGPAILLG

SEQ ID NO: 64227 - protein, 122 aa, Zea mays
  Coding DNA Sequence Number=SeqID_20852
  Subcellular localization annotation: CTP_CleavageSite=37; ConfidenceScore=5.38e-01
MRDAARCALSQYCSLFSGVANGINLRYYPCRSTSSTRSVIVSPVGEGNPRLNSTVNLVDVLNTELDYALDELNRARAERAERRHQEDGSLAPTRTRHPYRSPPRGHHAYGTRHYRTKINLDP

SEQ ID NO: 64228 - protein, 164 aa, Zea mays
  Coding DNA Sequence Number=SeqID_20853
MADPPSSMCIVLAARVCLCEWKIKKLLPVHEVEDGNRRSGFDDQVIKLFEFYEVEDLEHLFGEGKDLGTGVVPRLFPESRGYRFGYVRWSLCSGHFQHPHSEDPREKPHSDDLPDHLGSDQWGVALLGKKGNHGSVKCATSAKCYETDISFVLTVMSDLGILFD

SEQ ID NO: 64229 - protein, 139 aa, Zea mays
  Coding DNA Sequence Number=SeqID_20854
MGKSNKRKREPTPPSEDFGDSEYSEEEFSSESRGVSGSHDSQGIAAEVWTYIRAVERSGLEGSDESEYSSDEEDSDGGEDEDDDDDDSDDDDGGDGDGDGSGSGGGSSGGDGSKGSTRGGSSKGSTRGGGGGSSSKASG

SEQ ID NO: 64230 - protein, 154 aa, Zea mays
  Coding DNA Sequence Number=SeqID_20855
  Subcellular localization annotation: CTP_CleavageSite=71; ConfidenceScore=5.56e-01
MAPSSNSTSPAAAISPSIVSAPETNPWPPSALVLDPPCAASTDLRSSAGSQQGAPLLVVLRGARRLFVKMRSKPRAAGSLFREAQWTARRRRSPWFAVFAQPLCRRRSPPERNPAFCEKKANHSTLVGCLERCTNRNHRHSCKHRLGLFMVRVG

SEQ ID NO: 64231 - protein, 176 aa, Zea mays
  Coding DNA Sequence Number=SeqID_20856
MAGEHREDKEGECFVRFGHGGMTPSNITIKGWKKISRLASRLGLDQARLGSMEGSFVIRTSYYSEVEGFPHLLRSCALRIGIRKKPEYIWKDYRESEIERCSMAVHLGESRNYPNHPPFQVTATGHRFPDTCQNAAQRALRQLCQNYSREVSECNTRALRDKVRCISYIRQRRQHI

SEQ ID NO: 64232 - protein, 246 aa, Zea mays
  Coding DNA Sequence Number=SeqID_20857
MGKEDLTSRDHPPVARGEKGQGPTRGTHLSSFIKEHPREQAVCLIFVGTGDPMGDPYPYGYGYGDTPSLLPPSNKNTPTWRKRLQALSGRDPNEDDPTIVYMVGYLHTLDNHYDNLFFHYTHLNSQVESLEQQIKELKEEKVSLQESLEIAEGEEANTREAYRTLKMDYAKKLKKLAPAKKIRKRTKSRGCQTDRKEEAPPTLPPSRIENLSDVEEMSLASLDDLLREFGDTLEREFGSTLENARS

SEQ ID NO: 64233 - protein, 53 aa, Zea mays
  Coding DNA Sequence Number=SeqID_20858
MAPKRKTANSSAAVIPAIDPNSQLPFAEHSATERQSLPGISVSRAGRLNSGYQ

SEQ ID NO: 64234 - protein, 66 aa, Zea mays
  Coding DNA Sequence Number=SeqID_20859
MWGLDISHPSLFSFEHFCSALCADVWAVGVIRAWLHRGALSSGPSNQSHRAIARRSLSCSAESRWS

SEQ ID NO: 64235 - protein, 130 aa, Zea mays
  Coding DNA Sequence Number=SeqID_20860
MEGKEEGEGEGADRRGAKRPCETPGLRWGGERVGRGAAARKREGGEKRGRGCAGGTKIEELHGQQWWESSSENKTSPEPREKMSFCDEPTIRSTNQRHRDKALDEMDAVVPLDSTDDTLIESNCSPELSL

SEQ ID NO: 64236 - protein, 124 aa, Zea mays
  Coding DNA Sequence Number=SeqID_20861
MDELGFFLRHLGGEELSEEKALELEDNAKAVGYSPRAMLFGGGDKMLMCVPNDDESKIMKNITGSIGDTVGALTWIEKYLGEVEAIINAQSDYCAMIGSCANIKTSSKDVLNDAKRFFFKVKNK

SEQ ID NO: 64237 - protein, 150 aa, Zea mays
  Coding DNA Sequence Number=SeqID_20862
  Gene Ontology: Mol. function=hydrolase activity
  Homolog annotation: Hit_ID=Q2QUI2; Match level="QueryCoverage=66%, HitCoverage=33%, E-value=3e-28, Identity=56%"; Hit description =Phospholipase, putative, expressed
MASIAYSQTSIKNTDTAARLVHHGYVVHGIDHEGHDKSSGSKGYLSSFGDVVRDCSDHFKSVCEKQENRLKKRFLYGFSMGGTVVLQLHRKDPLYWDGAVLLAPMCKPTVVSKEHKMRCEHKVASKNGVMEHGQEGVRQWQPMYPLDNLV

SEQ ID NO: 64238 - protein, 406 aa, Zea mays
  Coding DNA Sequence Number=SeqID_20863
MEVRCQTSFCQNEDGFPKLLRACTVRLGIRSQPEYDGREFVEHDTEKCVVTVYIGSSPHHVEWSVTAAGHRFKDTCQVVARKALRALCQIYEEEMIARAEEAEKRNRKLHVDLTIAQARATALESCEVIAVEALKQAKDEHIQKLMEAYLVTHNQHRALWIQEPASSSPVQPIRAEDPQILEGHAVSIKGEKKAWELPEGAIVLEGILVSPKAMDKQEHPESSQDPPPELFEPLTMKKIPAPSREIKEEAAGTPPAPPPSEELQESVLLEEEFDPVLPSQSPPEENPLVGRAKRKKEEVKSEKRKEDSEEKIRRRFSQNQPCVSHLSAACSSSNSRRRPRNTLVMRYFKEFKSPRFKSSTLILFKWGSVPVRFLPWKKKKSCSKLVEDQIIEDYKFLDERWSPKFR

SEQ ID NO: 64239 - protein, 139 aa, Zea mays
  Coding DNA Sequence Number=SeqID_20864
MGTEQEHGREERARRAEQAAEGRGWKKWEEEAERRASSGSRSRAQGGCSTEGKQELGREEESRAEEGDGRRAGGGSHGPNAGELEAGYGRARAKGPGARCRKERAAGRGQREQRRSPGSFARERDGRGVQGKKKPGCWR

SEQ ID NO: 64240 - protein, 1263 aa, Zea mays
  Coding DNA Sequence Number=SeqID_20865
  Gene Ontology: Mol. function=ARF guanyl-nucleotide exchange factor activity; Cellular component=intracellular; Biological process =regulation of ARF protein signal transduction
  Homolog annotation: Hit_ID=A5BJQ1; Match level="QueryCoverage=97%, HitCoverage=87%, E-value=0.0, Identity=60%"; Hit description =Putative uncharacterized protein
  Pfam annotation: Domain name=Sec7; Domain location=539-726; Score =359.7; E_value=4.9e-105; Accession=PF01369.11; Description=Sec7 domain
  Subcellular localization annotation: CTP_CleavageSite=35; ConfidenceScore=5.15e-01
MGGVRAASPSGAGSGAVAGAGSDHGAPRLAMACVLASEAATVLAVMRRNVRWAGVRYGGGDGGAGDDEHLDHPLVAGLKVLRRRAAAWGQGSWAGVEPLLYLRPFLDIVCSDETGAPITGAALSSLHKILTLDVVGPGAPGAAGAMAAVVDAVTACRFEVTDPASEEAVLARVLQVLLACVRSRAAPALANRHVCTIVNTCFRVVQQAGTKGELLQRVSRQTMQEVIRTVFARLPDINVTLLSDEQVAGCKNPCLGAEETENGKSDYVCLNSSGDEVGDGSGVMQDKDLMEPFGVPCMVEILQFLCSLLNIAEDIELNPRMSPIDFDEDVPLFALGLINSAIEFSASSIHRHQKLLAFVQDELFRNLMHFGLSMSPLILSTVCSIVFTLFYHLRHELKLQIEAFFSCVILRLAQSRYGASYQQQEVALEALIDFCWQKEFMAEMYANMDCDLQCSNIFEELANLLSKSAFPVNSPLSALNVLALDGLVAVIQAMAQRTDNAPQHHDQTVPEISEYFPFWQLKCESSNDPDQWVKFVHQQKSIKTKLMIGVEHFNRDKKKGFEYLQAVHLLPEKLDPHNVALFFRYTPGLDKNLLGDYLGNHDEFSIQVLHEFARTFDFKDMNLDAALRLFLETFRLPGESQKIQRILEAFSERYYEQSPQMFVNRDAALVLSYSVIMLNTDQHNVRVKKKMTEEDFIRNNRRINGGNDLPREFLSELYYSICRNEIRTIPEQGAGCSEMSFSRWVDLMWRSKRTSLYIACDSYPFLDHDMFSLMAGPTVAAVSVVFDNVEHEEVLTGCIDGFLSVAKLAAFYHLDDVLNDLVVALSKFTTLLNTSYIDDPVIAFGEDTKARMATEAVFTIATAYGDHIRSGWRNIIDCILRLHKIGLLPGRLTGDTTDDQESSSDSLPGKHTSSAPQVLPISTPRKTYGLMGRFSQLLYLDADEPRSRPTEEQLAAQRNASETVKKCQIGIIFTESKFLQADSLSNLARALIQAAGRPQKITSSLDDEGVAALCLELLITVTLNNRDRIVLLWQDVFEHITHIVQCTVMPCNLVEKAVFGLLHICQRLLPYKANLVDDLLRSLQLILKLDARVADAYCENITLEVTRLVKANATHIKSQMGWRTIISLLCITARHPDASDAGFEALVFIMSEGVHLSPANFILSLEASRQFAESRLGCAERSIHALNLMADSVNCVVRWSQEVREAGGEADRILEGIAEMWMRLVQAIRKVCMDQREEVRNHALLSLNRCLVVDGISVFLLHG

SEQ ID NO: 64241 - protein, 95 aa, Zea mays
  Coding DNA Sequence Number=SeqID_20866
MESHDLRAERESRLVGGDENDGFGIDFGNGKWYSFRLERMARLRHTARKSVIPFLPSRLAERPLRRPVTGQSSHLERLHHRLHEEQECQRQEPEQ

SEQ ID NO: 64242 - protein, 228 aa, Zea mays
  Coding DNA Sequence Number=SeqID_20867
  Subcellular localization annotation: CTP_CleavageSite=23; ConfidenceScore=5.27e-01
MPPSPSSDAVPSLPPPPPWGGKSAGSSSARVPCSIGLDWESYELGHSKITSRRGSNSPTDVKCPSIEVFAKNYCLHWQKRSSGGGVDQFGSYTFTLKTGKTKEKVVQLAPCAKNKWRDGQNWFYVRCIKGKGWPRASTLSPFQFEAFPHFAVEERDQNDYSFDFAVVACIGQDLVDEYLACGVLSLGQGWVVGPVARKHFTSFDRQILSPIFTIELRDHSRDIFFAET

SEQ ID NO: 64243 - protein, 79 aa, Zea mays
  Coding DNA Sequence Number=SeqID_20868
MEKLNLGTIQQGTLTNVKLESVLLQRIIDAQRTDKAEDPKKNTFEGSSQKQAPKLLSIKLRHKDKSQDEGSNRLKDELT

SEQ ID NO: 64244 - protein, 191 aa, Zea mays
  Coding DNA Sequence Number=SeqID_20869
MADEMLERMWSPYAVEVARKRSVAELERARTAYEEQAYKGVSGAAAVRAIFETATSVAPPPLLLGSATPTAEIRTTNFMFHAAAIESSVDDDDLGIFTKMDESSNKDLNFFIAMDIMISYAFGAARGPSIFEADKILGPVRFWWGPFGVFCAWDCVNESVLGLFSKGRELEIMLHNCREVGLIPKEEPPSP

SEQ ID NO: 64245 - protein, 383 aa, Zea mays
  Coding DNA Sequence Number=SeqID_20870
MESHDLRAERESRLVGGNEIDGSGYDYGTGKWYSFRLERVVSIATTAQEKMKPWKETSRSSKTMTSSRCGWLVLDTLHESPSSPSYPPALLSVRFAVPWPEIESVRSCSPVLPLEAPPASPLGALASEVAAGGDPNDGGGNDSSSHDTDFSADHEPEGWVARPITRDAARGCHFHDALDTLLRQALNRRTWSIEYRCVVYQHSRGVYPDRWEATCLVRRPENSLWGAEVCSEHYSISERDSAEAAMQDVAWRALSHYCSVLGGVANGLELKYYPRRPSGSTGGVIVSLVGEDNPRLSSTVNLAAVLNTELDHALDELSRARAEIALLRAERAERRHLDDGSPAPVGTQHSYRSPRRGRQSYGNPDCKTKINLEPYVVRVGSCN

SEQ ID NO: 64246 - protein, 116 aa, Zea mays
  Coding DNA Sequence Number=SeqID_20871
MGRFGWERSEPGLRPPAPPSASRIFVILAGAEGERALTVLAEGAGFDNAGSSGRKRRQLLRARFAGSAGSGAASGATYRRWAECGYLPVVRAAVAPHAPGDRPRRRALLGRRSVTP

SEQ ID NO: 64247 - protein, 377 aa, Zea mays
  Coding DNA Sequence Number=SeqID_20872
  Gene Ontology: Mol. function=transporter activity; Cellular component= intracellular; Biological process=transport
  Homolog annotation: Hit_ID=A2Z2F2; Match level="QueryCoverage=64%, HitCoverage=53%, E-value=2e-95, Identity=62%"; Hit description =Putative uncharacterized protein
  Pfam annotation: Domain name=CRAL_TRIO; Domain location=53-216; Score= 83.5; E_value=6.8e-22; Accession=PF00650.11; Description=CRALTRIO domain
MMLRFLEARKFKADKAMLMWSKMLKWRKEFGTDTILEVDFVFEELDDVIRYYPQGYHAVDREGRPVYIERLGKVDPNKLMQITSMDRYIKYHVQEFERAFRERFPACTLAAKRHIDSTTTILDVQGVNFSKTARELVHRMQKIDSDYYPETLHQMFVVNAGSGFKWIWNSVKGFLDPKTSSKIHWQGLLSDTSNAESGSDVDDSGASFVHKVKGTDRVTYLSYDDQSHPDMAPESYHRVRRATGMEHHKPMAGFSQYSANRRPVLAFQFKQQVAISICFLFQFGLVSVIGSLGFFWVDDMDRHKLHRREEAKSQTCPLSSTDGNQVATAPSKFSAAKSWLQSIADGIHFKVDLAVAIPQARIVTTEIGEMQFEHQKM

SEQ ID NO: 64248 - protein, 194 aa, Zea mays
  Coding DNA Sequence Number=SeqID_20873
MEGAAAARAKGCQSTTGQQERRVTTMEKGWRRCRRAHAQQCVPYWYSLLVAQESNGRQEAAYDVQAPASLAGHSSLRGRKGLQSQDTEQYSFARDREADKKKRTGNVDTAKRTVTGTKVSPRKKCLDGNRTPGKTSGASRARPSRPRRAQTTMHAVSARRAHPSASNCALDGTGRLSPGGSVDGLGAFSLATNL

SEQ ID NO: 64249 - protein, 315 aa, Zea mays
  Coding DNA Sequence Number=SeqID_20874
  Subcellular localization annotation: CTP_CleavageSite=56; ConfidenceScore=5.24e-01
MQAACNRAKWTRFSDSQRASTEAQAHASRNRRAGCCMQATAPPLAPPPRLFGCGTNAATRGDPAAPAWRDGQYGRKDRGRGIPQKGSFPVKEPGSEPPTDQRFEGWPSEGFNNHLRSRGPDTHYWLAPEGFTVASDAERGMTRGDRVRQITRRYFWACLWAPSRPPTNGARTSTRITRLQLTGDTMFGAHRGARTRAKTRKTANSASPDPGLGLGLRPGRRRTPLRPTQGSDSGTAPEDDELRFARPQGSDSRPGLCPNDLPPAPHPRRLGARPPKTDSTSSRAQLAGPGIPGPLAPRRRPRADRGAYPGGRPGL

SEQ ID NO: 64250 - protein, 234 aa, Zea mays
  Coding DNA Sequence Number=SeqID_20875
  Subcellular localization annotation: CTP_CleavageSite=39; ConfidenceScore=5.04e-01
MAAKSTQGPPYTDHSPTALASFGGTPRLLISAGNPHQHKAAKESPPRPTPGLGLDLASDDNLRLARPQGSDSTSPRTTISASPDPRARTRPRLGRRSPPRPTPGLGLDLASDDDLRLARPQGSDSTSTPEDGLRLARPPGLGLSLNLGGVTTSLGPTTPQGEAIITLPLASPGYGEQDRCPIWLASVKQVMMAPRVLHDNGGSQPLTEARIRQQGSDSCASKGLKRSSDGHDAT

SEQ ID NO: 64251 - protein, 73 aa, Zea mays
  Coding DNA Sequence Number=SeqID_20876
MARWLRLNRTSGLGEAASRRPLTALLYTLVSSLDTSSLHPRQGLGTKGKAWGPVLRNGCPFHRVVRSLCGQLA

SEQ ID NO: 64252 - protein, 338 aa, Zea mays
  Coding DNA Sequence Number=SeqID_20877
MTLMQVVWCQPQDAVVDDLKNDGHDPWMLAKRPGCSPHRWSSRRMTTSLVVGRSKPGCGLPPALSFKDVHHPCWGGGEDGSEDLFVHAGAATVCWYGTGAQVAAVVSVEVVVAAGEAPHCRGGCLRRRDRQCHLLPDLRLFGFNGLLSPPVERRGRGPSCSGTHVGMIAVAGESSVQRRPSPLVLMRLPLLVSRLEFVILRPFWLTIRDQAERLHGFRTPPGDQCLFFKTGPPVRWTHRTIVLNTRTPVMEWWSVQGFGLDVSRLDTSVYKRAVNGLREAASPRPGSGKQAVCPDPLDGGSKYYDAYQRVVEHAGPRYGTRLSGYMVPDHPRRQVSLL

SEQ ID NO: 64253 - protein, 451 aa, Zea mays
  Coding DNA Sequence Number=SeqID_20878
  Gene Ontology: Mol. function=nucleoside-triphosphatase activity; Cellular component=nucleus; Biological process=polar nucleus fusion
  Homolog annotation: Hit_ID=Q6YU01; Match level="QueryCoverage=87%, HitCoverage=39%, E-value=1e-109, Identity=55%"; Hit description =CCAAT-box-binding transcription factor-like protein
  Pfam annotation: Domain name=CBF; Domain location=11-178; Score=28.3; E_value=1.1e-10; Accession=PF03914.8; Description=CBFMak21 family
MADLESIVRNLGLSLQLEYTFWYRDASLIEQLPLMVALQRPPQYACGCLFILSEVLKAKPPLWGIVLQNESVDDGDEHFEDILEIPEDSSVASAVLHKHNEKVAAHEKHNLDAADGIDSVKQVNLVDENNASTDSSRQHAFYDPRHREPSYCNADRVSWWELTVLASHVHPSVSTMARTLLSGNNIVYSGDPLTDLSLPAFLDKFMEKKPKGNRIAEGRWHGGSQIAPAKKLNLNHHLIGEELLELAENEVPPEDIVFHRFYLNKTGTVKRKTKQKDSVLDEDAGELLADNDADEASDESGDEILDLGDGLADDGEYDYDDLDSNAFEEEKDLLRDDSDVEFDDVSDDTASGDEGSENDDDIPILAGDSDGNLSDDEMVDAGKGGVSYTKKRRAGKKSGLSPFASLDDYEHLMVGDADATTAKRKHMATGRAGGEKKPKLRPRKKRSRSSE

SEQ ID NO: 64254 - protein, 268 aa, Zea mays
  Coding DNA Sequence Number=SeqID_20879
  Gene Ontology: Mol. function=binding; Cellular component=nucleus; Biological process=polar nucleus fusion
  Homolog annotation: Hit_ID=Q6YU01; Match level="QueryCoverage=63%, HitCoverage=16%, E-value=4e-57, Identity=76%"; Hit description=CCAAT- box-binding transcription factor-like protein
  Pfam annotation: Domain name=CBF; Domain location=116-240; Score =31.7; E_value=5.5e-11; Accession=PF03914.8; Description=CBFMak21 family
MGMILDGGEHTGKKRHSGVVLMSSGDTKGDTYSKDSKKKVGKIEGGNNKMDSRSKGNNEVGSTAGSDLELDSRILSALLTGVNRALPYVASSEVDDIVEVQTPILFRLVHAENFNVGVQALMLLFQISIKNNIASDRLYRALYSKLLSPSAVTSSKPELFLGLLVKAMKNDVMLKRVAAFSKRLLQATLILIIWSTIMRSRAVVGHNHHQHLVILGNNNALIMGFLFSRSLLFIIEVEIKPCRQVYALVILGKLWPLSDRDAPIASST

SEQ ID NO: 64255 - protein, 243 aa, Zea mays
  Coding DNA Sequence Number=SeqID_20880
  Gene Ontology: Mol. function=metallopeptidase activity; Biological process=reproduction
  Homolog annotation: Hit_ID=Q10PV8; Match level="QueryCoverage=75%, HitCoverage=40%, E-value=2e-76, Identity=70%"; Hit description =Expressed protein
MVSSDPDGNGGAPDVSELFCHYNSLYFRDSLGSCAVSWTEDPLPDCDVSTCDYYPGGGGCIILLSKSLCGSHNGSDLKNALLHEMIHAYICIKDNNSNHSDHGAKFQKLMNTINLSSVADPHRPVDGYSITLLHEIHKKYYHYKCQSCADFIKSTNMRGPSGDDCIERKGVDDPCHNSNCHWHRYGYALHLIDCNIWSFLSTLSKVEQLRYNNETNVKQWLSNILSTVLSPRSGEDIYRVTKG

SEQ ID NO: 64256 - protein, 116 aa, Zea mays
  Coding DNA Sequence Number=SeqID_20881
MEGDRALDKLQDLSGGAPDCPIMVRWQSPKELQAKTLSSSWLVKENGTAMRVVWDALSQIIRGTEVLFALPSYHQWGLVYAARSAEGGFPLGEECSTFRKPNGWIQPQGIFVKATQ

SEQ ID NO: 64257 - protein, 159 aa, Zea mays
  Coding DNA Sequence Number=SeqID_20882
MLLKRKPTFERASSYRIKGKVLINKERNKKTKQLRRRRIAQPSQDIHGCVVKKLETGETAASVKLHKKDVPKAKNEEINMNKEKDDNPFKGLTSVLSVEQVLNAKRTGFNTKTTDQAKDGSKKSFEVPSARGKVKETRNPKPGVKKKTCKVKVDLVKSY

SEQ ID NO: 64258 - protein, 149 aa, Zea mays
  Coding DNA Sequence Number=SeqID_20883
MNKHTGIRDAITNGTPVPPPQVRTTPLRGGRPTEQRKADERHAVTCSSSGDDDDFCSGGSNSGSTDPRADAAARRPPPTTKLVRQGRTEGRRVGGQSVAGPGYRTGRRTSSSCRGGRRRRERLRSHSRLKTGHAAAASATDNNRSSPHH

SEQ ID NO: 64259 - protein, 101 aa, Zea mays
  Coding DNA Sequence Number=SeqID_20884
MQVACNHTARAHPLGFVASSMDAQAHTSCNRRAGYYVQATAPPLAPMPRLLDCGTGVATRGNPAHGPTVPIEHNDHGSGLGKGIFQKGSFSTKEAGLEPSY

SEQ ID NO: 64260 - protein, 672 aa, Zea mays
  Coding DNA Sequence Number=SeqID_20885
MPASPAKGVACPAEELMRRDERFARRPLRVRESFEERNTGALSLLCERGLPCRFRRGREPAGDLTAASARLPRVAALVPQSRRRDIGESGARLTCGTQPPRHRRRALKHIGGDFARGAWGYEWGEPPFKKGVGLPGSSHAFALSSCIAPFHLPSPQMGRIRVAFVLLLLEEHDLAGVGALQPSLGFKDFHHAARLHSLTNGWGGGRGELGPTFAWAGDPLLPPAFGGEGHPPAVRRRRPPAMRGKANCCCLDRVQLSVLHPGRRSCRARVAAVTGLAEGANFDNMGLVGRERRQLQRAWHAGSAGSGAASDVASCRLVRAWLSVHRTGDCRAARRSGISTPPHGGRCRPVREELSGHLSVQAGVVAIRRHGAVAQVAAVIGAEVVAAREGFSAGETVGATCGQTPGSLAVMACPRSSCGGVGEGLSTAASALRSSLLLFSRPKRRSLSLMVQWSPASHLEFVFPQALRCGDCSYPREWNRSPNLRSLCDELKLEAAVSARTEAVSARKEALSVREQVASQAEEVQQRRLELGQVIRERDQSRSHAAEAVSRAEVLGGQSAEATERLAGVSARARTLAESLAVRVRARCWRPPLVWRSEPGRLRLGRIPPGVETTPRVLLLPLPTSEPAETVCLKITYPSESYFSRKVMSESKAVLVENFSEENFDAEGVPPF

SEQ ID NO: 64261 - protein, 197 aa, Zea mays
  Coding DNA Sequence Number=SeqID_20886
DYSLSPQQTVESRRQPSSVPQLDVPPAPPQGTLATGGDPDGDDNDGGSLSHNIELSEEQEPEGWIARSITHDAASWLSFPRCSRHLTVLSLRPTHLVYRVPLCSLPAQSWVIPGPMGATCSVCHPDDHLQGAEAYSEHELGKARAEITELRAERAERRHKEDGFPAPVGTQHPYRSLPRDHHAYGTPDCRAKIDLEP

SEQ ID NO: 64262 - protein, 147 aa, Zea mays
  Coding DNA Sequence Number=SeqID_20887
MCGLPSGMVGVGRSTCTGGDARRRRGVRPAHGAIVQLNGSESFTREQERGGRPKSGEVDLGLPVKSCRVRGLEKLHGPLAELAEALARLGGGWSGLATVAEAQAVVAGGKELAGAKEGLLAGEEIWSPEIWSVSLLKTEANPGFCHV

SEQ ID NO: 64263 - protein, 181 aa, Zea mays
  Coding DNA Sequence Number=SeqID_20888
  Homolog annotation: Hit_ID=A3BUQ9; Match level="QueryCoverage=82%, HitCoverage=23%, E-value=2e-08, Identity=35%"; Hit description =Putative uncharacterized protein
MTVAKEKAKMNDKEEVEAVVGKRKPVARGLRMNKTHGSPTVRKEVVPAVADNVSGSDTLPKDAKRQPAADKKGDDGGVAKKRNAVNFLKRIKQGRSASSTERVSLLETLKLSVAAEQKKVGKGEDEKEPASGSRSRSRSKAQPGRRNVGRPLKRPAATATPIPPSSKRARGGGEGKRGGRK

SEQ ID NO: 64264 - protein, 367 aa, Zea mays
  Coding DNA Sequence Number=SeqID_20889
  Homolog annotation: Hit_ID=A2YWX4; Match level="QueryCoverage=80%, HitCoverage=97%, E-value=7e-64, Identity=49%"; Hit description =Putative uncharacterized protein
  Pfam annotation: Domain name=ENT; Domain location=48-121; Score =101.5; E_value=2.7e-27; Accession=PF03735.5; Description=ENT domain
MEHRAFDCSGSDDDLPPTYQIRVPRMHFSGNRRQLAGPFSQPRPHNKLDSDIHQIEQQAYTGVLRAFKMQSDALTWEKESLITELRRELKVSDVEHRMLLNMVNEEEAIHRIRQSRQGCGMQSSLPYNSVVDHNLGPIKRQKKSHPIYSLPVDPHSPSMPLKALVDNKIYTLKSSPPPTAPRQLAPENIRRGSAYQTLPHQGGWLASDGATKGMDGRSGRYHTNEYYASHNDMGLLNFNRTDIPDTETLVKKVERVLSRPDVYAIERAKELLIGQEQSLLDAIAKLDEASDHESAFTTPLKCRSELATCGVCRRLGIHRFAELYCLSMSGWGTEFGKFSAEHITSHNVLYGDPIRPCTLIVILVEVQ

SEQ ID NO: 64265 - protein, 135 aa, Zea mays
  Coding DNA Sequence Number=SeqID_20890
MTFGSLDFLATATGELRLTDPDILVATSAGPTRFTRSKAKKRLKRHVAALQQHLNRLATTIKHRAEGTSPSTLVAVIGHQPTSVLNLIEEDSSHSSTESNFDANEVAERACFVATRPRNNNGGGDEESPNQEEEY

SEQ ID NO: 64266 - protein, 33 aa, Zea mays
  Coding DNA Sequence Number=SeqID_20891
MEEGVPECAAPAVLGPAQRAQVPVEPGMLYGPG

SEQ ID NO: 64267 - protein, 106 aa, Zea mays
  Coding DNA Sequence Number=SeqID_20892
MAGGRLLHRAGGWLPPPEAGRRGGQPTHAGGPPPTTRGLGPTRHASWPRVEEAKLPRAVRVTAQRLQALLHFRPNQRVKGRNAMQAACNHTKRAHPFDFDASSMEA

SEQ ID NO: 64268 - protein, 328 aa, Zea mays
  Coding DNA Sequence Number=SeqID_20893
MPGKANYCCPARMQHSVLCPRFRGEDESEDLPVRFGAADARWCGAGGQVDASVGADVVAAGESFSTDNPVSATRGPTSGSLALMSDSRPLSGDANESLPAAASILGPSLLLQRSLASRPELVAPQALRCGGCSYPRGRNRSSVCNGTLNASDCSLWLSGPKHESLGSVGLAARGFPCLVKGTLGRSASGDPPTVLPSEAWSDFAEGGVDSEGAAAPLPSTSEPAGSYLDLFVGNRIVCPSESYFSQKVMSEDSAIDVVEKAQKIVSAERFPSIKTCSASGIAYPSVSYLSQKAMSEDPTFEVVKKHERRSGRKTFSEENFDAEGVPPF

SEQ ID NO: 64269 - protein, 565 aa, Zea mays
  Coding DNA Sequence Number=SeqID_20894
  Homolog annotation: Hit_ID=Q6QP51; Match level="QueryCoverage=14%, HitCoverage=37%, E-value=2e-07, Identity=46%"; Hit description =Putative growth-regulating factor 1
MAERYQLPRSCVPPTTRRKDCGYPPSVGLEGGKARCIREREDMVAFQGGHPPFKGDSPYLRPQPSGAESSPARSKVLPLRHGGWVPHVMQAGPGQKKPNRRARCVQPPSGYKRLSTSVQTSGRKGGQPCRRHATAPSGRTSPTSNTPSMEAQAHASCNRRAGCFVQATAPPLAPLPRLLNCGTNTATRGDPAHDPAAPAWRDDDAPVFRSSDGPRTRNGRPANHSPRRINSAAGQATPLAGEASDASLRHNDRVKKAASEHVGSTPTTGQRFEGRPLGRVQRPPQATRAPRPLLIRGSKAGPRRVHSRLRHRARDDHGYVRYITKARAALPRLRGCSREPGSGQTVDSVNIPAQELGTRPYTRATASSHEGTTRPAEALREALRPQRSQTTPPRPRGLHPVGALSRTHRNKTQPRKAGPLAKKCDESLQASANTPFEAWGLLSGTIIRGTLKAPNSQLVTPISIKLQRPDGARTRAKPRKTANSAPPDPGLGLGLSPRRRRTPLRPTQGSDSGSAPEDDELRSAQPRARTWAQPQKTTTSGSARPKARTWSSAPETMTPLARPRL

SEQ ID NO: 64270 - protein, 175 aa, Zea mays
  Coding DNA Sequence Number=SeqID_20895
MVTSSSMAGESKPGRGLCPSLSLKDFHHQGWGGDCRVPGSRTRVASEPLSAPASATAAGRGSSTDEIARAAHGPTSNSTTFCPSLPHEFGRLTLGLDSHNEQKHWHSNGDDDDFCFGGPNSGSDDLRVDAAARRPRVKVTGESGDPRTTSPFESRSDLAEGVADAEGAAVPSTVR

SEQ ID NO: 64271 - protein, 230 aa, Zea mays
  Coding DNA Sequence Number=SeqID_20896
  Homolog annotation: Hit_ID=Q8H6I5; Match level="QueryCoverage=22%, HitCoverage=6%, E-value=8e-07, Identity=50%"; Hit description =Putative RIRE2 orf3
  Subcellular localization annotation: CTP_CleavageSite=75; ConfidenceScore=5.10e-01
LEALVEAGLPRPQPKWITSHDEQVSNPPKGYIVSFTSFHEWGFVVSVNRFMRPSSPPSTRGSWGLSSTGIEPFSLASEVRKKLRDCGLTTARVVTAFHRQRVLPLADRRLRLDEMTPIGTLNQGMYQLDRTSARKHQTPVRTTQTPDYGSGLPSKHAETLGWGPDPSEPYPVRLRSPLRWRPDAATWLVAHDRSQWVEPNLKFSSAKKAQLQLKKLNSAEVSSAEMLNCS

SEQ ID NO: 64272 - protein, 154 aa, Zea mays
  Coding DNA Sequence Number=SeqID_20897
MAKLTIPLVPLINQLRASHSTLMVALLSPGHNRSEDTCLHQVVAQRDLRQHTREPRAARCLSKASIHSIHLEGSNGQGGLGRGGAARSRSENSPETRGLAMVGLPGLGDWPGRNQGDLAGSDMGLTPVREHKRALHMARWANGGAGQLRRTIAR

SEQ ID NO: 64273 - protein, 150 aa, Zea mays
  Coding DNA Sequence Number=SeqID_20898
  Subcellular localization annotation: CTP_CleavageSite=56; ConfidenceScore=5.16e-01
MMQVDYTTVLDGPSVSVKGPTQQGIESVVEVTPASSVMSDGSSDPSLQLRLLRALRAVARTATGVVVVSVSVRGASLAKVQGKAASQTPPPAEARGKSFAAPAPAPGVGAPAPRAGDDAVSPSDWTDLTPCDAMDAPPGEKAKMGPQTYV

SEQ ID NO: 64274 - protein, 79 aa, Zea mays
  Coding DNA Sequence Number=SeqID_20899
MELPLDAQSSGRRLDVDERVEQCRAVAGVLHILARFIQVLQMQHLRDMGLTPAREHQRALHTTRRANSGVGQLRRTIAR

SEQ ID NO: 64275 - protein, 54 aa, Zea mays
  Coding DNA Sequence Number=SeqID_20900
MAEITPYPFACLSELNRIRGLRLFPEYLSVQALQSVRNWYISRAHGYEQPWDPL

SEQ ID NO: 64276 - protein, 46 aa, Zea mays
  Coding DNA Sequence Number=SeqID_20901
MAKLGDRDAQEPHCAQRAERREAMQGATEKTRLGWATPSPWADREQ

SEQ ID NO: 64277 - protein, 80 aa, Zea mays
  Coding DNA Sequence Number=SeqID_20902
MAPKRANSKAAPSIDDAAKAALLAEKKGKALADTAPKRLSKMMLSTARDSARTTPPPTALSRAHHKHHHQASPRQRVKTP

SEQ ID NO: 64278 - protein, 399 aa, Zea mays
  Coding DNA Sequence Number=SeqID_20903
  Subcellular localization annotation: CTP_CleavageSite=19; ConfidenceScore=5.01e-01
MTSVVLSALRKQGDVSRIPAASTTVLLQGSGTYPTATLSPHTWFAFDLPSKTGCDNRAEATTHTGVDRAHALLVDAYRQLGARTAPFDTSGEEVGLRFLGWLQGDLELLPSIVMGLMSIASLITYEGAANALSREGCRHFEVFDQANMDFDRGIFLVEDEMANDEEVDDFGGLESSVTRTEDARTGVEQPATQTDPGEDPAQWRLHRLAKTLHRQLHWLAKALQWQPRWLAKTLQRQLHRLAKALQWQPRRPAKTLQRRLLLRRWRVPVSANLSGSETESWSSDEGEFGSSFSWTEESSDEDLDFFAALDVAAAESLSQPEAHEVSIPPARAMLEEHHRRRVVSKHNVGEMSRSGRRRWMGMERSHLRLDRGGQRDLMSSTSVWSTTLRHVYVHYEDML

SEQ ID NO: 64279 - protein, 237 aa, Zea mays
  Coding DNA Sequence Number=SeqID_20904
  Gene Ontology: Mol. function=aspartic-type endopeptidase activity; Biological process=DNA integration
  Homolog annotation: Hit_ID=Q8H8K3; Match level="QueryCoverage=60%, HitCoverage=10%, E-value=1e-15, Identity=36%"; Hit description =Putative retroelement
MTPPTFLESNEFVEQASLGTGQSGATAGWCKFGYVKPNFSNPISFDLTRFLALRVIFFTLKTASEIWLKLHELHDDTSNIREQKHRLALNNYNSFAMKENELVRDMYYRLNLTINKLNSIGINKLGDVDIVRKIISLLPQQRYGSIITILHNMEDLSTMTPTIVIRKIAAFEMSRKMGRQEKPTSSRPYAFACNEKSKGKKKAPTPSFSSEEEGEEESNNDEDNQPSTSSFVDEETI

SEQ ID NO: 64280 - protein, 272 aa, Zea mays
  Coding DNA Sequence Number=SeqID_20905
MADKGKGKGIVIGDPRMSIISQKEIARKASGEKAKRFEDAGAILDPLLGVIGYGAEVTQLGALAYGAEVGLPEPRQLLGSLLPDGVPLESEIQAPPAIFCRPCARADRPAVRQGTLALRQVVDRPTPGRGPFAPVQRAPPPPSPTPRLRCLPKALPVPPHNMTRIHRLRPLFLFVLLASLQCGNAAKTLAGLSAATVASTLESPLDQSSLLFHSLHGLSLDPIAGAATAAAGYGGGAEGFCSAEPSSKCSGDQPLYWKVTHPTLAPAHLQGA

SEQ ID NO: 64281 - protein, 228 aa, Zea mays
  Coding DNA Sequence Number=SeqID_20906
  Subcellular localization annotation: CTP_CleavageSite=39; ConfidenceScore=5.05e-01
MVALLSQVVTPQTGPYGEDSRSLGKASGAIRATWRTQSRAQYRRGGTRERGTRRGGLTAARINSGEELRGHYGSNGRIKCIGRLLTSSANSGAPGKRRGCGEASGRRWRTLAARENTLVSADRANQGKKATQGVSRVADGEVELPEATDATGTQRRSWNGRQASMNDGGVAWLRAQGGRGSERAQLRAQMSRGKWASGVRALKGRGSEEVAGERADVGASTAGAWARG

SEQ ID NO: 64282 - protein, 307 aa, Zea mays
  Coding DNA Sequence Number=SeqID_20907
MGGPAEQQKTDERRAVARSGSGDDDDFCSGGPNSDSNDLRADAAARRPPPMPKLVRQGRAEGRRVGGWSVGGPGYLVGRRTSSSCRGRSRRRERLRSHSSPRARHAAAASAMDDNRPSPQSLREGAGHRPRRGRPQLGTLPSLALVMKILEAEGGAEAAARFSLPHRQTGDQRAKGRAAMQALHRHLRHRRASSTAESIPRLEATQRTTQQRQPGATVNAAENGPAVMAVAGGQEQRSRRQPSSRPIRGQRENPLSRREDNAPVFHSSNGSRTRNGRPANHSPRRINSAAGQAAPLAGEASDALPSP

SEQ ID NO: 64283 - protein, 154 aa, Zea mays
  Coding DNA Sequence Number=SeqID_20908
MGTKARRSDGSLAFKGALDGKPYLVDLSKENVDLDDYTESNQPTLEFSQAHSAIIHRTVRCASRATINSRNDRRQKAADRATVKNSAHRVRAAEPKAHRDSEHDLSGVAPDCVEPQGDKASTVDFAPNPNNRTMWRPTGQVLFTVRCADTSPNC

SEQ ID NO: 64284 - protein, 152 aa, Zea mays
  Coding DNA Sequence Number=SeqID_20909
  Subcellular localization annotation: CTP_CleavageSite=49; ConfidenceScore=5.04e-01
MWATGQSGGAPDRSYSLSGVLSGACFDFCARSCTVHCKLLQTIIGAVSRCSAGTPDSPMNYSGVASQIPEGGKFGVDLPGASDTVRWHTGQFENEEEVEVEEGRATPPPEDPPAGNCFYFDICGAEPDSPITQGKPRCICHLLAILKSFSLA

SEQ ID NO: 64285 - protein, 73 aa, Zea mays
  Coding DNA Sequence Number=SeqID_20910
  Subcellular localization annotation: CTP_CleavageSite=33; ConfidenceScore=5.10e-01
MTLRQNQCKNPSLHYGPSGGKERTVRDLARTVRPQARTVRRLSSRERLHGRFDDVGGGDLGVILRTGHLWADF

SEQ ID NO: 64286 - protein, 439 aa, Zea mays
  Coding DNA Sequence Number=SeqID_20911
  Homolog annotation: Hit_ID=A5BG04; Match level="QueryCoverage=57%, HitCoverage=47%, E-value=1e-100, Identity=67%"; Hit description =Putative uncharacterized protein
MPFLSTPSFDLSAGAEPTLGPRSAAPPPPPTAAAHHQPPVSEAAARRLREAEERLREAIEELLRHQGGGVKGDGDEQREGFSVFSVTTGSHARRTLWGICARASCFYTVSASASVSSSAPLSSCAAGPMARSSTLRILAGSVAGLAILALDDSSRRRTLSLYLLARLAQCAYNSAKSKNKFHFWGSHWRHGDALLFSLACAQVMYAFVMRPESLPKSYQEFILKTGPVAEPVYKVVKECCRGGPVDLTALSAHLSNKRNPDLINLTTNPSIIPCSVIHPDRASCLAQNVNVVSSTFKKTFPLYFSLTFVPFVVLRLQKAAICLHRKVANKDHKLVYWFAGLMSGLSILLEKKARRAELALYVLPRAGDSLWYILINRHLLPNIKNAECNPRGKANKIMLLAIMTTKNRSTKSCLKQLWAVCSSAMSQVVCHWLIATEDE

SEQ ID NO: 64287 - protein, 219 aa, Zea mays
  Coding DNA Sequence Number=SeqID_20912
MGSSPPKKYEVVEQIDPERAMERWTPRWWSRSTGRLQLRLPRPPQGRAQEVTISPFLFLVYSSCSAFSMGAPILDPSLSVACRCRGTGAGEGIIIDIMTLESGLREDTHPMGAELRESKLMNKYNELKEAGKLDAFMERRRNSEDLDLSKEDLLKLLLEKDGSLKSKDKEFKDMKDKVLQQTWPCHNKRESENTKKYAIQEALMMRELGNTKIVVTGDD

SEQ ID NO: 64288 - protein, 98 aa, Zea mays
  Coding DNA Sequence Number=SeqID_20913
  Gene Ontology: Mol. function=RNA binding; Cellular component =ribonucleoprotein complex; Biological process=ribosome biogenesis and assembly
  Homolog annotation: Hit_ID=A7PF22; Match level="QueryCoverage=72%, HitCoverage=49%, E-value=7e-19, Identity=69%"; Hit description =Chromosome chr11 scaffold_13, whole genome shotgun sequence
  Pfam annotation: Domain name=Ribosomal_L7Ae; Domain location=19-92; Score=-2.5; E_value=0.057; Accession=PF01248.17; Description =Ribosomal protein L7AeL30eS12eGadd45 family
MESTVNPKAYPLADVQLTMGILDIIQHSTNYKQLKKGANEAMNTLNRGISEFVVMAADTEPLEILLHLPLLGEDKAASMSASADSVAPEDSYQRYWET

SEQ ID NO: 64289 - protein, 156 aa, Zea mays
  Coding DNA Sequence Number=SeqID_20914
MSGGYGMASSPAWPPPMRRAGHWRVWDARLPRPRMVGYSRCGGDEVGGQRGRRGGRSDGKRRRYPDGAATEARSSGSEARGTGGCPTRCGERRWRTAGLAEVPGLPIAALPSGRPGAGTAGMPAASARGSRTGGGQRRRGSERLEGADSRKLNGIQ

SEQ ID NO: 64290 - protein, 64 aa, Zea mays
  Coding DNA Sequence Number=SeqID_20915
MRVEWDALSLQLEEPWCSSLRRRAVMGLGVCGSLCQGCPRCNHCLGEDEAVEEDFQEFQDYDEF

SEQ ID NO: 64291 - protein, 158 aa, Zea mays
  Coding DNA Sequence Number=SeqID_20916
  Subcellular localization annotation: CTP_CleavageSite=95; ConfidenceScore=5.76e-01
MEAAAAARASAPTFQPTRSRKDGSLDPSLATSLAGVTSMTRSTPCCARHSTRVLGPSSIAVLSSSTVTGFTRTARRRPACTGDVIVSPVGEENPRLSSTVNLAAVLNTELYHALDELSRARAEIAQLRAKRAERRHLEDGSPAPVGTQHPYRSPRHGH

SEQ ID NO: 64292 - protein, 118 aa, Zea mays
  Coding DNA Sequence Number=SeqID_20917
  Subcellular localization annotation: CTP_CleavageSite=38; ConfidenceScore=5.39e-01
MAGSLNDIVGRFTDGRPAWTPRAIKRGLNLNRPLSCPSSSPPSEGGSSALGVDVRVRNWKEKPRNRGNFSSSNDFRRGQPRTATRCFYGVKAGHRIIVVWSGALFVGVYAAVRARCRR

SEQ ID NO: 64293 - protein, 326 aa, Zea mays
  Coding DNA Sequence Number=SeqID_20918
  Gene Ontology: Mol. function=protein binding; Biological process =polarity specification of adaxial/abaxial axis
  Homolog annotation: Hit_ID=A2CIR7; Match level="QueryCoverage=99%, HitCoverage=63%, E-value=1e-145, Identity=84%"; Hit description =Ankyrin-repeat protein
  Pfam annotation: Domain name=Ank; Domain location=126-159; Score =18.7; E_value=0.022; Accession=PF00023.21; Description=Ankyrin repeat
  Pfam annotation: Domain name=Ank; Domain location=161-193; Score =36.3; E_value=1.1e-07; Accession=PF00023.21; Description=Ankyrin repeat
  Pfam module annotation: Pfam domain module=Ank::Ank; Domain location =126-159::161-193
MVEKASIEDVMKVLMASRKQDLHQLWTTCSHLVAKSGLPPEVLDKHLPIDVVAKIVELRLKSSMSRRSPFLAHHHPHHHPAAGGMEASSAADIDEHHKIRRMRRALDSSDVELVKLMVMGEGLNLDEALALHYAVENCSREVVKALLELGAADVNHPAGPAGKTPLHVAAEMVCPDMVAVLLDHHADPNVRTVEGVTPLDILRTLTSDFLFKGAVPGLAHVEPNKLRLCLELVQSAAMVMSREDAHTAVNPAAAPMYGEPSGGGAVYSASGTSSSMVNLSLDNRMVYLNLGMDAQFGKMDDGGDGDDGGGRGQGGPPSLFSPHGYH

SEQ ID NO: 64294 - protein, 235 aa, Zea mays
  Coding DNA Sequence Number=SeqID_20919
MEKLNFQIQCGGTEAPRAWPSKTIKCEGDGLVPSPEAGLRATVGTLNQGYPLLQYEDTVHVQLSLAAWMPSVGPDLHERAPDPYTLNPDLRVRSGTPKRRPGHPAGGVPVQSIVKQYTRAARAGAFRHPAGDFLSDSVDGHVTCVAECYASRREHGEPREDIACCAGPGTAQGSARNAPGVREQAAAPGAMPGRRALAKLKAAAMGTPDRTQGRVASTGWRAGAGCIAGRGLARP

SEQ ID NO: 64295 - protein, 107 aa, Zea mays
  Coding DNA Sequence Number=SeqID_20920
MVTSLVKVGGELRLRGIGQTANDVCHSASSSLAWMRWSPLLASRSELASNATLLGTRRVVEHAGSRYGTRLSGYTALDLPRRQAFGYGTKLSGHTAPDRPMERAPVL

SEQ ID NO: 64296 - protein, 105 aa, Zea mays
  Coding DNA Sequence Number=SeqID_20921
MEEGVGCRGGEEPLQLWRWRALHHKFWRWREAKESVWATSTNCSMVTIYLHYCALNWEKWRSWSVLRARGIRNSKAVALRTELEEEHEGGSLVRLAVEAGSGSLG

SEQ ID NO: 64297 - protein, 146 aa, Zea mays
  Coding DNA Sequence Number=SeqID_20922
  Gene Ontology: Mol. function=nucleoside-triphosphatase activity; Cellular component=integral to membrane; Biological process=transport
  Homolog annotation: Hit_ID=Q8GU82; Match level="QueryCoverage=47%, HitCoverage=5%, E-value=8e-29, Identity=85%"; Hit description=PDR -like ABC transporter
MEVGADGIALITIANLPVGNEGSLEAELASRRRWTLVLANMASVLEKIDEMLLLVVYKWCQGVGGITLHVGASDDLSSIVYPMIGFQVTASKFFWFFLYQVMSFMYYTLYGMMTVALTPNIEIAMGLSFLIFIFWNVFSGFIIVRE

SEQ ID NO: 64298 - protein, 282 aa, Zea mays
  Coding DNA Sequence Number=SeqID_20923
  Homolog annotation: Hit_ID=Q60EN2; Match level="QueryCoverage=25%, HitCoverage=51%, E-value=2e-19, Identity=66%"; Hit description =Putative uncharacterized protein OJ1651_D06.1
MFVSVLDLVHESSCKQRELCGSHNQDHTNRVGPSSVMTAIHDESNLKETIILRPLGHTSHLRLRSSKKQIQNGSSRFAGQGFVLDIQNKALVLGHVDLQGSTNDAKQADLYTMLNKQSSRGQNGNGVTGSSGWQIPRPPTYKDGKHAYPNESSESPYFVSSMHYGGREFYSNTLEWSITQQTDSRKTMTFCFPITGVIMQPAGMPQRGGSMWMRTAYPSAVILSVHKFIYNYSKSTIQNIVYYSRQEKLFRKTPMRGPSGPLQRTVRDNWVSLEQEHCKNIR

SEQ ID NO: 64299 - protein, 613 aa, Zea mays
  Coding DNA Sequence Number=SeqID_20924
MDKDRQGAAQKRQAAIRLVEARPKRQRLGAKAAAPSGGKSPLPAKSGAPASSKVPEATAGARGSKSAKVVPPAGGVAEVAKAAQALPLSGKRVADFATNISVDDYLVGSDEGQLAIVAPAAATTMAVVVPKAKGGALSAGGEASAFAAVKDEAGAASRRLAEVTEALSQASRRLKEVADFADRTASGALTAAVSAEVERLRTQHADAVREKSAADSKCRKLTDKVAVLEKEKSDLRRQLAGERRETNDALAKEKAAQAEAKLARAEGNIARERAEQLQERLTALESRMERAEAVARAEAERTRKQLMDTYRELGAGTGEFEVPDREAGLCCLEWVQEELQALPTVVEGFMSYASLVTCEGAMNALSREGCRHFEVFDQADEDFERDIFKVEDPVVKESAGAIYDRLWGAYGREVVRERAETARAQAARGERVDDFGALNDVPPDPDLTPAKAVPGVGLEPSPETAEDAPDASASAAAGEVVPDAPQRSPKACLMPPRLLRRVLKVQDFGPAHATATTKFLAASTAEGGNECGGSASESFDFADSGSSVEWTKESSEEDLDYFAALDMAAAEASPHAADADVPVRLHPLATSARPVFAVDLGFFALVVLVRLHP

SEQ ID NO: 64300 - protein, 510 aa, Zea mays
  Coding DNA Sequence Number=SeqID_20925
  Homolog annotation: Hit_ID=Q6QP51; Match level="QueryCoverage=16%, HitCoverage=45%, E-value=7e-10, Identity=45%"; Hit description =Putative growth-regulating factor 1
MEAQAHASCNRRAKCFVHATAPPLAPLPRLLDRGTNTATRGDPARDPATPAWRDGQCGQKDRERGIPQKGSFPEKEPGSEPPTDQRFEGWPLGRVRQPPQIAGSKAGPRRVHSRLRRRARDDHGYVRYITKARAVLPSSPETPCSAPIEGNMALSPPPPCGKATQGPTLTKSPHRPTKSQEHLMQRWPDTFILTRAPQSRSDRRHFAAPLTGLTERQRRLRRSDCGATRQSEADRQSGPVEGTIGSSASPDPGLGLGLSPRRRRTPPDPGLGLGLSPGRRRTPPDPGLGLGLSPGRRRTPPDPGLGLGLSPGRRQTPPDPGLGLGLSPRRRRSPPRPTQGSDLGSAPEDDELRFARPQGSDFAPASAGDLRLARPRGSDSTSATEDRLDLGFGGASTSPNLGRRPATSTGEARGRQQGLNSSDNFPSARLHRSSDGHDITPAGCQDLSGCHNGMALLERVGRAGTRTSLRPPRSPPFALGLALDPSGLGHAATFTRRPRDPRSRNADNAP

SEQ ID NO: 64301 - protein, 77 aa, Zea mays
  Coding DNA Sequence Number=SeqID_20926
  Subcellular localization annotation: CTP_CleavageSite=44; ConfidenceScore=5.46e-01
MAGPASHRAAPPISSLSLSLPPVARPIPCPGWPASSAEPPTPLRSSETAQANPFFLFHRPLLLQQVEEPTVEKKQPE

SEQ ID NO: 64302 - protein, 225 aa, Zea mays
  Coding DNA Sequence Number=SeqID_20927
  Subcellular localization annotation: CTP_CleavageSite=43; ConfidenceScore=5.12e-01
MQPGCTPPPAVTQDGDLQFDGGGKANRAAASAPPSASRIFITRAEEGSVPSWDRPLRGRCIVPGSRTRVASKPLSAPASATAAGRGSSADEIARAAHGPTSNSTAFCPSLPHEFGHGRGPPGSGIRPEVIAAAVRPPGAEVVVVAAARAGDGAPFVGLLLLRRPPPIEWGYSPVGCLNRFTKRESPRVKVTSESGDLRTASPSEARLDLAEGVVDAEGAAAPFQR

SEQ ID NO: 64303 - protein, 735 aa, Zea mays
  Coding DNA Sequence Number=SeqID_20928
  Homolog annotation: Hit_ID=Q6ETN5; Match level="QueryCoverage=58%, HitCoverage=85%, E-value=8e-61, Identity=38%"; Hit description =Putative uncharacterized protein P0504A05.21
MGGSLLSEKRGAKLQSWGGRESCCAREKKIGKSAGEERRTCTRQKFLKLLGISHHTKGYKFGYDVNSDIGTPNTVFELVLLFTATRAHPMFPPLLMFSPVRFVCTKPFPFILVAGPAPYSQDSHGNMQMQLFLTLAVNPSSLYASESNPTRNRQPPRSRRIISVARLENSKFSPLRHQQRNRKSATPHSPSAVGSRQRHSSPRFHSPMKASAAAASPPPPPPRGWLSGLVSGAGRLLAAILDPESSASDTTSSSPESSQSPPRRDQATAGHGIGKCFPSDSHQLNLSGKEIVLKDSGEGSLAIVSEVHPKDAVKQLLMQETYSWSECDALIKIIQERVVDSDDEPAAILPIAWHANTQLHPVAHSSNPNTTAVPAVSNPACRLEFDNIVEKEWLKKSSAVAENRCTNSHDQIQHAMKRSYSNTGDTIEESRRIRPKRNRSNSLRNQGASSKEAATNASSARREFPEGFRTLFKDNPLLGTNNLTFSDLVSKGLFDDEPSVAAAAEHFTSTSCQADWDKRGSGMSYPYSSQNQMEMSRVKAELIDEPVALETDMTNMVQKNDSMLPYPNHKNSSSFYLSAELIVRNGSCSVPNKTVFQGDIEAAPSSHVPTNNNHIHVSPHSPMGLQTEKSSRNCTRGFNLQNIPTKRRSPASRNLPSNNGNGKTVSKGERYNCNGHPRLQLTSVFSLARCVVDKASVHHCVRCDQEVSGPRAGGLQMAAAIQVPMCRAGATYLYL

SEQ ID NO: 64304 - protein, 156 aa, Zea mays
  Coding DNA Sequence Number=SeqID_20929
MGKNNKRKREPTPPSEEFGDSEYSEEEFSSESEGSSAPVPLRESSDDSDDSQGLAAEVWTYIRAVERSGLEGSDESEYSSDEEDSDGGSEDEDDDDDDGDDDDDGNGDGDGSGSGRGSGGDSKDGDGGGSRGSNRGGSSRGSTRGGSGGSSNRASG

SEQ ID NO: 64305 - protein, 95 aa, Zea mays
  Coding DNA Sequence Number=SeqID_20930
MEALPADDQRPFEDLVMRDEKEVMRQWNEQRDKEEAELLHVGGLRLPKVPSDLCQRGRTSKDTKVGSAKAVKQESFGMFAEKGTDLKMKRPFRPR

SEQ ID NO: 64306 - protein, 193 aa, Zea mays
  Coding DNA Sequence Number=SeqID_20931
MPTPGLCSLGLRAAHHVMPYQRSAHSGLVPIGHEPKVGARRGIHSNGFPLVRPTPLSGSATPSPRLNVADIVREQVPPRCHQGVVMPPTWRNRLLSPRLSCFACSLMKPTVVSLLPDYVGAHGTSLVEHLYNALCRIRDITDFSIHQGAAVALFMGRSAPVVAFGTSSVLLRPFRMKGWKTCSRDTSRWPVVS

SEQ ID NO: 64307 - protein, 138 aa, Zea mays
  Coding DNA Sequence Number=SeqID_20932
MPNAKEVKIKEKKQRREEKKRDAKDLAMYSHDSAQSGTPDCPVFLRNKILGDILVEYLGNISGKNLRGITGEISGQYFWKEFEARAPGCLNLQNNLGLVLRYPNSLKSIDVRNKNLGYPNTSLGALVFAPNIFGNYFT

SEQ ID NO: 64308 - protein, 483 aa, Zea mays
  Coding DNA Sequence Number=SeqID_20933
  Gene Ontology: Mol. function=zinc ion binding; Cellular component =cytoplasm; Biological process=signal transduction
  Homolog annotation: Hit_ID=Q1EPF5; Match level="QueryCoverage=93%, HitCoverage=93%, E-value=1e-171, Identity=67%"; Hit description=Zinc finger (ZPR1 type) family protein
  Pfam annotation: Domain name=zf-ZPR1; Domain location=277-438; Score =213.6; E_value=4.8e-61; Accession=PF03367.4; Description=ZPR1 zinc -finger domain
  Pfam annotation: Domain name=zf-ZPR1; Domain location=36-182; Score =205.2; E_value=1.5e-58; Accession=PF03367.4; Description=ZPR1 zinc -finger domain
  Pfam module annotation: Pfam domain module=zf-ZPR1::zf-ZPR1; Domain location=277-438::36-182
MASSGNEGRVVVDLGSAAESVAADEEAHATPLHEIESLCMRCGENVVLMAFECPHCGERNNEIQFAGQLQPKGCCYSLEVPLGQSEMLNRQVVKSDSATIKIPELDFEIPPEAQRGTLSTVEGIIMRAVDELQALQDERKKVDPQKAEAIDQFLLKLRSLGSGEAAFTFILDDPAGNSFIENPHAPLLDPLLSVRFYERTREQQAALGFLAEPPKEQPGEAVLPASAVESNSDGLQSVPHGSVGAVAGRRAIAQGNPDEVAAALCRYSAPEEVDTLPSTCGACGTECVTRFFATKIPYFREVIVMATTCDMCGYRNSELKPGGEIPAKGKKITLRVQNAQDLTRDVIKSDSASVKVPELELELSCGTLGGMVTTVEGLIVKICEALERIHGFQLGDSTLEWKKKKWDDFKERLSKLLSLQEAWTLIIDDGLAASFVAPATDSLEDDSQLTIEEYQRSWEQNEELGLNDMDTSSADAAYNTTNT

SEQ ID NO: 64309 - protein, 97 aa, Zea mays
  Coding DNA Sequence Number=SeqID_20934
MDWWSRGDMEPSPYLQAGAAAPGMEEGPRGTMPPYPPVSDSAPRSPAQCSARVPRQLVRVACAGQPGLCCCLLAWLCSRGMGKRKPGLGRWAGIPKQ

SEQ ID NO: 64310 - protein, 376 aa, Zea mays
  Coding DNA Sequence Number=SeqID_20935
  Gene Ontology: Mol. function=phosphoprotein phosphatase activity; Cellular component=protein serine/threonine phosphatase complex; Biological process=protein amino acid dephosphorylation
  Homolog annotation: Hit_ID=Q5MFV5; Match level="QueryCoverage=99%, HitCoverage=97%, E-value=1e-166, Identity=79%"; Hit description=BTH -induced protein phosphatase 2C 2 K2 form
  Pfam annotation: Domain name=PP2C; Domain location=33-309; Score =103.8; E_value=5.4e-28; Accession=PF00481.12; Description=Protein phosphatase 2C
MLRAVARCCGHWPPGAAAADGMLWQTELRPHAAGEFSMAAAQANLTMEDQAQVLASPSATLVGVYDGHGGVDASRFLRSGLFPHVQRFAREQGGISAEAIRSAFGAAEEEFHRQVRQEWARRPRLAAVGSCCLLGAISGDTLYVANLGDSRAVLGRRVGGGGGGAAVAERLSAEHNAASEEVRRELAALNPDDAQIVVHARGAWRVKGIIQVSRSIGDFYLKKPEYSLDPLFRQVGPPIALKRPALSAEPSVQVRKLKPNDLFLIFASDGLWEHLSDDAAVQIVFKNPRTGIANRLVKAALKEAARKREVRYRDLRTIDKGVRRHFHDDISVVVVFLDRHRERRHTRVVDSSSNCISAPVDIYSSNTHQSAEPLHG

SEQ ID NO: 64311 - protein, 80 aa, Zea mays
  Coding DNA Sequence Number=SeqID_20936
MATNGDEDERGGLGERVLDLNARGSLQREEMELVGGARVPRKDVGGGEVDTVLEAEQKVEVVEVGVDSWEAEAREGDEGG

SEQ ID NO: 64312 - protein, 41 aa, Zea mays
  Coding DNA Sequence Number=SeqID_20937
ETLPTHLGSVQGSVQPEAKRESRLMGKVAMRLMVLGFDSGN

SEQ ID NO: 64313 - protein, 139 aa, Zea mays
  Coding DNA Sequence Number=SeqID_20938
  Gene Ontology: Mol. function=methyltransferase activity
  Homolog annotation: Hit_ID=Q94H97; Match level="QueryCoverage=30%, HitCoverage=12%, E-value=3e-15, Identity=90%"; Hit description =Putative methyltransferase
MLKALVAPFTRDISSSKRSPGRKEYSDQELPRIQGLVQQGEGDERGEEGSGHGVGAAADGGERAGGVSRRWQGAQFGVRHGGMGLEDEAIQRYEPEEHTIVEAHPEVYERMLKLGWGEKKNVRNRVWAMAGHNAAARIL

SEQ ID NO: 64314 - protein, 110 aa, Zea mays
  Coding DNA Sequence Number=SeqID_20939
MAWRPPFRFRVSSLGRQLFVGPRTVLALRRIGVSENVPVTDGLWRRRARPAAAGHADTGNVCSRGTAAVSTQQTATEARGRWMGRTRAPSNRYSRALWYRGRWSKLGIDV

SEQ ID NO: 64315 - protein, 168 aa, Zea mays
  Coding DNA Sequence Number=SeqID_20940
MASSGLRTTRAIGGCSLGQLITFYLSLIHRVIYDTPSTIGETHGAPSTPRANDDTRTRSGAEKNMTGITTSLRGVRPPELSRQRLRLVARPRDGRGTTKTTPLPGIDIIANDRRILVEYQRSLHASGPFNGPRTSKSPTSTSTSLSRIQEAGWPSTPLPPELLGQPKM

SEQ ID NO: 64316 - protein, 42 aa, Zea mays
  Coding DNA Sequence Number=SeqID_20941
MEREGSSSSQPEDRPGVPGGRLPPHHTTVPTAKDELGAEGVV

SEQ ID NO: 64317 - protein, 153 aa, Zea mays
  Coding DNA Sequence Number=SeqID_20942
MAASPEYSARRGAAAKSGDLAPDSDTYDLLLDHALRSELVLGSWHRRVVRRQAAPGNARTVLRLRAVTNRTKSVQEDVRCAVPRTVAGKKNSSTRQLGKATNSKLWTKQLDKQITRAVAKTLPKNLIARTLVQAVRRREKNNGQKRSRIRTGN

SEQ ID NO: 64318 - protein, 172 aa, Zea mays
  Coding DNA Sequence Number=SeqID_20943
MKSPEETALMRIPPENTEAPHLEARKAKGGQRGEPPRKKCTTVPQLCAPSALPQLAVQLRGLGPHVIDSRQPRAWPNSTIKYDGHGSVSCGIGTAIGMAIGGPTVIAATDVRKQRSNHQSDSGPTYRLASSPEAGPGATVGTLNQGYPLLQHEDAASMRRLLATRRTARDPT

SEQ ID NO: 64319 - protein, 64 aa, Zea mays
  Coding DNA Sequence Number=SeqID_20944
PSCRQWGSVYAARSAKFGSPLGEEYDMFGLQVATRLMVLGNDSGNGEDEVVEGDFQEFQDYDEF

SEQ ID NO: 64320 - protein, 181 aa, Zea mays
  Coding DNA Sequence Number=SeqID_20945
  Gene Ontology: Mol. function=calcium ion binding; Cellular component =integral to membrane
  Homolog annotation: Hit_ID=Q5QNI2; Match level="QueryCoverage=60%, HitCoverage=19%, E-value=3e-23, Identity=56%"; Hit description =Putative uncharacterized protein P0031E09.40
MRVTRNPDPPKPMPRAGPTDTKGEGDPFAPLVLVICLSGSRLATGAATTWERCEQSYGFLPCTATVFKNLFLMLEYAFLMYKVTTYLLVGSELLLGIMGAGLVGRLLLPILSSLPDALLMVDKFGLDALNENVEGAFTISRLHQLIYEPYLYVSPEDGKKDAGLTYGHSSDKDATVLSMLM

SEQ ID NO: 64321 - protein, 33 aa, Zea mays
  Coding DNA Sequence Number=SeqID_20946
VATRLMVLGNDSSNGEDEVVEGDFQELQDYDEF

SEQ ID NO: 64322 - protein, 307 aa, Zea mays
  Coding DNA Sequence Number=SeqID_20947
MGDGCPNTREEVLAPVLTAGVRTRPSKNVVAAPTAYDVLYDPPPRPVQAAGGSAGGGTKAAQAEEPDTRQLTAPQTADRAYPAFASFARLANALLPRMLEEEAGHQPMRKARTPAHPIWRPRRRKGAMVERGKSTAREIDPFLKANLPTRAPEASWAKSPPTCTKLRCNQRSNTGAQAHISCNQRAGYRVTGQSDVGIGVAVGMTISGPAVITSTGAQEQQANRQSDSGPTCRLASSSEAGLGATVGTLNQGYPLLQYEGAAPVRHLQATRRAAPDPHGEGHHVARKDNTSQGASMGPDLRRGIPDP

SEQ ID NO: 64323 - protein, 214 aa, Zea mays
  Coding DNA Sequence Number=SeqID_20948
  Gene Ontology: Mol. function=xylose isomerase activity; Biological process=carbohydrate metabolic process
  Homolog annotation: Hit_ID=A2YPR7; Match level="QueryCoverage=35%, HitCoverage=15%, E-value=6e-21, Identity=73%"; Hit description =Xylose isomerase
MEGMEFGNLFYSTEPKPNKGHLAWADAFVITADSISMLSEACSTGLILKNVASLFMNKDSLKVEADTRLGELIKSVSEAAHGGCQVSSKGQKCRPCGRAAWARGEVQVAAVRACKEPGRQQPCEMFMLDMLVVLLIRRRESTNVEDMFLAHIFGMDTLARGLHNVVKLIEMIFSAKRYQSFDSEIGALIEDGKGDFEMLKKKVLECSALFHPAS

SEQ ID NO: 64324 - protein, 113 aa, Zea mays
  Coding DNA Sequence Number=SeqID_20949
  Gene Ontology: Mol. function=methionyl aminopeptidase activity; Biological process=proteolysis
  Homolog annotation: Hit_ID=A3B2Z6; Match level="QueryCoverage=71%, HitCoverage=22%, E-value=1e-18, Identity=62%"; Hit description =Putative uncharacterized protein
MKLSVSFFKLLMPARLLDYCIRQHIKWLHHAGDLVAHIKFTVLLMPNGSDRITSYPLQELKPTKSIEDNAEIKAWLALGTKSKKKGGGKKKKGKKGDAAGDPMEATNDATSQE

SEQ ID NO: 64325 - protein, 143 aa, Zea mays
  Coding DNA Sequence Number=SeqID_20950
  Homolog annotation: Hit_ID=A2XWP6; Match level="QueryCoverage=53%, HitCoverage=31%, E-value=5e-31, Identity=84%"; Hit description =Putative uncharacterized protein
  Subcellular localization annotation: CTP_CleavageSite=30; ConfidenceScore=5.18e-01
MAPARRAPPRPPVLARPSRRVPTRVVMAPVAMRLMVLVMTMVLGDTSGGGDAEGDAASAAEALDLDRAGVAEAIKADFARSYFVTGNLTLRAYEDDYEFAAPAGSFRGLQWFKRNCTNFGSLLEKSNLKLTKWEDLEDKLIGH

SEQ ID NO: 64326 - protein, 42 aa, Zea mays
  Coding DNA Sequence Number=SeqID_20951
MMDRLLELLHMDLFGPIAYISICGRKLSNPRDLKEILETGSE

SEQ ID NO: 64327 - protein, 117 aa, Zea mays
  Coding DNA Sequence Number=SeqID_20952
MKECPSRLRTSLSSLLTYTLIKYNHSRLYERLLNLNLYGPNPRVMMAGEHREDKEGECFVRFGNGGGLTPSGIIVKVRRLSRELWWTGSSVAVFENENQWETTEIPGWFSPGDYALY

SEQ ID NO: 64328 - protein, 209 aa, Zea mays
  Coding DNA Sequence Number=SeqID_20953
  Subcellular localization annotation: CTP_CleavageSite=67; ConfidenceScore=5.29e-01
MGAISEVPASSPSRATLAVELTLAISVFMRRSYTQLVGRLSKAYTASSQKVGSFGFSKKFQQHNGAVAMNVVVTSHQLVYLYSLAGVHQLLHHGPVRRPASPALSTSKNPPDPRDANACTRPREPAWQTRTPRLARDLRYRVFPPPPAKPLRTLPTHTSRRHLLGQDISVFGGQAPSTFPHPSSSRSENAVLKAAWYSSELLGIAASLL

SEQ ID NO: 64329 - protein, 747 aa, Zea mays
  Coding DNA Sequence Number=SeqID_20954
MSSSSSAASASSVDPSSEDTLSDLVATELQPSHTVEFGTSRISSVRVQEMQQLGYFGDGVGQVPGAEEIPEPKGELVVFEAFFIAGLRLSAHHFVAELNRLPYGGYPRDDDAVVGDRRGKRAVAAVDKGPSRGAVPAAATKKRKLGTTAEELGASDCFAVDLFGTCAALGDRMSSPELRESFARMLKVTGGRWPRNVPIPRVAGKDIRTSRLAHEMKIFPYGRNVAAVVSAVMEKDRQDMSRKRRASARVEDPHREVKMARGIAKSTAPGTSKPLPGAKSATPGPSKPLPAVPAQERRPASPLRTAEIEVGGAEVSIDISVDDYLVGGIAMFDAHTGRGPVGSKAGQLAVVPTPVAAGAKGSSQDPWSKFCASSEIALATTAKDVVGSVVQQLKHAAAFTERIASGALTSEFTVERRRLKGRIERLRMQHTKVVRDKSAMENKSRNLMDKLSAAEAKKEELVRLLAAEKEDADKACLMSFTSLITCEGATNALSREGCRHFEVFDRSDEDFDREIFQVEDAVLKRSAGALYDWMWGPHGRDTIRERSDRAMEQMANDEEVEDLGGLESTMPLVEGAWAGTEEQPAPPTGASEDDPVAAAVLPEDTLVVAAPAAEDPAASAGPSQVPTSRPMQATPTDGTNFVAATNAVPTNDSLSSSESGSFSSDGEFESPCSWTEESSDEDLDYFAALDVAAAESSPRLEVGEAFDPPAGARSERRQRKVVAKHSVGEMSRSGRRRRMGWSEPVFG

SEQ ID NO: 64330 - protein, 75 aa, Zea mays
  Coding DNA Sequence Number=SeqID_20955
MTRVMLVEDVQSSRNGIVSPLHYNHQYHADFDICHDFHGVIVGTCSTGQVDLTGKRKEYLQSLSWDGKSFVNLPL

SEQ ID NO: 64331 - protein, 481 aa, Zea mays
  Coding DNA Sequence Number=SeqID_20956
  Gene Ontology: Mol. function=translation release factor activity, codon specific; Cellular component=cytoplasm; Biological process =translational termination
  Homolog annotation: Hit_ID=Q2R068; Match level="QueryCoverage=27%, HitCoverage=29%, E-value=3e-11, Identity=38%"; Hit description =Peptide chain release factor 1, putative, expressed
  Pfam annotation: Domain name=PCRF; Domain location=366-444; Score= -34.0; E_value=0.0028; Accession=PF03462.9; Description=PCRF domain
  Subcellular localization annotation: CTP_CleavageSite=44; ConfidenceScore=5.16e-01
MARCPRRFATRSRSRPFSRSPTRSFRGLVTSHLEPPPSSVGPVACAVDWVPNYDNWLSAPVAPTSLCPWSSSHSNLLLTGHAVELLALPPHRRCRMLLLVATARALRLGMSGVPDEEAVTIVGKTSDWMTRLMSAYRLSVLTIAERKMVEGRRSEDGGRREREEDGAAVGCPMAVLVMARLEATTEGGAWLGEWWIDPIQLSWGKGENTVHATVAASFVGSPIHIQCCSDLPLLPLLVDAPSSHEECGTSISRESFQEEVKNLNPKVVMFGDNVPQERAESAKEAARTCDALLAMLITKVLNMQHGNHLENCFVDAYNKRYFEDSGLNITCQGLLFQSNALNKENGKLGPTTALFKAEMPWLAQRENLSEKQRVKSLQNGERCTEQTYTREITVRAGTGANEVGIWAGDLVGRMYQRYCEHNNWKFKSISWSYISTLKQQDLVEKGIFDIYEDVEKLLQALSKEEEVVRVWPGHLLRQRNT

SEQ ID NO: 64332 - protein, 172 aa, Zea mays
  Coding DNA Sequence Number=SeqID_20957
METGEACRELSVDDYLTLQYQAAILADQVASGALVSVATSQLRSERKRLEDKIERLRMQHTEVVRDKSVAKNKSWNLLDKIMSYASLVTYEGAANALSREGCRHFEAFGRSYKDFDLGVFQAKDDLLKRSVEALYNRMWGSHGREVVRERVDWALAQECVYPWWGCAFCLLI

SEQ ID NO: 64333 - protein, 136 aa, Zea mays
  Coding DNA Sequence Number=SeqID_20958
MQEDDVCLAVIVNKYFVQIPPCHSTIYHQSICARRTTEVNIPCIEGPVRATWLTLRYWSFFYHFVSNSELDPPGWGRCNPCLGVPRLCRGKDNIIFAAADLGLCLCLCLWLHCRCGLAVEGSHDDERCCLWSTADL

SEQ ID NO: 64334 - protein, 98 aa, Zea mays
  Coding DNA Sequence Number=SeqID_20959
MAPKKATSKATSSLDDTMKAALAEKKGKATLVGDVPHEALDDGVVNSKQPCSENPPTLRAPFAHAALKDYLGPSMRLHPPEANDVIEDGKILGISTED

SEQ ID NO: 64335 - protein, 42 aa, Zea mays
  Coding DNA Sequence Number=SeqID_20960
MACTSRVWGDQRARRENEEEVEIEEEKTAPPPPAEHQAGDRS

SEQ ID NO: 64336 - protein, 123 aa, Zea mays
  Coding DNA Sequence Number=SeqID_20961
MARVACTLRGKRLDGGSTFSKHFCKTESLIIEKPYLDSLITSIPLRVFSLVGARYRGPNPAWASQGGDDVRLVDFDRAFVLQQRGQRGTALVFIQSMPLACPGVFYGCSLHRSEEAMKALSEG

SEQ ID NO: 64337 - protein, 123 aa, Zea mays
  Coding DNA Sequence Number=SeqID_20962
MGTEHGVSGELQAGDPSGRPCPVRWGSARGPEARPKVPAGDLPDPVPWRRGPRARCLPPMGFRYKIVPAGLGNVLGYLGSTARASVMYRTYPWWEGESPNRLHPLNGGPLGAWKVNCQVACIR

SEQ ID NO: 64338 - protein, 139 aa, Zea mays
  Coding DNA Sequence Number=SeqID_20963
MAYATMFTGGETFALGSHIMFVSLNLLATTTGELHITDPNMSFTTGTRPARSTRSKAKKRCLKWCVAALKQYLNRHTDAIKQRAAKALPSTLSVISQHLSSTCSRTGQQDPQLGGRISVLARGAYPYPLGHPLVTAKGA

SEQ ID NO: 64339 - protein, 51 aa, Zea mays
  Coding DNA Sequence Number=SeqID_20964
MKSYTRPSSSVESDLSGVGSFTSGGSEEEEEKAEKTRHLGLVPESRLEVDE

SEQ ID NO: 64340 - protein, 71 aa, Zea mays
  Coding DNA Sequence Number=SeqID_20965
  Homolog annotation: Hit_ID=A2XMM2; Match level="QueryCoverage=78%, HitCoverage=10%, E-value=4e-15, Identity=71%"; Hit description =Putative uncharacterized protein
MVLTKIGLWYKHMIGMRRSELQKAEAKVMILSDKITAQLILLRKIYLALDHYSPTLLHPATDQGFYVGSLD

SEQ ID NO: 64341 - protein, 44 aa, Zea mays
  Coding DNA Sequence Number=SeqID_20966
  Homolog annotation: Hit_ID=A2XMM2; Match level="QueryCoverage=93%, HitCoverage=7%, E-value=8e-08, Identity=68%"; Hit description =Putative uncharacterized protein
MVLTKIGLWYKHMIGMRRSELQKAEAKVMILSDKITADSRLEGG

SEQ ID NO: 64342 - protein, 164 aa, Zea mays
  Coding DNA Sequence Number=SeqID_20967
  Gene Ontology: Mol. function=binding
  Homolog annotation: Hit_ID=A2YJA8; Match level="QueryCoverage=31%, HitCoverage=5%, E-value=6e-09, Identity=59%"; Hit description =Putative uncharacterized protein
MENQQLKEELPRSHETGLHQELGLLIDLGNDHDVLGEALENTETYTSSVPASDLLSIDQLLEMPWTTMWMNADYTTLVDSVATSEQTGGEIETTLEKTSAKIMATLEQTGGETEEPAFDPKHRLRAMVPHSSPSSRDSPVPPNLDGDVVPMAAGRPLPSRVVSQ

SEQ ID NO: 64343 - protein, 89 aa, Zea mays
  Coding DNA Sequence Number=SeqID_20968
  Gene Ontology: Mol. function=catalytic activity
MASRAAEFSFEPGVSRAAKPRWGWRAHGDGMTASFASVKDFGCDEKIPIIDDRVSHLVHAYEDRIVRVYAKKPELVSAHEVDVSPDDNV

SEQ ID NO: 64344 - protein, 68 aa, Zea mays
  Coding DNA Sequence Number=SeqID_20969
MALLLIADECLYAAASVRVSSLLIELRPWIVMRLLNLKPWGRVGAAGLGKRELRVMWERSAGHTIVIL

SEQ ID NO: 64345 - protein, 260 aa, Zea mays
  Coding DNA Sequence Number=SeqID_20970
MYVRNRFMSIQEHDEQYSRTVHADWAFAFCITLVPLLSFKPKVAFGAIYAQVKKKENGVEADLQEFQDIDEFEDLASDLPQSAACATGLHHAHHGHHTSALWQEDVCTKQKAQLKTLKNKLISSKNDYKGLLEKFETFANLNCELSTKIEQLETSAPSTATDDGLIKKNKKLKAKLASSQEAIENLLGKILSIHNNELTTKLENIVSTLGTSLVEIPEIIKKDASTSCFDLIDDSNPCNQVLVQNVVIETCSDEIALENE

SEQ ID NO: 64346 - protein, 66 aa, Zea mays
  Coding DNA Sequence Number=SeqID_20971
MSTTADDDEVNDVLGMLAGELSNSTRTESVTVATGHGLGEDEGVQSPESVRRKRSRRTSHPAAPTE

SEQ ID NO: 64347 - protein, 64 aa, Zea mays
  Coding DNA Sequence Number=SeqID_20972
DALLGHLGSDQWGVALSGQKGNHGLWRHYGTGGYEIDGFGYDYGAGEDEAAEGDFQEFQDYDEF

SEQ ID NO: 64348 - protein, 176 aa, Zea mays
  Coding DNA Sequence Number=SeqID_20973
MARLRCTARKSVIPFLPSRLAERPLHHIVSGQSSQLERLHRRLHEEQERRRQEQEQEQQDSSPSPQREVESERPPSLAPQPEMPPAPPQGIPAAGGDPDGDIDDDDAGGSSSHGTELSEEPEPDGWIARPITRDTARGCHFHDALDTLLRWAFDQHTWSIEYHCVVYQYRRGLYPD

SEQ ID NO: 64349 - protein, 57 aa, Zea mays
  Coding DNA Sequence Number=SeqID_20974
MAILLCFNPSMVNTRKGGGIDLPANPYNRRVLRQQQQQAEMNPPNPPPVGADPVISA

SEQ ID NO: 64350 - protein, 266 aa, Zea mays
  Coding DNA Sequence Number=SeqID_20975
MTSQAGLRQKQQTPGERHGVLSTGLHETASRQHAACCTFLRTAGGHHREQRGGGSLFAEEGTWENGAGRGESFLLLGRKMNREGTGKKNSGRPWEWLPLLCVVARPGTERGELQRGIHGKESSAGRAVNREKEKKTPWGTSSKGRPWRKSCCGIGLSPWMELGWGRKKLAGDAVQVLAAMGETRARCHGGSFSALRKKEQGAPWLAEGRSSPFGAVAGGACDCLAVEAVSHGRQRAEGMHAKEEEGWRGEKKTGRLWRLGRSEGWE

SEQ ID NO: 64351 - protein, 32 aa, Zea mays
  Coding DNA Sequence Number=SeqID_20976
MALVFKSFRQILKQRRGKITSSAPRKVLLQVV

SEQ ID NO: 64352 - protein, 82 aa, Zea mays
  Coding DNA Sequence Number=SeqID_20977
MGPCDSVTEIRASVWEADGQGPLVGTVHPPRAARMQGQMGRNWCSEPSFFPLFSTILNPNLEFKIKSQFKLILTLQFGHILM

SEQ ID NO: 64353 - protein, 297 aa, Zea mays
  Coding DNA Sequence Number=SeqID_20978
  Gene Ontology: Mol. function=transcription factor activity; Cellular component=nucleus; Biological process=regulation of transcription, DNA-dependent
  Homolog annotation: Hit_ID=Q2QM38; Match level="QueryCoverage=38%, HitCoverage=36%, E-value=3e-31, Identity=62%"; Hit description=CCAAT- binding transcription factor subunit B family protein, expressed
  Pfam annotation: Domain name=CBFB_NFYA; Domain location=241-297; Score=62.6; E_value=1.3e-15; Accession=PF02045.6; Description=CCAAT -binding transcription factor (CBF-BNF-YA) subunit B
MMSFRSSSHEGFGFGHAAAAASGAPLPWWAGPAPMLSGEPLALSPEAHCRDGRIQAPQGPPVPSVKAPVLAPQQPPPLPERGIPELLNLSVDPQGQELRIRFCLCLLARRLGQARGGHGMVASIMPNTVFMVPSIYGTEYMGGYSLDMLNPQTKTSCSYTLTTPTPTQKNGKGKKGSDHSATIALQSPFAIYNAHFELGLGQSMISADNSYADQHYGLLSPYPVGATPGGRLLIPLNRPTEAPIYVNAKQYDAIMRRRCARAKAERENRLVKGRKPYLHESLSLISNYELKPSIVTF

SEQ ID NO: 64354 - protein, 155 aa, Zea mays
  Coding DNA Sequence Number=SeqID_20979
MAGVLNPASHGPNPRIKGVFYAKEDETNYYDAELTEDDDTFGLSTARCGAAAAPNSGDELSKSTTTAQCTSPPHVAKAGMASGRGCIAPEARALLMCRNIGAREGLGVRCTGQLSRSKRGGGCAREETGGRRDFVCAVADQWVQRSQRDKTESAR

SEQ ID NO: 64355 - protein, 106 aa, Zea mays
  Coding DNA Sequence Number=SeqID_20980
MRMRLKLMKDKIKKMSHLKMTTMIKGEIQMIKIRRMRNQGRHTQESTKQSNEITPSTPSSGTFIRGVEEALQDSDWVVAMQEELNNFTRNEEPNGFSATSKMSMVW

SEQ ID NO: 64356 - protein, 59 aa, Zea mays
  Coding DNA Sequence Number=SeqID_20981
MTWGGGLVAGDDGGGGCAAKGKWGGGGAHGGGHACGGHGALAKVKKNFTTQCMQRTGHN

SEQ ID NO: 64357 - protein, 121 aa, Zea mays
  Coding DNA Sequence Number=SeqID_20982
MGWEARLGVGERVAPALSTGPLRSARAGRAGLSWPSHTGLPPYCGQAAQGCGTRRGEEEPPGGGRGSYLNDLVEIVVTVPSSMRGREQGRVGHARATWQGARGPRARRLHARGGWASAVER

SEQ ID NO: 64358 - protein, 49 aa, Zea mays
  Coding DNA Sequence Number=SeqID_20983
MPKNLHKLMMFVFWNTYEALCLSCFMFMRETFSEGPYLLVHTRSEMMEK

SEQ ID NO: 64359 - protein, 93 aa, Zea mays
  Coding DNA Sequence Number=SeqID_20984
MGTYKYQGKHQGKTGVEVITDKHTTKGVFRQNLQGVKEGEAVNDEIDEALSPNRDGKEEASKGRFKDGVKTGPANGKGEGTPKGQIGKLTLSN

SEQ ID NO: 64360 - protein, 197 aa, Zea mays
  Coding DNA Sequence Number=SeqID_20985
MALPVDVAGLCPRSGDVEAPPKPRGQGGVRALGSGEAEFRRLLGLSPSPSPGSGGVEFAVFRGLSPCPSPGSGRSGVRPSSGALAPSPSPGSGGAEFAVFRGLSPSPSPGSGGAEFAVFRGFSPSPSPGSGGAEFAVFRGFSPSPSPGSGGAEFAVFRGFSPSPSPGSGGAEFAVFRGFSPSPSPGSGGAEFAVFRG

SEQ ID NO: 64361 - protein, 478 aa, Zea mays
  Coding DNA Sequence Number=SeqID_20986
MSGLDSHNEQTPALKVPLQTELRFRPRGYEQPPHWRACGATSSGRLANDLCSSSDGPRTDAAAGRLSFASPLKGREPNIKAKEPEVGPRVALTGLSAEKLSPAATTSAPTAASTCPPAPHQRAPAAPKRTGSNSSPSPAWLEDASSVELGDGFHPQKLEEEVGRRPAREVELRLASPSAPSRIMNILEAEGGADVVARLASPHHQTGGHRLGECEDMVAIQGGHPPFKGNSPHLHPQPARTESSSTRSKVLPLRHGGWVPRVMQAGPGQKEPKPPRAERTMTQRLQAFLHYRPDQRVKGRTTMQAACNRTKGARPFNFDASSMEAQAHTSCNRRAGYYVRETAPPLAPLPRLLDCGTSAATRGDPAHDPTVPTEHIGHGSVSRGRKRDGRYDQKWAGSDGGGKRAEAAIKSSASSCPLMGQQENPLPWREDDAPVFRSSNGSRTHNGCPANHSTRRINSAAGQAAPLAGEAGDASPPP

SEQ ID NO: 64362 - protein, 284 aa, Zea mays
  Coding DNA Sequence Number=SeqID_20987
  Homolog annotation: Hit_ID=Q6QP51; Match level="QueryCoverage=45%, HitCoverage=67%, E-value=1e-09, Identity=35%"; Hit description =Putative growth-regulating factor 1
MAVAGGRKQQSSRQQAHAPSWDSERTLSHGVKDDDRRHLWQTKQATLHLRHNDRVKKGTGKGDTPKGILLREGRAPSPLLIRGSKAGPSEGFNSCLRELGLRAHYWSEVRRLAPRKGSTVASGHSGSAPTTDQGFVGWPPKGSTAASEHAERGMTLALGAIGSSASPNPRARAQPRHWTTDFASPDPRARTQPRPQKTVSASPDLGLGLNLDLGRRTLPRPTPGLGHSLGLGRRSSPRPTLGLGHNIGLGRRSPPRPTPRARTQPRPWKTDSTSTSEEHPPRPT

SEQ ID NO: 64363 - protein, 54 aa, Zea mays
  Coding DNA Sequence Number=SeqID_20988
MAGEGKEGGRRGEGGAYRARYLIKDVWITGGDDDDVYDYGNGKEEGVGADLQEF

SEQ ID NO: 64364 - protein, 447 aa, Zea mays
  Coding DNA Sequence Number=SeqID_20989
  Subcellular localization annotation: CTP_CleavageSite=14; ConfidenceScore=5.11e-01
MSVARSAFQPRRVHGSMGSVHPVRGPTRQQAARLFLFTHVHDFFNPKHPFTALLGNQQQGQPAAPARARDPGSACGRSAQHGGSTTGAAGVAARSGQPARDHGTAAGAVARGLPCAAACVASLLGLCPVRWLAASQCDARSLAPSPLSSPLLRACPTCPGVRPWLPSPPRGLCAILRDDKLIATKFKGFFSKTAAQRGIRSPQTSDLRSTAEIRSERERAHGRVNAADRWGRGGCDLGSAGLIGWAQLQSASEAANPGCLSPLPAAVPPDSAVKRRRRRERDRVEGSRGAGKGTGGAARLRGETSPEAQAGSRRWVSGRWEGHVKVQDGTADTIVVRPHRGVPGRWEGHLKVRDGTTDTIVGTTPTQGHQRLSICDKGGLGSTVAELRLYGEKACERRSGETEGLGANQRVSHIAGEDAELTEATGTPDAQRRPRNRRRITTELHGR

SEQ ID NO: 64365 - protein, 235 aa, Zea mays
  Coding DNA Sequence Number=SeqID_20990
  Subcellular localization annotation: CTP_CleavageSite=80; ConfidenceScore=5.53e-01
MSRISWSNSSSWSVGLVAFLFWLQASRRERVSWFGSSGCSAAAPVAEAFFGGMTKKIWFASLLALSTLMSFFLRLGVSVRVSDIWLRYMWGALRFNSPDCPVHQWSNNYFAQRSPAKAEDSEEQCATLRGRVELPVRGAPDTEQCLSGAAPDYLVPLEDKASNGQKLLNPNDWVTWLAHWTVSGSAPDCPVRPSTAVIPNGYVVVEGYKYPQPPPLQASKISEYHIHYKSSSIHS

SEQ ID NO: 64366 - protein, 76 aa, Zea mays
  Coding DNA Sequence Number=SeqID_20991
MVSGGGALACARRGGGCYRDFVPGQRNVHCLTTQREVPASVSPTDKEHDKAQLQSNDGTKTVPLDQATPKQTVTIA

SEQ ID NO: 64367 - protein, 163 aa, Zea mays
  Coding DNA Sequence Number=SeqID_20992
MASDCAAASGREQQAGCDAVQINRSKGLASSEEGGEEEAVGTSIDHQWRLWSFNERVNGGEKGEERNVTVKFLNAEETDGALGLRAGSVGAGGRASRACSGSALLALGSRRGPDAGQGRLLGLLGAGGCSSGSWRVGVDCAGAGRGCRGFRVGPGSSGHGACS

SEQ ID NO: 64368 - protein, 73 aa, Zea mays
  Coding DNA Sequence Number=SeqID_20993
MPLPKFLAVVLPQLLLCLPPSDTTVCHRARRHSDMILMFQMFDHFQHLRNEDSREKPRSETLAIHLGSEYGSS

SEQ ID NO: 64369 - protein, 44 aa, Zea mays
  Coding DNA Sequence Number=SeqID_20994
MATAAFTKRLVLVTSNRDTTPQLLMFTMFIFSFKLCPGDVPDLH

SEQ ID NO: 64370 - protein, 123 aa, Zea mays
  Coding DNA Sequence Number=SeqID_20995
  Homolog annotation: Hit_ID=Q60EN6; Match level="QueryCoverage=62%, HitCoverage=8%, E-value=4e-23, Identity=70%"; Hit description =Putative uncharacterized protein OJ1212_B02.13
MRRPRHRSSSGDVWDEGTKEQQQQQKLKADHLSRDLAERLTYHQKEHGLQGHFEDDRAVLPIADNGRAVDNRIVALDTLHKRLDHEQRSRHEETLGYDSSSMSKAWELLARVDHAEKVTASCR

SEQ ID NO: 64371 - protein, 160 aa, Zea mays
  Coding DNA Sequence Number=SeqID_20996
MRAERGARRTGARVRVAWVFVFPSLWSLDTPHGAWARALWSRAPRRGRLGAYRAGRNPVGPWGRQPSGRTLVDAGTQSGGWQAELGASRGIAGWQAELDACYRLPARVAGCRRGWNLEAELGACCRLTPRPTACAAGCRRDWNWKRKASAGGRGRQRLSE

SEQ ID NO: 64372 - protein, 345 aa, Zea mays
  Coding DNA Sequence Number=SeqID_20997
  Gene Ontology: Mol. function=protein binding; Cellular component =integral to membrane
  Homolog annotation: Hit_ID=Q60EN7; Match level="QueryCoverage=66%, HitCoverage=95%, E-value=2e-74, Identity=82%"; Hit description =Unknow protein
  Pfam annotation: Domain name=DUF803; Domain location=17-200; Score =227.1; E_value=4e-65; Accession=PF05653.5; Description=Protein of unknown function (DUF803)
MGGAQLVGRWVESYTGMSTDNIKGLLLALSSSLFIGASFIVKKKGLKKAGASGVRAAFLCYAAVVLAAAFVLIFHFVPEYGQTHIMVMSVKALGIALKLTFSGMNQLVYPQTWVFSSVVTLCIVTQMNYLNKALDTFNTAVVSPIYYTMFTSLTILASVIMFKDWDRQNPTQIVTEMCGFVTILSGTFLLHKTKDMVDGLPPNLPIRLPKHADEDGYAAEGIPLRSAADAGRLTHSVVDRWVAAAMPKSCASLRFLATANFTHHVASKYMSLAAGRQGEIQRAIQRTAAAHVGGARARNSQLAQPRARTYERTFSDWRTDRMFLLPSMTGRRRRRQAQRPGPGKQ

SEQ ID NO: 64373 - protein, 101 aa, Zea mays
  Coding DNA Sequence Number=SeqID_20998
MKLWKETSRSSKITTSSRCGLAATPSRLPVKAAFIYVSFPHFDLLAWAGFCWAVKAQMIAPRVTKANSVIDTSCADRPHSNLRVTKAGRCVSTPHAWAVPS

SEQ ID NO: 64374 - protein, 87 aa, Zea mays
  Coding DNA Sequence Number=SeqID_20999
  Subcellular localization annotation: CTP_CleavageSite=45; ConfidenceScore=5.29e-01
MAPPVDVAGPRPRLGDVEAPSRSRSSPSSVAGAESEPLGRARRSSSSSGAEPKSEPWVGWSRVRRLPGLSPSPSPGSGGAEFVVFWG

SEQ ID NO: 64375 - protein, 87 aa, Zea mays
  Coding DNA Sequence Number=SeqID_21000
  Subcellular localization annotation: CTP_CleavageSite=45; ConfidenceScore=5.26e-01
MAPPVDVAGPRPRLGDVEAPPRSRSSPSSVAGAESEPLGRARRSSSSSGAEPKSEPWVGRSGVRRLPGLSPSPSPGSGGAEFIVFWG

SEQ ID NO: 64376 - protein, 121 aa, Zea mays
  Coding DNA Sequence Number=SeqID_21001
MQAACNRTKGAHPFDFNASSMEAHTSCNRRAGYCVRETAPPLAPVPRLLDCGTGAVTRGNSAHGPTVPTEHIGHGAGDTFGRRSRQHFTSAMMTASKKGPGKGILRKGSFSAKEAGPEPSY

SEQ ID NO: 64377 - protein, 289 aa, Zea mays
  Coding DNA Sequence Number=SeqID_21002
MATTSPWMGRSKSGCDLGPALSFKDVHHPCWGGERGEPGLYLLRGPAGRLLLRRSRERALTGPAGGLDFDNAGLVDGGRRQPQRVGLASLAPGAPSCRKGDCRAVRTGGPPKTSRAARAAFVFWGGPAFAPESLGSVDLAVRGFSCLVKGTPRPLFDEPRPGVAVSAWAEAESSQKEDLVGRSLAGSSVSGTDAGVDLPRPRAGLMSSGDSWPRPRGDQPSRLLEPDSRRRLWRRWPGHDDDVVLQSGDPRTVSPSEARSDLAEGAVDAEGAAAPFNRQDPALQDRIIL

SEQ ID NO: 64378 - protein, 345 aa, Zea mays
  Coding DNA Sequence Number=SeqID_21003
MAERYQLPRSCVPPTTRRKHCGHPPSGGSEGGKTRCIREHEDMVTFQGGHPPFKGDSPYLRPQPSWAESSPTRSKALPLRRGGWVPRVMQASPGQKKTNRRVRCMQPSSGYKRPSTFAQTSGPTRHATGAPDATCEQLHRHSRHCHASLTAEPVPRLEATLRMTQQRQPGATVNTTKNGPAVMAVAAGRSSGHVVSKAYVPSGGSERTLSHGMKTARPCSVPRTARARTTATSRTARSVALTPRRDRRRPWQEKQATLRLHRNDRVKKGTRLRASLLIRGSKAGPSEGFNSRLRACGLHTHYLSEVRRPAPRKGSTAASGHSGSTPTTDQGFVGWPSKGSQPPQT

SEQ ID NO: 64379 - protein, 75 aa, Zea mays
  Coding DNA Sequence Number=SeqID_21004
MAARWLPPRDWAWDLTRGARDRRNPVGGAGGYARQLQDYEQKDLAGRLGPPREQELELKPEKDDAHDVWPCNAAK

SEQ ID NO: 64380 - protein, 95 aa, Zea mays
  Coding DNA Sequence Number=SeqID_21005
  Subcellular localization annotation: CTP_CleavageSite=4; ConfidenceScore=5.05e-01
MKFEANHATKRSVITTKAVPDGTIAKRSAGSVNLVTGDPAPGFAPGATIRAQRSIDNCSGLAGAKAPPSMVGDLTLQKNRKGRGLNGDISETEKQ

SEQ ID NO: 64381 - protein, 156 aa, Zea mays
  Coding DNA Sequence Number=SeqID_21006
  Subcellular localization annotation: CTP_CleavageSite=24; ConfidenceScore=5.60e-01
MGAIKVKAQSTQGTRSRLARAQPRAKAADPGGFTSRPRAPSSNGHTFGSPEAQSSQRSNLGQIAMLTDRLRLNLDARRRTPPRPTPRAQTQPWPRKTVSASPDPGLGLSLGSGRRWTPPRPTPGLGLNLDLGGIATSPKLGSGPATSPGGPSLPCP

SEQ ID NO: 64382 - protein, 147 aa, Zea mays
  Coding DNA Sequence Number=SeqID_21007
  Gene Ontology: Mol. function=hydrolase activity, acting on ester bonds; Biological process=lipid metabolic process
  Homolog annotation: Hit_ID=Q3ED52; Match level="QueryCoverage=97%, HitCoverage=45%, E-value=9e-22, Identity=42%"; Hit description =Uncharacterized protein At1g28570.2
MDTGNFIHLIGKAPSKYKEAPYGKTFFRHATGRISDGRVLIDFYAAKKQFLSDSLVIMGGIGQNDYYSYFIKGKPPKDGNIISDVIADISHFIEELIVVNGAKAFVVANNFPVGCLASYLSRFHSDDHEDYDEHGCLKSFNEFSQKA

SEQ ID NO: 64383 - protein, 241 aa, Zea mays
  Coding DNA Sequence Number=SeqID_21008
MAGWARITRTRGGSSAPRGLRCREQGGTRRGVAAGVLAGAGRIVGQRSGALRLAGREDEKATTTTQLGKGGQDTAGAAALRAEEERGDGAAGACLPSQGSHEDAARHDEEQRGTAPCMGVTDLTPLIGILPPRFKKKLGRKQDAWDRLMQFLRISWTYGLGPTHASVVPCAARAAGAGRGAVVGGSGGAGREGRGNGSANSCFGATWARELGRLESGEEDLPWAWPWRAGALGGWTRLRLL

SEQ ID NO: 64384 - protein, 97 aa, Zea mays
  Coding DNA Sequence Number=SeqID_21009
MAKLGEKVSPGAKVGTRSDTVLGESLALKSLRQGHDRHPGGLIYPHGPSPRDLHRRARVFPMANIILTLPPMAVGYGMTRIRVPARWKEGRGYRDGF

SEQ ID NO: 64385 - protein, 148 aa, Zea mays
  Coding DNA Sequence Number=SeqID_21010
MGASNRTMAYRLVVATRAGERNNSGEGGTVSPVRLRLVSCFGELYRALGKLAEALDRLEVTGKRLQIFTNLGKIVLLDMFLGVCFVVFVWAPRGFRPCTGVPKVSGHQDPGANIITRGCETARVSSHTFIAQQVVGNNVHELAKGGSS

SEQ ID NO: 64386 - protein, 68 aa, Zea mays
  Coding DNA Sequence Number=SeqID_21011
  Subcellular localization annotation: CTP_CleavageSite=18; ConfidenceScore=5.33e-01
MGGSVRMMFAMGKTLARRCYTVSHRRDFNASDSPNTVSDLVPTFAPGETFSPSFAMFLSTASIVLRME

SEQ ID NO: 64387 - protein, 185 aa, Zea mays
  Coding DNA Sequence Number=SeqID_21012
MAPSVSMGKNVGGRETAALKLLYAEGERSRAGSLGRDTRASGWLGGPGAVGRPSAVLGARVARGVGIGAWAALLGHGGAVPGVGLLGAAQQWLGASWCSTSGGQLRPGDCAWKGSKGRGEEIEGWVGPACKREKRGGGKFLAAVAASAGRGTRVAGSSVLANLLPVEVVTKTGSLSTLFLSQTVT

SEQ ID NO: 64388 - protein, 467 aa, Zea mays
  Coding DNA Sequence Number=SeqID_21013
  Homolog annotation: Hit_ID=Q6J9V9; Match level="QueryCoverage=25%, HitCoverage=43%, E-value=5e-12, Identity=42%"; Hit description =Putative uncharacterized protein
MNGGNHPRGGEPSFLQLLQGLQKGLEILLSLARGPVAPVIGGGGHHSLRKRREPRVVISEIKSPALPPFVRRREDGRDVLQRPRLPQLEDAATGPHHHANSSFPRRRGKKLCEEEMGPQVPMGGNPQISFANRREDGCLLDGVGTEIVQVHPVDVQNRPHKTARRHSEPPLVKGDEAQHIPRRRGRGGSARRGHPLRLRVTGERAKQIISNKGLQIIRHDGGERPRVARRNNGHPVGHHQAEEVAAERTRTGGTFGRRSRRRFTSAMMTASKKGPGKGILRKGSFSAKEAGPEPPTDQRFEGWPLGRVQQPPQSTRAPRPLLVRGSKAGPSKGSTAASGHSGSAPTTDQGLGLRSRGTLGHFRDRRERFCNGIPPEGGIEPSDPVKRGSGPANHPQGQGSVHSRDTISPQPRAKAADPGGFTSRPRAPSSNGHTFGSPEAQSSQRSNLGQIATPTDGIAGAFNARIA

SEQ ID NO: 64389 - protein, 75 aa, Zea mays
  Coding DNA Sequence Number=SeqID_21014
MAGGDRIGGLFPKLQLNKPRMDTLEPESHYCWVSATTVIYLLAERGGAVDGVEKRRRENGSTSRLGRGVFPCDNE

SEQ ID NO: 64390 - protein, 83 aa, Zea mays
  Coding DNA Sequence Number=SeqID_21015
MRRAYNQRGAERAATARSRSTRGHRREGDSTVVDMEKSAAKEAYGTALRGRRAPGPIAKSRVELDAMAAVLLPGLLPGPAERP

SEQ ID NO: 64391 - protein, 34 aa, Zea mays
  Coding DNA Sequence Number=SeqID_21016
MEPGTYGWRWKSWSLNQRETNSSICTVELEEVWC

SEQ ID NO: 64392 - protein, 113 aa, Zea mays
  Coding DNA Sequence Number=SeqID_21017
MAHRTVRCTPDSPVPPATSHCRWILTVGASDVWARLGVRCTPDIYCSLSAESPLEIPEGGELELESSGAPDTVRCTPDSPMLSDQRAFGSHYAPLLNPKLGLLLAECEPFTPV

SEQ ID NO: 64393 - protein, 883 aa, Zea mays
  Coding DNA Sequence Number=SeqID_21018
MKQLGYFGSGVGRVLGAEEVPEPEGELVMFEAFFTASLRMLAHRFVAEKRKIGHTIAQFGSCTFTPRTGKTSMEVVELVPCARNKWGNWWDFWFYVSEREVEDHLGLPVAVMCSHYYVAYPQFEVAEDDEDEGALRCVSRMSSGRDLVEEFIGYGVWPLAHGWALGEVCPREMPSLGGRRVRSPAFTLDLHGRDPAAFVREAEDGAARIVGHYVPRTEGLRSWDICGSNVRLNRVFELNCLPYGGYPGDDAVDRRGKKSLDVTEEGPSLEAAPATKKRKLGIAVGVGVSESFAVDLMVTCAALGGRMSSPELRESSTRMLEVTGGRWPKNVLIPRAAGEDFFTSRMARDLKVFPYGRNIVAVVSTVMEKDHQDAAQKRRAVVRIVDPMREVKKVRGSAKAAASGGSKPVLATKPAAPGHSKAAASPKAAAPGGSKPPPGELRKGQRPLSSARRIADFGADINVEDYLVGSGEGQLVVVPPLVVTTSPTAMAADFADLVASGALTADVAAEVERLRAQHADSVWEKSAAESKNRRLSEKVAAMEAEKTDLWRQLAEERREANKAIADVQAAQAEAKVARVERSLARQRAEELEARFNALRSRVDKAESSTRAEVEWTHAQFVDAYRELGITRFSNRRTTILNVKSFKVEDPVVKQSAGALFDRMWSPHGREAVRERFDRAIEQMAHAEDVEDLVGLDGALSEAAEVDPVLGFGPAHATSTDNVIFVAASTVAADDDSFGSVSKCFESNDSGSSIVWTEESLDDDLDYFAALDVAAAETSPRVVGAEDLPGASTGCRRRRAVAKRRVSELSRSNRRHCGEMESGRLRVDGTGKRELLSSPAGASVGEGELQNLFEGEELRIMLFNYREMGITPKVEPMFLMPSLC

SEQ ID NO: 64394 - protein, 447 aa, Zea mays
  Coding DNA Sequence Number=SeqID_21019
MLLKVSLDDASAGGVFAVDEEEDDMATYRRQRRAVCLMRARSPTSRSKEGRRAGKRTRPFGKPAVQQYHVRQRSHQKTPWNHFERGQRLHHLATSSTPDDLVELVPRRANVGAKAKTLPFAPAFVNLAAPTEAKRTARSTLRLRHYKTKAYDDVAPSHVLTRPGGPRGIRPIVTGPARRTGGHGDMDSNEPTLDGGDGATSEGEEAQCPVHERLGRRASPSHHMEALDVSCMGGSTEEASAPIFSSEDDLQLTCKPPSPDRAGPCLGVAVTTPIVLSYDVLKSPVKIVYSRRPATQCTSAALTLETQEGAIDFGVVDAHVLPVALVDDATQLRGLSSSSLGPTSMELVDLPVAIGKDRFIQSIACWSNKLLSMPLLSKRKQNHRKLIKYPPCRNRWIMGAGVEFSSDVLSTRSKRKALRSLELIGENEGLHDQALQEYARLFAKPPI

SEQ ID NO: 64395 - protein, 446 aa, Zea mays
  Coding DNA Sequence Number=SeqID_21020
  Gene Ontology: Mol. function=hydrolase activity, hydrolyzing O -glycosyl compounds; Cellular component=integral to membrane; Biological process=peroxisome organization and biogenesis
  Homolog annotation: Hit_ID=A2X929; Match level="QueryCoverage=99%, HitCoverage=86%, E-value=1e-152, Identity=60%"; Hit description =Putative uncharacterized protein
  Pfam annotation: Domain name=Aa_trans; Domain location=1-442; Score =266.9; E_value=4.2e-77; Accession=PF01490.9; Description =Transmembrane amino acid transporter protein
MAHIITAVIGSGVLSLAWSVAQLGWVGGPAAMVFFAGVTAVQSTLIADCYICHHPERGGVVRNRSYVDAVRIYLGSRRWLPRVPGDKSHLFCGFFLNLSLFGTGVVYTLTSATSMRAIRKANCYHREGHDAPCSVGGDGYYMLLFGLAQVLLSQIPNFHEMAGLSIFAAVMSCFYAFVGVGLGVAKVIDISLFEIIDRALARLPSANGVIMGGIGGIPLVSTTQKVWRVSQALGDILFAYPFSLVLLEIEDTLRSPPPESETMKKATRASIAITTLFYLCCGCFGYASFGDGTPGNLLTGFGFYEPYWLIDLANLAIVYTQPVFAFADRKFGGGATVVEAPLLPVPGARRVNANVFRLCFRTAYVAATTALAVWFPYFNQIIGLLGSFTFWPLAVYFPVEMYLTRNKVAPWTNQWLAIHAFSLVCLLISAFASVGSAVGVFGSETS

SEQ ID NO: 64396 - protein, 171 aa, Zea mays
  Coding DNA Sequence Number=SeqID_21021
  Subcellular localization annotation: CTP_CleavageSite=86; ConfidenceScore=5.39e-01
MDYSAPAGSRWKLAPGSLTSGGDHLYSKRLASGGGHLCTNGSPTTVTTFAPVACRRRWPPQRVRRGPRLRPPMGVRTRPSKNAVATSMAYAVLYDPPAASEQCGRRRKGCHGCGGPAHDATVARAMDGQPRPAWRREAALEAAPKPSKPKRWIRNIARVTPGFRRQTECEP

SEQ ID NO: 64397 - protein, 206 aa, Zea mays
  Coding DNA Sequence Number=SeqID_21022
  Gene Ontology: Mol. function=RNA binding; Cellular component =cytoplasm; Biological process=nicotianamine biosynthetic process
  Homolog annotation: Hit_ID=A2X931; Match level="QueryCoverage=98%, HitCoverage=60%, E-value=4e-78, Identity=75%"; Hit description =Putative uncharacterized protein
  Subcellular localization annotation: CTP_CleavageSite=54; ConfidenceScore=5.03e-01
MQSSPAYSWLGGSQGSSSGLIVKKTMKVDIPVDKYPTFNFVGRILGPRGNSLKRVEANTDCRVLIRGRGSIKDPARSTITYPLDTRYPVDTRWAWVRVQFLVRLAWWEEMMRGKPGYEHLNEPLHILVEAELPVEIIDARLMQAREILEDLLKPVDESQDYFKKQQLRELAMLNGTLREEGMQRSGSASPFHNSLGMKRAKTRGII

SEQ ID NO: 64398 - protein, 565 aa, Zea mays
  Coding DNA Sequence Number=SeqID_21023
MVRSPAFALNLQNHDPAAFVREAEDGAVRLVGRYVPRTEGQRSWDIRGSNDRLNRVFELNQLSYDGYPGQDDVDRRGKKPVVETGDDPAPVAAPSSKKRKLGTAMGGLGVSDGFARELMRTCAAPGGRMSSPELRESSARMLRVTGVMDKDRQGAAQKRQAVVRLHEARPKRQRGAAKAAAPGGGKPPLAVKLGVPASSKAPEAAAGAGGSKSTKAVPPSSRVAEVTKAARVLPSSGKRVADFATDISVDDYLGGSDEGQLAIVAPAAATTAAAIVPKAKGGALSAGGEMSALAAVRDEAGAASRRLKEVTEALSQVVDFANRTTSGALTAVLSAEVERLRTQHADAVREKSAADSKCRKLADKVAALEGEKADLWRQLAGERRETNEALAKAQAAQAEANLARAEGNLARERAEQLQERLIALESRVERAEAATRAEAERTRKQLMDSYHELGARTGDFEVPEREPGLRCLEWVQEELQALPTIVEGFMSYASLVTSEGAMNALSREGCRHFEVFDQADEDFERDIYKVEDPIVKESTGAIYDRMWGPHGREVVRERAETARAQ

SEQ ID NO: 64399 - protein, 142 aa, Zea mays
  Coding DNA Sequence Number=SeqID_21024
  Subcellular localization annotation: CTP_CleavageSite=53; ConfidenceScore=5.07e-01
MAHRSNFGPLEAFSPPFSLLCPWIHGLFPAIKFVVAPSPSLPNSGDPGATLARASLNSGDLTATERSGAACSRLFSPWAVNGGPGHIARSAKVGVQRFFRFGFVSHPPWGGGDAGNMDDFEEFQEYGEFQFFLSGKPPVSCL

SEQ ID NO: 64400 - protein, 96 aa, Zea mays
  Coding DNA Sequence Number=SeqID_21025
MQYNGSSSLITCEKQMIRIEFLNLASDRTCTHHNRNGRLRLRSREEINPWAGSLSCGRQILDGRFWCWLLDYLLSNSLLRNEDILFVSEITIYRMQ

SEQ ID NO: 64401 - protein, 179 aa, Zea mays
  Coding DNA Sequence Number=SeqID_21026
MTSHESTEGGNAHSHTDGLAQEGFPRILWEVLQGAGYATPPQYAVQLFEEHRVPRCRLSTHPIGLFPAEKEDNPMWKDRVKHSKDVWALYPGHTAHLTVRCMNALYHLQALRGEAMSQLMGLVESTKITLDNREDLVVDLSTELVEKDLQVEQMATQIQELEDQVEAKENTIEVLEDQL

SEQ ID NO: 64402 - protein, 125 aa, Zea mays
  Coding DNA Sequence Number=SeqID_21027
MEHGRGGAVHSDGNWPDSGHGVGPSPRSPHPHKPRNRDPLHAASTVLSLQWWLDNGATGSDGLRGMVARGTALYGSQYEPHTKATTIETAARELRLRDPSFLVRPDAMVPKRMGMKKPPTHGPHA

SEQ ID NO: 64403 - protein, 124 aa, Zea mays
  Coding DNA Sequence Number=SeqID_21028
  Gene Ontology: Mol. function=aspartic-type endopeptidase activity; Cellular component=chromatin; Biological process=chromatin assembly or disassembly
  Homolog annotation: Hit_ID=Q2QSA6; Match level="QueryCoverage=33%, HitCoverage=3%, E-value=3e-08, Identity=65%"; Hit description =Retrotransposon protein, putative, unclassified
MSSLPEATSGKLKSRFYGPYLITELINDIAVRLALPPGSNLNFTNFKPIQTKIHYFMERALARIPRLSAIAAKLTREPPCMQLPYCPCPFRDNYPSEVGVNKVFSLSGLGANLTETQGLWRKYS

SEQ ID NO: 64404 - protein, 100 aa, Zea mays
  Coding DNA Sequence Number=SeqID_21029
MIRFKRELARTDGRARLIGGVGKAATWGQAIRSQMDTLDLMAGSGWVAGLLAAAPPDSTAKFRQRRGNGHGGGLGAGEALRQARGDMADSAMGTTPAQRH

SEQ ID NO: 64405 - protein, 129 aa, Zea mays
  Coding DNA Sequence Number=SeqID_21030
MAVMGSTSEKMYLCQEILECDTTIEWTVNSRSFAWDCEAKALARVAELSASLENLQAYCNTLHEEVHVLYDRLHLNMPPEVAAMGTRPSGTADGGPNGELDLFAAPPSMNLADERSPEAGSGAAKDEED

SEQ ID NO: 64406 - protein, 120 aa, Zea mays
  Coding DNA Sequence Number=SeqID_21031
  Subcellular localization annotation: CTP_CleavageSite=69; ConfidenceScore=5.55e-01
MIKGLWLGPMAQYFARKPPKLWRSCFRKWMSTSGLTTTSAKEGRKLTAPVRMMTKEASFRGHSTLHSPRGSNKAPSSRQLRGAEAPGASEDDMGINLGKSIAYSVVRTRDILQECAKSLF

SEQ ID NO: 64407 - protein, 208 aa, Zea mays
  Coding DNA Sequence Number=SeqID_21032
MAVTSALPGARVRMKVSGHLCVKCPCNLVSRCGDLVKVASERSQGLGRAGDVSAIKRGPRARRKSLELYADGGYQLRIRRLEGTPNYGPRQYPPSLEGSVSTRLEAFVALFCKGTSLSRLHFVPAGADGSPRVAALAPQPKRRDGGTSGGAVACMQQLARRLLDAWAWVPKLACQKLEKRVHLARLHATCMAARPFCPLVWAKMGGRL

SEQ ID NO: 64408 - protein, 83 aa, Zea mays
  Coding DNA Sequence Number=SeqID_21033
MECREIIDLVKRVSERREQSPRDGSPPRRRPGKERVDDGEVAAAERDLGNGYFVRTRTLPSNTDGNSGSGPSPMASTEPRRVP

SEQ ID NO: 64409 - protein, 108 aa, Zea mays
  Coding DNA Sequence Number=SeqID_21034
MELGLRLKADVITFAFCKVLVRGAKLCVRTPWTVVLDTRAPVAEWWSVQAHGQQAGFMRADLTELAYTVPPSWGSVYGTLLGSVLAIGLGPDPEFPSVFDGRVLVLTK

SEQ ID NO: 64410 - protein, 107 aa, Zea mays
  Coding DNA Sequence Number=SeqID_21035
MGRSALRLRPRWELSRKALGVLSNWKWVQSLFLRVTDSLRKVSFDGGVQFGRATQAAGDKEEYRRSEYVFNAVAAIPVSNGELNSSAAKILYPATLSFYPTRESWRR

SEQ ID NO: 64411 - protein, 264 aa, Zea mays
  Coding DNA Sequence Number=SeqID_21036
  Gene Ontology: Mol. function=nucleic acid binding; Cellular component= ribonucleoprotein complex; Biological process=regulation of alternative nuclear mRNA splicing, via spliceosome
  Homolog annotation: Hit_ID=A2WYW1; Match level="QueryCoverage=91%, HitCoverage=52%, E-value=3e-95, Identity=72%"; Hit description =Putative uncharacterized protein
  Pfam annotation: Domain name=RRM_1; Domain location=180-251; Score =82.1; E_value=1.8e-21; Accession=PF00076.13; Description=RNA recognition motif. (a.k.a. RRM, RBD,
GSSVPLVVKWADTEKERQARKAQKSPFQSSNMLNANAMRQNSVFGALQMGYVPQYNGFGYQPQGTYGLMQYPPLSPVQNQAAFQNMVQPINQASSTRGANSELPPDLVPRSFNSTQLGSPYSPLPGLQYPGVYPGGPINHRPFSNSHSSTKVQNLNANLPSSSPSSNPAPQIEGPPGANLFIYHIPQEFGDHDLANAFHSFGRVLSAKVFVDKATGVSKCFGFVSYDSPASAQAAISVMNGYQLGGKKLKVQLKRDNSKHSKPF

SEQ ID NO: 64412 - protein, 331 aa, Zea mays
  Coding DNA Sequence Number=SeqID_21037
GKLLVEGITQCAVWHRHTVLQQTQQARRLLDDLDAVCQRMGRDTLNAERAHHPSTQWQAARPLLNKCRGYTTLRQARPDGLCHGPQAAGLRLRGERRTRPAHVSAPDPCIPQGPSRSGPLPGFGPPPGLRTCMTSVFIGLAGVGGPKYRYAFGYQLYSRHALYNENAVACDHMVRCHTRVSRAQRPVREIITRVDAIEVGGYKRPRGRERESLFVSPSSRATTSSYEGLGPSFYRCRALGSGEAETVFQGRGGGRAPGSGEAEAVFRGRGGGRAPGSGKAELPMAPEAGLGCCQPHLGGWHNSRSRAGDTVFLSGQSVEGRSDCGRFGPAD

SEQ ID NO: 64413 - protein, 31 aa, Zea mays
  Coding DNA Sequence Number=SeqID_21038
MSPKPCPINHWILLKFNLKVPLASLVVIIQS

SEQ ID NO: 64414 - protein, 143 aa, Zea mays
  Coding DNA Sequence Number=SeqID_21039
  Homolog annotation: Hit_ID=Q9ATL1; Match level="QueryCoverage=32%, HitCoverage=17%, E-value=9e-07, Identity=54%"; Hit description=Gag protein
MQAKVRQMILDEEQKARELEQQVADMQGEGRHQMQQNSPYIPAMAPTTFQGINYLNERSPLATQLQASPWPSNFRAETTKLSSFITYNNIGLKTLSTECTFASLIRQKEKASQGHAGLWESRSVTKTSYPRSYGDPNRLIPSW

SEQ ID NO: 64415 - protein, 189 aa, Zea mays
  Coding DNA Sequence Number=SeqID_21040
  Homolog annotation: Hit_ID=A2XFR6; Match level="QueryCoverage=71%, HitCoverage=39%, E-value=2e-10, Identity=31%"; Hit description =Putative uncharacterized protein
MARLRCTARKSVIPFLPSRLAERPLRRTLPGQSSHLERLSRKPCKMQHYSITKRDTNEAAMQDAARRTLSQYCSLFSGVADGLDLKYYPCRSTGTAGGVIASPVGEGNPRLNSMVNLAVVLNTELDHALDELGKIRAEVAELRAECAARHYLDGGSPTPVGIQHPYRSPPRGRFDYGTPDCRTWIDLDP

SEQ ID NO: 64416 - protein, 175 aa, Zea mays
  Coding DNA Sequence Number=SeqID_21041
MSNYVIAVYVHCTKVCDPLFAFSPGGASTTSHSASGVADGLDLKYYPRRSTGSAGGVIASPVGEGNPRLNTMVNLAAVLNRTTPLTSWARFGWMLRNCVLSAQHTTIWMVVLLPLSGFSTLIVHRPVVASTMMSENRRRGARHAQPKQQAPQEEAALQQHLPPPPPMTIEQMFLM

SEQ ID NO: 64417 - protein, 120 aa, Zea mays
  Coding DNA Sequence Number=SeqID_21042
MPYRSYSGPPETFSPPFSPLCPWIHGLFPAIEFVVAFSPSLPNFGDPRATLAHASLNSSDLAAAEKSSAARSRSSPWSYPLRPIQIARLRSRITLRASAPDTLARLSVPKSPGAGPARPL

SEQ ID NO: 64418 - protein, 47 aa, Zea mays
  Coding DNA Sequence Number=SeqID_21043
MELSLSPADVLGEGALLLTRAQRMREGKGFTRFSFYFHMVDLPPVDR

SEQ ID NO: 64419 - protein, 157 aa, Zea mays
  Coding DNA Sequence Number=SeqID_21044
MGGCARAGDVPDGESGRGGGRCVHRAWTQQGDRTERQRGAAVGRGPADGVASWARGVGAAGGEVNREGGHGGVLAGGDAASTWRGRGCVRPEGGAADREGGRGGTLAAGSGRRGDGLERSRLRSARGWGARWLPAAPRQQAARAVGSEGGREGWEWY

SEQ ID NO: 64420 - protein, 96 aa, Zea mays
  Coding DNA Sequence Number=SeqID_21045
  Subcellular localization annotation: CTP_CleavageSite=29; ConfidenceScore=5.19e-01
MTMGDGMPSSPLSSLPFFFLSSIGARHKRLMAARGGRTWLLGLGRYKYKKTSTILISNGSDQPALEKAHPDSKQGKLVIDWNHLDEIYTSTASNHP

SEQ ID NO: 64421 - protein, 220 aa, Zea mays
  Coding DNA Sequence Number=SeqID_21046
  Subcellular localization annotation: CTP_CleavageSite=3; ConfidenceScore=5.41e-01
MATAARATTPTFLLTRSQKDGLLGPSLATLLVGVTSTMRLTPCYVGHLTAVLGPSSIAVWSTSIVAGEQSLGAEVCSEHYSISERDSAEAAMQDAARRALSHYCSVLGGVADSLNLKYYPRRPSGSTGGVIVSLVGEDNPRLSSTVNLAAVLNTELDHALDELSRARAEIAQLRAERAERRHLDDGSPAPVGTQHPYRSPRRGHQPYGNPDCKTKIDLEP

SEQ ID NO: 64422 - protein, 244 aa, Zea mays
  Coding DNA Sequence Number=SeqID_21047
  Homolog annotation: Hit_ID=Q6QP51; Match level="QueryCoverage=20%, HitCoverage=22%, E-value=2e-12, Identity=71%"; Hit description =Putative growth-regulating factor 1
  Subcellular localization annotation: CTP_CleavageSite=60; ConfidenceScore=5.51e-01
MVAFQGGHPPFKGNSPHLRPQPSRTESSPTRSKVLPLRHGGWAPRIVQAGPRQKEPKPPRAMRATAQRLRAFLHFRPDQRVKGRTAMQATCNRTKGAHPFNFDASSVEAQAHTSCNRRAGYYVRETAPPLAPLPRLLDCGTSAATRGDPAHGPTVPTEHIGHGSVSRGRRDRERGYSKRDPSPRRKRAPSPPTDQRFEGRPLGRVQRPPQSTRAPRPLLVRGSKAGPSEGFNGRLRPLELRAHY

SEQ ID NO: 64423 - protein, 508 aa, Zea mays
  Coding DNA Sequence Number=SeqID_21048
  Gene Ontology: Mol. function=pyruvate kinase activity; Cellular component=chloroplast; Biological process=glycolysis
  Homolog annotation: Hit_ID=A2XKI5; Match level="QueryCoverage=99%, HitCoverage=99%, E-value=0.0, Identity=81%"; Hit description =Pyruvate kinase
  Pfam annotation: Domain name=PK; Domain location=56-370; Score=181.8; E_value=1.8e-51; Accession=PF00224.12; Description=Pyruvate kinase, barrel domain
  Pfam annotation: Domain name=PK_C; Domain location=387-508; Score =33.2; E_value=5.8e-08; Accession=PF02887.7; Description=Pyruvate kinase, alphabeta domain
  Pfam module annotation: Pfam domain module=PK::PK_C; Domain location =56-370::387-508
  Subcellular localization annotation: CTP_CleavageSite=32; ConfidenceScore=5.11e-01
MAASARTTSSLPYLVAVSSPAAHRHGASHPIRASVGEATMDVVSEAELREKGFLGMRKTKLVCTVGPACVEALPALARGGMGVARINLCHGGREWHRAAMRSVRRLNEEGGFCVTLMVDTEGSQLLVADHGGATSVKAEDGSEWIFTNKKADEAHQFTMHVNFDKFSEGLLLPRAKLSFWRNGKIVQRNFGLPTLSTKDWADIEFGIAEGVDCIALSFVNDANDIKQLKAYLSRRSLEHIKVFAKIESLESLKNLKDIIEASDGVMVARGDLGVQIPLEQIPAIQESIVKLCRHLNKPVIVASQLLESMVEYPTPTRAEVADVSEAVRQYADAVMLSAESAIGAYPQKALSVLRAASERMESWSREENMQKLLPRHQLAIALPDRISEQICSCAVEMANNLAVDAIFVYTKHGHMASLLSRNRPNPPIFAFTDNANSRKSMNLYWGVIPLHLPLSNSMEDNFNKTISLMRSKGSVKPGDTVLVVSDSDLNQPCAATSVFQSIQVRLVE

SEQ ID NO: 64424 - protein, 78 aa, Zea mays
  Coding DNA Sequence Number=SeqID_21049
MERTTTSSRDGQGSRFYRPRRRIFGILKFSETLMALKTLMPIASRFMSVDPTTLFIGSDNHAFIDVLLEGIEPFAMVL

SEQ ID NO: 64425 - protein, 47 aa, Zea mays
  Coding DNA Sequence Number=SeqID_21050
MGELRRGSARCRGLPAMSMTNAGHAGSLDLCTPVNYAAVGSLGAGVR

SEQ ID NO: 64426 - protein, 26 aa, Zea mays
  Coding DNA Sequence Number=SeqID_21051
MGDHVSGCVRGKVYGQVHSELITIMP

SEQ ID NO: 64427 - protein, 323 aa, Zea mays
  Coding DNA Sequence Number=SeqID_21052
MPRTRKTAHKSTGPIGVPRHQLAPRHEGSSSGSNNPIGDLEAQVEQLRTKLHHRNRVMAQDGQSINELAVDVRRLQDELAEKDLAVNWAINSCSVAWDREAKAHARVAELSVALDNLQVYSNTLHEEVHVLYSRLHPDVPADLDHPLCWLQDVKGAAAVATIQSETWKPKWNSFGRSYITKTGCGHKTICRVRGKPRISPWDLLACLVISWLQDMKGAAAVATIQSETWKPKWNSFGRSYITETGCGHKTVYSNILHEEVHVLYSRLHPDVPADLVAMGLSPSGTAGEGTHGELDLFRPPPSMNLADDRSPTAGNEENKDDED

SEQ ID NO: 64428 - protein, 266 aa, Zea mays
  Coding DNA Sequence Number=SeqID_21053
  Subcellular localization annotation: CTP_CleavageSite=72; ConfidenceScore=5.06e-01
MRRQEDPTRSATVYPRGLRPSHLQVGPPRQNLLPPMAGNVESVRSVGTSDCRARNCSYQIPRALRKFCTQLRLSLYKTRRRRLLLVHRILSPPRHRLRVVVGRGASLRFGDSFRGIDVGLGAFGANEFYTGSPPFTVNLGARRTALDRILPWAGAFAAYYSGPCAVPSQGWADTIRSRTQSAVAVRFVRAAVIDPWAYRFRMNMDHRFRIQRWFGDSFRGIDVGLGASGANEFYTGSPPFAVNLGARRTALDRILPWAGAFAAYYS

SEQ ID NO: 64429 - protein, 160 aa, Zea mays
  Coding DNA Sequence Number=SeqID_21054
MAGNVESVRSVGTSDCRAWNCSYQIPQALRKFCTQLRLSLYKTRRRRLQLVHRILSPPRHHLRVVVGRGASLRFGDSFRGIDVGLGASGANEFYIGSPPFAVNLGARRTALDRILPWAGAFVAYYSGIIPPLALPPSAPRDALNRIRNRAGGTSIWISSA

SEQ ID NO: 64430 - protein, 306 aa, Zea mays
  Coding DNA Sequence Number=SeqID_21055
  Gene Ontology: Mol. function=double-stranded RNA binding; Cellular component=integral to membrane
  Homolog annotation: Hit_ID=Q6ZFV7; Match level="QueryCoverage=13%, HitCoverage=13%, E-value=9e-13, Identity=78%"; Hit description =Putative membrane protein
MAIRICRASDDLYYYFISIAFSQTRSRETRTISEKHEIMSLLSRNLPYDVYKNTLQCIVEGYNLVFQACPSPADGLVGEESYAQVQIGRQILGKGVGLTWEEAKLQVVASMDWLEITKGKLYAVVVLHMRTTATTRRERSSREIDVHNLPSSSRATDFTSTPSSIGTGTIPSEKMHLSEIEGIEGLRFTAAAIITLLFIIALNLAIGILPHVDNFAHIGGFATSFLLGFVLLARPQFSWMESHELPHMKRPDPLGLKCDTITSPRRLVNTFIHQMIPDLLKRDKLIKVANNFKSWSTTRDISSEWG

SEQ ID NO: 64431 - protein, 241 aa, Zea mays
  Coding DNA Sequence Number=SeqID_21056
  Subcellular localization annotation: CTP_CleavageSite=55; ConfidenceScore=5.04e-01
MAMMGSTSEKMYLYQCRLPPLPHAHAPAKPSLPHAHASASHARRRPRSRNGLRTAASATKSGPMHPVRRQPWIPHDRRGFRAHAASHGAERPPPYARGTTAQKPPRAVPTRTPPQPQTPAPPARHAIRSSLRLRLSSSVCAAPDPSAPPARDGSPSYARVEPSPTDPRISYLSAPDQLLPPPEIVVISPLYVRSVCSPARDGTRVEQPPPLLDLATVLVVRLCPSPSTSSTLHATIWPTSS

SEQ ID NO: 64432 - protein, 301 aa, Zea mays
  Coding DNA Sequence Number=SeqID_21057
  Gene Ontology: Mol. function=kinase activity; Cellular component =nucleus; Biological process=cell division
  Homolog annotation: Hit_ID=Q2QQ96; Match level="QueryCoverage=88%, HitCoverage=55%, E-value=1e-73, Identity=57%"; Hit description =Cyclin-A2-1
  Subcellular localization annotation: CTP_CleavageSite=22; ConfidenceScore=5.22e-01
MAARKKKPLLIACQATSARITRSQAAANSTRSGLAPSVPVPLKTEHNHAAKKKMKREASDENASADAGASAPLPKRRTVLKNVTNISCAKISKRCTAVTGLKLGPSQKAGQSINKQCTNKISMLLPLAVGGSSLVDDSNNAEETQMVDLLAQKEKQIVLLKEAQPLQNTEQNKGGACDEASVEERNAMNVHETAALKAGVSNGLNIVDIDKNNGDPQMCVTYVAEIYRNLMASELIRRPRSNYMETLQQDITASMRGVLIDWLVEFLTGDLPCPAYPTARTSPVTPKKVIDEKELLTNYDD

SEQ ID NO: 64433 - protein, 57 aa, Zea mays
  Coding DNA Sequence Number=SeqID_21058
MGRRQVCIARTQGPGRQCVSSPGRRPGTGDSRTGSGAICDECDKKTEEKREDGTSRL

SEQ ID NO: 64434 - protein, 130 aa, Zea mays
  Coding DNA Sequence Number=SeqID_21059
MAVSKFKEFWLRHFTEDAHKHLHTGRGVDDSEEAVTSEEQHGRVEVGCCVTVPGSASTTVAILSKTKQWQGDECRTHILARPNHGGDPIQNQARTEQVQLSELKYAPPRLTETLWGYFTPNFSQHQANLT

SEQ ID NO: 64435 - protein, 150 aa, Zea mays
  Coding DNA Sequence Number=SeqID_21060
MKLWKETSRSSKTTTSSRCGLAATPQSAACEGRVIYVSFPHFDLLWLDLDTLHESPSSPSYPPALLSVRFAVPWPDSPATWRDYTTACMSENRRRGGRRAQQEQAGQQDEAPQQQQLPPPPPMSIEQMFLMQTQAVQAIGQTLATIQQQQ

SEQ ID NO: 64436 - protein, 568 aa, Zea mays
  Coding DNA Sequence Number=SeqID_21061
  Homolog annotation: Hit_ID=Q6JAD6; Match level="QueryCoverage=92%, HitCoverage=78%, E-value=1e-177, Identity=76%"; Hit description =Putative uncharacterized protein
TLCDRVPSPVLPGSSPLVMPRTKNASASGGGDDEDPRRPFRQVKGKTVYLEQQEGRKKRRSDREARAAAAAAAAAAQAALGDQPHVPSDQIAFRARRLTSRPRSSTHTSASTPPPTLPAPVTPIAPSTSTAIPTTSTTPASTATPAPAPASAPPVPPPRFRERDETEVRPLVSDPRLFDLQRATAARVRRFRYVPVESWLPAQRDPAAGVLFSTRIQESFFRAQMSAQIALRVHRLLDLPAFLLAAGAESEAHLTYLPGLLSLLTISGRYVEEWVRVFYASVWIDPDHHWMRFRFEREDVTITANQIRQLFGFPESTTRLHSLCYGTSDPPRRPHGAAKYLYELIRRTLLPRMGYREATTHIQLWLLGALVSHSQFDVVDFLICEIEDTVLDGIRARRQLPYAHYLCHIFVQLIQPPRFQSTLEASRLVFGSYRPAPEIPVPASASVFDSQAEDAALRQYDTQGTAADDDDDDDFGVPPPPPPPMPPRSHDHEAGSSSAAPATPQAMDPALASILQTLSQQQAHLAAEQARLSERMLSMFQNITSGSVCSASSASRSSGAFDLVGTPC

SEQ ID NO: 64437 - protein, 114 aa, Zea mays
  Coding DNA Sequence Number=SeqID_21062
  Subcellular localization annotation: CTP_CleavageSite=38; ConfidenceScore=5.03e-01
MAAPPTTRPVALTPRRDRRRFWQEKRTTLRLRHNNRVKKGTGKGGHPEKDPSPRRNRAPSPSLLIRGSKTGPPKGSTVASDRVGPTPTTGQGFEGQPPEGFHGRLRLLGLRAHY

SEQ ID NO: 64438 - protein, 113 aa, Zea mays
  Coding DNA Sequence Number=SeqID_21063
  Gene Ontology: Mol. function=catalytic activity; Cellular component =protein complex; Biological process=metabolic process
  Homolog annotation: Hit_ID=A2XIX5; Match level="QueryCoverage=48%, HitCoverage=21%, E-value=5e-10, Identity=65%"; Hit description =Putative uncharacterized protein
MAQCRHHLLLMVYCCSGTLSIEPKPQKPTDQHTQGSKRPVREFKINVECNHATLSRHWFQSPPGALPSSLLGYEALTGSLDDSGFEDYLHRLNQDCEHLVLLRQFCGQTTASD

SEQ ID NO: 64439 - protein, 122 aa, Zea mays
  Coding DNA Sequence Number=SeqID_21064
MKLWKETSRSSKTTTSSRCGLAATPQSAACEGRVIYVSFPHFDLFDSRHPAHGPTKTLSTVVMGQSAAGAGVAVGVTIGGLAVTASTDAQEQRADRQSNSGPTCRLAFSPKAGPGATVGTLD

SEQ ID NO: 64440 - protein, 141 aa, Zea mays
  Coding DNA Sequence Number=SeqID_21065
MKSLQCQIGWGVGALFLQSCGRRVLVIGWPSAGRVGELTEKGESRWGRASVDGGVVFLESDQDASSDCVACLLRLVEQKGNGWRYGPNDRACAPAMAATAVVSHATVFDVYRRKMWPGPLIGVWVTRISWDTALAGRDLGR

SEQ ID NO: 64441 - protein, 64 aa, Zea mays
  Coding DNA Sequence Number=SeqID_21066
MVKTFDRQLGQGKRSDFVYGPFHPAVNMQALCLVYDLILNGEIKESGKYMNNCELFTTKTFGGS

SEQ ID NO: 64442 - protein, 100 aa, Zea mays
  Coding DNA Sequence Number=SeqID_21067
MRNRRSSTVVGKEAGHCTTLVKMGSGSGREERNGESVLGSRREERNGESAGSVLKTIGEEWGIDWRGRRLERNLGPHISRRQLTGTTWECMNEERRAAWV

SEQ ID NO: 64443 - protein, 100 aa, Zea mays
  Coding DNA Sequence Number=SeqID_21068
MAQVRVCAAHPLPRVQTSRATSEAHIEKVHEKCKFFMWMDDYIKMVEGTGFTRGLGEMMASNFGDERVAAIRADVTANWDMFTTDLKKMNNNLSDLKKMF

SEQ ID NO: 64444 - protein, 129 aa, Zea mays
  Coding DNA Sequence Number=SeqID_21069
MTTGGRLQLGYMMKILEAERWQKSANTHEVVLLQQQQEGDKIGSTTAEEMKSASSPTICPLVPQSVTGKVSPDAHQDQPPGHPWARLWSPPAKPEVAPWPQPSLDSMGHIPPSTWTPTAAPRSHQQCPG

SEQ ID NO: 64445 - protein, 343 aa, Zea mays
  Coding DNA Sequence Number=SeqID_21070
  Gene Ontology: Mol. function=hydrolase activity, hydrolyzing O -glycosyl compounds; Cellular component=extracellular region; Biological process=cell wall organization and biogenesis
  Homolog annotation: Hit_ID=Q654U4; Match level="QueryCoverage=98%, HitCoverage=66%, E-value=1e-141, Identity=72%"; Hit description =Endoglucanase 16 precursor
  Pfam annotation: Domain name=Glyco_hydro_9; Domain location=1-329; Score=252.7; E_value=7.7e-73; Accession=PF00759.10; Description =Glycosyl hydrolase family 9
MKTSRQAYKVDRDRPGSDVAGETAAAMAAASMVFREHNPHYASLLLHHALQLFKFADKYRGKYDSSIAELLWAALWLHRATGRAEYLDYVVDNADDFGGTGWAITEFSWDVKYAGVQILAARLLLSGEHSPRHRETLEQYRAKAEHYVCACLGRNAADGNVERSPGGMLYVRQWNNMQYVTSAAFLLSAYSGYLSSSSSSSSVTCAAGGGSSAAASAGEVFALARAQVDYVLGSNPRGMSYLVGYGARFPARVHHRAASIVPYKHSKEFIGCAQGFDDWFVRKGANPNVVVGAIVGGPDRRDRFRDHRENYMQTEACTYNTAPMVGMFAMLNRLARDEAGVNR

SEQ ID NO: 64446 - protein, 141 aa, Zea mays
  Coding DNA Sequence Number=SeqID_21071
MKSLQCQIGWGVGALFLQSCGRRVLVLGWPSAGRVGEIMGEGESRWGRASVDGGVVFLESDHDASSDCVACLLRLVEQKGNGWRYGPNDRACAPAMAATAVVSHATVFDVYRRKMWPGPLIGVWVTRISWDTASAGRDLGR

SEQ ID NO: 64447 - protein, 531 aa, Zea mays
  Coding DNA Sequence Number=SeqID_21072
  Gene Ontology: Mol. function=ligase activity, forming aminoacyl-tRNA and related compounds; Cellular component=cytoplasm; Biological process=alanyl-tRNA aminoacylation
  Homolog annotation: Hit_ID=A7P8L7; Match level="QueryCoverage=47%, HitCoverage=26%, E-value=1e-117, Identity=80%"; Hit description =Chromosome chr3 scaffold_8, whole genome shotgun sequence
  Pfam annotation: Domain name=tRNA-synt_2c; Domain location=65-481; Score=190.2; E_value=5.2e-54; Accession=PF01411.10; Description=tRNA synthetases class II (A)
  Subcellular localization annotation: CTP_CleavageSite=43; ConfidenceScore=5.41e-01
MEVVDLSPTSRPLSPLLSTAPARRLRLLPPRCVVGLRASPRTRASVEPATQELGTADAVEWSGDAIRRRFLEFYAARGHKILPSSSLVPGDPTVFLTIAGMLQFKPIFLGKEPRRVPRATTSQKCIRTNDIENVGRTARHQTFFEMLGNFSFGDYFKKEATTWAWELATKEYGLPAERLWISVFEDDNEAFNIWHNEVGVPKERIQRMGAEDNFWTSGATGPCGPCSEIYYDFYPERGSSDVDLGDDSRFIEFYNLVFMQYNKKDDGSLEPLKQMNIDTGMGLERMARILQKSNIPRSRNGGTTHDETGVEAEGRSRRVEIPPQSQRRDGANVEAGVETGVCSKKTIAPRCRGSRSRGGCGWETRSRSLIFGRGRRSSVNDRQGDTTKGRRHADLPASSIVRASRSPAREADSSARVCAGHGVRACGRKEGETTDPAGKATTATDPAGKTRSSQRDGGSSRKGHNNVDPTGKAAAAIDPAKAMKGVGGGAGPAEKGPAPDLARGVDDTGNGRSSKGRCCTRPGDGSTAVAA

SEQ ID NO: 64448 - protein, 122 aa, Zea mays
  Coding DNA Sequence Number=SeqID_21073
  Gene Ontology: Mol. function=signal transducer activity; Biological process=response to light stimulus
  Homolog annotation: Hit_ID=Q10BX5; Match level="QueryCoverage=100%, HitCoverage=34%, E-value=5e-46, Identity=71%"; Hit description =Expressed protein
  Pfam annotation: Domain name=DUF569; Domain location=1-122; Score =186.9; E_value=5.3e-53; Accession=PF04601.4; Description=Protein of unknown function (DUF569)
MELFARAKVVRLRSHHVKFLYADEVRVTQDRDGYSANARWTVEAAPHSTGVVRLRSRYGRYLTASGEPFLLGMTGRKVTQTAPAAPRLANASVDWEPLRDSFQARLRTKAGHFLRANGGLPP

SEQ ID NO: 64449 - protein, 556 aa, Zea mays
  Coding DNA Sequence Number=SeqID_21074
  Gene Ontology: Mol. function=ligase activity, forming aminoacyl-tRNA and related compounds; Cellular component=cytoplasm; Biological process=alanyl-tRNA aminoacylation
  Homolog annotation: Hit_ID=A7P8L7; Match level="QueryCoverage=97%, HitCoverage=59%, E-value=0.0, Identity=66%"; Hit description =Chromosome chr3 scaffold_8, whole genome shotgun sequence
  Pfam annotation: Domain name=tRNA-synt_2c; Domain location=2-320; Score=-46.3; E_value=2.2e-17; Accession=PF01411.10; Description=tRNA synthetases class II (A)
  Pfam annotation: Domain name=tRNA_SAD; Domain location=417-460; Score= 80.6; E_value=5.1e-21; Accession=PF07973.5; Description=Threonyl and Alanyl tRNA synthetase s
  Pfam module annotation: Pfam domain module=tRNA-synt_2c::tRNA_SAD; Domain location=2-320::417-460
MAMVSYAKADDATKTNLKIIGDHMRAVVYLISDGVIPSNIGRGYVVRRLIRRVVRMGRLIGIRGDGHGNSEGAFLPSLAEVVISLSTEIDSDVESRRRSILGELQREEMRFVQTLERGEKLLAELLDEALLNAGNNGNKPSLSGKNVFLLYDTYGFPVEITAEIASEQGVTVDIEGFDIEMENQRKQSQAAHNVVRLSVGNETEIVKNIPDTEFLGYDSLSASAVIKGLLVNGNPVNEVSQGSEVEILLDRTPFYAESGGQVGDNGFLYVNGGEDRRQTTVIEINDVQKSLGNIFVHKGMIKQGSVEVGKEVDASVDAKLRQGAKAHHTATHLLQSALKSVVGSETSQAGSLVAFDHLRFDFNFHRPLSEEELTTIEALINQWIGNAAHVETKVMALQDAKNAGAIAMFGEKYGEQVRVVEVPGISLELCGGTHVSNTAEIRGFKIISEQGIASGIRRIEAVAGDAFVDYVCARDNYMRRLCLSLKVKAEDVNSRVETILEELRATRNVASSLRSKIAVLKAASLASRATTVEPQNVRYLLQLSINCVLRITTPCL

SEQ ID NO: 64450 - protein, 109 aa, Zea mays
  Coding DNA Sequence Number=SeqID_21075
  Gene Ontology: Mol. function=transcription factor activity; Cellular component=transcription factor complex; Biological process =regulation of transcription, DNA-dependent
  Homolog annotation: Hit_ID=Q27W79; Match level="QueryCoverage=69%, HitCoverage=18%, E-value=3e-24, Identity=69%"; Hit description =Transcription regulator of the cell cycle TaE2Fe
  Pfam annotation: Domain name=E2F_TDP; Domain location=58-109; Score =49.3; E_value=1.3e-11; Accession=PF02319.11; Description =Transcription factor E2Fdimerisation partner (TDP)
  Subcellular localization annotation: CTP_CleavageSite=66; ConfidenceScore=5.12e-01
MDAPASGPSFSSAESSAATAQPSTTDAQAPPVDLQAQVPVQGAGNGVARACRHHTYNRKQKSLGLLCSNFVALYDQENVQVIGLDDAAKQLGVECRRIYDIVNVLESVG

SEQ ID NO: 64451 - protein, 144 aa, Zea mays
  Coding DNA Sequence Number=SeqID_21076
MMLLGETLKLSFELAIGGRSDRSSCDVPSGVAKKCVGADLAANHCEVYRRWCFLRQEEMDPYFGVIFLDTEITCLSVNIDDAKVSTLHDDVASMRPELSVNRRGVEVPKSVFNGLYISPPKSHYLATSANSPPISSPYAMVPPN

SEQ ID NO: 64452 - protein, 57 aa, Zea mays
  Coding DNA Sequence Number=SeqID_21077
RAHGYERPRELQRLVILDQRYFGTGGNEIDGSGYDYGIGEDEAVEGDFQEFQDYDEF

SEQ ID NO: 64453 - protein, 131 aa, Zea mays
  Coding DNA Sequence Number=SeqID_21078
MMDEEKNLATERRLESLPWCDCGDRVVPYNGRKCIFREWLYGLRSNWPELEAKEKKKMSGAEEWKSNPILCKCGIEAKYGLVRFELSVGYFCGYGDEEMQLGEIRREIRGDAYNKVKVTHGIEDALWISAC

SEQ ID NO: 64454 - protein, 122 aa, Zea mays
  Coding DNA Sequence Number=SeqID_21079
MPKAPLRTASALFHHFVFPCASSHCDFDSSPKGSKSEENDLVEEPKELTGEVPEQQLVVSIATPAQKKMKLWKETTRSSKIMMSSRHGLATTPSRLPVKAAFIYVSFSHFDYCKDYVDVSDI

SEQ ID NO: 64455 - protein, 73 aa, Zea mays
  Coding DNA Sequence Number=SeqID_21080
MDWGWLWLILLLILWNIILIEGCKLEWNGAGLERRWIGAALDWRRGNRLASRLQRKESLRAGVFFLQALVCLR

SEQ ID NO: 64456 - protein, 46 aa, Zea mays
  Coding DNA Sequence Number=SeqID_21081
MAMMGSTSEKMYLCQVKKQQTFVASLQRWYQKKRTKTKVVGGKVLH

SEQ ID NO: 64457 - protein, 183 aa, Zea mays
  Coding DNA Sequence Number=SeqID_21082
  Subcellular localization annotation: CTP_CleavageSite=83; ConfidenceScore=5.28e-01
MAVAGGRAQQSRRQPGSRLIPGQQESLLSRREDGAPMTRSSNGSRTRNGRPANYPPRRINSAAGHAMPLGGRSARRFAFAVITASKRGTGKGDTPKRILLAKEPGSEPPLLIRGFEGWPSEGFNSRLRSRGPDTHYWSGVRRPAPPKGSMAASGYSGSAPITDQGFEGWPPKGSQSPQTPSEG

SEQ ID NO: 64458 - protein, 152 aa, Zea mays
  Coding DNA Sequence Number=SeqID_21083
MALRASTASAPANVASTNECGRDFYMAVRAATMNSFGEAWSRGWAESGRGLGRKNRVKVEKTNMMSDDAENDGLVSDEYEEEVPALTPSAKNGVARRQRHEGRERREVGWRMRSRQLRRRPSLPCGVKVNGFVCKDPMAVNADDFFKAAKLD

SEQ ID NO: 64459 - protein, 119 aa, Zea mays
  Coding DNA Sequence Number=SeqID_21084
MAVGPLICFAAYIGLLQPHSDDMSRVVDQLLKLIATFIGRTMMWKVGRRSGSRAMDEATLREVGGASGGVWWVEAPRRMSLQAEVASAPTDGTLGGVWWVAVPQWMALRVAAASALADG

SEQ ID NO: 64460 - protein, 98 aa, Zea mays
  Coding DNA Sequence Number=SeqID_21085
  Homolog annotation: Hit_ID=A2Z417; Match level="QueryCoverage=47%, HitCoverage=31%, E-value=1e-20, Identity=93%"; Hit description =Putative uncharacterized protein
MGGDHGGGHAGGDFRQKVWSMTGGPYCRPVHWRRNTAIAMFGVFLICIPIAMKSAELEVYMCIPITQTLTLRSLLGVHAVKFQSGDIANAFDPVGSAP

SEQ ID NO: 64461 - protein, 123 aa, Zea mays
  Coding DNA Sequence Number=SeqID_21086
  Homolog annotation: Hit_ID=A3C1H3; Match level="QueryCoverage=69%, HitCoverage=29%, E-value=4e-22, Identity=62%"; Hit description =Putative uncharacterized protein
MCVRFYRPDNNISFFQNDEKYSCSETGYRLPLKCVQAQNATKEGNMSKQRKILDDASTSGGTKSASGGPKHYITYRSCVPLVGEENLSVLGFEERSVLMAVANAAAVAAITAEQAGHRLRPKT

SEQ ID NO: 64462 - protein, 253 aa, Zea mays
  Coding DNA Sequence Number=SeqID_21087
  Gene Ontology: Mol. function=pyridoxal phosphate binding; Cellular component=mitochondrial outer membrane; Biological process=electron transport
  Homolog annotation: Hit_ID=Q0MRQ7; Match level="QueryCoverage=84%, HitCoverage=62%, E-value=1e-74, Identity=63%"; Hit description =Molybdenum cofactor sulfurase-like protein 1
  Pfam annotation: Domain name=MOSC; Domain location=95-234; Score =55.9; E_value=1.4e-13; Accession=PF03473.8; Description=MOSC domain
  Pfam annotation: Domain name=MOSC_N; Domain location=12-82; Score= -21.8; E_value=0.016; Accession=PF03476.7; Description=MOSC N -terminal beta barrel domain
  Pfam module annotation: Pfam domain module=MOSC::MOSC_N; Domain location=95-234::12-82
MPPEAFAEDWHPTPDDHMGIVRWIADRFSESVIRAPGMEPLKVPLSVECATISDVSVWEWTGAAYDEGAEAAEWFSTFLGCPTRLVRFNEDSETRLTDPDYARGYKTMFSDGFPYLIVSQGSLDALNEILKEPIPINRFRPNILVEGCHPYAEDMWKSVKINKLTFQGVKLCGRCKVPTINQDTGIPSPTEPTETLQTYRSGEVLLRSHKNKRQVIVACIFSVEHITPYADICRYAGEIDSSWLKSLKLRKGL

SEQ ID NO: 64463 - protein, 293 aa, Zea mays
  Coding DNA Sequence Number=SeqID_21088
  Gene Ontology: Mol. function=nucleotide binding; Cellular component =myosin complex; Biological process=signal transduction
  Homolog annotation: Hit_ID=Q6UAL3; Match level="QueryCoverage=95%, HitCoverage=20%, E-value=4e-82, Identity=57%"; Hit description =Myosin heavy chain class XI E1 protein
  Pfam annotation: Domain name=IQ; Domain location=32-52; Score=21.1; E_ value=0.0042; Accession=PF00612.18; Description=IQ calmodulin-binding motif
MAARNEHRFRRETRASIIIQLSRAYAAYKQQQKASLILQCLWRARIARKELRKLRMEARETGALKEAKDKLEKRVEELTWRLDVEKRLRADLEEAKSHEIEKLQSALQKMQENLKEAHATIVNEKEAAKLAIEQAPPKIVEVPVIDNAKLEELTTQNKELEIHQICLKEELSTFKQKAEDLENKLIEFQKQSDELSQETQEQASKVIQLQELVERLESKIATFESEIELLHNNSALAIQAVVTPEMNQTTIIEEFDKGHQLEEVKTVNKMAIGVPKKRNDKWMANQLLKLHLE

SEQ ID NO: 64464 - protein, 259 aa, Zea mays
  Coding DNA Sequence Number=SeqID_21089
  Gene Ontology: Mol. function=nucleic acid binding; Cellular component= intracellular
  Homolog annotation: Hit_ID=Q653D5; Match level="QueryCoverage=92%, HitCoverage=64%, E-value=3e-83, Identity=67%"; Hit description=Zinc finger protein-like
MEKKERYNFPLYLTFVPRAEEDPSTKVPKVEVPQVRPVIMPNSLGMAFPPRPAYGVAPPIYNPALNPLMARPPIWPAAPAQAWYPQQAAYPQQSAVSVPPIVAGLPPQQPLFPIQNVPTPMTSAAANVLQTSFPMAPPGVPSPVAPHVSQPLFPVNTSAVNGAVNSPFLASVAPGTIPASSPAAVGVAGIGYGTNNQGTRDPAVGSSPAVSNNKASGAQPATNEVYLVWDDEAMSMEERRLSLPKYQVHDETSQFSNEQ

SEQ ID NO: 64465 - protein, 144 aa, Zea mays
  Coding DNA Sequence Number=SeqID_21090
  Subcellular localization annotation: CTP_CleavageSite=55; ConfidenceScore=5.13e-01
MEPGGGTAVGAVESLLTSSCFRKGAESRRRHRVGRCGSSSEAEVESVFRGRGRVRAPGSSEFLVRRLLGLSPSPSPRSGGAEFAIFRDVARVRALGRAERSSSSSGAEPESEPWVGQSGVRRLPGLSPSPSPGSGGAEFVVFQG

SEQ ID NO: 64466 - protein, 395 aa, Zea mays
  Coding DNA Sequence Number=SeqID_21091
  Gene Ontology: Mol. function=pyridoxal phosphate binding
  Homolog annotation: Hit_ID=Q0MRQ7; Match level="QueryCoverage=22%, HitCoverage=27%, E-value=3e-34, Identity=78%"; Hit description =Molybdenum cofactor sulfurase-like protein 1
  Pfam annotation: Domain name=MOSC_N; Domain location=102-229; Score =96.2; E_value=1e-25; Accession=PF03476.7; Description=MOSC N -terminal beta barrel domain
  Subcellular localization annotation: CTP_CleavageSite=81; ConfidenceScore=5.52e-01
MPPPPTAVSSCWRGTRRHRAKNLHPHPAAVSVKQPGSGVRFQQFSSLASAAAPALRVLRYQPASTLYESPSSTPPRQLQAMAMEKAASFLSSLLGGGGGEPAATVKSIFIYPIKSCRGLAVSQAPITSTGFRWDRQWVVVNAKGRAYTQRVEPKLALVQVELPPEAFAENWQPTPDDHLGAGFPDIDHQPPVGVDRPAGGDRGPSGVGSSHPGGLFCAACPACEFDARPFSAAGQLGYADRYSRQPWWRLTSAHGGATSPYRTAISIRIDLLSPSASMVRVPRVTHFNSTAAAVGKALPSLSLVREHCLAPPHSATGRHEDASAGHCCDLFQMVIHVFPFRSDGVYGIQVAAHVQVQCAGVIVRLQLEDDLLIQEGCSVRAQEERYKIVTVMAVL

SEQ ID NO: 64467 - protein, 128 aa, Zea mays
  Coding DNA Sequence Number=SeqID_21092
  Gene Ontology: Mol. function=pyridoxal phosphate binding
  Homolog annotation: Hit_ID=Q0MRQ7; Match level="QueryCoverage=74%, HitCoverage=29%, E-value=7e-33, Identity=71%"; Hit description =Molybdenum cofactor sulfurase-like protein 1
  Pfam annotation: Domain name=MOSC_N; Domain location=19-119; Score =89.7; E_value=9.2e-24; Accession=PF03476.7; Description=MOSC N -terminal beta barrel domain
MAMEKAASSLLGGGGGEPAATVKSIFIYPIKSCRGLAVSQALIISTGFRWDRQWVVVNGKGRAYTQRVEPKLALVQVELPPEAFAEDWQPTPYDHLATRSLATDSKSFPNSKLNILETNLQILLAIQH

SEQ ID NO: 64468 - protein, 20 aa, Zea mays
  Coding DNA Sequence Number=SeqID_21093
KEEGVEADPQECQDFGEFVV

SEQ ID NO: 64469 - protein, 36 aa, Zea mays
  Coding DNA Sequence Number=SeqID_21094
MGSHDPRARRESRLMGKEEGVETNLQEFQDFDEFED

SEQ ID NO: 64470 - protein, 380 aa, Zea mays
  Coding DNA Sequence Number=SeqID_21095
  Homolog annotation: Hit_ID=A2Z408; Match level="QueryCoverage=95%, HitCoverage=74%, E-value=5e-59, Identity=40%"; Hit description =Putative uncharacterized protein
  Subcellular localization annotation: CTP_CleavageSite=52; ConfidenceScore=5.32e-01
MSREKPPAPAVVSTGCSGFMSCLSRHRRGPQQRAVPRGAAVLPRRSDAGGCDAGAEAAEGCWKRVQLLEEEEEEGKRLSGHEERPAPGAPERVARGRAKQDRAEGGGEVTDRVGNGAKATAEGGGSVMSMGTAKTTAATTCASAGHGVQEVVRLEDGSYMREVRRVVGRPWERLAVQVSRPVVPADAASASEVLGKMAAMNAEDLRKFLVQLMPLEDITGQKNPGEPVRRAARPSSGDDLVEALVLDTMGMLESLLLEGLKIQMASPATDPAAGDGRRDRAVAVGKDCMVHVVLMQARDPKERYGAIGDPMIGLIEASLEKKDATAVRLRILGLHVAGISFVVRRPSDDGSRCMLWSAYLRRCKDSHDGDGGGDGCSNMR

SEQ ID NO: 64471 - protein, 48 aa, Zea mays
  Coding DNA Sequence Number=SeqID_21096
MRTNRIIRVTTDDDDDSKDYFSSLDDEAECTDVADDDENCPSDGYCGY

SEQ ID NO: 64472 - protein, 55 aa, Zea mays
  Coding DNA Sequence Number=SeqID_21097
MRTHASGVESRGTVLSGTPTQTETKCGNARITQSGQSHLNCGAKTLARNTEGPSK

SEQ ID NO: 64473 - protein, 69 aa, Zea mays
  Coding DNA Sequence Number=SeqID_21098
MRKAKLLVWSVAAVLACAVALTDARLENFLHKDPGRDLSPTGSELGQYIGRRVPISFYMMKLQTLEFIF

SEQ ID NO: 64474 - protein, 95 aa, Zea mays
  Coding DNA Sequence Number=SeqID_21099
  Subcellular localization annotation: CTP_CleavageSite=53; ConfidenceScore=5.66e-01
MAALAAPPRPGSPWLPARPPAWPRALAARSAARLAARPGRPLAARLAARPGARSAPAWARPCARLGPGAPPGRSAAQPARSAAPARPAPGRFNRP

SEQ ID NO: 64475 - protein, 278 aa, Zea mays
  Coding DNA Sequence Number=SeqID_21100
MQVACNRTTGTHPFDFEHPAWRPRPTRHGKRRLWQAKRATFHLRHDDRVKKGTEKGDTPKGILLREGKVRRLAPRKGSIAASDHSGSAPTTDQGFEGWSLEGFDSRPRARRARDDSRYVRYMAKARATLPRRRSPPRLTLGLGPRLGLGRWSTPLPTPRLGLNLGLGGWSPPRPTPGLGLNLDLRRNRVLTPPRPRPQEESSPRPTLGSDRPRHRGDIITLPLASSGYGEQDRRPIWLAPGPLGVETPTIWEGKFSKKRLDGGSLMAMMGSTLKKMYL

SEQ ID NO: 64476 - protein, 200 aa, Zea mays
  Coding DNA Sequence Number=SeqID_21101
MADHPMAEGAVIIDRRRRHAPARPVAICLPRCARVACTVSFISSEWQRLECKQTRREQEPAIGKLRKDVHCTRWAKNYKKRHGHGLLLSRTLKPREFSKARRTPAAQSRTVSLFLVVTAQSLTTLPKTQHVPPASPMRRQRRTGGLRPVLLLLPFAALISVATFSLHSADRLLSSSDTGTAQKAASSSRQHRRLPVATLD

SEQ ID NO: 64477 - protein, 272 aa, Zea mays
  Coding DNA Sequence Number=SeqID_21102
  Homolog annotation: Hit_ID=Q6QP51; Match level="QueryCoverage=70%, HitCoverage=79%, E-value=7e-46, Identity=55%"; Hit description =Putative growth-regulating factor 1
MAVMDSTSEKMYLCQDLVDVGLLTEDPLTGHMPRHGLASLLSDRRALSHGTKMTRPANRIGKGDISKRILLSEGNGPSSPPTDQGFEGWPLGRVRQSPQSTRAPSPLLIRGSKAGPLEGFDSRPRAHRVRDDSGYVCYMAEARATLPRRIHASPEGLLRQWAHPRLARGPAQAGFVEKQHWPNRLTNRPYRGRIQCEDRLTPYPDTRASVYKVEAGLTTANSASDVTGNSASPDLRPQPREEVSASPDPKTRPQPRPHEESRPHPTPASASG

SEQ ID NO: 64478 - protein, 516 aa, Zea mays
  Coding DNA Sequence Number=SeqID_21103
  Homolog annotation: Hit_ID=Q10EW2; Match level="QueryCoverage=95%, HitCoverage=94%, E-value=1e-162, Identity=63%"; Hit description =Auxin-regulated protein, putative, expressed
  Pfam annotation: Domain name=DUF966; Domain location=21-445; Score =280.3; E_value=3.9e-81; Accession=PF06136.4; Description=Domain of unknown function (DUF966)
MESRGRRPRSPERRRPAARKVPVVYYLTRSRHLEHPHFVEVPLASPEGLYLRVDGFRSYKNGFVWHDLSEDDLVLPATDGEYVLKGSELVDQSPSGPFYPVTVSNGNQKQQSRPKEGARQPLPRDQSDPSSPPSVTVREAKARRSPSVPSQDEEDDTPSPCRDRSMSQPQELEPQRNERRTQPPASGSASPVELRAHRPTTGCTDAATQTDDLGRRPAGRRALELPRKKSLSTDHDAVVREIAEYRQSHPRRSADLHGISRELLRQCITTPLTVPSTCAKSESLESLIRADNVMTDSFRILEEEDVVARTCPKLRPASVLMQLVTCGSLSVKGHGDAGVVRTCKPRFPNLRFLPSPLISRTMMMGELDYLSENPRLMGMKLEEKEYFSGSLVETKKTQRDGPAERYSALKRSSSYNAERAGEALDCTRREEDKADDVSSRTRCLPRTPILSSFLHPKGDSLRSPVSDCRRSSSARRDYDAASGDGSRRFADASVASATTGAESFRKEEKLVKIEES

SEQ ID NO: 64479 - protein, 202 aa, Zea mays
  Coding DNA Sequence Number=SeqID_21104
  Homolog annotation: Hit_ID=Q6AV43; Match level="QueryCoverage=68%, HitCoverage=66%, E-value=2e-58, Identity=81%"; Hit description =Putative uncharacterized protein OSJNBb0101N11.18
  Pfam annotation: Domain name=DUF538; Domain location=7-149; Score =114.3; E_value=3.5e-31; Accession=PF04398.3; Description=Protein of unknown function, DUF538
MSPLPRRLVVLVLLAAAVAATASAASLSGAANDLLPKYGLPKGLIPDSVTSYSFDEATGAFEIHLASTCYVHFGSHLVYYERTITGKLSRGAISDLSGVQAKKLFLWVYVTGMVAHPDQGTIEFQAGFVSESLSASMFDEVRTCGSSAGAQLRGAAGVIGELGLLPVAQMDLSVKHAHEFNNAYSFYVAMFFFWVQRAWLRV

SEQ ID NO: 64480 - protein, 267 aa, Zea mays
  Coding DNA Sequence Number=SeqID_21105
  Homolog annotation: Hit_ID=Q6QP51; Match level="QueryCoverage=77%, HitCoverage=98%, E-value=6e-23, Identity=38%"; Hit description =Putative growth-regulating factor 1
MTKILEAEGGTKIAARLASPHPGTGGHRLGTGDTFGRRSRRRFVSAIMTASKMGSEKGILQKGSFSAKEAGPELPTDQRSKAGPSERARPLERVQRPPKGHSGSAPTTDQGFEGLAPEGFDSRLRRRARDDPGYVRYITEARAALPRAESDRSHFAAPLTGLTRRQRRLRRSDCLPLDRVRLTAAKSGLGRHRKQGSDSGSTPEDDELRLARPQGSDSGSAPEDDELRFARPQGSGSAPEDDELRLARPQGSDRPRHRGGHHYPIPS

SEQ ID NO: 64481 - protein, 169 aa, Zea mays
  Coding DNA Sequence Number=SeqID_21106
MVVFPYKGETSLRPLKGKGNNKTCRIGGMSIIKDGAKSKDCIRQGENATKVRIGKTPFLKSRWEKMIFQKDKTCKVSKDWGAVNDGIDDALSPNRDGNEEASKGGREEIFFRARIKIGVKARPMDDKEEMGNSQLSNWVERKGKLLKDQFKVTIGKDMREKMKALKSQW

SEQ ID NO: 64482 - protein, 154 aa, Zea mays
  Coding DNA Sequence Number=SeqID_21107
MTVAGGREQQSRRQPSSRPIQGQQESLLPRREDGAPVIRSSNGSRTRNGRPANHSPRRINSAAGQAALLAGEADDASPSPDRERGIPRKGSFPVKEPGSEPPLLIRGSKAGPPKGSTVASDRVSPTPTTGQGFEGQPPEGLHGRLRLLGLRAHY

SEQ ID NO: 64483 - protein, 85 aa, Zea mays
  Coding DNA Sequence Number=SeqID_21108
  Gene Ontology: Mol. function=kinase activity; Cellular component =ornithine carbamoyltransferase complex; Biological process=amino acid metabolic process
  Homolog annotation: Hit_ID=Q6QP54; Match level="QueryCoverage=72%, HitCoverage=21%, E-value=2e-09, Identity=53%"; Hit description =Putative kinase
MAPHVDVAGLRPRLGDVEAPPKPRSSLSSIAEAESEPLGRARRRSSAEARAESEPWGRAKRTRVRALGRAERSSPSSGAEPESEP

SEQ ID NO: 64484 - protein, 197 aa, Zea mays
  Coding DNA Sequence Number=SeqID_21109
  Gene Ontology: Mol. function=kinase activity; Cellular component =ornithine carbamoyltransferase complex; Biological process=amino acid metabolic process
  Homolog annotation: Hit_ID=Q6QP54; Match level="QueryCoverage=53%, HitCoverage=36%, E-value=8e-11, Identity=44%"; Hit description =Putative kinase
MALPVDVAGPRLRPGDVGAPPKMGSNLSSVAEAESEPLGRARRKSFGRGQGGVRALGSGEAEFVVFRGRARVRALGSGGAEFAVFRVLARVRALGSDGAEFAVFWVLARVRALGSGGAEFAVFRVLARVRALGSGGAEFPMAPLARPDCLSDSLCRVALQSEWRRRRCPSVRPLYADGGYQLRIRRLEGTPNYGPRQ

SEQ ID NO: 64485 - protein, 290 aa, Zea mays
  Coding DNA Sequence Number=SeqID_21110
MVPSGGRNNGGKGLGWDNMSGGRWSGEANRLEGPEPLHPATTTRVATFKSHQGHPHRATGRADGAGSELVDDMSGWGIWQCLDHHGDNGGVREQKWSEGVATLLMIKLDTEMEDMVHDPIKGHKGAPKKQTIMKGHMHAVGRHKNCIGSKKGSIKGRAKTQALAVADVRAEGGTLGPLGAGAGALGARAGPLGQSVMADVDDRREVELDYITVDRVHDPIKGRKGAPGEASVMKGDAHAIGRDENRGGAKKGRRNNHVRAMRPITEEEAQSAGRTTRKSKVTGKDATTAV

SEQ ID NO: 64486 - protein, 428 aa, Zea mays
  Coding DNA Sequence Number=SeqID_21111
  Homolog annotation: Hit_ID=Q6JAD6; Match level="QueryCoverage=89%, HitCoverage=69%, E-value=2e-85, Identity=54%"; Hit description =Putative uncharacterized protein
TYPWESGYQLRGTLQQLTYSAHVFRSLFRAQMSSQIALRVHRLLDLPAFLLAAGADSEAHLTYLPGLLTLLTTSGRYVEEWVRVFYTSVWIDPDHHWMRFRFEREDVTITATQIRQLFGFPESTTRLHSLYYGTSDPPRRPHGGVASGTAHVAALFRPPFSDGSRRSPADFTTSAKYLFELIRRTLLPRMGYREATTHIQLWLLGALAEDAALRQFDTQDTTADDDDDDDFGVPPPPPPPMPPRSHDHEAGSSSAALVAPPAMDPTLASILQSITQQQAHLAAEQARAFMALMLQQSGVSVPPVQSAPPPPLHAPVVPSILSGPPVPTVGPSPLRPVTLAFTSPVLSSVCPQPPVPPASAVTTTAVAVSVTSSVPAAPAAWPQSESVPAPASTADPRSETDSDPPPAFALLPRPRPDAPPPPPPTSDV

SEQ ID NO: 64487 - protein, 306 aa, Zea mays
  Coding DNA Sequence Number=SeqID_21112
  Gene Ontology: Mol. function=nucleotide binding; Cellular component =endoplasmic reticulum; Biological process=membrane organization and biogenesis
  Homolog annotation: Hit_ID=Q2QMH2; Match level="QueryCoverage=86%, HitCoverage=33%, E-value=1e-124, Identity=82%"; Hit description=Root hair defective 3 GTP-binding protein containing protein, expressed
  Pfam annotation: Domain name=MMR_HSR1; Domain location=43-136; Score=- 17.0; E_value=0.038; Accession=PF01926.14; Description=GTPase of unknown function
  Pfam annotation: Domain name=RHD3; Domain location=48-306; Score= -100.5; E_value=9.1e-09; Accession=PF05879.3; Description=Root hair defective 3 GTP-binding protein (RHD3)
  Pfam module annotation: Pfam domain module=MMR_HSR1::RHD3; Domain location=43-136::48-306
MEESDAAEGVAVQLIDGEGEFAAAAAERFMAAAGVAGCGLSYAVVSIMGPQSSGKSTLLNQLFGTNFREMDAFRGRSQTTKGIWIARCVGVEPCTVVLDLEGTDGRERGEDDTAFEKQSSLFALAISDIVLINMWCHDIGREQAANKPLLKTVFQTPLEHLEPVLREDIQKIWNSVAKPEAHKDTPISEFFNVQVTALSSFEEKEEQFREQVQQLRQRFSNSIAPGGLAGDRRGVVPASGFLFSSQQIWKVIRENKDLDLPAHKKTQSLPILRGAQLQGYLDGSAIAPEEKINTKKDDDSLDKHKL

SEQ ID NO: 64488 - protein, 105 aa, Zea mays
  Coding DNA Sequence Number=SeqID_21113
MELGVEVKGSSIPVPEELFLESEPRLMARVRLVADDVLELDGDGVVEQGEHHGRGLGRGRRGNDVVEDVVSESIAPKGEEDLPSPTRVVGGCWVQDDGQEGPDVV

SEQ ID NO: 64489 - protein, 645 aa, Zea mays
  Coding DNA Sequence Number=SeqID_21114
  Gene Ontology: Mol. function=nucleotide binding; Cellular component =endoplasmic reticulum
  Homolog annotation: Hit_ID=Q2QMH2; Match level="QueryCoverage=79%, HitCoverage=56%, E-value=0.0, Identity=69%"; Hit description=Root hair defective 3 GTP-binding protein containing protein, expressed
  Pfam annotation: Domain name=RHD3; Domain location=1-581; Score =268.5; E_value=1.4e-77; Accession=PF05879.3; Description=Root hair defective 3 GTP-binding protein (RHD3)
MTGAGWRQRAVGFTPEQRLAAGRYMNFGRCIAKSMCLEKPKYLTIWNRVMVATVRCDEIANEKFGCITSDTEWLDVESAVQSGPVPGFGKKLSNIVEVHLQEYDKEAFYFDEAVRKGKRQHLESRILNLVQPAFQKMLTHLRMKALEKFKAGLNSSLESGKEFAISARDNTECSLKDFEQGCADAIIKQANWDCSKILEKVRRDIEDHALSIRERKLSELTTHAKEKLRKALAEPVESLFDAADQTTWTSIRNIYKRETEAILPEFLKTICGFEMEYAQAEEMVSKLRDYARSVVQSKAKEESSKVLIHMKERLTKFSIVLQRYGVLIHDFLTLFPLVARFTTVFSHDKDSIPRVWTGKEDVHAIAKEARAAALKLLSVMAAIRWDDEPDRIESIITSTLLEGSVVSKIASAASADPLASTTWEQIPPEHTMITPSQCKLLWKQFKSETEFTITQAVSTQQAHRRGNSKLPPPWAIVAIAILGFNEIMTLLRNPIYVFLLFVGYLMVKALAVQLDVSREFQNGVVPGIISVSAKLLPTIQNLVNKVAAEQQDEHRHPHQQHPQVAEPLQPQMQPPPLLLSPRSPMSELRRLHMPSSPRKVASSSSSPSSSSSSAVSSPRHVGEDQKPRPGAAAPENQSTIADSIV

SEQ ID NO: 64490 - protein, 147 aa, Zea mays
  Coding DNA Sequence Number=SeqID_21115
  Homolog annotation: Hit_ID=Q6J9V9; Match level="QueryCoverage=73%, HitCoverage=39%, E-value=1e-39, Identity=72%"; Hit description =Putative uncharacterized protein
  Subcellular localization annotation: CTP_CleavageSite=61; ConfidenceScore=5.02e-01
MCEQVNSTPVLFTLTWHSLLRHAYTFAFRQAEGLSFITFVRNSLYPKYLRTSPQQSPLLIRGSKAGPSEGFDSRPRARRVRDDPGYVRYMAEARATLPRYPRTFPRPAGTICNGIPPEGGIEPLDPIEWVRVRQITCMYFWSAPLGH

SEQ ID NO: 64491 - protein, 140 aa, Zea mays
  Coding DNA Sequence Number=SeqID_21116
MALGKEGNLGTGKAIFAECCCQGTRHRDWRWGPLDPSLPRAVIAYTRQNWPLCRVPKKTLGKGSVTVTWRRDGDFSLPSVKWHSANALPSARQKVLGKEAIADVQFAECYTRQSRVAVHIYCVGGFAEDVVAAVEGFCSR

SEQ ID NO: 64492 - protein, 49 aa, Zea mays
  Coding DNA Sequence Number=SeqID_21117
MGLGVCGSLCQDDDEDNAGFYGVYDYGNGKEEGVEADLQEFQDFDEFED

SEQ ID NO: 64493 - protein, 202 aa, Zea mays
  Coding DNA Sequence Number=SeqID_21118
MPSCWAKAHYDYERLPLPSLWQGRVIVFPLSKTKRHGRRGAFGQTPQGGYDTPSPELNAIALVRCRKLENLDAIECGVVGVFIAPTTKSGRWEAVCRMAHRTVQCATGHCPENSAACTALTAVPPARVRMTAVESNLRRHRKLCLARPQGSDSTSTSEDGLRLARPQGSDSTSTSEDGLRLARPQGSDSTSTSEDGLRLTRP

SEQ ID NO: 64494 - protein, 165 aa, Zea mays
  Coding DNA Sequence Number=SeqID_21119
  Subcellular localization annotation: CTP_CleavageSite=55; ConfidenceScore=5.00e-01
MVAPPPPPSAGKVTGQTQMLLFRHAGKTSSIPPPAGGLKAAIAVVARRWKEYHVVAAVEGHELETPETEHHPGLERLLETTHLELDGKLFINTQQAPTWRANCRCFDLGGSLDRRVNCRYVSQPRWVGARRNTRGNNKGNRDSCCPTPRADALALGGYKRSRGRE

SEQ ID NO: 64495 - protein, 54 aa, Zea mays
  Coding DNA Sequence Number=SeqID_21120
MAMMGSTSEKMYLYQDLLDVGLMIEDLLTGHMPHHGAINGVRGYDLWEIFVKAA

SEQ ID NO: 64496 - protein, 306 aa, Zea mays
  Coding DNA Sequence Number=SeqID_21121
  Homolog annotation: Hit_ID=A2XFR6; Match level="QueryCoverage=52%, HitCoverage=46%, E-value=3e-10, Identity=30%"; Hit description =Putative uncharacterized protein
MAHIRCTARKSVIPFLPSRLAERPLHRTVSGQSSHLERLHRRLHEEQERRRQEQEQEQQDSSPSPQREMESERPPSPAPQPEMPLAPPQGISAARGDPDRDDDDVGDSLSHGTERSEEPEPEGWIARPITRDAARGLPASSRAITDQWEATCLVRRPNDDLRGAEAFSEHYSITERDTAEAVMQDAARRALSQYCSLFSGVADDLDLKYYPRHSTGSAGGVIVSPVGEGNPRLSSMVNLAAVLNTELDHALDELGKVRAEVAELRAECAARHYLDGGSPALVGIQHPYRSPTRGRFDYGTPTAGPA

SEQ ID NO: 64497 - protein, 296 aa, Zea mays
  Coding DNA Sequence Number=SeqID_21122
MGDTRRLFASSLEERNSVGVGTFQPSFGFKDFHQPARLYPPPPPRRRSPKTVTTSSWVGRSKPGCDLGPTLSFKDVHHPRWGGGRAEPALYLPRGFVGHPLPRRSRERALTGPAGGPDFDNAGLVDGGRRHLQRVGLVGLASGGPSCRRAAAAPHSPVDYLNRFTKHESPRVKVTSEHEQRRSWLENENLVGRSLAGLSVSGTDAGVDQPRPRVGLAPLEDGRPRPQRDVCASESCFSRKVMSEPPGTPSKGSGCCAMVGVFGFDAPFGDNELQDHALGRPEDPPFRVELDAFRFF

SEQ ID NO: 64498 - protein, 376 aa, Zea mays
  Coding DNA Sequence Number=SeqID_21123
  Gene Ontology: Mol. function=Ral GTPase binding; Biological process =protein transport
  Homolog annotation: Hit_ID=A7Q7C3; Match level="QueryCoverage=39%, HitCoverage=13%, E-value=3e-62, Identity=80%"; Hit description =Chromosome chr18 scaffold_59, whole genome shotgun sequence
MASDSDVDEDELLQIALQEQAARDLSHQRPPAANKPVVNLVRPPAPNARGGNGRAGGAAAKARQPSRGGDEDEDSDVELLSISSGEEDDNPRARGPPPPRGGGGGRAGARRAVARDDGDFDDEEPRSWKRVDEAEFYADIESKLRQIEEDPEGAGTAHLYSVTQKISGVANRAFEPLFERQAQAEKIRSVQGMLQRFRTLFNLPSAIRGNIRKGEYDLAVREYQKAKSIVLPSHVGILKRVLEEVEKVMQEFRGMLYKSMEDPHLDFAELENIVRLLLELEPETDPHVPAFWRLALSVFSGKFAKTASGNVVSDSDMNAKPSANKNDDKGGDVNMILNLMSETAKSYDISQPLQEINESVRLAFLNSFLDFAGMNL

SEQ ID NO: 64499 - protein, 338 aa, Zea mays
  Coding DNA Sequence Number=SeqID_21124
MLFFHHAGKTSSIPPPAGGLPAAIVVVARRWKEYHVVAAVEGHELKTPETEHRPGSERLLETAHLELDGKLFVNTQQAPTWRANFRRFETGGSLSRRVNVAACPSPDGSSAWASAKGGSEVAGVGRERGGNPAAFMFVPRPARVRALGSGGAEFAVFRDLARVRALGSGGAEFAVFRDLARVRALGSGGAEFAVFRDLARVRALGSGGAQFAVFRDLARVRALGSGGAELPMVPLAGPDCPSVSLCQVALQSEWRRRRCPLVRPAGAGGDRWAAASDTEVEEVAVVAWASWWPRRREPEEPSSEESEEDGDGGESAADGGDEGALLLAAELRVVEKRK

SEQ ID NO: 64500 - protein, 378 aa, Zea mays
  Coding DNA Sequence Number=SeqID_21125
  Gene Ontology: Mol. function=molecular_function; Cellular component =membrane; Biological process=auxin mediated signaling pathway
  Homolog annotation: Hit_ID=A7QBC8; Match level="QueryCoverage=83%, HitCoverage=92%, E-value=6e-79, Identity=48%"; Hit description =Chromosome chr4 scaffold_73, whole genome shotgun sequence
  Pfam annotation: Domain name=DUF6; Domain location=209-338; Score =39.8; E_value=9.8e-09; Accession=PF00892.11; Description=Integral membrane protein DUF6
  Pfam annotation: Domain name=DUF6; Domain location=25-159; Score =38.4; E_value=2.5e-08; Accession=PF00892.11; Description=Integral membrane protein DUF6
  Pfam module annotation: Pfam domain module=DUF6::DUF6; Domain location=209-338::25-159
MGTGGSCAAAVRGARPAVGMVAVELAFSALQIFIKLALDDGMDERVLVAYRLMFATAFLCPLAFLVERKKRPPLTMKVVLGLFMCGLFGIAINQNLIVLAMKLTNSTTIVTALSNLTPQSTFIVAILTRQETVKLGKASGRAKLVGTLVGLGGAMLVTFYRGPEIGFMHRLARTAGLRDAGRLSGGGGHGTSSAAARVVGSFLAITSCFSYAIWLSIQARVGEVFPCHYSIAALVCLFGAVQSALLALCFHRDMAHWRLGLNVRLYSSAYAGIVASGFAFPLMSWCLRERGPLYVAMFGPLIIVFVAVLSSVFLDETLHLGIALGAVLIVAGLYIVLWGKAREAQEKAAAAVLTDEELGNDSSMAPAAANTKYNGETK

SEQ ID NO: 64501 - protein, 179 aa, Zea mays
  Coding DNA Sequence Number=SeqID_21126
MPVLGLSSPPPNAFTALACEAQWGIERVQSGVVGWCPRQLLVIVVNPSRAVGNHSCDPIASLRSPVLRWSSAVLNAPVPLFGRRRRTISLGRWILANGGEVSDLIPVQSFDRNHCEMIVQLGLKMKNSLGECDRSFANENPGFSQNNPQSTLGVAESGESFKYHRMRRLEDDVTSSLEV

SEQ ID NO: 64502 - protein, 53 aa, Zea mays
  Coding DNA Sequence Number=SeqID_21127
MGLGICGSLCQGGDEDDGFGYAYGNGCPRCNHWSGEDEVVEEDFQEFQEYDEF

SEQ ID NO: 64503 - protein, 137 aa, Zea mays
  Coding DNA Sequence Number=SeqID_21128
MGSLSENMTRRALSLVCSGPKHRLFSGEKFPATRLAIDPDTTSNMFQEGLNTKSFIKKLQSTTMDGMMTCTMQSCRLPLGHLHTSRHSFPCMMGTLTLSHPVLEGKPNANHVRARISNSRTQQLHNWTSSHSAQIIA

SEQ ID NO: 64504 - protein, 227 aa, Zea mays
  Coding DNA Sequence Number=SeqID_21129
MRSPACSRRDSSIERVRELHQGTRKGLPVKFCRVRGLGKLHGPLAELAEALARLGGGRSGLATVAEVLEAVAGGKELVGAKEGWLAGDEIWSLEIRSVSLLKPEANPGHTARLATRIARTNRNPQITVCHRHARRVSWEEELVSRSRLSATLFLQYAKENDQMGWVHEPVRHLAQACAVLADHAVPQSATHAKWARGSRPRPGEGFRRACGSGLRSWGAAMTDKGPH

SEQ ID NO: 64505 - protein, 97 aa, Zea mays
  Coding DNA Sequence Number=SeqID_21130
MRRVKAIRNKSTTKDEVTNSRAKEEDTAKRKKVSGPTVSTALIPLMSHPVLEGKPNANHVRARISNSRTQQLHNMDIIAQCSNSIKKGNNSRLHHDV

SEQ ID NO: 64506 - protein, 44 aa, Zea mays
  Coding DNA Sequence Number=SeqID_21131
DVRITDGVEKVGLVLTLVMHCNHCSGEDEAVEGDFQEFQDYNEF

SEQ ID NO: 64507 - protein, 174 aa, Zea mays
  Coding DNA Sequence Number=SeqID_21132
MGLGVCGSLCQDGVEKVGLVLTLVMSKIYCSIEGSCYSRIVAGMKGYKFATDVLASCCTKIQDLDIAIGFVRRSESGFNGTMTRSERQLRELTIGDCAPRFAPAAVIRARRSWIMQRGRFRARIVQLSKGKRLLGVELGDSQVRAPSIAYLGRYRFAGARFIAVRRRGLRAVKK

SEQ ID NO: 64508 - protein, 322 aa, Zea mays
  Coding DNA Sequence Number=SeqID_21133
MNVLSREGCRHYEVFDQADEDFERDIYKVEDPIVKESAGALYNRMWGPHGREVVRERAETTRGQAARGERVDDFGALNSTLPDPESNPAEAALEPLPETAEGAPDAPAAAAAGRGPPPETAEGVPDAPAAAAAGEGLPLTAALRVEDPVTVAAEATAEAPATAGSSQVQDFGPAHATATTNFLAASTVDDGNKSDGSASKFSDFGDSGSSVEWTDESSDEDLDYFAALDVAAAEASPRAADAEDVPGPSTGRKRRAIAKHRVSGADGGRLRVSRAGRQELLSLPAAVSIGEGELRSLFVGEELRIMLFNYREMGIISKAEPM

SEQ ID NO: 64509 - protein, 362 aa, Zea mays
  Coding DNA Sequence Number=SeqID_21134
  Homolog annotation: Hit_ID=A2YGC2; Match level="QueryCoverage=38%, HitCoverage=62%, E-value=1e-07, Identity=28%"; Hit description =Putative uncharacterized protein
MESYDLRAERGSRLVGGNETDGSGYDYGAGKWYSFRLERMARLRHTARKSVIPFLPSRIAERPLRRPVAGKSSHLERLHHRLHEEQECRRQEQEQQGSSFSLQQEIESVRSCSPVLPLEAPPAPPLGAPASGVAAGGDPDDGGAGRMVARPITRDAARGCHFHDALDTLLRRALNRRTWSIEYRCMVYQHSRGVYPDRWEATCLVRRPENSLQGVEVCSEHYSISERDSAEAAMQDAARCALSHYCSVLGGVADDLNLKYYPRRPSGSTGGVIVSPVGEDNPRLSSTVNLAAKLNTELDHALDELSRARAEIALLRAERAERRHLDDGSPAPVGTQHPYRSPRRGRQSYGNPDCKTKINLEP

SEQ ID NO: 64510 - protein, 54 aa, Zea mays
  Coding DNA Sequence Number=SeqID_21135
MGKPVPSLLMLLLSRVTALVPTITGMGDHDSGRVRGYVHCQVHSGFNNIMLKRN

SEQ ID NO: 64511 - protein, 245 aa, Zea mays
  Coding DNA Sequence Number=SeqID_21136
MTSHGSSDDGNALTHTDGLAREGFPRILWEVLQGAGYVTPPQYAVQQFEKHRVPRCRLATHPIGLFPAEREDDPMWKDRVEHAKDIWAIYPGQTTHLTVRCMNALYRLQVMRGEAMSHLMALLEATKITLDNREELVVDLSQEMVEKDLQVEQLSTDIQELEELVGTRENTIEVLEDQLINTQQQLAEANEHLDCITRRSRTWRPTRTSTSREEMSLPLVWTLLAREDHLPPSRVLPHSLTRCPE

SEQ ID NO: 64512 - protein, 131 aa, Zea mays
  Coding DNA Sequence Number=SeqID_21137
MALAWLGRGAGHAGARASVLWRGQEASNTWSLRHGRGSRIGEAAAHAPDPYREFHFRSPRGDIPGGEGRQQRGAGWRCCALAVDCDRLDRSLAAESSSTCAWTVEHLWASFETQPCAGGALRIWRIFKQLI

SEQ ID NO: 64513 - protein, 178 aa, Zea mays
  Coding DNA Sequence Number=SeqID_21138
  Gene Ontology: Mol. function=endonuclease activity
  Homolog annotation: Hit_ID=Q2HUP4; Match level="QueryCoverage=67%, HitCoverage=47%, E-value=4e-18, Identity=38%"; Hit description =Endonuclease/exonuclease/phosphatase
MKPQRKPLGRNPLSDAPYRNPGMVLNEQGPGRHPSSDALSLDLEPVISEQGSGRRILSGALHRRPGVVKNEQGSLHLPRRVRRVRKLVEPTRVRVGSWNVGSLTETKWKGQKAKEVEGTGFKLWYTGTATNKNGVGVLIDKSLKDGVVDVKRVGDRIILVKLVIGDLVLNVISAYAPQ

SEQ ID NO: 64514 - protein, 125 aa, Zea mays
  Coding DNA Sequence Number=SeqID_21139
MEKGRDGKAKAAEKERGVNNGLMGILCRNSKPMANPPRTEFSRRKNPDRYEVEKFSFRNDGHVVTCERQLAVGVNSSRSSSWVPSRFYQRAEWEANSREDSEARKQELGDGKQRRLKAQHLWDIL

SEQ ID NO: 64515 - protein, 116 aa, Zea mays
  Coding DNA Sequence Number=SeqID_21140
MRVGMWCGNALRVPGVREPHRGTTLPRAGAARTEAGTAARRGLERLRVGARGPRAGDRGSHTGGQGAEPSWGWGATREGVKGPRVRGAKSRATGGRDGCAGRSRGRTGGGEGPRAR

SEQ ID NO: 64516 - protein, 251 aa, Zea mays
  Coding DNA Sequence Number=SeqID_21141
MVLGEDMMSDDDKENSDNTTFEASFFADELAAERTPEVKVFGFEHLIEDLVKLLMELVEKLVTPISTKLQRPDGRDSGQGSVHSRDTISPRPSPASGKGSRPGRIHVSPEGLGLSLDFGRRTPPRPTPGLGLSLDFGRRTPPRPTPGLGLNLDLGRRTPPRPTPGLGLNLDIGRRTPPRPTLGLGLNLDLGRWTPPRPTPGLELSLDSGRRSPPRPTPGPRLDLDLGRASASPDLGLGPATSQGGPSLPYP

SEQ ID NO: 64517 - protein, 328 aa, Zea mays
  Coding DNA Sequence Number=SeqID_21142
  Subcellular localization annotation: CTP_CleavageSite=63; ConfidenceScore=5.68e-01
MLDVSKSKGCAPLVRLHAACMAVRPFTRWFGRKWRSASFARLQGFSSGSPAASPRRWSPKTVTTSLKVGRSKPGCDLCPSLSFKDVHHPCWGGGRAELELYLPHGSAGHLFFQLLGVETILQLCGGGALQPCRGRRTIAAQPGCNILSSVLAFVARTGVRTCRCALGAAGARWCGVGGQVDAVVGAEVVAAGESFSAVETVSATCGQTSGSLALISGSRPLSGDANESLPAAASVLGPSLLLQRSLASHQEFVALQALRCGGCSYPRGRNRSSICNGTLSAGVCSSWLLGPEHKVKSEVSVSRRNPRPLCDELEPEAAVPARTEAELA

SEQ ID NO: 64518 - protein, 75 aa, Zea mays
  Coding DNA Sequence Number=SeqID_21143
MKVDSQLFPGVNMVECADQVFSFNINMVGSARYQDARKASEHLLRKYEYQYRQRHHHEPEDEEYKHRTGKRLRRR

SEQ ID NO: 64519 - protein, 239 aa, Zea mays
  Coding DNA Sequence Number=SeqID_21144
MANTQTNMSGPMQDSPITYEKLPPEHQVKYDQIKALFEANPIGTFERTCNYGIQWKGFLLEGALDEVDLLLHSEECTRDLCQEVNYMVAHPLHRHSGSLMNAFKRMAIHIVQEIMRHQYYPMGLVLGSHKREITFHTRSPLPYSVASPEAQSAASPAYVVYKMGGGPEDCQFFNEPLNHIPHGYSCMQKRGETVLEFIQQCYSSRITEKEVVELATLGLAKTIKVLAFQLEFNSLAHLA

SEQ ID NO: 64520 - protein, 773 aa, Zea mays
  Coding DNA Sequence Number=SeqID_21145
MEALRSWDICGSNVRLNRVFELNRLPYGGYPGDDAVVAVDRRGKKPVATAGEGSSREAPPAMKKRKLGTAAEGLGVSDCFVVELMGTCVALGGRMSSPKLRESSARMLRVTGGRWPRNVPIPRGAGEDIFMSRMARELKIFPYGRNIATVVSVVMEKDRQDVARKHRAVTRVGDPFREAKKVRGGTKSAAPSSSKPLPAVKPATPRPSKSSAGAKAAASNVGKLPSAKPTKEQRLPSPARIDVATTRVADFDTNICVGDYLVGSDVGQLAVVSTPVAATSPTTVVGAKGASQDPWSNFYASGEISSGAAANDVAGSVSQQLRHASQQLKHHTDAVREKSAAENKSCRLTERLATAEAEKGDLHRQLVEERRDANKAIADAQAAQAEAKLARAVASLARQRVEELEARLNGLCNHVDKTEASTRAEVERTHAQLVDAYWELGARTAAFEAPDQEVGLCFLEWLQEELGVLPTIVTGLMSFASLVTCKGAVNALSRKGCGHYEVFDHSDKGFEREIFQVEDPVLKRSVGALFDRMWGPHGRETVWERSDRAIDQMAHDEEVEDLGDLDGTLPDSTLPEASGVELAPPSDAGKGPSAIPAPTGAGEDPAPAPALTAETSPRVEGSGDLPSASTGQNPLDSSNPNPRSFPQIKQYPAAEERAKGLTGGKIAPVGELVGGKESSLSRAQSTNQTGQRASLGIKEGVEVLPGPRAWKASRANGDANRSAGTTWGDWSGLATVAEALAAMAGGKELAGAKEGCLAGGGIKVNTLDLWLKV

SEQ ID NO: 64521 - protein, 99 aa, Zea mays
  Coding DNA Sequence Number=SeqID_21146
MAPKRASSKAAPSVDEAAKATLLAEKKGKALADNTPQEACEDEALSKRERNEQPTPKGTLRTCSFGGQPQAPPPGFAPLEGEDATEDGKVISVSAEEQL

SEQ ID NO: 64522 - protein, 97 aa, Zea mays
  Coding DNA Sequence Number=SeqID_21147
MNVNGNLQNGIGIQMGQVKAIEIKETAEKKRNINHGFMGILCWNSDPVANPPRTELLRRKDPDGHEMEKVRLRNNRHMVTCERQLTVGVDRGNHRSG

SEQ ID NO: 64523 - protein, 138 aa, Zea mays
  Coding DNA Sequence Number=SeqID_21148
MGKSNKHKSEPTPPSEDFGDSEYTEEEFSSESEGSPALVSPPASSDDSDDSQGIAVEVWTYIRAVERSGLEGSDESEYSSDEEDSSDSAEEGGGGDGGDEDDEGGDGDDGGDGDSRGSKGGDGGSNGGGSKGSNKASG

SEQ ID NO: 64524 - protein, 118 aa, Zea mays
  Coding DNA Sequence Number=SeqID_21149
MASPNVGGTGGGLGVTSLPTGSADPRLDRCYHCYYLDAVGLVDGGRMGFAPIPAVTEPPKSLGPPTVVFVQQTSDNSAGAPDHLTSSLSELLTFPKSISPAMQTLQFIGDTEVRKQLQ

SEQ ID NO: 64525 - protein, 236 aa, Zea mays
  Coding DNA Sequence Number=SeqID_21150
  Subcellular localization annotation: CTP_CleavageSite=36; ConfidenceScore=5.07e-01
MADDVGAAMVLSIIIMATSTPGLRSLGLGSTRHVVPCERPQRLGAPFFSTLSDWRVLGTWGHFLDKCRLSSSSQRLTGILLLLTPTLPLSFAWQPASRIYGRGAAPGDRNGGAAGLFFTGAAPGGRNGSAVGLFFTSLRLQRPSSSHTGRSSKPIPSSNSTLGRIRGQIGGAAGVFFTGAWQICGARPSGWILGIEACFTGEEEAPGRISAAPWREESADDVGLRRAAYRLASPAS

SEQ ID NO: 64526 - protein, 253 aa, Zea mays
  Coding DNA Sequence Number=SeqID_21151
  Subcellular localization annotation: CTP_CleavageSite=34; ConfidenceScore=5.05e-01
MEETHLHVFDASCPRQSTLTRAPACPAPRPSQASAMARARAYKALPGFDCTLPRTLKPHRSLAHRRLPVRSVFAAAQSLCHHRPANRAIPNSVQPSEKTVHTSVKLPERGIGVCFAGEASPRSPELSTPPDSPWFGRYTRRRREHPPARVDRAIPAIPDVKPYLDVTARVSPSQPHPSPDLPRRRHIPSRDLRRGLPFQLWWVQVRSLHDGQSGSVRHCSLEEMVAGLTWPSTLPPGWTVEWDPASAEEEQEE

SEQ ID NO: 64527 - protein, 107 aa, Zea mays
  Coding DNA Sequence Number=SeqID_21152
  Subcellular localization annotation: CTP_CleavageSite=61; ConfidenceScore=5.43e-01
MPLPATALARPPLLAARRRPSAPAPPLFARSAAPVCPRHGPARPRWPLLAGATPARPPAPGASPARPRPARPPLAGSTALAPARPPVPPSRPLARPYLLAALAVIAR

SEQ ID NO: 64528 - protein, 65 aa, Zea mays
  Coding DNA Sequence Number=SeqID_21153
MKLWKETSRSSKITTSSRCGLAATPSRLPVKAAVIYVSFPHFDLLSLTGALQYLTFSTPDIAYVV

SEQ ID NO: 64529 - protein, 99 aa, Zea mays
  Coding DNA Sequence Number=SeqID_21154
MANRTETPGVLSPRWWMATSVSPASRYWPKNVMTGAPVWLTPNSTYNDHNPSINCKIPAHNRFVHGGDGNRRNLNMFWVIQGGLIQSDGSVSNMGHEGG

SEQ ID NO: 64530 - protein, 277 aa, Zea mays
  Coding DNA Sequence Number=SeqID_21155
MAVRQGEVALPCAEVNRHQGCLEYLPAYLPHSPSCKEATSSSLDAVNEDDVTKFGVVPGDGHAGVQDVVTKLAGDATHGDEDAGCQDGVTKVACGAAHGDGDLGCQDGVAKVTCGAVHGDGDAGCQDDAAKLAAEAMGSDRNPSSPILDAMVTRSVRDWRGNSMIEAAGGGGVVLFMREQYSRFHRSGKIKQKFGIVSSEDMAEHACEDRYANVDLVCALCDNGSKIVRLFVLWFIVVQLSKVKFNAYGLNCLEIMSFIRSYVVPEGIADSVTPSYV

SEQ ID NO: 64531 - protein, 53 aa, Zea mays
  Coding DNA Sequence Number=SeqID_21156
MAPRVSIAGCIPRTGIVTDNEQLVVPECVTEDLPEQQSGEGKCPLTHYVLHTL

SEQ ID NO: 64532 - protein, 237 aa, Zea mays
  Coding DNA Sequence Number=SeqID_21157
MGCTGVAFFFLPLEEHDLVGPAAVSRQWSPRMMTTSLVAEKSEPGCGLPPALSFKDVHHPCWGRGQAELGSCLPHRLATRFFLQHSGEKGVGRVHGPSRAVGHTRGSYKTSYAVGAVSAFLDAAIRRGGVSAQVAAVVGAKVVAVGEPLGVCYLAALPVWRITYLSVSYLSRKVMSKRGFPPSRPEATARAGTLAEGLAVTVGSARSAQAMASQQRAWAEGFEAALDESVKNCKTLA

SEQ ID NO: 64533 - protein, 431 aa, Zea mays
  Coding DNA Sequence Number=SeqID_21158
  Homolog annotation: Hit_ID=A2XD85; Match level="QueryCoverage=23%, HitCoverage=17%, E-value=4e-23, Identity=55%"; Hit description =Putative uncharacterized protein
  Subcellular localization annotation: CTP_CleavageSite=60; ConfidenceScore=5.18e-01
MAEKHLQNRPSRLEDNTIHPVSTTVPTTGVRLTTGAPPRPTLGLGLSLGLGRRSPPRLTSASASGGITTSPDLRPQPQPRPREKVSASPDLGLGLRRGLRLARPRPQPLEKSPPRPTSASDRLCYRGYIITLPLDSRLRLRRNKTGVTSRLLRQQTPTGSEKAEWAQEDGFKEICTSWIALRREYRSWFLSFLEYALESGFVMEGGSRNTREHMWGQPKGGDGGGRIVARLSQLKKTSDWLDRDRRAAEAEGLPVLAWNGRNCGVGTRRKARGVKNTTEALNGNIREEENGWGASDITTADLGEETSLRWRRHDARGGDESRGGAAMFRTSEVETSAKGSQQTNTKLKERVQNKGAKKTEGCPGLAHRTVSGAPWTVSGAPGRSTPNLPPSGFWKMLDAIIHWTVWCSTGLSGVPAAATAIAPTVDCKSEQ

SEQ ID NO: 64534 - protein, 230 aa, Zea mays
  Coding DNA Sequence Number=SeqID_21159
MSRNKTFDKHHTIINGMLETSGFGWDRNKNKISVVSDSVWEAYVAVNFSFFLFFCYYTIINVKLGSNAWYHLELTSNSFLQKIKEANGYRHKTVLYWDLISLVFGKDHANGEATKTLANGARDMSKEEGTGKELTSSTTSGSLKRQWSSDSFTSMMAEKLDKFTEAIKDEAPKGPTSKEIFSTLEEIDGLDEDTFLDLFDILIGDAHKYESLLALLVILRKKWLLKQLKK

SEQ ID NO: 64535 - protein, 350 aa, Zea mays
  Coding DNA Sequence Number=SeqID_21160
  Homolog annotation: Hit_ID=Q6J9V9; Match level="QueryCoverage=36%, HitCoverage=34%, E-value=7e-20, Identity=50%"; Hit description =Putative uncharacterized protein
MASRSEDLHLEGRCQHRAWAIITRVSSRNPAQADGRTGRSVASAGCPPRTPARLIASAARLQGWSRQWTTWPGSSHRCYASSAWEVPYSWADGVSSPADSAGAQRLQALLHFRPDQWVKGRTAMQAACNYTKGAHPFDFDASSMEAQAHTSCNRRAGYYVRETAPPLAPVPRILDRRIGAVTRGNPVHGPAVPTRHASHGSVSRGRRHDGRYGQKWANSNGGRTGKGDTPKGILLREGSEPQALLLISGSKAGPSEGFDSRLRALGLRAHYWSEVRRLAPRKGSTAASGHSGSAPTTDQGFAGWPLEGFDSRPRTRRARDDSGYIRYMAEARATLPRYPRTFPRPAGAIL

SEQ ID NO: 64536 - protein, 277 aa, Zea mays
  Coding DNA Sequence Number=SeqID_21161
MKGRMKKAESVLDRPLALCKGSGAALANLAPAKPLIASTYQPENSEPDYAPGQRPLVTPISTKLQRPDGRNSGQGFVHSRDTISPRPSRASGRNSRPRQIHASPEGLLKQRAHLRLAQGPTWAGFAEKQPWPDRHANRPYRRSIQCKDRLTPYPDARSPVDKAEESPPRLTPGLGLNLDSGRRSPPRLTPGLGLNLDSGRRSPPRPTPGLELNLDSGRWSLPRPTPGLGLNLDLGRRSPPRPTPGLGLSHDLGGATASPDLGLGPTTPQGGPSLPYP

SEQ ID NO: 64537 - protein, 308 aa, Zea mays
  Coding DNA Sequence Number=SeqID_21162
  Homolog annotation: Hit_ID=Q67UT1; Match level="QueryCoverage=36%, HitCoverage=51%, E-value=2e-49, Identity=82%"; Hit description =Putative uncharacterized protein P0046G12.37
  Pfam annotation: Domain name=TATA_RF; Domain location=157-307; Score=- 46.6; E_value=0.064; Accession=PF08612.2; Description=TATA-binding related factor (TRF)
MSCAFDDYYIKDYGIILMQEVTQRRTDSNDHSPSSGVYGGAYLMTDNIRGNFYRQVLGVKQVGFGFGLDTEQELPRKYPDIRVGYGYPEFGQEIEPAGSAAPARAGLGGPFGHLYTTHTSTCNLLAFTNPAPSSLDVADADAGAGASPNRRHAPRQMVPLMHWHPSPGATLNSQILAEACGCAESLGGSKDGRWKTSIFFYRAMTRDGAGGPAVQQHPDLPRELLGVALHERPGLYFSIVRAQRLVLQADAAFPQVMEKLQSYRIRVALNFELLGLAGTGSVSQPTLCFVHVPIRCTFGPDLMGWPEA

SEQ ID NO: 64538 - protein, 227 aa, Zea mays
  Coding DNA Sequence Number=SeqID_21163
  Gene Ontology: Mol. function=DNA-directed RNA polymerase activity; Cellular component=chloroplast; Biological process=transcription, DNA-dependent
  Homolog annotation: Hit_ID=Q67UT1; Match level="QueryCoverage=51%, HitCoverage=50%, E-value=2e-51, Identity=86%"; Hit description =Putative uncharacterized protein P0046G12.37
  Pfam annotation: Domain name=TATA_RF; Domain location=7-168; Score =19.0; E_value=1.6e-06; Accession=PF08612.2; Description=TATA-binding related factor (TRF)
MDEGINLATLFPQDLLQEEDNLQLRLVNFISHENSKLTQRIYHTNSQFVRTCLVVNWEQEEKEGARASLVEGFQYQLGDFCLRIGKCVPNNSEALRGIMMEVEYYPLTSIEKSKAVMEDFFDIWQETVAKKSLPGQFIHVDSNFSEYGLSDQYSFQHTAVQYATCLQQLMAAVTHSQCLDICCVIDIQFTNGFPSSCSFKMPTTGTYKVVKFSIVDSKGVWGVCLGL

SEQ ID NO: 64539 - protein, 385 aa, Zea mays
  Coding DNA Sequence Number=SeqID_21164
  Gene Ontology: Mol. function=nucleotide binding; Cellular component =Golgi apparatus; Biological process=regulation of transcription, DNA- dependent
  Homolog annotation: Hit_ID=Q67UT6; Match level="QueryCoverage=95%, HitCoverage=61%, E-value=1e-175, Identity=78%"; Hit description =Putative auxin-independent growth promoter
  Pfam annotation: Domain name=DUF246; Domain location=4-339; Score =482.9; E_value=4.1e-142; Accession=PF03138.5; Description=Plant protein family
MPSYRPLISGLSQAVQISDNALFQTLIKICDMVAVAKILKATLVLPSLDHTSYWADDSEFKDLFNWRHFIESLKEDIDIVETLPPEYSDIEPLAKAPVHYYRDEILPLLKKHKVIYFTHTDSRLANNGLPSYIQKLRCRVNYRSLNHKFLELQQQIILQKYEKDMLAFTGCSHNLTSEEEEELRKMRYEVSHWKEKEINATERRSLGGCPLTPRETSILLKGLGFTRSTRIYLVAGEAFGNGSMNALKDDFPNIYSHSTLATEEELAPFKNHQNMLAGLDYIVALQSDVFIYTYDGNMAKAVQGHRRFENFRKTVNPDRMNFVNLIDEFDGGRVPWDIFSSEVKRLHKDRIGAPYFREPGEFPKLEESFFANPLPGCICEQHSEE

SEQ ID NO: 64540 - protein, 177 aa, Zea mays
  Coding DNA Sequence Number=SeqID_21165
  Homolog annotation: Hit_ID=Q6QP51; Match level="QueryCoverage=22%, HitCoverage=17%, E-value=3e-09, Identity=74%"; Hit description =Putative growth-regulating factor 1
MAERCQLPWSCVPPTTRRKDGGSPPSGGLEGGKTRCIRECEDMIAFQGGHPPFKGDSPYLRPQPSWAESSPTHSKVLPYGAGAGSHASCKPAQSRRGQTAVRGTGKGGYPEKDPSPRRNQALSPPTDQRFEGWPPGRVRQPPQIAWALHPLLVRGSKAGPSKGFHGRLRLLGLRTHY

SEQ ID NO: 64541 - protein, 17 aa, Zea mays
  Coding DNA Sequence Number=SeqID_21166
MTGYFTLTGRKWAILRL

SEQ ID NO: 64542 - protein, 57 aa, Zea mays
  Coding DNA Sequence Number=SeqID_21167
RARGYERPRELQRLVILDQRYCGTGGYEIDGSGYDYGAGEDEAVEGDFQEFQDYDEF

SEQ ID NO: 64543 - protein, 102 aa, Zea mays
  Coding DNA Sequence Number=SeqID_21168
  Gene Ontology: Mol. function=diaminopimelate epimerase activity; Cellular component=chloroplast; Biological process=lysine biosynthetic process via diaminopimelate
  Homolog annotation: Hit_ID=A2ZLS4; Match level="QueryCoverage=44%, HitCoverage=12%, E-value=1e-17, Identity=91%"; Hit description =Putative diaminopimelate epimerase, chloroplast precursor
MPGVNGVDYTMRIFNSDGSEPEMCGNGVCCFARFIAEIENLQGTNRLSMLNIWLQAQQTALASMPDHLLDDANRAGSKIRVERAERSSYTFQSLLDGGAEST

SEQ ID NO: 64544 - protein, 510 aa, Zea mays
  Coding DNA Sequence Number=SeqID_21169
  Gene Ontology: Mol. function=microtubule motor activity; Cellular component=microtubule associated complex; Biological process =microtubule-based movement
  Homolog annotation: Hit_ID=Q2QP07; Match level="QueryCoverage=83%, HitCoverage=52%, E-value=1e-165, Identity=67%"; Hit description =Kinesin motor protein, putative, expressed
  Pfam annotation: Domain name=Kinesin; Domain location=46-352; Score =382.5; E_value=6.5e-112; Accession=PF00225.14; Description=Kinesin motor domain
MDEEKQNNLTTKEEASFAVNGSNAAQKFHLKAEINFDLQHKQIKGLRGTVSSIKSGMEQLKLHYSEEFTKLGKHLYTISNAASGYHKVLEENRKLYNQIQDLKDEVFSDMQPLIRSVLDGFNVCIFAYGQTGSGKTYTMSGPKVLTEESLGVNYKALNDLFNLQAQRKGTIDYDISVQMIEIYNEQKGLAVPDASIVPVTSTSDVVELMNQGQKNRAVGSTAINDRSSRSHSCLTVHVQGRDLTSGTVLRGSMHLVDLAGSERVDKSEVVGDRLKEAQYINKSLSALGDVIASLSQKNTHVPYRNSKLTQLLQDSLGGQAKTLMFVHISPELDAAGETISTLKFAERVASVELGAAKQNKEGSEIRELKEQIASLKAALAKKEGEPENILSTRSSPSIYRIRKGNATPATPKDRQPMEEVGSLEASTQKCTTVLPHVLPPPRALAHAQTRPAISATKSSVDTAPSTPPNPRRAEESSQGHEQAAAGGKKHGTGGARRGLEESLESGKIAA

SEQ ID NO: 64545 - protein, 63 aa, Zea mays
  Coding DNA Sequence Number=SeqID_21170
MALEEKRAVGTGMMWTLRGKGGGEVGMGRYHGHLYVAIGPCHAGTTRARHRSCQFNQAEARHE

SEQ ID NO: 64546 - protein, 96 aa, Zea mays
  Coding DNA Sequence Number=SeqID_21171
MDLVPGDEILAAPTVIPSFSGHERPPSNVLKPPDPLWNPDCKLRPRATLVRWRRTGFFFLTALMAEAQGLHLSTGAASVTENAGKKIGPGEFGAGG

SEQ ID NO: 64547 - protein, 497 aa, Zea mays
  Coding DNA Sequence Number=SeqID_21172
MGLGVCGSLCQVWVRPLGRRCECYETDISAVLAVYERPRELQRLVILDQRYCGTGGYEIDGSGYDYGAASPLQPNRILAEYVDVYSPLLYTPNPPQVVSVATTAQAKMKLWKETSRSSKITTSSRSGLAATPSRLPVKAALSTFLFRTLIYCKNYMDVSDMARLRHTARKSVIPFLPSRLAERPLRRPVAGQSSHLERLHHRLREEQERRRQEQRSSSLSLHQEIESVRSCSPVLPLEPPPAPPLGAPASGVAAGGDPDDGDGDDSSSHDTDFSANPEPEGWVARPITRDAARGCHFHDALDTLLRRAFDRHTWSVEYRCVVYQHSRGVYPDRWEATCLVRCPEDSLQGAEACSEHYSISERDSAEAAMQDAARRALSHYCSVFGGAADGLDLKYYPRRSSGSTGGVIVSPVGEGNPRLSSTVNLAAVLNTELDHALDELSRARAEIALLRAERAERRYLDGGSPAPVGTQHPYRSPQRGHQSYGNPACKTKINLEP

SEQ ID NO: 64548 - protein, 332 aa, Zea mays
  Coding DNA Sequence Number=SeqID_21173
  Gene Ontology: Mol. function=kinase activity; Cellular component =ornithine carbamoyltransferase complex; Biological process=amino acid metabolic process
  Homolog annotation: Hit_ID=Q6QP54; Match level="QueryCoverage=27%, HitCoverage=36%, E-value=6e-11, Identity=51%"; Hit description =Putative kinase
MALPVDVAGLCPRQGDVGAPPKPRSSLSSVAEAEPEPPARVRALGSGGAEFAVFRVLARVRALGSGGAEFAVFRVLARVRALGSGGAEFAVFRVLARVRALGSGGAEFAVFRVLARVRALGSGGAEFAMAPLARPDCLSDSLYRVALQSEWRRRRCPSVRLSGLLLSEAKASGEPELYADGGYQLRIRRLEARVHGRGPSSRAGMLTLSTVWPESSLREQPPSLRTGREDDQGQTRLFTYAPTSPFRKEEGECAMLPSMGTEHGVSGELQAGNPSGRPCPVRWGSLGAQRHAQKYLWVICRTRSPGDGVRGLDASLRWDSVTRSFPLVSEMS

SEQ ID NO: 64549 - protein, 304 aa, Zea mays
  Coding DNA Sequence Number=SeqID_21174
  Subcellular localization annotation: CTP_CleavageSite=51; ConfidenceScore=5.15e-01
MSSSSLMRRVFPSSEPPDGGYPPSFRLLVGGTQLHGSWYLSAIVRLQGFSSAGPAAPLRRRSPRMVTTSFWVGKSKPGCDLGPTLSFKDVHHPRWGGGHAEPALYLPRGSAGHPFPRRSGVEALAGPAGGADLDNVGLIDGGRHHLQRVGVVGRAPGGPSCQRAAAAPGRCPTRLGGFEWGSAGGLASPAIGAEAEAAREVLVADGIAATIRAPGHCAGVLVLAPRASAWARARLQQRSPTVAVVRTGGGEPLVSLLSLRRPSPWSGVESLGSIGLVVWGSSSLVKETPRPLFDEPRPGVAISV

SEQ ID NO: 64550 - protein, 234 aa, Zea mays
  Coding DNA Sequence Number=SeqID_21175
MASRIWICSGLGFHRGFGSGVRSSPPTHAQIENQDNQPARGITNGASIRQLSGRGPHDKQGRRPWMVARRSPTQRRGRAPRTVDAGSGASRGSGRGFRVSRARRWVRDGGGGRRGDNHSAEVGEKGALRTGGLRRAAGVRTGGIRDGGHAGFAERALRQDGPHSLRQGGIVLYWLDVARPIVPLPLPWESRESYRVFCAAQEAIEAEAELLRVQRSRGWPPDPGLSRAIFGYGG

SEQ ID NO: 64551 - protein, 414 aa, Zea mays
  Coding DNA Sequence Number=SeqID_21176
  Subcellular localization annotation: CTP_CleavageSite=62; ConfidenceScore=5.84e-01
MPCTGLGHSSPPFPSSTASSSAAPPSTQNTAPLPSITTQTSPATTPAAELCHPTVVSSLPVTSSKIGPTLKLASLSSCYGTCPILRNRGHRRVMKAGEHREDKEGECFVRFGHGGGLTPTGITVKVRTCEMEDSLVIRTSYCSEVEGFPHLLRSCALRMGIRKKPKYVWKEYLEIRMENCSMAVYLGESRNYPNHPLFQVTFTGHRFPDTCQNVARKALRQLCQNYSRVVFETPLHYFPPSNKNTPAWRKRLQALSGRDPTEDDPTIVYMAGYLHTLDNQYDDLSSHCTHLNSRVESLEQQVKELKREKASLQESLEIAEGEETNTREAYRTLKMDYGKKLKKLAPAKKIRKKTRSQGCQTEQKEEAPPALPPTRIENSSDTEDMSLACLDDLLKEFADTLEKEFGSTLDSTHG

SEQ ID NO: 64552 - protein, 116 aa, Zea mays
  Coding DNA Sequence Number=SeqID_21177
MDDVGEERHRLLGPDAVQGSDLDPLGEFVDGDQQVRVAPGCLLQWTDEVQTPYSEGPGDGYRLQSLSGQEFLTFGDGDAALEDARGAPVVELLLATQQDERLGASCYPPSLGLVEG

SEQ ID NO: 64553 - protein, 62 aa, Zea mays
  Coding DNA Sequence Number=SeqID_21178
MGLGVCGSLCQVWFALGKECGGNEIDVFCIDSGNGCQHCNHCLGEYEAVEGDFQEFQDYDEF

SEQ ID NO: 64554 - protein, 255 aa, Zea mays
  Coding DNA Sequence Number=SeqID_21179
  Gene Ontology: Cellular component=membrane; Biological process=proton transport
  Homolog annotation: Hit_ID=Q33AJ2; Match level="QueryCoverage=50%, HitCoverage=59%, E-value=2e-18, Identity=40%"; Hit description =Putative uncharacterized protein
MGVFDRLPPMDHMRSEKMCFVQLIMPADSSRLAVTYLGELGLLQFKDRKAVGEIPTTRKIFYYDKRETMYKPSITLDKNLEEKHKKDGEGAPKVTGFLSKAPKVIGFLSKAPKPGDFSNDICNSSVLSLGAGAGDRVLTLGGPEDETITKNTTKPKSSKVRLTGVVHMKAGLLDCIRDVRPCESEILEGPYKATEICRISHWITNSARQLGIDINWGGTELAFSHASSVKDVNHVLTLRQNKLVVVRWTCIPKKW

SEQ ID NO: 64555 - protein, 136 aa, Zea mays
  Coding DNA Sequence Number=SeqID_21180
MGKSKKGRISLHHSGDKQKREPTPPSEDFGDSEYSEEEFSSESEGSPVHASPPSSSDDSDDSQGIAAEVWTYIRVVERAGLEGSDESEEGSDGDDGDEGDDDDGGDGDGDGNKDDDKGDSWGGSGEGGSGSDKASG

SEQ ID NO: 64556 - protein, 179 aa, Zea mays
  Coding DNA Sequence Number=SeqID_21181
MEQSGPGYLHKSKTTDQAKDGGKKSFEVPSALDKVKETRNPKPGVEKKTCKVKVDRVKSYGDIQILFLDIGNFQVSNGGANSGDLWLGDGDSAARHLAQWRGAPCLQTPEHPVVGAWADRVREAIWDYISQIPSRRIQGDILVERFRRTQELAAILLCPSARLALNPPGGARKEVTRLE

SEQ ID NO: 64557 - protein, 43 aa, Zea mays
  Coding DNA Sequence Number=SeqID_21182
MTTDRPLELLHMDLFGPFAYISIDERKITNPRDPKGILEMSSK

SEQ ID NO: 64558 - protein, 144 aa, Zea mays
  Coding DNA Sequence Number=SeqID_21183
MGRGRRGRGWPHRADGKRKRPPKSPSEDFSDSEYSEEASSKYDRSPTPASLVASSEDSDDSMGLSTVARAYWRSIERAGLGGSDELEEVSSEEVDSFEEWSGGEGDGEGDGSGGDDDGNKGEGGKGDGDGSTDDDDDSKGDGGS

SEQ ID NO: 64559 - protein, 33 aa, Zea mays
  Coding DNA Sequence Number=SeqID_21184
MAYEIKARAAKALSEGWRLRLRPNICPPRDQFN

SEQ ID NO: 64560 - protein, 298 aa, Zea mays
  Coding DNA Sequence Number=SeqID_21185
MPVAVGPLFCFAAYIGLLQPHSDDMFRVVDQLLKLTATCIVGSVASATGDDGRCRTAASELRLDVVKLFHPSSTLAEAGTAASATGPLHCAAIIAGDELGPELLRPRNQYRWIRNDEVKPLAVTTSPETSPSPAMADRWGCWPRGPTYQSLGIDPSALHWVYPAFSDPCVKDSQQANQKDQSWIQNEELKAAQEPPWSGAPDCPVAHRTVSGAPGSPVLNSSASGFSRSCRAKNHRTVRCTPDSVRCAKGGAAPELASLGFLRRLLRYNSPDCPVCTGLSGEPRSNDYIRANGSLPRI

SEQ ID NO: 64561 - protein, 22 aa, Zea mays
  Coding DNA Sequence Number=SeqID_21186
MGTNGHLDLDMGDSKPVLRNAT

SEQ ID NO: 64562 - protein, 15 aa, Zea mays
  Coding DNA Sequence Number=SeqID_21187
MNRLHRDTNAVALAS

SEQ ID NO: 64563 - protein, 438 aa, Zea mays
  Coding DNA Sequence Number=SeqID_21188
  Gene Ontology: Mol. function=kinase activity
  Homolog annotation: Hit_ID=Q6QP54; Match level="QueryCoverage=19%, HitCoverage=30%, E-value=5e-20, Identity=66%"; Hit description =Putative kinase
  Subcellular localization annotation: CTP_CleavageSite=57; ConfidenceScore=5.27e-01
MELDGGTAVGTAVLLLMSPCFRKGAGSCRRHGPVRRHHCLSGGAGQMGRRSCPLRPKSAQGRVMMTLPVDVAVSCPRSGVVEAPPKPGSSPSCKTEAESEPWVGRGGDRLAEAEAESEPWVGRGRARVRALGRAERSSPSSGALARVRALGRAEFAVFRGLSPSPSPGSGGAEFAVFRGLSPSPSPGSGGAEFAVFRGLSPSPSPGSGEAEFSLALLAKPGYPSVLPFALKAPGIWAVGAVGCRGGSSEAGVESVLQDRGRVRALGRDEAEIVVFRGLSPSPSPGSGGAEFAVFRGFSPSPSPGSGGAEFAVFRGLSPSPSPGSGGAEFAVFRGLSPSPSPGSGGAEFAVFRGLSPSPSPGSGGAEFAVFRGLSPSPSPGSGEAEFPLALLAKPGYPSVLPFALKAPGIWAVGALYADGGYQLRIRRLEGTPNYGPRQ

SEQ ID NO: 64564 - protein, 22 aa, Zea mays
  Coding DNA Sequence Number=SeqID_21189
MARRRSQKNKKSKENKESDKSF

SEQ ID NO: 64565 - protein, 61 aa, Zea mays
  Coding DNA Sequence Number=SeqID_21190
MGQSWPRADLRLYGLLPVLASRVLGKGGGLPAAASALRPTPVEWGCSYLRRRNRSSVCNGT

SEQ ID NO: 64566 - protein, 102 aa, Zea mays
  Coding DNA Sequence Number=SeqID_21191
MEACVWLSRDQGRLSHTELLTGAKLRRGPALHREPAPPRHQRRSFRGGELTTLSPDGCGSGESPPWGGLAPLVGRVCRGPLIWVQRWGLEMGTALAGSIRAV

SEQ ID NO: 64567 - protein, 133 aa, Zea mays
  Coding DNA Sequence Number=SeqID_21192
  Subcellular localization annotation: CTP_CleavageSite=37; ConfidenceScore=5.30e-01
MANAAERCALKASVAANGARRAATSAANAAVVAGDLCAATSVGNQSTVSTLDVLITATCAETRAESAWGEARLAALLAEESRVSNLQLTSYVAEDVCITIVAEGVCITYSRLTDFICVHGSVLFTKFISAVTV

SEQ ID NO: 64568 - protein, 192 aa, Zea mays
  Coding DNA Sequence Number=SeqID_21193
MCEFFKRKCFHNGYDEGLSPLSPLSGMIRDSLVWEGLKVVAQPGLWWLGSTGRTRRGEVLSWFGHGGGLVPFGITVKRRRSLIRSQKEVLCQTSYCRNEDSFPKLLRACTVRLGIRSQPEYDGHEFIEHGIEKCVVTVYIGSSPHHVEWSVAAAGRRFRDTYQVVARKALRALRQIYEEEVADTLLRFFPPF

SEQ ID NO: 64569 - protein, 479 aa, Zea mays
  Coding DNA Sequence Number=SeqID_21194
  Subcellular localization annotation: CTP_CleavageSite=55; ConfidenceScore=5.35e-01
MNEMQPRKPRPTYVTFTPNFINNAEYSSSSSAPVRPSPWSKWWPRTPTGCCVLPTAAADQELRTSACRSWTLHEGNCNPSEYVDWDSIEVEDRWTEEGRQNVTSEQALYIQLGLHNEDVFESAQREEESARHVRWSNRDFLDGEASAAIPCSDSVASPAAWRNTAVPSAAARVSVAPLTQPPYQRAPELRLDAPHHPLHSVRQAHELRLDAVKLFHPSLTLAEAGTAASAVEPRHRAAIVGSELGPELPRPRNQYRWVRNDVVKPLVKDTPVEILEDQEEGLQSVVPEDVELVEELPECVDHHPSSFERGKPRSIFPPYDGQMYYGYCANCLYPAMGDYLTMGARILYSLGYPEGKEPRYYWDKEPLCDGMLVYVTAVVRAKGDDPNWGGWHFESKGRTPKEGADRAAYMVLQEIMERFLGELAIAIARVFPRGDPYTSVWNQPKGGALEGGSVEHQYSDNAAMSALFAMIKGIQGCGE

SEQ ID NO: 64570 - protein, 314 aa, Zea mays
  Coding DNA Sequence Number=SeqID_21195
VVQLDEREVTWFGRKRCFKKHAQHPCRFLALCSRSPHASRHRPSCVGAAVPACVLLLPRFSDAAVRHAMRVATLRALESSRRVRCSSRATTLWPLWNSACCLWRCGLVVRWGAQPRSRTLHECRAAVRAALRQARRPESACQSPHRSGRRTHAIPFLQIGSTSSQFIPSIAPLGSQPPDQPHPTSTGAQLSSNFGVWPLRTPEWLLSVAWAITSPITQLTLPSTSLRPPLHPAHTHRTATVLPWPLTQPRHRGAPPSRSGRTWLALLQRPLLQPSSRVAQLAGIIVQCRPFAAPSSARSLGASPREFGSIQGAE

SEQ ID NO: 64571 - protein, 76 aa, Zea mays
  Coding DNA Sequence Number=SeqID_21196
MPFVNQGGRPRQDLHTSGYMVLGEGGPELGGYPGVFSRLKMCDWVVGYVKQWQKLQISAVELQEDLARLMERIKEF

SEQ ID NO: 64572 - protein, 40 aa, Zea mays
  Coding DNA Sequence Number=SeqID_21197
MVMAPWVKYLSQEYDPMSTWAASTYRSPYCPSFRLNKEYR

SEQ ID NO: 64573 - protein, 128 aa, Zea mays
  Coding DNA Sequence Number=SeqID_21198
MEDIFRATTSSSINHHAVFVFEFENVQMELKQLAEAEDDGAGAAGQTGKVEEEVQSNAEGGSNQEGRPGKMGQIMGWASKSLKPQILQARWEGKSVLGHWALMHVHPPSAGLRLLSKPWRSSLGPWSR

SEQ ID NO: 64574 - protein, 110 aa, Zea mays
  Coding DNA Sequence Number=SeqID_21199
MGGRPPRLTFTLRAAQLQPHAREVSPVHAAHVRGFSGWNSWSEYGRFLTGAASSPPSRPTRGLHRHGLNHQIEVRGSNVLGRESRPWRRRRHTVPPRAGRRRAVKEEEIA

SEQ ID NO: 64575 - protein, 172 aa, Zea mays
  Coding DNA Sequence Number=SeqID_21200
MSGGALDCPVAHRTVSGAPRDLEQNSSASGIFQEPARYNSSDCPVYTGQCPVLQKDAAPELGSLGNLQRLLRYNSPDMSGVHRTVRCASGATATSRQRSTLTAYSAKQYTRQKSEQKDRGAPDCLVPHEDKASNGRPAPTPTDRMTWLAHRTLSERERVEKDPSLSGLLNGD

SEQ ID NO: 64576 - protein, 122 aa, Zea mays
  Coding DNA Sequence Number=SeqID_21201
MVVMGSTSEKMYLCQMPSRTHAYDRAGTSRGGEETPNPPPVPPTLAEAIVALVNATIDNTCFLRELAGNQFQQHGGRGQPQGPRDTTYLEFSKTRPPLFVKAEEPLEADEWVWVMEQKFRLI

SEQ ID NO: 64577 - protein, 242 aa, Zea mays
  Coding DNA Sequence Number=SeqID_21202
  Gene Ontology: Mol. function=carboxyl- or carbamoyltransferase activity; Cellular component=ornithine carbamoyltransferase complex; Biological process=amino acid metabolic process
  Homolog annotation: Hit_ID=Q8SA97; Match level="QueryCoverage=85%, HitCoverage=23%, E-value=2e-13, Identity=33%"; Hit description =Ornithine carbamoyltransferase
MAPPVDVVGPCPGLGDVEAPPRSRSSLSSEAEVESKPPGRARRRLSAKARAESKPWGRAKRNSSSSGAEPESEPWGRAKRSSSSSGAEPESKPWGRAKQSSSSSGAEPESEPWGRAKRSFLWCLRPGLAAVSLTLSSGTAVGAAQAALSSCQTGQWRGEATFALNAPAIWSVGVAIWPRLLLGEDWASGEPKLCADGGYQLRIRSLEGVCKSRFGEEKTPEMMQDLHWNAQAMSIIKGSLSV

SEQ ID NO: 64578 - protein, 103 aa, Zea mays
  Coding DNA Sequence Number=SeqID_21203
MEAQAHVSCNQHAGCYVRATAPPLAPLPRLLDCGTSTATRGNPAYDSAVPARGSGAALANPAPARPLTASTYQPENLGPDRAPGLRPARMRELPDQPKHCARH

SEQ ID NO: 64579 - protein, 722 aa, Zea mays
  Coding DNA Sequence Number=SeqID_21204
MQVRSPAFALNLHGRDPAAFVREVEDRAMRIVGLYVPRTEAQRSWDIRGSNDRLNRVFELNRLPYGGYLGQDVVDRREKKPAAETEDDSAPAAAPSSKKRKLGTAKGGLGVSDSFAMELMGTCATPEGRMSSPELRESSARMLKVTGGWWPKNVPIPRAADEDFFTSRMVRDMRVFPYGRNIAAVVSAVMDKDRQEAAEKRRAVIRLPEARPKRARGTAKSAAPGGSQSTLVAKSAAPGSSKVPEVAKAAGAGGTKSVSAGSAKAQELASPARRVADFATDISVDDYLVGSGEGQLVVVPPAVATAVPVAKGSALSAGGEIPALTAVKDEAGTVSRRLKEASQWLSQAADFADRVALGAPTAVVSAEVERLRAQHADVVWEKSVADSKCRKLAEKVGVLEGERTELRRQLAEERREANQALAKARSAQAEASLARVEGSLARQRAEKWEERFNALQARMERAEASTRSEVERTRKQLMDSYHKLGARTADFEVPDRESGLRCLEWLQEELQALPTIMEGFMSYASLVSCEGAMNALSREGCRHYEVFDRSDEDFEREIYKVEDPVVKESTGALFDRMWAPHGREVVRERSDRARGQAARAEIVEDFGSLNNARPEAEMNPVEAEAEDQDFGPAHATATANFVAASTVDAGNELDESASKFSDFGDSGSSIEWTEESSDEDLDYFAALDVAAAEASPHAAGAQVVPGLSAWALGGEGRLRSVE

SEQ ID NO: 64580 - protein, 153 aa, Zea mays
  Coding DNA Sequence Number=SeqID_21205
  Subcellular localization annotation: CTP_CleavageSite=36; ConfidenceScore=5.39e-01
MGEGLLAAASSLRSALPLLGPSEQKASSSPLLEQVTARHSSAFSCSVGLPPRSGVVRACGGGTGVPFVMALRMPVFFVHCGCRGLNMDVCVSESCFFAEGTSEDPLSEVVKKHERNLAKKRSFFEEKFDAEGVSPLLAPEGGSGFAEARPTLP

SEQ ID NO: 64581 - protein, 117 aa, Zea mays
  Coding DNA Sequence Number=SeqID_21206
  Subcellular localization annotation: CTP_CleavageSite=56; ConfidenceScore=5.44e-01
MAVMDPSIIFMVMVIARSNSHHCRTSDHGNEHRTISSSSSSSTSSCSFLRVSCAPCCSHITTTHPRCVVTSPSFANATTATFLEDGMKTTSLASRQIGTPQRQEPPWSANRPPPSQR

SEQ ID NO: 64582 - protein, 143 aa, Zea mays
  Coding DNA Sequence Number=SeqID_21207
  Subcellular localization annotation: CTP_CleavageSite=81; ConfidenceScore=5.68e-01
MGPASQAAPYPNASTRKRGQHAPMNRLAPNLPLAPHSLTPLPSSGVVLAQNSHRHRRSSSSPELAVRPPSSPFLAQHGAARALAAWRAAAAWPVVHGQRGRLGLRRVGAWLTARPLPPVRLGPGVIPARPIPVHAAPTRVVPF

SEQ ID NO: 64583 - protein, 172 aa, Zea mays
  Coding DNA Sequence Number=SeqID_21208
  Subcellular localization annotation: CTP_CleavageSite=29; ConfidenceScore=5.61e-01
MRSTPCYVGHSTSVLGLSSIVVWSSSTVAGSTRTAGRRPALVRRPENSLRGAKICSEHYSISERDSAEAAMQDAARRALSHYCSVLGEVADGLNLNTVNLAAVLNTELDHALDELSRARAEIAQLRAERVEHRHLEDGSPALVGTQHPYRSPRCGHQSYGNPDCKTRINLEP

SEQ ID NO: 64584 - protein, 138 aa, Zea mays
  Coding DNA Sequence Number=SeqID_21209
MRTIAASRLRPTDLTLAILHLFALPLCHDCSVNQVLECREGDGVGVGVSGEIRLSPRLSCSSQQTGTIQNLLPVITLSGMQLPLHSTQPVFIIHGIRRHACPWASEASEAEVVAAATAVAAEWRPESDRWLELPESTS

SEQ ID NO: 64585 - protein, 91 aa, Zea mays
  Coding DNA Sequence Number=SeqID_21210
MHGDGSDANRSLAAVSGGGMVESLARCMREGVAGENGSRENFYGWAIAYGEDPGTRPPCAELVDTGGGRSLSAWKELLASGPEHPVTRDRK

SEQ ID NO: 64586 - protein, 78 aa, Zea mays
  Coding DNA Sequence Number=SeqID_21211
  Subcellular localization annotation: CTP_CleavageSite=51; ConfidenceScore=5.19e-01
MAPPFFHLRQQGSAPMAPSLSSSMAMALPATPIAQQQARLWYCAREGDPSMAASKVDGQPNSLLRDLGQSAARWPLCS

SEQ ID NO: 64587 - protein, 64 aa, Zea mays
  Coding DNA Sequence Number=SeqID_21212
MQWIDDLKNDGLIQWMLAKRVPPSKHYLSVKLKTQLVLLANQTPQPNSCMSRGRGVDSSHRVPH

SEQ ID NO: 64588 - protein, 100 aa, Zea mays
  Coding DNA Sequence Number=SeqID_21213
MAEVKVMRARADGPGAVKGECWVMTDESKQPGDQPWWLTPRTRTCARTWWSGSCCRRGQGLAGHTSDRGGRARGAVLMAEGTGGGTRRDRGGCVKAKQSV

SEQ ID NO: 64589 - protein, 746 aa, Zea mays
  Coding DNA Sequence Number=SeqID_21214
  Gene Ontology: Mol. function=protein tyrosine/serine/threonine phosphatase activity; Cellular component=intracellular; Biological process=protein amino acid dephosphorylation
  Homolog annotation: Hit_ID=Q5Z8E0; Match level="QueryCoverage=96%, HitCoverage=84%, E-value=0.0, Identity=78%"; Hit description =Putative PROPYZAMIDE-HTPERSENSITIVE 1
  Pfam annotation: Domain name=Act-Frag_cataly; Domain location=1-261; Score=123.9; E_value=4.8e-34; Accession=PF09192.1; Description=Actin- fragmin kinase, catalytic
  Pfam annotation: Domain name=DSPc; Domain location=519-661; Score =88.5; E_value=2.2e-23; Accession=PF00782.11; Description=Dual specificity phosphatase, catalytic domain
  Pfam module annotation: Pfam domain module=Act-Frag_cataly::DSPc; Domain location=1-261::519-661
MIEVVRLMLGSLFLSQTVMKYVTVNSGGIVFIALFKAIENVDLPSKETAAVIKIAPSRMATQSERFGYELAKWLGVRTPQGRVIHSSSDEWQQVKDAVENARNASIASGDELEEMICAEVLEALELSRCLFLMNYVHGSALLENVMPFESRQAAEKTAEALGRVLILDLVLRNEDRLRCRPLGWRGNYANLLVANREAYANLDSLDDVYDSAIIRYKPEIIRSPQKQKQRRAVSISGSIGSDVSDLTLEDSYASSGHVFSSFNIVAIDSGVPRRPPASKRAKDQESYPKLVELTLNNFDYSSKLLFEVSFGKLGTPGHEEFDVPSDYSYNSPLSESDMVATVHSFRGGFRSALRDLQRFHIFLITLYQKLDGLLKIFFNLMYKCSNEYAREDAGTSDSPLCSVEPQGDSNDTDVPRHLPFITRHFKGNGDSSRGLRLTMKLRDFNKYAKIDSELSKEIEQWNDMLRTEVVKLCQDNNFQTGFFEGTDNSTVVDAYELKVRLEHILERISLISDAASTERPSQITDYLYIGGALAARSTHTLKHLGITHILCLCANEIGQSESQKPDLFEYRNFSINDDDNADIGDLFQDGSDFISYVDHLRGKVLVHCFEGKSRSATVVLAYLMLRKNCTLLEAWNMLKKVHRRAHPNDGFAKILLDLDKKLHEKISMEWQHKRPAMKVCPICGKNAGLSSSSLKLHLQKAHKKISSGSVDSAMTLEIQKALEAIKAGWGGSDSPVHKSQSHIEGF

SEQ ID NO: 64590 - protein, 360 aa, Zea mays
  Coding DNA Sequence Number=SeqID_21215
MSFVLSDYFEKWILKTMEYTRHTLQDNLILQARVLTLEGGSGTLGIDDNFGEVRPSLGRRRGPKTSTPKDDVITTPGPSPPGSSPGIRPEQAARPVASGASANHLPWAPARPEASAANSASVHADIATPGLGSSKSGQGQRRPQDGRCCNLSLAHTDARGARTSAKSRRPEARMVAVIPSATGTSRTAAASAPTQGPSALWQIPTQILPDEWGIGLCVKAPSRRPPAGGAAGSQADEPDTLEVTTPAVDQPRVVEVRATRRASERPLPRTLRERVTHEPAREVERRLSPAPTPARMMNILEAEGGTKIAAQLCFSPPRNWWSPSWVTTGGGVQPGWQMKILEAERWLKGTNSHGVAFLQR

SEQ ID NO: 64591 - protein, 113 aa, Zea mays
  Coding DNA Sequence Number=SeqID_21216
MVAPSGVAHGDGNAINKDDMTKSGVVPGDGHVGVQDVVTKLAGDVVHEDGDAGCQDVMTKVACGAAHGDGDASCQDSVTKVTCNAVHGDGDVGCQDDATKLAVEAMGSDRNPS

SEQ ID NO: 64592 - protein, 135 aa, Zea mays
  Coding DNA Sequence Number=SeqID_21217
MLVDYTTVLDRPGVSVEGPTQQGIESVVEVTPASGVTSDGSSDPSLRLRLLQALRAVAQTATDVVVVSVSGKVASQTPPPTEARGKSPAAPAPAPGVSAPAPRAGDDAVSLGDWNDLTPCDAGDAPPVEKAKRGS

SEQ ID NO: 64593 - protein, 123 aa, Zea mays
  Coding DNA Sequence Number=SeqID_21218
MERAHRRVSRVADGKAKLTVALDGARAQLRPWNRRWTSAERERGRVGWTGGTNERGEGGEQGTGLKRGAKARTWPENARSWAYPQRGDRGREVRDELTGGDGGTERGSGCMREKQCRQDWPTG

SEQ ID NO: 64594 - protein, 134 aa, Zea mays
  Coding DNA Sequence Number=SeqID_21219
MNRDPAEVGPGSTCALGKKAPYCSRSPRGVGRALDHWGSLASRASPAPWEERSRRPGRKRSAHVQEKQREETWGKMEKGTGCLLLEVQEKGRCAGRNEGAAGLRKKKGLGAIHGSDCSLLAAVCAVNRGEESCA

SEQ ID NO: 64595 - protein, 141 aa, Zea mays
  Coding DNA Sequence Number=SeqID_21220
MTSRDSASAGKWAQSVSGVGEVGRGMHTVRLAMCPLDVGEPSHSSARTTDDWWGPGVGTTVREQELGCARVHDDDPPKVEVSHVVDYRKMEKENYADGFKQALLVHTSVNGYLLVSSSFGWHVINPTTHQWASIADLSSET

SEQ ID NO: 64596 - protein, 556 aa, Zea mays
  Coding DNA Sequence Number=SeqID_21221
  Gene Ontology: Mol. function=protein serine/threonine kinase activity; Biological process=protein amino acid phosphorylation
  Homolog annotation: Hit_ID=Q94K14; Match level="QueryCoverage=12%, HitCoverage=29%, E-value=3e-18, Identity=68%"; Hit description =Putative uncharacterized protein T1N24.12
MTSPALDSLARARAGRGQDNHHQPPTSDLKQKPELPPTAREVAPPPVADPQNIAFRGPCRAQGPEPRGDVAAAHGALGALSRGSGPTTVASTTLGRHRKRAHIYVAVATATCEEKKQEGAQVRRRCLGARKDTIWGRLWAGGVAGKLKKVATSDVFFVRVGGPGEQGNKGEVACYIRLRHVWWRRAAGLGFVGNTLAEGDYLFVPSKCKGGIQRVHIIKGCVDGSLLLELFTGDGEGTMIASNKNIWKFSIYNMSWEFPNCTFLMDQTLTKLRFTRNDFTEDDKATFNKVLREDGFYTIIRLPSNALDTTKKPHVVSSIKVVNKIFSENAFDVVMHFVTVAYVGVMEARCMTKARRLGVPTPVLYDVDPVLHTLTFEHVDGLSVNDILLRFGSNGVNEERLNDIATQIGNAMANYMMEALFMQTYMGNNTDLDDEPDGENPCGVQKGFEAMVLYPEQVGSSPASTWTPASLPRSPRSRPAPMSRTRARAPAVLPRLVRHARPGCPRRCSVKGLGFDLFIIRGGNSAFNACWRCDRYYPCLINDDKVDSHDIWSILY

SEQ ID NO: 64597 - protein, 113 aa, Zea mays
  Coding DNA Sequence Number=SeqID_21222
  Subcellular localization annotation: CTP_CleavageSite=62; ConfidenceScore=5.61e-01
MASSSVLAVPSIPLPLPSAYKRTRPSPVPSTPAPVISSASPELIELAPPHSPVAPVSPALPSQVSFGQIRLVLELSHMITVTRHTSPPPIAPNCGTGDLATVDTRHRAADRPP

SEQ ID NO: 64598 - protein, 294 aa, Zea mays
  Coding DNA Sequence Number=SeqID_21223
  Gene Ontology: Mol. function=oxidoreductase activity; Biological process=response to oxidative stress
  Homolog annotation: Hit_ID=Q5U1M3; Match level="QueryCoverage=30%, HitCoverage=43%, E-value=1e-11, Identity=35%"; Hit description=Class III peroxidase 70 precursor
  Pfam annotation: Domain name=peroxidase; Domain location=22-279; Score=-55.4; E_value=0.0012; Accession=PF00141.14; Description =Peroxidase
MVRAVGTRKRESGDFLHVRDALRGVIPYFMGWLRTAPRLRLFLTAASSPLSSHATVTHRGSDARARKKRTFQTAIPAKRSHETTEEDAAGFDGTTDEDEGGVEASSDDRNELRAGRRRSTETDVADEQQPRSSTSRRNGGAHGHGEPDRRALNAAIPPPGSPCGAAQRDRVRVLKFLVDVVLSVLDSSVPSSTDGVADLIESFRRKGLSADNMVTLSDARTIGRSRCSFSRQLARTDPSLDTAYAEHLRTRCLWPRIVHFNAAVDKAWQVKFVEAMVKMCEVQVLRRQGPTLIN

SEQ ID NO: 64599 - protein, 382 aa, Zea mays
  Coding DNA Sequence Number=SeqID_21224
  Gene Ontology: Mol. function=kinase activity; Cellular component =nucleus; Biological process=cell division
  Homolog annotation: Hit_ID=Q6K8S0; Match level="QueryCoverage=61%, HitCoverage=50%, E-value=1e-42, Identity=46%"; Hit description =Cyclin-F2-2
  Pfam annotation: Domain name=Cyclin_C; Domain location=262-382; Score= 54.9; E_value=2.7e-13; Accession=PF02984.10; Description=Cyclin, C -terminal domain
  Pfam annotation: Domain name=Cyclin_N; Domain location=119-260; Score= 72.0; E_value=2e-18; Accession=PF00134.14; Description=Cyclin, N -terminal domain
  Pfam module annotation: Pfam domain module=Cyclin_C::Cyclin_N; Domain location=262-382::119-260
MNPHSRCYVPAVVRATFQDPALPLPPAGCNIPRPVSDYGNVNPFYADTGYSLGMEVPAPWDRWYCYRGSRHFVQRTAEEPVPVMSAAPVCDGGSTRDDEKNSTRVPTTKYGPYHGYDKEIEDTLRTQEREAKPSPDYLETTQRGRMSQDARADLVSWMKAFTRHYNDDLAPGTLHRAVYYADRFLSVRSVEDVAMHRLYLLGAAAVYVAAKYEDQGTVRKLNAEKVARYYGHRSGGFASTKQQVLDMERALLVALDYRLGRPTAYTFVQHFTRHYGQAEVEQDLRSAAHDFADMSLLHYSCLQHNPSAVAAAAMFLARLTLKPWYGQITRSNRELRELTGYEPQKLKRCVEAIHSLIPQYGNGSYSDIDLFPMFYAVAADPR

SEQ ID NO: 64600 - protein, 216 aa, Zea mays
  Coding DNA Sequence Number=SeqID_21225
MGIRKKPEYVWKEYRKNRVEKCSMAVYVGKKRSLKPPFVTSHLATKIPPPGGRLQAQSGRDPTKDDPTIVYMVGYLHTLDNHYDDLSSHCTHLNSRVESLEQQVKELKKEKASLQECLDIAEGEEANTREAYRTLKMDYDKKLKKLTPTKKIQKKTKSQGCQTERKKKAPLAPPPTRIENLSDVEDMSLASLDDLLKEFGVTLEKEFGSTSESARV

SEQ ID NO: 64601 - protein, 224 aa, Zea mays
  Coding DNA Sequence Number=SeqID_21226
  Subcellular localization annotation: CTP_CleavageSite=70; ConfidenceScore=5.32e-01
MPSPLSLSGVWSHAHGVRRAVPRSSWANWAHLAATPHARARPGRNPPRPAKVSSVWVHRTVRWCTGQCPVCQAGSSELAALGKRLTAYDYNSPDCPVSQRSTGPMVGRAIRARHVAEPTVGRGHRTVQCAPDSVRCANGSQAPTIGFAKEGKKSAPDSPMRQATEDKNCLPGLLSTAPRCLGAIKGTPRRMEEYTKHSLSIVDHSHFILAHLFDILSDLSSVLV

SEQ ID NO: 64602 - protein, 169 aa, Zea mays
  Coding DNA Sequence Number=SeqID_21227
  Subcellular localization annotation: CTP_CleavageSite=45; ConfidenceScore=5.06e-01
MNELTGIRSAIANGTPVPPPQVRTTPLRGGRPAERRKADERRAVTCSSSGDDGDFCSGGPNSGNADLRVDAAARRPPPMPKLVRQGRAEGRISWRDRERGIPRKGSFSAKEPGSEPPITDQGFEGWPPEGSTVASDRVGPTPTTGQGFEGQPPEGLHGRLRLLGLRAHY

SEQ ID NO: 64603 - protein, 185 aa, Zea mays
  Coding DNA Sequence Number=SeqID_21228
  Gene Ontology: Mol. function=aspartic-type endopeptidase activity; Cellular component=chromatin; Biological process=chromatin assembly or disassembly
  Homolog annotation: Hit_ID=Q6UUN3; Match level="QueryCoverage=83%, HitCoverage=20%, E-value=2e-10, Identity=28%"; Hit description =Putative gag-pol polyprotein
MAQQNEILWQLAQRQLPPQHYGGGDHQRHPAAATYQEFLSTQPPLFTRAEDPLDADVWLRVVESKFPLLHGVCLEVTKVSQMTERWNGESTRQLSGGTIYQQAFNDLCQYAGYHVDTDEKKRDRFRRGLSTKLRDRLNTVRANSYNELGQNVNQNQGKRQKVQVRQGRLNFTTMADILEGAPVKT

SEQ ID NO: 64604 - protein, 234 aa, Zea mays
  Coding DNA Sequence Number=SeqID_21229
MTSHGSSDEGNALSHTDGLAREGFPRILWEVIQGASYMTPPQYAVQQFEKHRVPRCRVRMTLEPHPLQPGWRSLDSESFGYRAEDTIEAIALRGLTTFCGFHPLELSTHPIGLFPAEKEDDPMWKDLVEHAKDIWAIYPGQTAHLTLSNEIQELEELVGTRENTIEVLEDQLINTQQQLAEANEHLDMHHQEIQDMEANEDVDIEGGEEPASSLDTAGLGRPPSPESSVASFAH

SEQ ID NO: 64605 - protein, 237 aa, Zea mays
  Coding DNA Sequence Number=SeqID_21230
MEAIRASRYRVHGRRSKRLRNPKPGVKKKTCKLKVDRVEKRYGGQARFGVRISSDLGLIFPWNSHTRDSHRCQEEADEHLHVFDAFCTRQSTPAPDLVCPASRQSPAGAVARARAYKTPRDFDRTPPCTLDLTGARNHRRLPRARHVHGHQNPCHRRPASRALPNPVQPSEKTVHASVKLPEQGIEVCFAGEASPRSSDFARPPVNVDRVILCSILRFLVHIASTSPYEAHRAIGLN

SEQ ID NO: 64606 - protein, 184 aa, Zea mays
  Coding DNA Sequence Number=SeqID_21231
MAPCDVVGPSPRSGEAEAPPRSRSSPSSEVEAESAPWGRARRRPSSEAEVVSEPWGRARRSPSSSVEVEPEPWVGRGGDRLLSPRLCPTLGVDLTLSSGTAVGATQAALFSCQAILALNAPAIRSVGMAIWPRLLLCEDWASGEPKLCADGGYQLRLGVLGGAEHGVSSELLMGDPSGRPCPIR

SEQ ID NO: 64607 - protein, 70 aa, Zea mays
  Coding DNA Sequence Number=SeqID_21232
MPGRARVSCTGHVSTSVPAAEQHAGKRLYACGLAAAACGWASGGYGYEWRARWGRGWTRRATAGRARCGR

SEQ ID NO: 64608 - protein, 172 aa, Zea mays
  Coding DNA Sequence Number=SeqID_21233
MQAACNRTKGAHPFGFDASSMEAQAHTSCNRRASYYVQETAPPLTPVPRLLDYGTGAATRGDPAHDPTVPTEHIGHGSVSRGRRHDGRHGQKWAGSNGGGRRAEAAVKSSASLGQRENPLPRREDDAPVFCSSNDSRTHSGCLANHSSRRINSAAGQAAPLAGEAGDASPPP

SEQ ID NO: 64609 - protein, 62 aa, Zea mays
  Coding DNA Sequence Number=SeqID_21234
  Homolog annotation: Hit_ID=Q2QVH8; Match level="QueryCoverage=46%, HitCoverage=4%, E-value=3e-07, Identity=86%"; Hit description =Retrotransposon protein, putative, unclassified
MTHKEVIEFITEHIIHRFGIPQTLTTDQGDRQEDDSFGSNRKGQDHGSQGLQQEGQSKNHSK

SEQ ID NO: 64610 - protein, 169 aa, Zea mays
  Coding DNA Sequence Number=SeqID_21235
MAVMGSTLEKMYLCQGCPSWLQDMKEAVAAATIQSETWRPKSGTNFRRSYVIEIGCGHRTDLVVDWAVNSRLIAWVREAKARARVAELSATLDNLQVYCNTLHEELHVLYARLHPDVPADTVAMGAGPSGRAGEGPDGELDLFRTPPSMNLADDRSPAAGNEETKDDED

SEQ ID NO: 64611 - protein, 83 aa, Zea mays
  Coding DNA Sequence Number=SeqID_21236
  Subcellular localization annotation: CTP_CleavageSite=38; ConfidenceScore=5.40e-01
MGHACDDYFNRFSPTSSGKLRTSPQQMPSRARAHDSVRTSHGQEDTPNSPPVPPTLAEAIAALVNATTDNTCFLDEMAGNQFQ

SEQ ID NO: 64612 - protein, 48 aa, Zea mays
  Coding DNA Sequence Number=SeqID_21237
MAAMTLERRKTSERETNLNYKSLEKCKTVNVKIISMLGVERLMSVDDD

SEQ ID NO: 64613 - protein, 57 aa, Zea mays
  Coding DNA Sequence Number=SeqID_21238
MESHDLRAEWESRLVGGYKIDGFGYDYGAGCQHCNHCSGEDEAVEGDFQEFQDYDEF

SEQ ID NO: 64614 - protein, 148 aa, Zea mays
  Coding DNA Sequence Number=SeqID_21239
MTGEECRRQVMKIFRWTSTARAATPAALAAALSGDPAFYGVNDRSNSIEPVADDGEGMLRTGHADEGVATAWAANAVAAGVAPAAMFRVASTAGPQTVNTTLGLATPPRWQPPMPRGTASRCLQATLPHWQLSGKGGKALRWLRAMPP

SEQ ID NO: 64615 - protein, 324 aa, Zea mays
  Coding DNA Sequence Number=SeqID_21240
  Gene Ontology: Mol. function=hydrolase activity; Biological process =metabolic process
  Homolog annotation: Hit_ID=A3CJP7; Match level="QueryCoverage=73%, HitCoverage=73%, E-value=1e-89, Identity=74%"; Hit description =Putative uncharacterized protein
  Subcellular localization annotation: CTP_CleavageSite=60; ConfidenceScore=5.75e-01
MSAAAAAAAAARCVPLRVSSPETAKSAASIPTSSAASASAPLRAAVAAGPGRRLPAPPFRCSSSSPENSAPRDLGLLLEVEGVLADVYRFGNRQAFNIGWPTSLPTSEKGSFIKSVLREKLKALEEFSASDSLPLRPGVEKFIDDALGEGVPLAILAAYGRNGEKISRSIAMKLGPERISKIKIVGNVEVEESFYGQLVLGKGVTSGLDEQLVREAQKAASAEKQRIAEKVASILKLSVDITASESSDKVIAALRAGSEYVGCDVQSCILVAGSQSGVLAAERIGMPCIVVRSRLSKKLVRKSRNKQILHSPILVDCFARCIPG

SEQ ID NO: 64616 - protein, 120 aa, Zea mays
  Coding DNA Sequence Number=SeqID_21241
MTRWLSRGSAKFTFKHLCWHLITKILRNGPKAHFPFKDNGVKLGDDNELSAWFHGAAAATLGEDWKADNGNYGASPMSTIGQTPAPSARRRGGRAPRPPAAVTRSSTRSVSLDVNLADAR

SEQ ID NO: 64617 - protein, 208 aa, Zea mays
  Coding DNA Sequence Number=SeqID_21242
  Subcellular localization annotation: CTP_CleavageSite=59; ConfidenceScore=5.53e-01
MAAMLVRSSPCLLLVAVIALCASSSCQTTTATPDASSSTSAAVAALPPSAPSGTATAATAPKKFPQPSPGGVGGGPYQQPGGVGGPYQPGGVGEPYQPGGGGHGEPYLPAAEVASALPVPTPDELPSGASLGFGSNGGLGFGGPGDECCGGPGGYGWFGGPGGFGPGTYGYSGPLYWGAAPAAAGSFGRVTNVLLPLVVAYVSSCVFA

SEQ ID NO: 64618 - protein, 199 aa, Zea mays
  Coding DNA Sequence Number=SeqID_21243
MARVWFEDECDNDTVEIRSLGNCRLGSCRTVILHPRVQCMEPNGLLFLTIKLTTSKFICDYKKTLKECRGGSRTIGTFINLSSVSAVSSIMRFISLEFNEWSAAGARRLHGLSLYNFISQMGWREMEHKRGRTVARVILRQGDALAVGVTSAREGERERASLFVSPSSPATTLSHEGPGPSFYRCKERLQVYNGGVAMR

SEQ ID NO: 64619 - protein, 306 aa, Zea mays
  Coding DNA Sequence Number=SeqID_21244
  Gene Ontology: Mol. function=DNA binding; Cellular component=nucleus; Biological process=regulation of transcription
  Homolog annotation: Hit_ID=Q2QLR9; Match level="QueryCoverage=99%, HitCoverage=96%, E-value=6e-66, Identity=45%"; Hit description=No apical meristem protein
  Pfam annotation: Domain name=NAM; Domain location=25-160; Score =236.1; E_value=7.7e-68; Accession=PF02365.6; Description=No apical meristem (NAM) protein
MEDDEEKPSQRITNKEEDEEDDDLVFPGFRFHPTDLELVGFYLKRKVEKKGFRIDIIREIDIYKHDPWDLPNEARHVVQGAGGDKDDWYFFCLRGRKYRNSIRPNRVTGSGFWKATGIDKPIHDGAGERVVGLKKSLVYYRGSAGRGNKTDWMMHEFRLPSAELVELHDAGIWTICRIFKRNTSYTRRCQQQKQEYGSKRSQQQEQELQYYYDYYRYHHHHHQHHYFHSSEAVYAAAEHHRQPSFLLRGFHGSSSSSAETTTTSGFVGAHPLLPPSTTSTLGWSDAASLRDSGISTWDELGRILEI

SEQ ID NO: 64620 - protein, 134 aa, Zea mays
  Coding DNA Sequence Number=SeqID_21245
  Subcellular localization annotation: CTP_CleavageSite=65; ConfidenceScore=5.13e-01
ARLRRLRPTAYRPRRLRPTAAGRAASAPPPAGRAAAPARHRQQATPPPCHRPGSRHRPGSAPPPRLGTDSGSCRRPCSPTPAVQTLARFHCYCIGFCIVLPWLFDASSRWEKRQAKVLEKDDRALYLDPHEVQM

SEQ ID NO: 64621 - protein, 79 aa, Zea mays
  Coding DNA Sequence Number=SeqID_21246
MGEVNGQIDQSSTLVPRESDEVVAPGCNNPSQQRENRGRDFGSYIDGGRGFLLVFVADSLERVLPEHADLSPVMISLLA

SEQ ID NO: 64622 - protein, 57 aa, Zea mays
  Coding DNA Sequence Number=SeqID_21247
MGIGGCCVSGLGAVFSLPVRTGLDPGDTFPLVGFQNTLTRAFPYTGTFGLGMKLFTI

SEQ ID NO: 64623 - protein, 99 aa, Zea mays
  Coding DNA Sequence Number=SeqID_21248
MTRQRCPDTWRKAVRRWFPGELICSAAKQKEDGDGHKPHNLKVTKGFQVEAITLKCRLNQKGLSMALLHLSPNLKFWIANSHMIDPNDLIYLFNLIFAL

SEQ ID NO: 64624 - protein, 33 aa, Zea mays
  Coding DNA Sequence Number=SeqID_21249
  Homolog annotation: Hit_ID=A2XIH6; Match level="QueryCoverage=81%, HitCoverage=1%, E-value=5e-07, Identity=96%"; Hit description =Putative uncharacterized protein
MGRPEPVVLFAQTILHSQLDEYVDEALSLCSAS

SEQ ID NO: 64625 - protein, 314 aa, Zea mays
  Coding DNA Sequence Number=SeqID_21250
  Homolog annotation: Hit_ID=Q6J9V9; Match level="QueryCoverage=20%, HitCoverage=33%, E-value=1e-07, Identity=45%"; Hit description =Putative uncharacterized protein
MAERYQLPRSCVPPMTRRKDGRYPPSGGLEGGRTRCIRERGDIVTFKGGHPPFKGDSPYLRPQPSWAESSPTRSKVLPYGAGARSHTSCKPAQSRRTKPPCAVRATAQRLQAALHFCPDQRARGRAAMQAACNRAKWAHFSDSQHAQHGGPGPHVMQPARRMLRACNRTATCATTAPPRLRNQYRDSRRPSARPSSASLARRRSERRFAFAIMTASKKGPGKGDTPKRILPREGTRLRASLLIRGSKAGPSEGFDSRLRSRGLYTHYWSEVRRPAPRKGSMTASGYSGSAPTTDQGFEGWPPKGSQPPQTQSEG

SEQ ID NO: 64626 - protein, 335 aa, Zea mays
  Coding DNA Sequence Number=SeqID_21251
MVTSSLMAGESKPGRDLCPSLSLKDFHHQGWGGECAELGPVPAWAVARSFPQRLGGKGGCRPWRWQLPRAWLSGPSGFGAALGTGFCHGSWKRFFRRRDSQGRPRTDLQLYGLLPVLASRVWAWAGGLLAAASALRSLLLLFGPPEQKSSSSPLPERATARRSSVFCCSAGLPPSSGVVRTCGDSPVGCLNRFTKRESPRVKVTSEARGSGVSANRGRVGSERRPGRRSLAGSSVSGTDAGIDLSRPRVGLMSSGDSWPRPRGGQPSRLPEPDSRRRPWRRRPGLGDDVVLQSGDPWTASPSEARSDLAEGVADAEGAAAPFKRQDPSLQDQIIL

SEQ ID NO: 64627 - protein, 795 aa, Zea mays
  Coding DNA Sequence Number=SeqID_21252
  Homolog annotation: Hit_ID=Q10IG0; Match level="QueryCoverage=87%, HitCoverage=32%, E-value=0.0, Identity=75%"; Hit description =Expressed protein
  Subcellular localization annotation: CTP_CleavageSite=49; ConfidenceScore=5.64e-01
MGSTGLGSILFMSPGISGHRHSSMQSSFPAPFRCLSSSGMILCHCSTCSAALVSVHCSKGNISVSSEGQPAAVAWAHGYNEDDYLGMESASTPVKEKGGSPLGLAIFHSAAEILEVLVVDSTASSLESWIGFAVDLHKALHSSSPGSNRKDAPTRLLEWIDAGVVYQRNGARGLLRYSAILASGGDAHLSSGNVLVSDSMDVENVVADSNSRDGQVIDNLLGKLVADKYFDGVALCSTSVVQLTTAFRILAFISDDKPVASSLFEEGAITVIYVVLMNCKSMLERLSNSYDYLVDEGAELSSTTELLLDRTHEKAIVDLMIPSLVLLINLLHILRETKEQYRNKKLLSSLLQLHREVSPRLAACAADLSFMFPTFAIGFGVVCHLITSALACWPLYNWAPGLFHCLLENTEATNASVPLGPKAAFSLLCLLGDLFPDEGIWLWKVELPSLSAIRSLSTGAVLGPQVEKGVNWYLHPEHVTILLVRLMPQLDRLARIIDNFATSVLMVIQDMLRVFIVRVALEKIECAVVLLRPIFMWLDDKVDKTSLSERDTFKVHQLLQFTVKLSEHPTGKALLWRMGFTRILSKLLQNCSRASFPYDNQTFGRAHSKNDLMLKWRIPLFKSIAYIFSIDPCNNEKADVEESLNEKSVHECSSVMHDLMMFCQVLPVGREMLACSLAFKELVYSYTCRSAVTLILSQIHTSNKDVLEKDESDPNHNSPSLDGWNCFSSLFKCWKKLVKYVGSNERTDYLVETIYSLTLGAITLSQYGEKRAAHHLLKRRKKVKNVPKYKAYRRQ

SEQ ID NO: 64628 - protein, 371 aa, Zea mays
  Coding DNA Sequence Number=SeqID_21253
  Homolog annotation: Hit_ID=Q10IG0; Match level="QueryCoverage=86%, HitCoverage=15%, E-value=1e-104, Identity=62%"; Hit description =Expressed protein
MGQRLEDLAPLFPKCVANKRLRHCGASLVSSVGGGVGGDSECVVGAIVTNHLVLRGTYRSLTLVIYGNTAEDLGQFNIELGLDHSLANVVSSPSEGKLEDLPPALHSSKLSFEESLSSLKPSSFHATDVDLSIEAKKVLHLALKMYQISDVENLIPNLRSAVLSAISKYVTASTNHILHTLSQDSANAFINSDFDSQEINKILAEAGKELSEIWKNVHAVTESNLFNDNGFTIGVDEDLPTTKILIELFNHCFPYYKKLSLLDLQCPSQSAVVKVISNIQADKLSTDGVPFLISASVELGEMLKLIIFCGPIEDPSPVATASRIFKSEHLEGLLSYKATIDLITSSKYSFLQYDTDPYLLSLIQELGAKSY

SEQ ID NO: 64629 - protein, 327 aa, Zea mays
  Coding DNA Sequence Number=SeqID_21254
MDKDRQGAGAKTPGDCEGSRSSAEKAAGNGEGCGLRQRQTAAAGEGSDEGPFALVAPGAAIATAALAPKARGETLGVGGEVSALALVRDEACVATRRLKGVTEALSQVADFTSRTASGALTAALSAEVERLRTQHADAVREKSASDSKCRKLADKVAALEKEKADLRRQLAGERREANEAIAKEQAAQAEARLARAEGNIAKELAGELQGRLTALESHAEGAEAAMRAEAERTRTQLMTAYRELGARTGDFEVPEREAGLRCLEWVQEELQELPTVLEGLMSFTSLVTCEAAMNALSHEGCRHFEALDQADEDFGRDIFEVEDPVVK

SEQ ID NO: 64630 - protein, 71 aa, Zea mays
  Coding DNA Sequence Number=SeqID_21255
MAKLNFKFNQGPGQVEPGSREVQPGSKESSTGVLSPDLTDVDPRAIDLAMRIAERMFLKMKEDEAKNKIEE

SEQ ID NO: 64631 - protein, 101 aa, Zea mays
  Coding DNA Sequence Number=SeqID_21256
MCEREWEVFFKLEMEFGSCSSVGRDVGDRFNRLGQADSQSASQIGRLQVRLQKHVLTPVELPLGPIRPPGGQTGSQEVRTDQVTLTPVEPPLGPGSTGFDQ

SEQ ID NO: 64632 - protein, 90 aa, Zea mays
  Coding DNA Sequence Number=SeqID_21257
  Subcellular localization annotation: CTP_CleavageSite=67; ConfidenceScore=5.61e-01
MGRITRGPLSWTKPHGGMTLSQAFVWCRTKRRVSLPVLSPSDQRLQRRPRAKGGVFAFAPTAGVCVRDVEEAPKVVLGRCCVPAIPSLQA

SEQ ID NO: 64633 - protein, 94 aa, Zea mays
  Coding DNA Sequence Number=SeqID_21258
MKHEICKIERSRAEKNVDELRASKENCYEISLECAKKLKDSFARVGAYSFEQKFICADNMKDPSTKASALGGKFYSKVWMKGDREIADEAIRKK

SEQ ID NO: 64634 - protein, 226 aa, Zea mays
  Coding DNA Sequence Number=SeqID_21259
MTSHVPTDGGNVYSHTNGLAREGFPLILWEVLKGAGYTTPPQYAVQLFEEHQVPHCRISPLGDVDPPHWLVPAEKEDDPMWKDRVEHAKDVWALYPGHTAHLTALRGEAMSQLMGLVESTKITLDNWEDLVVDLSTELVEKDLQVEVRENTIEVLEDQLQNTQQQLEEANQHLDLHHQEIEDMEAEGADEDIDIEGGEEPEPASSLDNAGSGGPPSPESSVASFAR

SEQ ID NO: 64635 - protein, 175 aa, Zea mays
  Coding DNA Sequence Number=SeqID_21260
MLVVVLLVLLGFWRLAADELLSSGNESPNGLVPHSGNIHDLLLALGLSDCSDWWPWQESEVPSYSTTDTDFLPIGCAGSTTVSGTTVDADVDVGGVDVLQVSAIAVEAKVEAAVAPVAWLPVSDQLSRLPESASETSARLSLVVVVATTAGVPHPRVPSTLAGHAFHLDDVVRHL

SEQ ID NO: 64636 - protein, 301 aa, Zea mays
  Coding DNA Sequence Number=SeqID_21261
  Subcellular localization annotation: CTP_CleavageSite=58; ConfidenceScore=5.21e-01
MGNDGAPYALEQQPLNFLRKQGDVSKDSTAPTAVPPPGSVAPSTATISRQQGAKTSPAAALAWRTRAFLEEVGRAGPRTGQALSWGRSLPSPAWTLVTPLLQAHPTWARDEHEGRGTSTSLTLGSGHLASPPFALAHALDPSGLGHTAHSLVGLGTPLSRNADTERDTAEVAMQDPTRRALLQYCSLFSGVPDGLDLMYYPRRSISSTGGVTVSPVGEGNPRSSSMVNLVDVLNTELDHALDELGKARVEIAELRAERVERRHKEDGSPAPVGTQHPYRLPPRGHHAYGTPNCRTKIDLEP

SEQ ID NO: 64637 - protein, 202 aa, Zea mays
  Coding DNA Sequence Number=SeqID_21262
  Subcellular localization annotation: CTP_CleavageSite=21; ConfidenceScore=5.32e-01
MDQGAPLAKAQGRAASQAPPSAEARGKSPGTPTLGVGAPAPRACNDAVSPEALRYNSPDCPVYTGLSGVHRTVSGAPKKSGLRNSPASGKHSDCSAIIHRTCPVYTGLSGEPAEQRLLRANGHLQAHSMRARGAQKSGTPILAHRTLNSTCPVYTEHPGGPRRQKLQRSESNGIGDVAGAPDMSGIHRTVRCTIRQSAPPNG

SEQ ID NO: 64638 - protein, 296 aa, Zea mays
  Coding DNA Sequence Number=SeqID_21263
  Gene Ontology: Mol. function=zinc ion binding; Cellular component =ribonucleoprotein complex; Biological process=translation
  Homolog annotation: Hit_ID=A3AHV5; Match level="QueryCoverage=50%, HitCoverage=19%, E-value=2e-65, Identity=80%"; Hit description =Putative uncharacterized protein
  Pfam annotation: Domain name=KOW; Domain location=255-289; Score =23.6; E_value=0.00075; Accession=PF00467.20; Description=KOW motif
  Pfam annotation: Domain name=Ribosomal_S4e; Domain location=168-248; Score=72.7; E_value=1.2e-18; Accession=PF00900.11; Description =Ribosomal family S4e
  Pfam module annotation: Pfam domain module=KOW::Ribosomal_S4e; Domain location=255-289::168-248
MDEEMDEDVIVKAVDCSNQSEVDIELKQFIKGYLDGSKGGDDHLLMLKLKEWPRPSVLEVFLLCQRPEFIVNFPLVDFIHPRWGLLNLAAKLPPDALQPELGMKLLIAHGSHQELGKGDSMTNLMINMCDVVHMLMRATKVHYQCPKRVKYPIYDQTVYLNNYHKKMLKDQYVWVLKLVCIEENRADYNGLSSVETNMFKLCKVRSVQFGQKGIPYLNTYDGRTIRYPDPLIKANDTIKIDLETYKIKNFIKFDVGNMVMVTSRRNTGRVGVIKNREKHKGSFETIHVLLGAFCYV

SEQ ID NO: 64639 - protein, 259 aa, Zea mays
  Coding DNA Sequence Number=SeqID_21264
  Gene Ontology: Mol. function=aspartic-type endopeptidase activity; Biological process=proteolysis
  Homolog annotation: Hit_ID=Q6L477; Match level="QueryCoverage=82%, HitCoverage=43%, E-value=2e-13, Identity=27%"; Hit description =Putative uncharacterized protein OSJNBa0009L15.8
MKKFCQKLGRRSYTVQKRKWAKEDAQALTEGKSIPFQDMPGGRHKDWARARNPSSDVNITESHPIIKKIVDLNEKSVAGTFTPLDNMDILATTIGSNHPGRTTGVSAYVGLGMGLAQGDGPRKKKRRTTKEYVKRIVDEYEAKFDKLTALCQSMECRLNNSESCSSSKFVDTPDHATHHSVNSLQEVMKCKLVVQIGPQSVVVARGQAYPRKDVVTVHGIERKQQFMQSLNKSHTHRLRYSITHRKRIKCQHQQWVPRI

SEQ ID NO: 64640 - protein, 70 aa, Zea mays
  Coding DNA Sequence Number=SeqID_21265
MASLSNKVVDGERAVAMGQVFLMLILALEKTKCFVLTKDDASSGMGWFSKIKLDDGSIMAMMGSTSGELK

SEQ ID NO: 64641 - protein, 114 aa, Zea mays
  Coding DNA Sequence Number=SeqID_21266
MSLPTPQWVTLSVVDLWKVAYKMLVMVVNEDITMNTTEIPTMQDNIINNYIYTFSSAKEDSKIALEGPGHGSSEFRIDLRKKETPNSSPFAGLDRFFITSSVHETYEGLFMPKV

SEQ ID NO: 64642 - protein, 55 aa, Zea mays
  Coding DNA Sequence Number=SeqID_21267
MGRLEPREDRESRLVGKVYDLCRVLETGCPHCTQCSGGDVGNMEDFEEFQDYDEF

SEQ ID NO: 64643 - protein, 101 aa, Zea mays
  Coding DNA Sequence Number=SeqID_21268
MAHRTVRCTPDMSGAPATSPMPLDSYRWSPDFWARLDVRWRTRHVLLSVRYTFALTKIGFRIMRLQIPESVNSRGILFTIYRHRAQPVRDYKYAPYESLQH

SEQ ID NO: 64644 - protein, 139 aa, Zea mays
  Coding DNA Sequence Number=SeqID_21269
  Gene Ontology: Mol. function=hydrolase activity; Cellular component =anchored to membrane; Biological process=carbohydrate metabolic process
  Homolog annotation: Hit_ID=Q6K6C5; Match level="QueryCoverage=56%, HitCoverage=69%, E-value=1e-26, Identity=70%"; Hit description =Glycosyl hydrolase-like
  Pfam annotation: Domain name=X8; Domain location=29-115; Score=132.1; E_value=1.6e-36; Accession=PF07983.4; Description=X8 domain
MRRRGRLPAVLWLVAVTLAALLARPANAAWCIARSGASDKALQSALDYACGPAGGADCAPILTSGLCYLPNTLAAHASYAFNSIFQRSRAAPGACDFAGTATVTLTDPKFGYHSYVPIVQGLIVHNTMRVQETGAFVSY

SEQ ID NO: 64645 - protein, 48 aa, Zea mays
  Coding DNA Sequence Number=SeqID_21270
MEAKSHHQPNQGGLTALAYNAPLTPAAAVQWPHLYPPYLEWETQSQVA

SEQ ID NO: 64646 - protein, 50 aa, Zea mays
  Coding DNA Sequence Number=SeqID_21271
MAAWPRLLLGEVWASGVPKLCADGGYQLRLGVLRVPLIMVPDNNVTRNFN

SEQ ID NO: 64647 - protein, 325 aa, Zea mays
  Coding DNA Sequence Number=SeqID_21272
  Subcellular localization annotation: CTP_CleavageSite=34; ConfidenceScore=5.38e-01
MGGARGSPALSSLGKCNFAEVGTFQPSFGFKDFRQAARPHPLTGGHPRRCRVPGSSSRAASALLPAPPSATAAGRGFSADEIAGAAHGLTSNSTAFCSSSPPEWGCGRGLYGSSIRPEVIIAAVWPLGAEVVVVAAGAGGGAPPVGLLLLRRPPNRVGLNPRPLFDEPKPEVAVSAQTEAELTRKEDFVGRSPAGLSTGGTSVGVGLPRPRAGLMSSGDSWLRLRGGRSSRLLEPDSWKRPWRRWPGRGVDVVLRSGDPPTASPSEARSDLAEGVVDAEGAAPPFNCQGLSLQDRKVMSERGSPLLAPEGGSGFLPRQGRPFLDG

SEQ ID NO: 64648 - protein, 45 aa, Zea mays
  Coding DNA Sequence Number=SeqID_21273
MALGTLCISSPCAAAPLHDTFSRKKKTTRRANDKWAQGQIGKVFL

SEQ ID NO: 64649 - protein, 215 aa, Zea mays
  Coding DNA Sequence Number=SeqID_21274
MHRVFPPFEPPDGGRPWFSRLVVVGETQLRGSWYLSAIVLLQGFSSGSPAASPHRWSPKTVTTSSCVGRSKPGYGLRPSLSFKDVHHQRWGGDCRVPGSLSRAASALLPVPPSATAAVRGFSVDEIAGAAHGLTSNSTAFCSSSPPEWGCGRGLYGSSIRPEVITAAVWPLGAEVVVVAAGAGGGAPPVGLLLLRRPPNRVGLFVPTEVEPEFRL

SEQ ID NO: 64650 - protein, 42 aa, Zea mays
  Coding DNA Sequence Number=SeqID_21275
MGTNGHLDLDTGGKSIDQKILCFPYACVQGSKPILRKFTLGP

SEQ ID NO: 64651 - protein, 254 aa, Zea mays
  Coding DNA Sequence Number=SeqID_21276
  Gene Ontology: Mol. function=kinase activity; Cellular component =ornithine carbamoyltransferase complex; Biological process=amino acid metabolic process
  Homolog annotation: Hit_ID=Q6QP54; Match level="QueryCoverage=26%, HitCoverage=32%, E-value=7e-15, Identity=61%"; Hit description =Putative kinase
MAPPAEVESEPLGRVRQRLSAEARAESEPWGQARRSLSSSGAEPESEPWGRAKRSSSSFGAEPESEPWGRAKRSSSSSGAEPESKPWGRAMRSSSSSGAEPESEPWGRAKRSSSSFGAEPESEPWGRAMRSSSSSGAEPESEPGGRAKRSFLWRLRPDLAAVSLTLPSGTSVRAAQAALSSCQAGQWSGEAIFALKAPAIRSVGMAAWPRLLLGEVWASGKPKLCADGGYQLRLGVLRVPLIMVPDNNVTRNFN

SEQ ID NO: 64652 - protein, 425 aa, Zea mays
  Coding DNA Sequence Number=SeqID_21277
  Gene Ontology: Mol. function=cysteine-type peptidase activity; Biological process=proteolysis
  Homolog annotation: Hit_ID=Q6J9V9; Match level="QueryCoverage=14%, HitCoverage=22%, E-value=4e-22, Identity=85%"; Hit description =Putative uncharacterized protein
MGYAKQTDSSSCGLFLLNYIEYWTGDELSNSFTQDDMSHFRKKMAAILLSSELNKRRGCLLYKNDKEVDSGSPSDVEILENPTDSKKRKLLHVLDDNEVVYEDEEGPITQADLQKWFVDDWDKRTPVKVSNDGCTNDFLMVGLSTKDMPVTKADSIDVLCDYIMAIEDDTTLEMTWVRSFNPFKIEISVKDLQNILTINKDMTLRCFDMAVRLLANKESCRPKGEIINNRKHYMDMRFWRMVGFGKLPKYHQDPTAEELAKTLDCWPSMNYYITGCRYVLMPWKFNGCHALFVIDHVKKHVTFIDFTPTQDWCKHMPYTRFAEAIIMASKKYKIAYSKKRSGWAEDIFKWEHTIQTGVPIDLRGFNTSYLVLQAMAMWGNDRRMKFVGIVRRSFVIDLLSYEDNLCRYAIPANIQQRLIDIAKKD

SEQ ID NO: 64653 - protein, 70 aa, Zea mays
  Coding DNA Sequence Number=SeqID_21278
MARPAGPAHVEPCLGALQLRTVGQINPFVGGFGWDWNKNKISVDSDSVWEAYVATIYADKELGEVLRDVL

SEQ ID NO: 64654 - protein, 136 aa, Zea mays
  Coding DNA Sequence Number=SeqID_21279
MAHGEIPMAAGRLLHSLPHRRSVSTTWSGVLGRACGSSTKKFWGAQYLGTIEIAHLSVFTAAEPHHGVGRAADRIIVGFGTSVRWVARHRQGAPPCASTPSCPNTGMGKMNADGPIRDDRLGLDLDDVLASDIVDC

SEQ ID NO: 64655 - protein, 121 aa, Zea mays
  Coding DNA Sequence Number=SeqID_21280
  Subcellular localization annotation: CTP_CleavageSite=22; ConfidenceScore=5.11e-01
MDGDATALASPSTGTFPDKHPRSENSVQRAPGDSIATSTPPEKEAVDPRTAAIPFYWYVRRRRRRSSLSAGSASAGRRSTGVRRFADRSTLTRSASLELQVPRYMTRCSKFQSSDSIRVPT

SEQ ID NO: 64656 - protein, 549 aa, Zea mays
  Coding DNA Sequence Number=SeqID_21281
  Gene Ontology: Mol. function=transferase activity
  Homolog annotation: Hit_ID=Q6YWE6; Match level="QueryCoverage=94%, HitCoverage=99%, E-value=0.0, Identity=61%"; Hit description =Putative HGA1
  Pfam annotation: Domain name=DUF563; Domain location=142-386; Score =259.1; E_value=9.4e-75; Accession=PF04577.5; Description=Protein of unknown function (DUF563)
  Subcellular localization annotation: CTP_CleavageSite=44; ConfidenceScore=5.21e-01
MGSPKAAKSMVKQRIWRHRLVAPFAAVLITAVVVFSGLFAQDPSATSEFTAVNAGNTLPVRDKSESTAARGSPNKEDLATAAFEQELDVGNSGVALLLLLLLFHVPINQAREGQQRQCRSNEKEAVEDLVCSPAIIVKQSPDATNRYDICELCGDARAIGRSSTVMYVPQPLTSNGEEWNIPAQSRKSLPWIKKVTVKTLKASQQAPSCTSRHTMPAIVFALGGFTGNVWHDVSDVLVPLFLTARQFDQDVQLLVTDNRPWFIKKYSAILRRLTRHSVIDFDADDEVRCYPHVIVGLRSHRDLGIDPDSTPQKNYTMVDFRLFVREAYGLPAPGVDIPYRADKDEPEKKKPRMMLIERGKTRRLVNTPDVLLGLGWFGFEVVRADPRTHSDLEEFARLVDSCDAMMGVHGAGLTNMVFLRSGAALVHVVPYGVEFMADGFYGAPARDMGLRHVRYSVGPDESTLLEKYGRNHAVVRDPEAVRSGGWEKVGEVYMTEQDVVLNVTRFGPSLLKAIEFIELASVLGRWYTNWRKNMSFVLCWSLGSQQTPL

SEQ ID NO: 64657 - protein, 210 aa, Zea mays
  Coding DNA Sequence Number=SeqID_21282
  Homolog annotation: Hit_ID=A2X449; Match level="QueryCoverage=62%, HitCoverage=90%, E-value=9e-22, Identity=47%"; Hit description =Putative uncharacterized protein
MGLCISVSLWKEKLYGADGSSRSVQCRVVHEVAGVESGDCECGNLGSDADALGVEHKAAAAAAPAAMGVKSGGVEGAAAAVSGGTPVRPIWQRRVLMGVKCQLPRFSGMVLYDESGRPVCTGVRDRARDQEFMNIYILSPISCGSYMLERSIFLSSQPVFIDKPDSDGFNDKFKLGFNVQPTHEKHAAAISVLKGPALVFVIRSRRWQFC

SEQ ID NO: 64658 - protein, 135 aa, Zea mays
  Coding DNA Sequence Number=SeqID_21283
  Subcellular localization annotation: CTP_CleavageSite=26; ConfidenceScore=5.28e-01
MSKNTRDTRFIPRFGHTTKVPYFLVEAPTKSRVSFNPNPPLPTTKVPTKAGGRWGKLAKNRLNRFVNRLNRFPPGRTRFTDLLSRRVNRTQNRLSRAQIRLNRFSQNLHTTFSDRTDWQTGSDRAEQCRNRLNRF

SEQ ID NO: 64659 - protein, 87 aa, Zea mays
  Coding DNA Sequence Number=SeqID_21284
  Gene Ontology: Mol. function=catalytic activity; Cellular component =integral to membrane; Biological process=metabolic process
  Homolog annotation: Hit_ID=A6MCZ1; Match level="QueryCoverage=64%, HitCoverage=11%, E-value=3e-13, Identity=64%"; Hit description=Long -chain fatty acid condensing enzyme
  Subcellular localization annotation: CTP_CleavageSite=68; ConfidenceScore=5.11e-01
MAHQTVRCATAPSVYLWTTIVALFPTLDSPLTKAGIPPSTVGALVVNCSGFYPAPWLAAIIASRYRLRADTKTVNLSGMTALQALLA

SEQ ID NO: 64660 - protein, 129 aa, Zea mays
  Coding DNA Sequence Number=SeqID_21285
  Subcellular localization annotation: CTP_CleavageSite=27; ConfidenceScore=5.02e-01
MMENFGSKTVQIAMNAVVTSQLLVSLYSAAVDRKDQTVTLQGGTDTRSEVGSFLRNELREGVFWTFGFPKLKRLFSRVKLVTKNDLAPRKGLLLGSCFGAPKVSHEEVASAEVVSKRWPKVPFHGASAF

SEQ ID NO: 64661 - protein, 460 aa, Zea mays
  Coding DNA Sequence Number=SeqID_21286
MTARRAQLVMAMLGMRMLVGDGILLLLQVTLDKEITFAECHLIHSKMLVNSRVERSMTARRAQLVMAMLGMDICHFILYLIALPESSALPLEKHSAKTLSSVALDKEISANSTSAMTSLPSTFYRALGKVGTRQRKMAVTAPGDGGGDFAELLLTIVNSRVERSMTARRAQLVMAMLGMRMLVGDGILLLLQALACYYRLVNSRVERSMTARRAQLVMAMLGMDICHFILYLIALPESSALPLEKHSAKTLSSVALDKEISANSTSAMTSLSSTFYRALGKVGTRQRKMAVTAPGDGGGDFAELLLTIVNSRVERSMTARRAQLVMAMRNAHARWGWHTPAITAYLINNANDFSDRSYRSVPRHVYGPGHVHFGWNYGRQRKSEDGVGDGEQGRAHSIPMAVLADQGPGPGDPGRACRDAGQGRRRERIVVRRLAGGERDARLHCPVYGYGDSLGDGDFN

SEQ ID NO: 64662 - protein, 53 aa, Zea mays
  Coding DNA Sequence Number=SeqID_21287
MRKNFEGKIFMLRCVRKEGKVFFAFGSKEKFRPQQSRLYTDSRNKIYYKENIL

SEQ ID NO: 64663 - protein, 105 aa, Zea mays
  Coding DNA Sequence Number=SeqID_21288
MDKKLSEHFSAYDEGALKFRLWDVKQELPFCQPFVCTISTSRQLEAKRDLVAGVVYGTDFFTVSIISRHSTRSHNLCFTECPRFLLYVALISVMPCIRRLSSVNI

SEQ ID NO: 64664 - protein, 315 aa, Zea mays
  Coding DNA Sequence Number=SeqID_21289
  Gene Ontology: Mol. function=sequence-specific DNA binding; Cellular component=nucleus; Biological process=regulation of transcription, DNA-dependent
  Homolog annotation: Hit_ID=Q6YPD0; Match level="QueryCoverage=37%, HitCoverage=33%, E-value=2e-42, Identity=76%"; Hit description =Putative homeobox-leucine zipper protein
  Pfam annotation: Domain name=HALZ; Domain location=216-261; Score =66.6; E_value=8.5e-17; Accession=PF02183.9; Description=Homeobox associated leucine zipper
  Pfam annotation: Domain name=Homeobox; Domain location=161-215; Score= 54.8; E_value=3e-13; Accession=PF00046.20; Description=Homeobox domain
  Pfam module annotation: Pfam domain module=HALZ::Homeobox; Domain location=216-261::161-215
MADSGSDLVLGLGMGVGVRREEETQRGRRDREARRELEFETGRCARPSPEPAVRLTLLPGLVPSLGLPWPLSSETNREVSTRGFDDVNRALSVAGAGAEEDEAAVAAATAAASSSPNNSSGSFAMDISAQGQGQGQDQAAPAADRACSRASDEDDGGSARKKLRLSKEQSAFLEESFKVRATPNPKQKLALARQLNLRARQVEVWFQNRRARTKLKQTEVDCEHLKRCCETLTGENRRLHKELAELRALKAVRPLLHMHLPATTLSMCPSCERVASTSSAAPAAPAPASPSPAAGAGIAASAPDPDQRPSSSFAA

SEQ ID NO: 64665 - protein, 339 aa, Zea mays
  Coding DNA Sequence Number=SeqID_21290
  Homolog annotation: Hit_ID=A2Z1U9; Match level="QueryCoverage=22%, HitCoverage=20%, E-value=2e-35, Identity=92%"; Hit description =Putative uncharacterized protein
MEKGVQLMEGRQAWPLHTMGMPVASTTTTSTCFDDYSCSSSGWEQSAPFGCFGLLAADVHDLFPLFAAMEPAPPPPPSAHGVAVAIPGELDDLLLNFWDAGCHDGDVGEPPLKAQQEEEEAAFNSSCACASATHEQGYRTPTDSFTIHCDDDDQALSSIFSAGPAPAAERAAFQQQAPATEAEPLPSSSSSSCRGDPRAAGAGTGLPLPGRGAARGPARAPPLPRTCGPSLKRAATREESEQASAESGGGKRRKGAGVVVVRPFALLKPDGLDGGATLADINARVLMRPARPVRHPVGEFACAPRVSADQPGISGKAVAGFTRLHTPGRGSITIIRTRG

SEQ ID NO: 64666 - protein, 92 aa, Zea mays
  Coding DNA Sequence Number=SeqID_21291
MSLSSPVLPHPLSPWRRTIARHNAGEQADQHIGVQPQNRASLREKGNKANTLVGPLPVITAWRHPAMARCGITVAEELRREITCSQAVDVSV

SEQ ID NO: 64667 - protein, 177 aa, Zea mays
  Coding DNA Sequence Number=SeqID_21292
MAPPVDVAGPRPRLGDVEAPLRSRSSLSSVAVVESEPLGRARRRPSAEARAESEPWGRAKRSSSSSGAEPKSEPWVGRSRVRRLLGLSPSPSPGSGGAEFAVFRGLAQATFALNAPAIWSVGAAIWSGLLLGEDRASGKPELCADGGYQLRIRSLEGPSATKHGPNSSPFVVLDRFS

SEQ ID NO: 64668 - protein, 259 aa, Zea mays
  Coding DNA Sequence Number=SeqID_21293
MTVEKGHGSRGRTTVTRSAITKRRGWRRSGQGTGNGDTLKGILLREGSGPRALLLIRGSKAGPSEGLDSRLRAFRLRTHYWSEEAPPRSTPRLGLNLDPGRRPPPRPTLGLRLNLDLGRRSPPRPTPGLGLNLDPGRRPPPRPTPGLGLNLDLGRRSPPRPTPGLGLSLDPKRQSPPRPTPELRLNLYLGRRSLPRPTLGLGLNLYLGRWSPPRPTPGLGLNLDLGRRSPSRPTLELGLSLDLGGASASPDLGFGPTTS

SEQ ID NO: 64669 - protein, 590 aa, Zea mays
  Coding DNA Sequence Number=SeqID_21294
  Homolog annotation: Hit_ID=Q6JAD6; Match level="QueryCoverage=86%, HitCoverage=88%, E-value=7e-46, Identity=60%"; Hit description =Putative uncharacterized protein
MSGAPAAARWNSIFLCAVWWFIGQLLCAVRHQFRMPHTKNVSAPGGGDDEDPRRPFRQVKGKTVYLEQQEGRKKRRTDRAARAAAAAASAAAQAELGDQPQTLSDQIAYRVRRLASRPRSSTHTTASTPPPTLPAPVTPVAPSTTTAIPATSTTPASTAPPPAPASAPPVPPPRFRERDETEVRPLAADPRLFDLQRAIVARVRRFRYVPVESWLPAQRDPAAVDLFSTHIQESFFRAQMSAQIALRVHWLLDLPAFLLAGGADSEAHLTYLPGLLTLLTTSGRFASSLDFPSRRLDFTTSATTPLTLLVALTAVWLRIEDTVLDGICARRQLPYAHYLCHIFAQLIQPPQFQGTLEASRLVFGSYRPVPEAPVPASAPVFDSQAKDAALHQFDTQDTAVDDDDDDFGVPPPPPMPPRSHDHEAGSSSAAPAAPPAIDAAIASILQSLTQQQAHLAAEQTRLSERMLTMFQTIQYRHNSLQQQLLQDRAESRAFMALMLQHSGVSVPPVQSAPPPPLQAPVVPAIQTGPPIPSVGPSPLRPVTLAFTSPVLSSVCPQPPVPPASAVTTTAVAVSVTTSVPAAPAARLKVA

SEQ ID NO: 64670 - protein, 70 aa, Zea mays
  Coding DNA Sequence Number=SeqID_21295
MGTNGHLDLDMGGNSVDQKKEHIGDLPVLGKVSGVVDFKEAKFCGSFYHQSRVYCRRPLLRAIALDEANP

SEQ ID NO: 64671 - protein, 404 aa, Zea mays
  Coding DNA Sequence Number=SeqID_21296
  Gene Ontology: Mol. function=protein binding; Biological process =embryonic development ending in seed dormancy
  Homolog annotation: Hit_ID=Q7EY67; Match level="QueryCoverage=37%, HitCoverage=16%, E-value=1e-53, Identity=64%"; Hit description=F-box protein family-like protein
MTLQNLEDLSSDGDSQSKRRQLFVPRCTGLTADGLVKIIHFLHGQHKGNLSRVRLHGICKVNNHHLDIIKSLMCRGSQQQDAQALHYNHRVHEVLNTDDGRPIDVDLCPLCRNVRLVFDCTRKNCREVKDGRSRCRGCFFCVARCETCGGCIDLEELASKMLHMQPSLLREAFKFERESISVWAVHMSGVCSVCYLTQKSGRSGCRPQGLAHPTCLNEGTAMSRGDNVRLKKGPWTAEEDEKLVTFVILAPTPTAAQARRCVCMQCMLDRSIVQITRLPAPPGMLRPADAAGDFLTRRRRLDGSTPTTTSSSAASAAASLSRDEALFPLVDMDLEELPEIAVFQMGALEDMVASWDDDSLAQPQLSPPLVYDYWDHAYQPRRSRSGVAFDQESRKKIELFSSYC

SEQ ID NO: 64672 - protein, 295 aa, Zea mays
  Coding DNA Sequence Number=SeqID_21297
  Gene Ontology: Mol. function=kinase activity; Cellular component =ornithine carbamoyltransferase complex; Biological process=amino acid metabolic process
  Homolog annotation: Hit_ID=Q6QP54; Match level="QueryCoverage=23%, HitCoverage=37%, E-value=2e-13, Identity=52%"; Hit description =Putative kinase
MALPVDVAGPRPRPGDVGAPPKLGSSLSSVAEVEPEPLGRARRRSFGRGQGGVRALGSGEAEFVVFWGLARVRALGRAERIGVAQAALSFCQTGQWSGEVTAVTSALPGGARQDKGLLLSEGKASGEPEMCPPLKGGLGRDGKSLGLYADGGAQMRIRRLEATSCDDLSQEEQTSLHAELTEKVEVLTLDNQKLKNYLINAITRGKVAIENNDFNNELAVDNQRLKNEVKKLKGENEHLATSVQKFNNDQYLQNELLMNTVMKSNKSGIGYNAFVQKKATTQYKPKQTHRAYQML

SEQ ID NO: 64673 - protein, 118 aa, Zea mays
  Coding DNA Sequence Number=SeqID_21298
MSGIPRDVAKHSPDIRAGARPVRQPLRLSCQGRVGLASAEPDPPSGAKKGGTPLRRDWVYFSASKIFDQKGVFAFSRLCQKQGPKERTWVHVSGKADRAEELLCLWVRDTSLITCHEK

SEQ ID NO: 64674 - protein, 82 aa, Zea mays
  Coding DNA Sequence Number=SeqID_21299
  Subcellular localization annotation: CTP_CleavageSite=46; ConfidenceScore=5.17e-01
MAARAPKVAASRSIPQPSLRFVHCIWPTIQIIPQSPTLFFFPWLPSTMARAGRSSAVPATPIPLHDYPCGPPARQPRCPKTA

SEQ ID NO: 64675 - protein, 145 aa, Zea mays
  Coding DNA Sequence Number=SeqID_21300
  Gene Ontology: Mol. function=transferase activity, transferring nitrogenous groups; Biological process=amino acid and derivative metabolic process
  Homolog annotation: Hit_ID=A9CM06; Match level="QueryCoverage=33%, HitCoverage=9%, E-value=3e-13, Identity=71%"; Hit description =Nicotianamine aminotransferase
MKCMETWCLGTPLTSQWVSLATLPCLEHRITIEEMDSAWVATWEHFPIFLGTQRKIFFRRIIGLLAETSEICYREIKDIKCITCPHKPKGSMFVMWLNRKKIVIQMKQLSTMLEQSASEMGVLDKESLYLKTGGYKKLEWLSEGF

SEQ ID NO: 64676 - protein, 308 aa, Zea mays
  Coding DNA Sequence Number=SeqID_21301
  Gene Ontology: Mol. function=kinase activity; Cellular component =ornithine carbamoyltransferase complex; Biological process=amino acid metabolic process
  Homolog annotation: Hit_ID=Q6QP54; Match level="QueryCoverage=35%, HitCoverage=51%, E-value=4e-29, Identity=56%"; Hit description =Putative kinase
MARGERKVQNDINIVDDSDSDSDEEFASPSYDELADLLKDYTQIIRKSKAKCDRLKNENESLNAKYDIVIKASDEIKEENKTMSSTVNELTNSLKDAKDKCDKLNEANRELQNRLVKIKEDYCRRFETGGSLSRRVSVPRAPAQMGRARGRAQRGKSEVAGDGRERGGNPAAFVFVPRPGRLRVAVVTGHVGRHHCLSGGASQMGHRSCSLRPESARGRVMMALPVDVASPRLRPGDVGAPPKLGSSLSSVAEAEPEPLGRARRRSFGRGQGGVRALGSGEAEFVVFWGLARVRALGRAERSPPSSGA

SEQ ID NO: 64677 - protein, 87 aa, Zea mays
  Coding DNA Sequence Number=SeqID_21302
MVAKPRLRTNHSGERGPDRPERERAHRRVSQVANGKAKLTVALDRALAQRWPWNRWWTSADGGGGSRFTWVERVLRAGQRAQMEEGR

SEQ ID NO: 64678 - protein, 64 aa, Zea mays
  Coding DNA Sequence Number=SeqID_21303
MMSFACGGTTQPSPTSLTAVANAAELVGDEQTGHGGHQRPEGWPRRAKGDLADSAEGTTPAWEH

SEQ ID NO: 64679 - protein, 360 aa, Zea mays
  Coding DNA Sequence Number=SeqID_21304
MGSTRVAFVLLPLEERDVAKVGTLQPSLGFKDFHQAARLHSLTNGHPGWVQHSVLCPGDCGRPHQRVSQHVVRREGGTRVLGRSRSCFRGEDGSEDLSVCFGAADARWCGVGGQVDAVVGAEVVAAGEGFSADEIVGVTCALGLRFFGFNGWFSSPVRGHEREPSSGSVRPGTIAAAAEVAGENPRLHCDEPEPEAAVSAWTEAESAREEASSAQEQLAEATERPVKPSARAGFLEETLAAMAQAGPDSAEGGDDAEGAAAPSVDVRTCRESLSIDLFVGNRIVYPSESYFSRKVMSEDPAIEAIEKRKRRFGRKTFLRKIFDAEGFPLLAPEGGLQNLGDDERPFLGRSELVAPSGVLS

SEQ ID NO: 64680 - protein, 37 aa, Zea mays
  Coding DNA Sequence Number=SeqID_21305
HCGTGGYERDGFGYDYGAGEDEAVEGDFQEFQDYDEF

SEQ ID NO: 64681 - protein, 207 aa, Zea mays
  Coding DNA Sequence Number=SeqID_21306
MMTTSFVVGRSKPGCGLCPTLSFKEVHHPRCGGGRAEPGFYLPHGPAGCLFLQHLGERALTGLAEGANFDNARPVGRKRCQLQRAWLAGSAGSVAASDAASCRLIRAWLSVHRTGDCCAARTGGSSKTSYAAWAAFVFLDCLVLTLARSLHAENLRPLYDEMKPEAAVSAWTEAESARKEASSAREHVASLAEEVQQRRLELGQVVR

SEQ ID NO: 64682 - protein, 89 aa, Zea mays
  Coding DNA Sequence Number=SeqID_21307
MGQVVHGPVYDPRTEDIDGDVLMRAQLEEERKERHGMEARMIAEREARLADQQRMVEMFQYMQSLGAAHGFAPPPPLFPPVDPAQFHTP

SEQ ID NO: 64683 - protein, 102 aa, Zea mays
  Coding DNA Sequence Number=SeqID_21308
MKYESPSRGLAWRKRGHHYPLGGSEGPASSATPTPELGIASGVSGMVRRRLEIVGDTAPNTVPPASVSSLEETVMASVGDAGCAGTTSDATVLGSTGAPGVG

SEQ ID NO: 64684 - protein, 295 aa, Zea mays
  Coding DNA Sequence Number=SeqID_21309
  Subcellular localization annotation: CTP_CleavageSite=38; ConfidenceScore=5.11e-01
MADSSDLARPYVISICLCSARAPSRVPLHPRGAQLGLRAAALAHGGVSLSLAHPLSSSLSPSPNIPARSCGREFFPVLARARQPPLSYPRQHATVVVFEFVEFANALLPIRLSLLFAPALIHQVSRVLAFAVKPLNPFFPCSTSSSPFWWPSSLWCWTTLHHLVALAVDFVGPFHVKPASSAIVTQLLAPSSSDTCLVVFRLLMISPIWVMWAEDLNTRQMFDDKPKPEFINVLTSIESHLMLACMIKDYLNWPHALDMGQDPQLSKSIQITVISSESGDLISDLQPKSGCKYYE

SEQ ID NO: 64685 - protein, 70 aa, Zea mays
  Coding DNA Sequence Number=SeqID_21310
MATKCCIEGQAPGKGHWLQQGGEAMAEGRDPSQGRWSRGALHGRWDIFGTQNFSDTNELSQMRSIEINGT

SEQ ID NO: 64686 - protein, 95 aa, Zea mays
  Coding DNA Sequence Number=SeqID_21311
MDKSVAQEESSSEGYETPSDPFPTTRIDRAATRGLVSISCDARKSCGTIPRRTGTDPRRTGTDPRRTGTHPRRTGIDRDNFREVKEKEAERSEQR

SEQ ID NO: 64687 - protein, 185 aa, Zea mays
  Coding DNA Sequence Number=SeqID_21312
  Homolog annotation: Hit_ID=Q6JAD6; Match level="QueryCoverage=78%, HitCoverage=20%, E-value=1e-48, Identity=68%"; Hit description =Putative uncharacterized protein
MGYREAATHIQLWLLGALVSHSEFDVVDFLICEIEDTVLDGLRARRQLPYAHYLCHIFAQLIRPPQFQGTLEASRLLFGSYRPAPEDPVPAPAPVFDTQAEDTALHQFEAQDAAVDDDDDDDFGIPPPPPPPMPPCSHDHEAGSSRATPAAPPAIDPALASILQTLTQQQAHLAVEQTRQAATHQ

SEQ ID NO: 64688 - protein, 83 aa, Zea mays
  Coding DNA Sequence Number=SeqID_21313
  Homolog annotation: Hit_ID=Q6JAD6; Match level="QueryCoverage=65%, HitCoverage=7%, E-value=3e-13, Identity=75%"; Hit description =Putative uncharacterized protein
MPRTKNVSAPGGGDDEDPRRTFRQVKRKTVYLEQQEGHKKRHPRLFDHQRATAARVRRFRYVPKGVLDTAQRNPAAVDLFQHP

SEQ ID NO: 64689 - protein, 178 aa, Zea mays
  Coding DNA Sequence Number=SeqID_21314
MKEEPALGSVQHQGSCPNEGDDPLWPCRGLHTQISTSAWGSKSIDETWWLDAQAASWCSDELISKCSFRTARLTRKLRTAACRRTTACSCDDGHGVALEATTSRVNASGVGEGGWEGVAAADGAAAGGGEGWAAGGGEDNLELIPGVMDLRSMRIAVFSGEVIPLCRKLGSRVAALGA

SEQ ID NO: 64690 - protein, 66 aa, Zea mays
  Coding DNA Sequence Number=SeqID_21315
MADCANSGVVRRRDSTQSRRGKKITRALLDACLFVLLRVDEQVTEDPGVQQVEIADQELIEGKLCP

SEQ ID NO: 64691 - protein, 453 aa, Zea mays
  Coding DNA Sequence Number=SeqID_21316
  Gene Ontology: Mol. function=diphosphate-fructose-6-phosphate 1 -phosphotransferase activity; Cellular component=6-phosphofructokinase complex; Biological process=glycolysis
  Homolog annotation: Hit_ID=A1E381; Match level="QueryCoverage=39%, HitCoverage=83%, E-value=6e-95, Identity=96%"; Hit description =Pyrophosphate-fructose-6-phosphate1-phosphotransferase beta subunit
MAEVAAKKETLKNVTNYITDIICKRADLGYNYGVILIPEGLIDFIPEVQKLIAELNEILAHDVVDEAGAWKSKLQAESRELFEFLPKTIQEQLMLERDPHGNVQVAKIETEKMLISMVETELEKRKAEGRYSAHFRGQAHFFGYEGRCGLPTNFDSNYCYALGYGAGALLQSGKTGLISSLCPPVLLDPKERAELRTSRWMKGGLHTQISTSAGGSKSIDETWWLDAQAASWCSDELISKCSFRTARLTGKPRTAACRRTMACSCDDGHGVALEATASRVNASGVGEGGWEGVAAADGAAAGGVEGWAAGGGEDNLELIPGVMDLRSMGIAVFSGEVIPLCRRLGSRVGNLAAPVEEWTVGGTALTSLMDVERRHGKFKPVIKKAMVELDAAPFKKYASLRDEWAIKNRYISPVLGVETWTLGLLEQPAVQSPYCELSNKRFDGSFLGTDWMW

SEQ ID NO: 64692 - protein, 233 aa, Zea mays
  Coding DNA Sequence Number=SeqID_21317
  Pfam annotation: Domain name=IQ; Domain location=110-130; Score=17.9; E_value=0.039; Accession=PF00612.18; Description=IQ calmodulin -binding motif
  Pfam annotation: Domain name=IQ; Domain location=68-88; Score=25.0; E_ value=0.00028; Accession=PF00612.18; Description=IQ calmodulin -binding motif
  Pfam module annotation: Pfam domain module=IQ::IQ; Domain location =110-130::68-88
  Subcellular localization annotation: CTP_CleavageSite=27; ConfidenceScore=5.28e-01
MTPGISSRLSSPPPAAHPSTPPAAAPSAAATPSHPPSPTPDAFTRLEKKWDQFVVMFHRYKEKTEKELQAAVRLQAAARGFLARRQVQSLRGEKHLAVASRATPWPSSHEQAMVRLQAAVRGFPVRRAVRKLHLLISSSLHQLAACASNHQVSSILFEPPAEVEIWVCSPPARPKRVVSLIRATALVLDRPKGWFLLHLSSNLEDELVLKGGGDVMGIIGSERQQLGWDKARE

SEQ ID NO: 64693 - protein, 156 aa, Zea mays
  Coding DNA Sequence Number=SeqID_21318
  Pfam annotation: Domain name=zf-CCHC; Domain location=43-60; Score =28.5; E_value=2.4e-05; Accession=PF00098.14; Description=Zinc knuckle
MKHMDTQTEESSQAQLHEIQTPNQPSPPIDQAKLTRKELKARGACYYCKNEGHIIRECPKKRLDRIKKKAAKHDLSNSSEDPPFYKYDDEGRLIGIHFGAKNQRPRNLAPASTPAWTPETDTARALVHRAMRPCTQAIRRPKPRRRDTAVSSPVRF

SEQ ID NO: 64694 - protein, 1368 aa, Zea mays
  Coding DNA Sequence Number=SeqID_21319
  Gene Ontology: Mol. function=nucleotide binding; Cellular component =microtubule; Biological process=defense response to fungus
  Homolog annotation: Hit_ID=Q9SDX4; Match level="QueryCoverage=34%, HitCoverage=50%, E-value=0.0, Identity=78%"; Hit description=Dynamin homolog
  Pfam annotation: Domain name=Dynamin_M; Domain location=258-515; Score=-60.4; E_value=2.3e-07; Accession=PF01031.11; Description =Dynamin central region
  Pfam annotation: Domain name=Dynamin_N; Domain location=41-210; Score= 158.4; E_value=1.9e-44; Accession=PF00350.14; Description=Dynamin family
  Pfam annotation: Domain name=MMR_HSR1; Domain location=39-211; Score =13.3; E_value=6.5e-05; Accession=PF01926.14; Description=GTPase of unknown function
  Pfam annotation: Domain name=zf-CCHC; Domain location=545-562; Score =22.7; E_value=0.00055; Accession=PF00098.14; Description=Zinc knuckle
  Pfam annotation: Domain name=zf-CCHC; Domain location=564-581; Score =14.2; E_value=0.011; Accession=PF00098.14; Description=Zinc knuckle
  Pfam module annotation: Pfam domain module=Dynamin_M::Dynamin_N::MMR _HSR1::zf-CCHC::zf-CCHC; Domain location=258-515::41-210::39-211::545- 562::564-581
MEAMEELSELAESMRQAASLLADDDPSDAAAPRRPTTFLNAVALGNVSSGKSAVLNSLIGHPVLPTGENGATRAPIVVDLQRDPGLSSKSIVLQIDSKSQQVSASALRHSLQDRLSKGTSGGSGRGRADEIYLKLRTSTAPSLKLIDLPGIDQRAVDDSMINEYAGHNDAILLVVIPAMQAADVASSRALRLAKDIDSDGTRTVGVISKVDQADGDAKVIACVQALLSNKGPKNLPEIDWVALIGQSVAIASAQSAGSENSLETAWRAEAESLKNILTGAPQNKLGRIALVDTIAKQIRKRMKVRVPNLLSGLQGKSQMVQDELARLGESMVQSPEGTRAVALELCREFEDKFLAHITSGEGSGWKIVASFEGKFPDRIKQLPLDRHFDLNNVKRIVLEADGYQPYLISPEKGLKSLIKLVLEMAKEPSRLCVEEVHRVLLDIVNASANATPGLGRYPPFKREVVAIASNALDTFKNDAKKMVVALVDMERAFVPPQHFIRLVQRRCPSVDAGGWQLVESRRSRRRRLFLKQEPRSRRVPVDLVGRCFNCLSPHHFAKDCWERSRCFCCGGLGHLSYKCSAPRRAEPRRPVWRRLGPTVAPVSKKSVWDRLGSTIAHSDRLDLLSSSSAAAAPERIPVWRRITPVSDASQRAEPAVLTGSSEGGPTIGGEARPAKRRRRRQRKRPLAPIIHEDAQLAPVSSPTHDSASPVLEDSSPPSFPCIIGWNQSMSRAEEDLATAVVITVFGNMEVVSANDIAAPLASRLEVDEGSLVIRQLSTSFLLMLPSDGLVQQLCGRWSVVRANSFSLSCKRWSRLMNSSGSTLAQLLEVELDGIPVHAWEVPTVESLLSPFAWIESVHEDTLQLRNLSSFRCSVWCLDPVSIPPARDLWVVEPLQLGIRDGSGVRSLVYPVNIRWKAAADTENSAPRPPPSSVITPAEPRRHLRSRSPPAYRGQRSGASFGRAQGTDHYVQGSSSCHGFREASCRDPQVVQKVTLEPPHGSVIAPTSSPEAGLQTLEAGHPTPSAHGFTEDVGGGLCVVQNVILEPPPGSVTVPTLVSTHTTTSIQGSLEVDDDLLCVEQNVNLEPPPGSVTVPSLVSAQTVRLDTRTEGRKTLATSTLPAGTYGIRAGLQASNTVTKVYYRRRLGGKQEGSLISEQLPTMELDGAPMANSAHATQTVGDLGSAVVCTEAPEYIKAMARPVTSPCLVDASPSHVPTSDVVELTATVVDTQVTLVAVAPASICGGTLAVEQEVLHSHQRQAFLASVSRRPSRVLPAPPVQLLKSGYKLPTKPIPRRSRRVAGVGVEFTSADLDSRATRKIMRAVGIITNNNGMDQRALDEYANLFKTPLSGSHIKALAALFGWQPPEDM

SEQ ID NO: 64695 - protein, 141 aa, Zea mays
  Coding DNA Sequence Number=SeqID_21320
MESEQAARIERKRKRDCRHGDRRRGLPSTRSVCGRRGPRTSQASAPASRTLIRRGQPRIMGIPYRCGSCRSATTSTGIEPRRLEAPGVLDFVVGASSPPRNHSAPSGLGDGSWKMSGGRSSENERSGLDPGRNGSSSNLGR

SEQ ID NO: 64696 - protein, 31 aa, Zea mays
  Coding DNA Sequence Number=SeqID_21321
MEGGLESLKELGFIFPGMGGMVTMNMLIGPY

SEQ ID NO: 64697 - protein, 69 aa, Zea mays
  Coding DNA Sequence Number=SeqID_21322
MGIPYRCGSCRSATTSTGIEPRCARFTAIGSTRGIGFRRRGLFTPAEPQCAIGARRRELEDERWPFIRK

SEQ ID NO: 64698 - protein, 65 aa, Zea mays
  Coding DNA Sequence Number=SeqID_21323
MTELQGLTSSLLPQDEGEVVSNVVADLCSLFVVTLILRGVKPVISGQVLLDNVDIKTLQSKQLRD

SEQ ID NO: 64699 - protein, 244 aa, Zea mays
  Coding DNA Sequence Number=SeqID_21324
MAPHKLCDDGGSQLSYGSRGTKDQGLLREGWPRGDEDGTCALLGSLASLTRVDACNPLLQAHPTWARDEHEGRGISTSLTPVSGHLASPPFALAHALDPSGLGHAAHSLVGSGTPRSRNADNTDSCRANTTVHGARRTHEGFCATTANSEVSGHPSSAVRPLVLSSKHGEAPKHVFMDATSTAMARTALRWRNFYPMVASAFCGESGAGAVRGEQGGCGERRGSYPPRRGELRPTVPYFPRGGG

SEQ ID NO: 64700 - protein, 136 aa, Zea mays
  Coding DNA Sequence Number=SeqID_21325
  Gene Ontology: Mol. function=kinase activity; Cellular component =ornithine carbamoyltransferase complex; Biological process=amino acid metabolic process
  Homolog annotation: Hit_ID=Q6QP54; Match level="QueryCoverage=69%, HitCoverage=29%, E-value=2e-17, Identity=57%"; Hit description =Putative kinase
  Subcellular localization annotation: CTP_CleavageSite=62; ConfidenceScore=5.30e-01
MALPVDVAGLCPRSGDVGAPPKPRSSLSSVAGAEPEPLGRARRRSFGRGQSGVRALGSGEARAESEPCGRARRSSSSSGAEPESEPWVGRSGVRRLPGLSPSPSPGSGGTELAVFRVLARVRALGRAERSSPSSGS

SEQ ID NO: 64701 - protein, 159 aa, Zea mays
  Coding DNA Sequence Number=SeqID_21326
  Subcellular localization annotation: CTP_CleavageSite=25; ConfidenceScore=5.29e-01
MTYLLLPSSTRSRGSPSSSPLSMLLCVLRRSSPICWQSSFKALIHKGCNHEARLASEDFIVNRSVYSEVIVTTSEAADEMLDEMWSPYGVEVAQQRSSRRDGADLVENVSMAQPKGFYHARKRTYGMSLKEVHLWIKKHLDIGISSLIRLSISLVLRKT

SEQ ID NO: 64702 - protein, 254 aa, Zea mays
  Coding DNA Sequence Number=SeqID_21327
  Subcellular localization annotation: CTP_CleavageSite=23; ConfidenceScore=5.36e-01
MGRGRGGGGAPVGRRRWCSRTPSYNSRWSTRPLSMQHNMTTTTTMLSGTPLGLAHQSFDHYAIISRSDVVATTSYKKLVVDMHYKAHIQVVVTYYGFILREKMIPCPWARLRSEDRGHRRRCPHEGRRRQEEWAVLDYRWGNLLVLYSRSILGASKEHEREPSHTTLAGQLTTSHIETPARRREVGTNGDGGEDGGEAGGRVGGSLGRSAEDDRDVPVQVVVHSFAPPPLLFPPTDLAQFHTLVSIKILVLHDI

SEQ ID NO: 64703 - protein, 167 aa, Zea mays
  Coding DNA Sequence Number=SeqID_21328
MSKTPAEPLRARAASPPSSDVFGTSRWSNRDKTGRDTLRSIQHQTKACDGVIPQCGLAQLRGPRAIRPIVAEGTCVLNTRHWALRRVTTGSMVGRSKPGCGLCPALSFKDLHHPCWGWGRAEPEPYLPYGPAGHLFLQHSGERALTGLAEGADFDNTGPIGHKCRQL

SEQ ID NO: 64704 - protein, 150 aa, Zea mays
  Coding DNA Sequence Number=SeqID_21329
MNALSREGCRHFEVFDQADEDFERDIYKVEDPVVKESAGAIYDRMWGPHGREVVRERAETARAQAARGERVDDFGALNSALPDPEPTPAEAMSGAALEPPPETAEGAPDAPAAAASRAEDPATVAAEATAEATAEATTEDPATTGSSQVA

SEQ ID NO: 64705 - protein, 72 aa, Zea mays
  Coding DNA Sequence Number=SeqID_21330
FKVVLGTARAATTGASETVYLSLKAPHHLGCGSRAANVVLQQVFHLHHLSSKDRAPFYPLGLSSGIKAQVAR

SEQ ID NO: 64706 - protein, 79 aa, Zea mays
  Coding DNA Sequence Number=SeqID_21331
MPCGGAGASLAEVLGKATSQTPPPAEARGKSPAAPGPTPGIGAPAPRVGDNAVSPGDWTDLALCDVVDAPPGEKAKRGS

SEQ ID NO: 64707 - protein, 183 aa, Zea mays
  Coding DNA Sequence Number=SeqID_21332
MELSEEPEPEGWIARPITRGAARGCHFHDALDTLLRRAFDRHTWSIEYRCVVYQHRRGLYLDQWEATCLVRRPDDDHRGAEAAMQDAARRAFSQYCSLFSGVADGLDLKYYPRRSTDSAGGVIVSPVGEGNPRLNSMVNLSVVLNTELDHALDELGKVRAEVAELRAECAARTIWMVVLPPLS

SEQ ID NO: 64708 - protein, 163 aa, Zea mays
  Coding DNA Sequence Number=SeqID_21333
MAQRLTQSTCYGGVPNSGEHDCAILVAGVLGSISGKLHVLLGELSKGLDRAEEGGKGFGHGGCPRASLAGRGEVAGAMGELGEVWRGTEEATGKMAGHWGGLYSRSAGVVTGRPRAREGFNGRFERLSVQILAKPPCTGSLGAILSIGPKGFEFGIKVNMLDL

SEQ ID NO: 64709 - protein, 97 aa, Zea mays
  Coding DNA Sequence Number=SeqID_21334
MELMINVWILSQGFECTKHMSRNMTLLLTGPETGFSHASYGGYKCGCGTVAAGDNWSIVRQGRTLQDMVDGVTSPSIPPPGWTVDWDAAPVGEDQKE

SEQ ID NO: 64710 - protein, 134 aa, Zea mays
  Coding DNA Sequence Number=SeqID_21335
MSSPACARGPAYADHPRRRSAHRRNRHNLPYALGHLTGAISPPPQHLKASPGFCNTPGVTQGVHLRVTPLFTHYHMEIELGNRETCSSLTRGALVTGIAQSRSPEFKNPPAHVDREPPTTPAACARGQSSSDHL

SEQ ID NO: 64711 - protein, 117 aa, Zea mays
  Coding DNA Sequence Number=SeqID_21336
MSALYRLQALQSDAMAHLANLAQTTKLTLDSREDFVVDLSSELVEKDLQENQLHNVQQELEDANDHLDMHHLEMEGNEDGSEGEEAPEELKPTSGTNATASVMPPSPVSSVASTTQG

SEQ ID NO: 64712 - protein, 387 aa, Zea mays
  Coding DNA Sequence Number=SeqID_21337
  Homolog annotation: Hit_ID=Q6BTJ4; Match level="QueryCoverage=48%, HitCoverage=29%, E-value=7e-11, Identity=33%"; Hit description =Similar to CA1621|CaIFF6 Candida albicans CaIFF6 unknown function
MQAARNRAKWARPSDFQRTQHGGPGPRVMQPGPGKGDTPKRILLREGNRPRASQLIRGSKAGPSEGFNSRLRALGFCAHYWSERLGGCSRKPGSGQTVDSVNIPARELGTRPGTRATANSHEGTTRPAEALRKALRPRRSQTTPPRPRGLHPAGALARTRRNKTQLRKVGPLAKKCDKSLQASINTPFEAQGLLSGTIIRGTLKAPNSQLGSDSGSTPEDDELRSAQPQGSDSGSAPEDDELRSARPQGSDSGSAPEDDELRSARPQGSDSGSAPEDDELRFARPQGSDSGSAPEDDELRFARPQGSDSALASADGPRLARPRGSDSTSASEDRLDLDLGGASTSPNPWARTDRVNSRLQRSSDGHDTTRTGCQDLSGCHNGMYLGR

SEQ ID NO: 64713 - protein, 138 aa, Zea mays
  Coding DNA Sequence Number=SeqID_21338
MGSLGEGCIPRVTRGRTLSTGSEVAHPQERSSDPLEQRQGVVDVYCEVDNGGGDCSLSLSLTTNLGSPDLDATGGEATRGSSAFITRETESKRSQERPPSLRAEVELPMLAPTTSVAVVEDYSDQRGPHVGQQTTECG

SEQ ID NO: 64714 - protein, 173 aa, Zea mays
  Coding DNA Sequence Number=SeqID_21339
  Subcellular localization annotation: CTP_CleavageSite=63; ConfidenceScore=5.72e-01
MTNSTSLYGGIPDNSSGKTSGKSLTAWMLSPTNFLSTKNAASLVAIVTAIPTSNLSPLELGLLCKMGTAEGNSRSKPLDQNRWPELDLPIREPVAHPQERSSDPLEQRQGVVDVYREVDDGGDARSLSLSLTTSLGSPDLDATGGEATRGSSAFITRETESKRPQERPPSPRA

SEQ ID NO: 64715 - protein, 102 aa, Zea mays
  Coding DNA Sequence Number=SeqID_21340
MEVEQPENLHHWDWAAELQQEAQPELPVEQVDSKVVVLDDDDDDDDDSEYQLSDVDISSGEIDLPGDDALEDDEDPNDEYIKDVDPKEEDPHELIDIDGMGT

SEQ ID NO: 64716 - protein, 396 aa, Zea mays
  Coding DNA Sequence Number=SeqID_21341
  Gene Ontology: Mol. function=protein dimerization activity; Biological process=RNA-dependent DNA replication
  Homolog annotation: Hit_ID=Q6EPG8; Match level="QueryCoverage=97%, HitCoverage=96%, E-value=4e-65, Identity=41%"; Hit description =Flavonoid 7-O-methyltransferase-like
  Pfam annotation: Domain name=Dimerisation; Domain location=33-81; Score=41.1; E_value=4.1e-09; Accession=PF08100.2; Description =Dimerisation domain
  Pfam annotation: Domain name=Methyltransf_2; Domain location=99-373; Score=200.7; E_value=3.6e-57; Accession=PF00891.9; Description=O -methyltransferase
  Pfam module annotation: Pfam domain module=Dimerisation::Methyltransf_ 2; Domain location=33-81::99-373
MGHQAQHATDDTEELLAAHRELWCHALGYVKSMALKCALDLRIPDIIQRCGGSATLGQLLAASEVPASNLGYLRRVMRTLTAMRIFAVVGHGHGPDKADDPADDDATAVSYRLTPASRLLATSDDDDDASKNNLSIHPNISSHVRPKNVSLLFSMAEWMKDEQALSVSLYETVNRKCMWACVEDDAATRACFYESMDADTRLVMQAVIRKCPAVFDDGLTSLVDVGGARGTAAAAVVAAFPHIQKCTVMDLPHIVAEAPAGTGLCFHGGDMFEHIPSADAVMLKVYIYTNWYQMDWILHDWDDDKCVKIMERCKEAISGKEGRGGKVIIIETVLGSRPDDDATCKETYVLDLQILSFVNGAEREEHEWRRIFLAAGFRDYKITHTRGIPSIIEVFP

SEQ ID NO: 64717 - protein, 91 aa, Zea mays
  Coding DNA Sequence Number=SeqID_21342
MVKNFGSKTVQIAMNAVVTSHLLVCLYSTAAFENKSPTGTLDTPKTSCSAYMIRSYQNNLKASDVEDDANVEEESDLRLSKSSYIDMGDPL

SEQ ID NO: 64718 - protein, 173 aa, Zea mays
  Coding DNA Sequence Number=SeqID_21343
  Subcellular localization annotation: CTP_CleavageSite=54; ConfidenceScore=5.03e-01
MVKKRFLQEIKVGQAVKRRDPTNGVPVPSLASPTTRIAPEPCQSPAPLVSGEPSAAGTSAAAQLAVGKTQAAHPISAVQPRSGGPDSTHPDLILAVRQRSSGPGPLPPHPVPLPVRPHLPVARAPALSARSRLPVARARAVRPALPVSRSRRRAPARPPAGSNPGRRSEIQRL

SEQ ID NO: 64719 - protein, 58 aa, Zea mays
  Coding DNA Sequence Number=SeqID_21344
SETTDQAKDGGKKSFEVPSAREKVKEAEEPKAKGEEEGLQSQGMLEPRNVNLDQVKQT

SEQ ID NO: 64720 - protein, 52 aa, Zea mays
  Coding DNA Sequence Number=SeqID_21345
MAPVPGAASVVAMRLMVLGIGSGNGCQHCNHCSGEDEAVEGDFHEFEDYDEF

SEQ ID NO: 64721 - protein, 100 aa, Zea mays
  Coding DNA Sequence Number=SeqID_21346
MQHGSSSLISCEKQMIRIEFLNLASDRTCTHHNRNGRPRLRSHKGQSLLPGSIRLCIKPGLAFQSCGRQILWCRLWCWIRGYLLSNTLLRRHNNLGGRLG

SEQ ID NO: 64722 - protein, 105 aa, Zea mays
  Coding DNA Sequence Number=SeqID_21347
MRLILWYLFLTFGGVRDSKNCNLADGEYVLVPEQGAAQEVAPDPAPEPAPEDLPATALEGKPRNPVEMNTSSLEDMVAGVTWPSILPPGWTVEWDPTSVEEEHEE

SEQ ID NO: 64723 - protein, 57 aa, Zea mays
  Coding DNA Sequence Number=SeqID_21348
MATAVVSARSAACTLAWGGRQLRAVQSKWAGVGCVDGRGPQRKEDLGMNGPGCVPVQ

SEQ ID NO: 64724 - protein, 160 aa, Zea mays
  Coding DNA Sequence Number=SeqID_21349
MGNDPIGDLEAKVEQLRSELRHRNRAWAQDSQRIAELSADVSRLQYEISERDSAIDWVVNSCSITWDREAKALARVAELSAAHDSLQVYCNTLHEDVHVLYARLHPDMPSDAAAMGARPSGTASEEPDGELDLFRPPPSMNLADERSPAAGNEATKDDED

SEQ ID NO: 64725 - protein, 89 aa, Zea mays
  Coding DNA Sequence Number=SeqID_21350
  Subcellular localization annotation: CTP_CleavageSite=26; ConfidenceScore=5.01e-01
MVALGDGASVSDGVRRRDRGPCFIARGMRISESRSRRQVRTLLRCVIENMGTSCFSYLVNLVLGSDLGTISHGVRCHYLSWDNNCGLMG

SEQ ID NO: 64726 - protein, 58 aa, Zea mays
  Coding DNA Sequence Number=SeqID_21351
MESAESGQPVQSNRLDRILSPDECPSGQGVTLHKIVTAIGSGVSVAKAQCLWKAVVGP

SEQ ID NO: 64727 - protein, 78 aa, Zea mays
  Coding DNA Sequence Number=SeqID_21352
MPSGSYCTESLTGAENPLGARGGGKGGGAYRRRDSSGEASREVGEVTAVMSRTCPSGRGVTLHKIVTAIGGGVSVAKA

SEQ ID NO: 64728 - protein, 148 aa, Zea mays
  Coding DNA Sequence Number=SeqID_21353
MAQRLTRFTFTGERKKSNEVSGEASRADIEDWGWLGRAGHSARSSGGLAGGGASCSGESPANMGLGGAVSVRGVWSKPLGCFIGAARVRAWVGRRSAWARGVGCPGRALARQQGSNTWTFASALVQAPIGRKSLRIWARSSCRICSSD

SEQ ID NO: 64729 - protein, 55 aa, Zea mays
  Coding DNA Sequence Number=SeqID_21354
MDRPTPTTSHDDPYLDVTAVTSLTSLDASSELSRRRGSRKHPYGHEFRKSPKNDQ

SEQ ID NO: 64730 - protein, 32 aa, Zea mays
  Coding DNA Sequence Number=SeqID_21355
MGYEEGELELEEGEAASGGGRELVIPDALTCI

SEQ ID NO: 64731 - protein, 57 aa, Zea mays
  Coding DNA Sequence Number=SeqID_21356
  Subcellular localization annotation: CTP_CleavageSite=41; ConfidenceScore=5.00e-01
MAGGIELAGAKESGWPVRRYGARKSGLSPCPNPRQIQGFVVSRARVPMPSSGTRQRG

SEQ ID NO: 64732 - protein, 64 aa, Zea mays
  Coding DNA Sequence Number=SeqID_21357
MAEALAAMAGGIELAGAKESGWPVRRYGARKSGLSPCPNPRQIQGFVVSRARVPMPSSGTRQRG

SEQ ID NO: 64733 - protein, 1087 aa, Zea mays
  Coding DNA Sequence Number=SeqID_21358
  Gene Ontology: Mol. function=zinc ion binding
  Homolog annotation: Hit_ID=A7PTW9; Match level="QueryCoverage=65%, HitCoverage=50%, E-value=2e-55, Identity=27%"; Hit description =Chromosome chr7 scaffold_31, whole genome shotgun sequence
  Pfam annotation: Domain name=zf-CW; Domain location=370-418; Score =55.5; E_value=1.8e-13; Accession=PF07496.6; Description=CW-type Zinc Finger
MRLLGLWCLKFCLMNLHIMTSHYIPGGHLLSPLKENVLELKQKPKVMVKQEAPEFQVKVELHGDWGCTTSATLDNKDKCTKEIKSDEKKDKIPIFRSSKIRVNKPSAVNKGTKPLQDVLDDTGSNLLPTIVNTEHTVEEPAKFTGAISDKMKGSKDGASKGHISGKNKNIKEEPSLDHGFSRKNRCDSDEYNGKPHASSCQLQNIPNKTSPLERDKGKVLHMEDEPSQYKSKENGDLFSADSMAVMVGNVDRNSLGMMKGKKKVSSLQATLSGKFKFKAKKQLNDNIDRKKYGEDEHYALDHRIGLDNSYQIDKSVRLEKKTISSGEIDNKSDVGNDGGVNISAMFDEKSDVLPLASASLPAPEPILINEQWVCCDKCENWRLLPYGMNPDILPKKWRCSMQSWLPGMNSCKITEDETTKALRALYMVPAPENNIKDGGHDNAMSGKGTAIAPTFQGNTQSISSLGKLKGSLDGANVANTLESAGEIVGKDQSRRMRSSVGVDHDNLRASKKMKKESNGPVMKHQPSEFEISKSSPASETLKNIQKRSCISPGMGKYGLSSSGKHSHGEDKDFSAVVIKTSDTENSGPRDSSIKKRKLKQRQSSQHFRDPHCSNNDTNGITKQNITEINAVKKKSRSELNLLKTDRIATDSRGTVGGVDDRISTDKECLSEQLQENTHFQHPSLVEGTTKREIRHAQTPIAATSSSSKMSNSNKYIAHFQETRASPVESVSSSPLRSSDKNPLGRHRSSSWTITENVHSQESGKINSSCSNRNYDLGSDCDKAKARISGCFNGDVSHHVQKDRDFLKDKQDVMNACLINKGSGFGARNFQLSPEHKVNPDVLSSHDNDGHKQPTVRQNGKTQPHFGSNQGDHANLTYGHIKPGKGNIPNKDQKTNPSAVKASKQQPSLNNASNGDASYKARQIEKAVIENLDTRKHITLNGDASNLTSASVLLKEARDLKHLSKRLKEKGDDFESTSMCFEAGLKFLHVASLWETPNIDSSNQGVSIQAMKLYSETGILFGFCAHEFERLKKMANAALAYKCVEVAYMKAAFFRSPGVIKDRHALHAASLMVAPGFFFTHALAHFYC

SEQ ID NO: 64734 - protein, 213 aa, Zea mays
  Coding DNA Sequence Number=SeqID_21359
MSGASATSSVPLEIDRWSSDFWARLDDNFEAEEFSASPPGAPDTVRCTTGQSATHPIGLFPAEREDDPMWKDRVEHAKDIWAIYPGQTTHLTVRCMNALYRLQVMRGEAMSHLMALLEATKITLDNREELVVDLSQEMVEKDLQVEQLSTDIQELEELVGTRENTIEVLEDQLLNTQQQLAEANEHLDMHHQEIQDQEANEDVDIEGGDEPAS

SEQ ID NO: 64735 - protein, 97 aa, Zea mays
  Coding DNA Sequence Number=SeqID_21360
MSNKCARMKWHISLSEVWMYIRAVERSGLEGSDESEISSDEEDSSDSSEVGSGGDGDNEGDDGDGGDGSDGDGGRGNGGSGKGDGSSGKASGKAPLA

SEQ ID NO: 64736 - protein, 75 aa, Zea mays
  Coding DNA Sequence Number=SeqID_21361
MKNELKMLQHQSSDGDVARMESARLSSELEKLNAKSTEDVAKELRVCTASFVEGDLTLENNLLAGSKGNSAVLQR

SEQ ID NO: 64737 - protein, 126 aa, Zea mays
  Coding DNA Sequence Number=SeqID_21362
MTIAVVGWRRRRSCLEARGRGTTGLPQWDRDATGWLLPYAKCLHGSLRQALRQVLHRVSYWTKPSKYSQEETPSWTKNPEEKEELQTSKKHAVGKKTTRGHHAGAAAQPRALLTRGSLEETLSIQL

SEQ ID NO: 64738 - protein, 359 aa, Zea mays
  Coding DNA Sequence Number=SeqID_21363
MLNDAIQTCTDRPEWKNNSHLCSQPKGSSVPSYFGNPSFCAPGGGGPCLKSAPLEVLEESLKESNPGLRGATRKSLTARLEALSHLRFGLVGFEMKTRARSSSANSRCAAAYTARWWSWSCWRPCNASARHARVQEGDRVLTGKEDVRAITKEARSVVEPHTNKIKRVTMYHCIKKMKGVKSLGRIAQESNQKQQAKITSADDEDAIAIFTTFQPRQGLAFWHVNLSPISNASMGMQENNPSQTSLGEYGMTEWAAVDLAEYICDGSVGFRVRPLSDSDRVKVKKALRIVNVERTTGCENSSRPMMNNTLLQRHRRCRSGQHYGPRLQAKHIMAFLALASIRSFMRPHWWVWVTRTHKN

SEQ ID NO: 64739 - protein, 110 aa, Zea mays
  Coding DNA Sequence Number=SeqID_21364
  Gene Ontology: Mol. function=kinase activity; Cellular component =ornithine carbamoyltransferase complex; Biological process=amino acid metabolic process
  Homolog annotation: Hit_ID=Q6QP54; Match level="QueryCoverage=79%, HitCoverage=30%, E-value=1e-28, Identity=77%"; Hit description =Putative kinase
  Subcellular localization annotation: CTP_CleavageSite=40; ConfidenceScore=5.54e-01
MEPGGGTAVGAVGSLLTSSCFPSQMGRRSCSLRPESARGRVMMAPPVDVAGLRPRLGDVEAPPKPRSSPSFVAEAESEPLGRARRRSSAEARAESEPWGRAKRSSSSSGI

SEQ ID NO: 64740 - protein, 87 aa, Zea mays
  Coding DNA Sequence Number=SeqID_21365
MAVIGRLCAFTHDAVMNECVAPISNNTFAIWESTGNIPTIMSGEDEVPADSASGTDLLLTDCFGDSDTGAEDTAFGTATTEVDAGSA

SEQ ID NO: 64741 - protein, 171 aa, Zea mays
  Coding DNA Sequence Number=SeqID_21366
  Gene Ontology: Mol. function=kinase activity; Cellular component =ornithine carbamoyltransferase complex; Biological process=amino acid metabolic process
  Homolog annotation: Hit_ID=Q6QP54; Match level="QueryCoverage=75%, HitCoverage=51%, E-value=5e-24, Identity=46%"; Hit description =Putative kinase
  Subcellular localization annotation: CTP_CleavageSite=89; ConfidenceScore=5.07e-01
MEPGGGTAVGAVESLLTSFFASVRGLRAAAVIGYAGRHHCLSGGASQMGHRSRSLRPESARGRVMMAPPVDVAGLRPRLGDVEAPPRPRSSLPSVVEVESEPLGRARRSSSSSRAEPKSEPWVGRSGLHRLPGLSPSPSPGSGGAEFAVFRDLARVRALGRAERSSPSSGT

SEQ ID NO: 64742 - protein, 358 aa, Zea mays
  Coding DNA Sequence Number=SeqID_21367
  Homolog annotation: Hit_ID=Q6QP51; Match level="QueryCoverage=40%, HitCoverage=65%, E-value=9e-08, Identity=33%"; Hit description =Putative growth-regulating factor 1
  Subcellular localization annotation: CTP_CleavageSite=46; ConfidenceScore=5.05e-01
MTVAGGQEQQSRRQPSSRPIQGQRENPLSRREDNAPVFRPRTARACAAAAPPTTRPVALTPRWDRRRLWQEKQATLRLRHNNRLKKGWPPGRVRQPPQIAWALPPLLVRGSKAGPSKGFHGRLRLFGLRAHYSSGVRRLAPEGGNNLVTESHQREASSPRTPSPGDRVRQITRSSPETPCLAPIEGNMALSPLLLAERRRRGRLGGCSRKPGSGRTVDSVNIPARELGTRPYTRATASSPEGTTRPAKALRKALRPRRSETTPPRPRGLHPAGALARTHRNKTQPRKAGPLAKKCDDSLQASANTPFEARGLLSGTIIMGTLKAPNSQLEDSAACATPTAVPLDRVRLTDSQAQPKAS

SEQ ID NO: 64743 - protein, 67 aa, Zea mays
  Coding DNA Sequence Number=SeqID_21368
  Subcellular localization annotation: CTP_CleavageSite=55; ConfidenceScore=5.10e-01
MEPGGGTAVGAVESLLTSSCFRKGAESRRRHRVGRCGSSSEAEVESVFRGRGRVRAPGSGEAEFVVF

SEQ ID NO: 64744 - protein, 166 aa, Zea mays
  Coding DNA Sequence Number=SeqID_21369
  Subcellular localization annotation: CTP_CleavageSite=42; ConfidenceScore=5.48e-01
MTKSRAREDGFNSSTTNASTREVRWTKSECAAVTTSRRMSVNASQRQARVMRETKTELSSTPDETLRSTWHDVQLRKHKGRNAAAMGDAVEELGRKKIKQSRRLEERRLGKKQLRCWGPEAAERGIRASARECGKQYAASWDQAPAMGAWTGAASESSNQEPSTGR

SEQ ID NO: 64745 - protein, 110 aa, Zea mays
  Coding DNA Sequence Number=SeqID_21370
MNEQRDGDQGVPAGREAWRAHKAQKLGTAMDWEIGSAPGSSEQGRRGPSAGRRAERATQEKLERAGKGISSVKKNLEIGRDELGEAGLGLGLSPGIRRTPLRPTQGSDSG

SEQ ID NO: 64746 - protein, 484 aa, Zea mays
  Coding DNA Sequence Number=SeqID_21371
  Pfam annotation: Domain name=TolA; Domain location=74-356; Score= -150.1; E_value=0.056; Accession=PF06519.2; Description=TolA protein
MDKDHQDATRKRRTFTRVWDPGHEVKKAWGVAKSAAPGGSKPPPAAKLAVPALANLHRVRGLSLSARASRLRLSPRRSQGSDAGQLVVVLALVAASPAESATEAKGASQDPWSKFCASGEITSAAAVKDVAGSVAQQLKHAAAFADHVASGALTSEFAAERQRLEGRIERLRAQDTKAVPDKSAAENKSRRLMEKLAAAEAEKEDLSRQLAAERKDANRACAEAQAAQAEAKLARAEASLARQRAEEAETSHNSLRDRLDKAEASTRAELDRTHAQLVDAYRELGARTAPFDASGKEVGLRFLGWLQKELEVLPTIVTGLMSFASLITCEGDVNALSREGCEHFEVFDRSGEDFEHEIFQSEDPVPKRSARALYDRMWGPHGRETVWERSDWAMERMVHDEEVEDLGDLDSTLPEASCAKGGDWGELAPPSNVGEGPLVTPALTCAGDDPVSAAVPTGGDTSVVAGEPNAEDPAASAGPWQVAG

SEQ ID NO: 64747 - protein, 160 aa, Zea mays
  Coding DNA Sequence Number=SeqID_21372
MLVDYTTVLDGPSVSVEGPTQQGVESVVEVTLASGVTSDGSSDLSLRLWLLRGRGSNCHRCHCHLRLHRGLLQQLGCPVVVQGASLAEVQGKAASQTPPPAEARGKSPAAPAPGIGAPAPCAGDDAVSPGDWTDLAPCDAVDAPPGEKAKRGSRTYVQCT

SEQ ID NO: 64748 - protein, 214 aa, Zea mays
  Coding DNA Sequence Number=SeqID_21373
MGTIGHLDLHTGRCQRFIYNYTKSTVRNTVDYSGQEKLFGKTGQARTVRALAADRPRHEDVTRPEPMQKSKSVLWTVRRKSKDRPSPCADRPASGTDRPVVNEEDDFSFCNATTVVCRTVTVLAKASIVLARSTVVGADMAEGAEVASVGGGDVGGRGKGATATVGWGSCRFRGAAAAVGCGGGAEEDEEHLEPDTRLSWAEYPQTAGSRLRSS

SEQ ID NO: 64749 - protein, 270 aa, Zea mays
  Coding DNA Sequence Number=SeqID_21374
  Homolog annotation: Hit_ID=A3C0E4; Match level="QueryCoverage=78%, HitCoverage=53%, E-value=4e-64, Identity=62%"; Hit description =Putative uncharacterized protein
MPQRSEAGTAGEGDEEQRLRAALRHLQAEAGVLERLVYKHRNQHRGAAYFQYLLKVRRDLKLLLGAGLAEVLNAVFPVLACRKPANTILVPNKQSKKKPVANHSHHQRLLGVARLLSQMSEPVMKAAMYPFSYACYIMVLFIFLASAVGTDPLVLISQMLLDVVSIYNKVTDLTERKQAVKISISGVQAFREYYPSMNDACTVLECVWIKDKFVLHEKVKDISQETQVENQKCCGPESTVQYETIALISEELADMLMNHENPWCFVADLV

SEQ ID NO: 64750 - protein, 153 aa, Zea mays
  Coding DNA Sequence Number=SeqID_21375
MSHKRKFASDRSKKSGPESFSGVKEKRQVSDKKRKKKWQFKLRRDWEAEKKGDKRRKCTSQVLSLMSDISGRETEAYYYLAECYVNPAIMKAQWQLILKFTFGLESWRQGVMEAERMHGCLFSVIIVHFSNRGLDIPNKGLKDLKWCKGFHDN

SEQ ID NO: 64751 - protein, 272 aa, Zea mays
  Coding DNA Sequence Number=SeqID_21376
  Gene Ontology: Mol. function=protein serine/threonine kinase activity; Cellular component=cytoplasm; Biological process=protein amino acid phosphorylation
  Homolog annotation: Hit_ID=A2X946; Match level="QueryCoverage=73%, HitCoverage=34%, E-value=1e-99, Identity=88%"; Hit description =Putative uncharacterized protein
  Pfam annotation: Domain name=Pkinase; Domain location=57-251; Score =51.4; E_value=3e-12; Accession=PF00069.16; Description=Protein kinase domain
  Pfam annotation: Domain name=Pkinase_Tyr; Domain location=57-251; Score=-95.3; E_value=1.4e-06; Accession=PF07714.8; Description =Protein tyrosine kinase
  Pfam module annotation: Pfam domain module=Pkinase::Pkinase_Tyr; Domain location=57-251::57-251
MSGKPNTLLKNNRSRWGDKPEKMRLLVHTKPHKANDSRWEAIQTARARDGILGPSHFRLLKRLGSGDIGSVYLSELSGTASYFAMKVMDKASLAGRKKLLRAQTEKEILQCLDHPFLPTLYTHLETDKFSCLVMEFCPGGDLHTLRQRQPGKHFSEQAVKFYIAEVLLALEYLHTLGIIYRDLKPENVLVREDGHIMLSDFDLSLRCAVSPTLIRSSNPDAELQKRSGRAAKATVLSQPVLSRPASLNRRVQPQPPASAHACSPPSPRPRET

SEQ ID NO: 64752 - protein, 147 aa, Zea mays
  Coding DNA Sequence Number=SeqID_21377
  Gene Ontology: Mol. function=dihydroorotate dehydrogenase activity; Cellular component=cytoplasm; Biological process='de novo' pyrimidine base biosynthetic process
  Homolog annotation: Hit_ID=A2X9D2; Match level="QueryCoverage=97%, HitCoverage=34%, E-value=2e-42, Identity=64%"; Hit description =Putative uncharacterized protein
MESLTLRASTAASPLQRRRLLPGRQHATYVRATASAGEPDLSVRVNGLQMPNPTAPDNVEDTLTVITSTPVSLDAEKVINVTPRYAKLRAEPNGAAMGRIIGWQNIELISDRPLETMLNEFKQLKKEYPDRILIGSNMEEYNKANAR

SEQ ID NO: 64753 - protein, 506 aa, Zea mays
  Coding DNA Sequence Number=SeqID_21378
  Gene Ontology: Mol. function=methyltransferase activity; Cellular component=nucleus; Biological process=positive regulation of cell proliferation
  Homolog annotation: Hit_ID=Q6Z5K9; Match level="QueryCoverage=56%, HitCoverage=45%, E-value=1e-141, Identity=84%"; Hit description =Putative proliferating cell nuclear protein P120
  Pfam annotation: Domain name=Nol1_Nop2_Fmu; Domain location=323-506; Score=87.9; E_value=3.3e-23; Accession=PF01189.8; Description =NOL1NOP2sun family
MEWGMLSADGGTTRGWGWQVTDVYKAVIPGMASVGELKHPRLGFKDFLLRSPGPHSHPAQLQTVSMAKKGAKRKQQPPPAAPTAKKGSKAVPPPKAAKRAPKKQELLESSDDSDTEQQLLEEASHLDVPSDSDAEELSGSDAEADELSGSDADSDGSSSSGDDVEDEEEEEEGDGSDDDPLADDFLAGSDEGSEGGDSGLESDESDDLEAKSRAIDEQKIKAEEDAEEELQTNIRSESDEFRLPTAEELEEEAHRPPNLPNLKRRISEIVRVLSNFSKLRQKDVPRKDYIEQLKTDIISYYGYNDFLVEALIEMFPAVELVELLEAFEKRPPECLRTNTLKTRRRDLAAALIPRGFNLDPIGKWSKKQGASSFLPVMALAPQEKERIVDMAAAPGGKTTYIGALMKNTGIIYANEFNEKRLHGLLGNIHRMGVTNTIVCNYDGKELPKVLGMNSVDRVLLDAPCTGTGTIWKDLQIKTSKDIEDIRSCAFVQKVFGYIDSQIADSV

SEQ ID NO: 64754 - protein, 352 aa, Zea mays
  Coding DNA Sequence Number=SeqID_21379
  Gene Ontology: Mol. function=sugar:hydrogen symporter activity; Cellular component=integral to membrane; Biological process=response to nematode
  Homolog annotation: Hit_ID=A2X943; Match level="QueryCoverage=92%, HitCoverage=94%, E-value=1e-150, Identity=78%"; Hit description =Putative uncharacterized protein
  Pfam annotation: Domain name=TPT; Domain location=174-309; Score= -23.9; E_value=0.015; Accession=PF03151.7; Description=Triose -phosphate Transporter family
MTKLPWWRADASELVAVTAMGVWEAVLAGGGRRFIKRKDSDAGETGRALEELRSSLYNEMHSAEGAKRQQQRFCGPSVALTFNFAVAVGIIMANKMVMGTVGFKFPIALSLIHYAVAFVLMATLKTLSLLPVAPPSKSTPFSSIFALGAVMSLSTGLANYRLHIFSVFLLFSVGFYQMAKIAVTPTIVVAEFMLFQKKVSSKKAVTLAVVSFGVAVATVTDLEFNFFGACVALAWIVPSAVNKILWSSLQQSGNWTALAATSALSHVVLGQFKTIVIMLSGYLIFGSDPGITSVCGAVLALGGMSFYTYLGLKKDPATSGKKAPSRQNSFMARPKVAADDSDDADSEQDDTV

SEQ ID NO: 64755 - protein, 457 aa, Zea mays
  Coding DNA Sequence Number=SeqID_21380
  Gene Ontology: Mol. function=zinc ion binding; Cellular component =intracellular
  Homolog annotation: Hit_ID=O82118; Match level="QueryCoverage=82%, HitCoverage=92%, E-value=1e-136, Identity=65%"; Hit description=Zinc finger protein
  Pfam annotation: Domain name=CCT; Domain location=400-444; Score =79.0; E_value=1.6e-20; Accession=PF06203.5; Description=CCT motif
  Pfam annotation: Domain name=zf-B_box; Domain location=93-140; Score =36.8; E_value=7.6e-08; Accession=PF00643.15; Description=B-box zinc finger
  Pfam module annotation: Pfam domain module=CCT::zf-B_box; Domain location=400-444::93-140
MEVKRGFNDGPAPGKRKKGSAAFFSEGPARPHHIGDEYRIGFHWIQLLSRVLEGGFDTSSEQPVEFLKYCPGSWLLSVISVGNKANALSRRHTRTLLCDRCGSQPASVRCLEDNASLCQNCDWNGHDAESGASGHKRQAINCYSGCPSSAELSRIWSFITDIPTVAAEPDYEDGLSMMTIDGSDVTNRHDTSDDKRLLEIANTTLMSDPPSADKLKSPTGSSSGDGFDVMTLATDQPAGPVSATPKVPNARDDDKFNDGMYEDLCVDDADLTFEDYEELFGTSHIRTEELFDDAGIDGYFELKETPPFYFNEQPKAMQIECGNVVSADCAMSNPGARADSSLCIPVRQVRSSISHSLSGLTGESSAGDHHDCGVSPMLLMGEPPWHSPGGPEGSVAGGSRDSALTRYKEKKKRRKFDKKIRYASRKARADVRKRVKGRFIKAGEAYDYDPLSQTRSY

SEQ ID NO: 64756 - protein, 82 aa, Zea mays
  Coding DNA Sequence Number=SeqID_21381
MAVPPREVRHERRCYPCAASQPCHRVRASLSNEKLRSPGNTQHTSTEPPCKCLNGLAKARRERHCNCRLCCLLLRGFVRGVI

SEQ ID NO: 64757 - protein, 430 aa, Zea mays
  Coding DNA Sequence Number=SeqID_21382
  Gene Ontology: Mol. function=drug transporter activity; Cellular component=membrane; Biological process=multidrug transport
  Homolog annotation: Hit_ID=Q8S6Q1; Match level="QueryCoverage=98%, HitCoverage=83%, E-value=1e-154, Identity=67%"; Hit description =Putative membrane protein
  Pfam annotation: Domain name=MatE; Domain location=282-430; Score =45.0; E_value=2.7e-10; Accession=PF01554.9; Description=MatE
MEGGGEHHHPLSVFLRDARLAFRWDELGQEIMRIAVPGALALMADPVASLVDTAFIGHIGPVELGAVGVSIAVFNQVSRIAVFPLVSVTTSFVAEEDAMSNGRDNDKIHQQNERNVSVSEMDELIPPEGASASTSISSFETDSCEVSVEQKRKNIPSVSTALLLGGVLGLLETLLLVLSAKPILGYMGVKPVAKTTNAKNLESILVLAVLFSMAGDAINIVLDPIFMFVFQYGVSGAAIAHVISQYFIASILLWRLRLHVDLLPPSFKHLQFGRFLKNGFLLLARVIAATCCVTLSASMAARLGSTPMAAFQICLQTWLACSLLADGLAFAGQAILASAFARKDYPKATATASRILQLALVLGLLLSILLGVGLRIGSRLFTSDQGVLHHIYIGIPFVCLTQPINALAFVFDGINYGASDFGYAAYSMAS

SEQ ID NO: 64758 - protein, 96 aa, Zea mays
  Coding DNA Sequence Number=SeqID_21383
MDSENAKLRRALAHLIRVVEQRCADIVDVVHGAFQPVSTPVLNEMNRALIQIEDLTKDLDHLALEKDWEMEHMVSHPDLRNKARCISYMRQRRQHI

SEQ ID NO: 64759 - protein, 121 aa, Zea mays
  Coding DNA Sequence Number=SeqID_21384
MDLNIEIRICRTPDNSVGDYVAAVLKRMQPWGAGFTDEDHTKGCIPCLLQLHVGPHGARGHHSSGRPAPMQKVKPSGGGYDDDGHAADRVVCPLQAYNRAWVLSMIEPTIAAMERLPCGGR

SEQ ID NO: 64760 - protein, 155 aa, Zea mays
  Coding DNA Sequence Number=SeqID_21385
  Subcellular localization annotation: CTP_CleavageSite=89; ConfidenceScore=5.13e-01
MPYYPAQMMRQQEKNKASQQEVAITVVVGENRQLPMERMPRQRNASTNNPSRRRSSPCLTMPTKAPTRINGAATTLFPAWTVVQRENPRGGEERRRARVWAKLAGIHGGHRARSVAPASESGEEDQWVPPGELNTDDIVGYDDGRDYSTDNTYPY

SEQ ID NO: 64761 - protein, 236 aa, Zea mays
  Coding DNA Sequence Number=SeqID_21386
MEIISGEDLRVDCFLKSTQSSGATPIGCTSGPDGHNEQTPALKVPLQTELRFHLHRYEQPPTIGGPAEQQKADGWLAAARSSSGDNDFCSERPNSSSDDLRADAAAIKPSPTSPLKGRGRAEGRRVGGQSTGGTDYLVGGETSSGCHGGRWHREQRRSRSDRRAGHAAAASATNGERPPPRSLREGAGRCLREDRPQLGALPSPALMMNILEAEGGAEAAARLASPHPGAGGHRLG

SEQ ID NO: 64762 - protein, 325 aa, Zea mays
  Coding DNA Sequence Number=SeqID_21387
MGNTRNPSALSLEERNFMENWYLSAIVRLQGFSSGSPAASPRRWSPKTVTTSSWVGRSKPGCGLCPSLSFKDVHHQCWGGDCRVSGSPVRAASALLPVPPSAVAAGRGFSADEIVGAARGLTSNSTTFCSSSPLEWGRGRGLYGSSIRPEVIAAAVRPLGAEVVVAAAGASGGEPSVGLLLLRRPSNRGGLNPRPLFDEPKPEAAVSAWTEAELAQNEDFIGWSLAGPSTGGTDAGVELPRPRAGLMSSGDSWLRLRSGRPSYPPTALPSEARSDFAEGVVDAEGAAAPPPSRSRMVSTTVEKWFVPIARRTVDKIYRFGPLRDA

SEQ ID NO: 64763 - protein, 125 aa, Zea mays
  Coding DNA Sequence Number=SeqID_21388
  Homolog annotation: Hit_ID=Q8H6I2; Match level="QueryCoverage=100%, HitCoverage=51%, E-value=2e-56, Identity=83%"; Hit description =Putative MURBZC
MMNKKLAHALKYDTSQMSDTAKKLQDTASFCYTDEDVVDGFMMTQVARSMDELAEILEVTSIDCQVLMMDPTAILEAGYGSEDSAVWEDVFRDREIMNQPLEAETLGEHCAKWGLSFNEIWDRSM

SEQ ID NO: 64764 - protein, 210 aa, Zea mays
  Coding DNA Sequence Number=SeqID_21389
  Subcellular localization annotation: CTP_CleavageSite=30; ConfidenceScore=5.16e-01
MAPPVTWSVRALGRARRRLLGGRGRVCLPRLRSGPSPWVGRGGYRRLRPGPSPSPEVGRGGVRRLSGPRPRPSPSPGVGRGGVRRLPGPRPSPSPRVGRGGASYGARGRTWLLSASLCRVAQQLERRRRRCPLVRPARDRIRCQAILALNAPAIRSVVVAIWPRLLLGEDWALSEPKLCADGGYQLRLGVLGVPLIYGPPTVAPEPRREC

SEQ ID NO: 64765 - protein, 148 aa, Zea mays
  Coding DNA Sequence Number=SeqID_21390
EGWNDEQVILGKRASTDTLDLEDPMTRNSSKKVKNDKHDLKTAISHNDMDRNIIHSQKVLIQGEGSGKEDAENKNRDLVEGVEKQDKEAFEDSEDDLYSSQELDEFIKSMDENTHETPNDGIGEKGVESQDEDLLVAKNKKGKNRISS

SEQ ID NO: 64766 - protein, 96 aa, Zea mays
  Coding DNA Sequence Number=SeqID_21391
MRRDDDGARPYARGSGVSSVGTTPSRCTYSNDHVYRNVNGYGYPMGTRYPWWVWVWHNFVPMMGSGYEYGSRDGNGYPKPETRWAKTLLGHGYGGF

SEQ ID NO: 64767 - protein, 488 aa, Zea mays
  Coding DNA Sequence Number=SeqID_21392
  Gene Ontology: Mol. function=peroxidase activity; Cellular component =intracellular; Biological process=RNA processing
  Homolog annotation: Hit_ID=A2Y583; Match level="QueryCoverage=90%, HitCoverage=90%, E-value=1e-133, Identity=61%"; Hit description =Putative uncharacterized protein
  Pfam annotation: Domain name=TPR_2; Domain location=404-438; Score =10.5; E_value=1.5; Accession=PF07719.8; Description=Tetratricopeptide repeat
  Pfam annotation: Domain name=TPR_2; Domain location=439-473; Score =10.9; E_value=1.3; Accession=PF07719.8; Description=Tetratricopeptide repeat
  Pfam module annotation: Pfam domain module=TPR_2::TPR_2; Domain location=404-438::439-473
  Subcellular localization annotation: CTP_CleavageSite=69; ConfidenceScore=5.91e-01
MGFQVAAVAPPPCARSSSALSSPSTSSRPLPAFLGGGGGCAGLARSRAPVNWGTGVMVRRPRPARTPARCALSASLDGMGGGDAEFMKRIEELAAAAGVQPAGPAGCGWPASVELSASNVGLPLSLRMLKRKKQQQQAQLHAVARPSRWDDGLLGSAGESVGRAFSSMVLIVRELQSFALQQMRDALLCDDLQGVLARVQGEMHDSFVWLFQHIFAGTPAFMVSLMLLLANFTVQSMGRSVAAAAATIPPTAPAVALVNAQRPEPSRPRFDAASVKTFSVDRMASVGGDIGGGGKTPPVAGATGDGRSDESLYRLSRVSPQQPSAPPVAEVAQDAADADEQAIWEMMLAEALKASPRTEELSDPDVLRSLVAPVEAELETEDHAEHTLTEQRYEQAVAAEPNNPLILANFAQFLYLVQNDHDRAEHYFERAVRAEPADSEALSRYATFLWKARNDLAGAEDTYQEAIAADPGNAHHAAAYAHFLWNTG

SEQ ID NO: 64768 - protein, 55 aa, Zea mays
  Coding DNA Sequence Number=SeqID_21393
MAVAPESNLGFVGAPALSWGIGRTVGDDLSQILFFASLLIGYLFQLLDFVPVCLL

SEQ ID NO: 64769 - protein, 134 aa, Zea mays
  Coding DNA Sequence Number=SeqID_21394
MFGAPEDPDFKLVTFGKFQRQLRYNSPDCPVHIGHVRCSKEEWPPELASLGNSSQLLRYNSPDCPRSGTPMLAHRTIYSACPVRHRTSRRAQKSELQQSEPNGFGDVAVAPDMSDKEGKKDGGSWKPSHQKDGK

SEQ ID NO: 64770 - protein, 246 aa, Zea mays
  Coding DNA Sequence Number=SeqID_21395
MPPFTNRTRDTALLAHGGAIGEVLTGCLGAENVRRAIGADAGESSPVQAQHLTPQAPRLSSVCSRDRTPTKVGKPEWLATGTRQSALRVTCAREGRFGPRGGKQLWAEMLICGPGTLKTPNSQLVTPISIKLLRPDGARTRAKSRKTANSAPPDSGLGLGLSPGRRRTPLRPTPGLGLGLSPGTRRTPLRPTQGSDWGSAPEDDELRFDRPQGSDSALASADDLRLARPRGSDSTSASKEPPHRPT

SEQ ID NO: 64771 - protein, 80 aa, Zea mays
  Coding DNA Sequence Number=SeqID_21396
MAALSPLTEARERQQGPNRSDSCPSARLHRSSDGHDITPAECQNLSGCHDGMSVRIESGGGAIEREFDVQLTRGYINNTS

SEQ ID NO: 64772 - protein, 135 aa, Zea mays
  Coding DNA Sequence Number=SeqID_21397
MAAPPTTRPVALTPRRDRWRLWQEKRATLHLRHNDRVSKGTGKGGYPEKDPSPGRNQAPSLPTDQRFEGWPPEGFDSRLRSRGPYTHYWSKVRRPAPRKGSTAASGYSGSAPITDQGFEGWPPKGSQPPQTPSEG

SEQ ID NO: 64773 - protein, 187 aa, Zea mays
  Coding DNA Sequence Number=SeqID_21398
  Gene Ontology: Mol. function=acyltransferase activity; Biological process=metabolic process
  Homolog annotation: Hit_ID=O80437; Match level="QueryCoverage=19%, HitCoverage=7%, E-value=8e-07, Identity=62%"; Hit description =Glycerol-3-phosphate acyltransferase 6
MTVEKDDLLVAHRTRILWLLGAGTLAASYSIKFKLKLSTAEKRTASRPKVHHHFTASESFGLCKRDLKAQRRDLTKGPHEMSQPNMPSGKRPHVEKHEKFSNCHAGLHLHQSPLHLMSVPFVYLTYVTVSETLAVRAFLYVAVAGLEVRDTEGVAPVRAPKVLRRRRPPGGLARLPLVRECYTLNTA

SEQ ID NO: 64774 - protein, 86 aa, Zea mays
  Coding DNA Sequence Number=SeqID_21399
MAKGLTGGETAPAGELVGGEESGLTKAQLINKMGQRVSAGIKEGERPKSGEDDIGSPVKFCWVRELGKLHELPAKLTEGQARLGSD

SEQ ID NO: 64775 - protein, 102 aa, Zea mays
  Coding DNA Sequence Number=SeqID_21400
  Gene Ontology: Mol. function=N-acetyltransferase activity; Biological process=metabolic process
  Homolog annotation: Hit_ID=Q84S80; Match level="QueryCoverage=43%, HitCoverage=15%, E-value=2e-10, Identity=75%"; Hit description=GCN5 -related N-acetyltransferase-like
  Subcellular localization annotation: CTP_CleavageSite=33; ConfidenceScore=5.44e-01
MASPSRLLPPTPPSAAQPRGPRDRLALPRLRCLAAAAASASPTDGAVLLERGGSAAVAVREFVTLDELRAAVRLRVRTFHEYADDSVGTEVDPFSSVFWRAV

SEQ ID NO: 64776 - protein, 107 aa, Zea mays
  Coding DNA Sequence Number=SeqID_21401
MVVTTRSMECCYQVLIRSYQATVVNCNQQVEPASEWCQQAPIKISDFLNNRAKSYARFKEDCNLADGEYILVLEQGVAQEVVQELAPEPAIEDLPAPALEGKPRFYA

SEQ ID NO: 64777 - protein, 53 aa, Zea mays
  Coding DNA Sequence Number=SeqID_21402
MVGTSAVTARRQPGSVEHCALPNMVDGVTWHTTLPSGWTVEWDVAPAGEEHEE

SEQ ID NO: 64778 - protein, 123 aa, Zea mays
  Coding DNA Sequence Number=SeqID_21403
MAEGLTGGETAPAEELVSGEESGLTRAQLINQMGQRASPGIKEGGRPKSGKDDLGSPVKFCRVRELGKLHELLAKLTEGQARLGSDRGGLATVAEARVAMAGGRELAGAKERHLAGEGEHGVR

SEQ ID NO: 64779 - protein, 96 aa, Zea mays
  Coding DNA Sequence Number=SeqID_21404
MEAKSHHQPNQGGTCKNYATSKYEYTNTQLDLPVTALVPTITEMGDHVSGRVRGYVHCQVHSEIRQIQLLNLRKAQLLNDQTYVCQILTQNLDRFS

SEQ ID NO: 64780 - protein, 266 aa, Zea mays
  Coding DNA Sequence Number=SeqID_21405
  Subcellular localization annotation: CTP_CleavageSite=31; ConfidenceScore=5.19e-01
MKLWKETSRSSKTTTSSRRGLAATPSRLPVKAAVIYVSFPHFDLLVRMTLLPHPLQSGWRSLDSESFGYRAEDTIEAIALHGLTTFCGFHPLELSTHPIGLFLVEKEDDPMWKYRVEHAKDIWALYPGQTAHLTVRCMNALYRLQAVRGEAMSHLMALVEATKITLDNREELVVEQMAIQIQELEELVGARENTIEVLEDQLINTQQQLEEANQHLDMHHQEIQDMEANEDVDIEGGVEPEPASSLDTAGSGRPPSPESSVASFVH

SEQ ID NO: 64781 - protein, 142 aa, Zea mays
  Coding DNA Sequence Number=SeqID_21406
  Gene Ontology: Mol. function=nucleic acid binding
  Homolog annotation: Hit_ID=Q75HA0; Match level="QueryCoverage=97%, HitCoverage=41%, E-value=6e-10, Identity=28%"; Hit description =Putative uncharacterized protein OSJNBa0056E06.12
MAQQNDILRQLAQRQSPPQHYGGGDHHQHPPAAAAYQELLSTQPPLFTWAEDPLDADVWLRGNRTVLQYAQAFNDRCQYAGYHVDTDEKKRDRFRRGLSTKLRDRLNTVRANNYNELVNMAISQEDCITARQAEKKRKTPVA

SEQ ID NO: 64782 - protein, 155 aa, Zea mays
  Coding DNA Sequence Number=SeqID_21407
MAVSHTYLCRCRVGSPGQPTTTHPCLLAITEKWALLSRCFFSPSLVTTEQITSWSLLHLRRVGDSAREGAIKLGLRNPSLIPKSNVAEAFCAGQFSHRSDGTTVELLCIVDNFIATLAVVEFGHQGARVRVPVMAATALRAQAPPCLVSDRRRSW

SEQ ID NO: 64783 - protein, 349 aa, Zea mays
  Coding DNA Sequence Number=SeqID_21408
  Homolog annotation: Hit_ID=A2YGC2; Match level="QueryCoverage=50%, HitCoverage=75%, E-value=3e-10, Identity=29%"; Hit description =Putative uncharacterized protein
MAGSDAYRKSFLESVVEHYNRGAVFATAAAQIGATAVAGHLGAQSALLFLTVARMTRPASRSLCVGTVVSTARGRRPSRDRPIRNEVMLARWRSIHCVAQCQISSVACTRSRSADARSRSRSNRTLPPHLTKSLSHSTELSEEPEGWIARPITHDAARGCHFHNALNTLLRWAFDRHTWSIEYCCVVYQHRRGLYPDQWEATCLVRHPDDDLQSAEAFSEHYSITERDTAKEAMQDAARWALSQYCSLFSGVADGLDLKYYPRRSTSSAGGVIVSPVGEGNPRLNKMVNLAAVLNTELDHALDEFGKVRAEVAELRVECVARQYLDGGSPTPIEIQHPYRSPPHGRFDY

SEQ ID NO: 64784 - protein, 202 aa, Zea mays
  Coding DNA Sequence Number=SeqID_21409
MTGWWLGFGAACREGKMGRARVAGPHKPTTEIRSAAEGASGRALIGGATPPRDGEVAGVGAGTCYGGSGVAGIGQKGGERLVELGGGVVATNPRSERGNGGGKVSGGPEDSGEGFRPRGEGLRHDKAWDNFSRGRGTLGTNVGALGRANLAGHRAGAADRHGRTPAKPKLADNKAKLGKLSTGTGVSPRGGAQGGLTRSSMS

SEQ ID NO: 64785 - protein, 69 aa, Zea mays
  Coding DNA Sequence Number=SeqID_21410
MGAPDSPSRPLRADSRCSTGAPDSPVNYSGAALGEPKAEEFKLIHRGAPDQGTLRFPFCSFLLKPNLFF

SEQ ID NO: 64786 - protein, 299 aa, Zea mays
  Coding DNA Sequence Number=SeqID_21411
  Homolog annotation: Hit_ID=A2XFR6; Match level="QueryCoverage=48%, HitCoverage=41%, E-value=9e-26, Identity=45%"; Hit description =Putative uncharacterized protein
MDPGHICYAFGFAPRTGCDISVKEIPVDLPRICVENRVILEDNSEEFLPTPTPLAQSLAFATGSSALAPPAPAVQAPAPRGNDPDDSGDDDEDDEEEEAENVNEEANDEQQDHYMRLWPVTEHYTSMFETGHFLTCCRMFCMRWEPTSDPCDRDFRTLSVHESLTPLSTYAASDNDAARRTLWSLSHTYWQQLHNTKYRHISLCIRGKSQTNIVPGGAGEDRLNTLAGVVAGLNTDLDSATLDLSRVHLELEDAHARITALEAQLDGRNPPKVQVSTMTLSPPRKRIRYGEPGSITRLL

SEQ ID NO: 64787 - protein, 778 aa, Zea mays
  Coding DNA Sequence Number=SeqID_21412
MSSSSSSAANMPLGESSSEGTFSDLAAVELHPGHTVEFGVSRISSVRVQDMQQLGCLRIVLWWKTSVEVVELVPCARNKWGNWYDYWFYVVGGEVEDLPALPMAVMCSHCYVAFPPFEVAEDDSNEGALRCAARMSSGRDLFEEFIGYGVWPLVHGWVLGEVGPRQMPSLGEQLVRSPAFALDLRGRDPAAFVREVEDGAVRIVGRYVPRTEALWSWDIRGSNVRLNRVFKLNRLPYSGYPGDDAAVAVNHRGKKPVALMRTCAALGGRMSSPELRESLARMLRVTGGRWPKNVPIPRATGEDMFTSHMAHDLKIFPYGRNIAAVVSAVMEKDRQDAAQKHRAVVRIADPFREAKKARVGGAKSAAPGSSKQVSAVKPAIPGPRNSSVGAKAAASGAGKPPLGEPAKGRRLPLPPHSNEAAVRVANFDTDICMGDYLVGSDVGQLAVVPPPVVATSSTTAVVAKGASQDPWSAFCASGAIPSSAAAKDVAADFADHVASGALTVEFAAEVERLRAQHVDAVREKSAVESKNRRLTERLAAMEAKKGDLRRQLVEDWREANKAIVDAQAAQADVKLAWAEGSLACQRAEELEARFNSLRNRVDKAEASTRVEVERTHAQFVDAYWELGARTAAFEAPGQEAGLRFLEWLQEELGVLPTIVTGLMSFASLVTCEGAVNALSHEGCGHFEVFDQSDENFECKIFQVKDPVLKQSTGALFDRMWGPHGRETVRERWRMSKRSKDLGKLDSKLPRGPGGGGGTAIRCRRRPLDGPRNNHADWS

SEQ ID NO: 64788 - protein, 211 aa, Zea mays
  Coding DNA Sequence Number=SeqID_21413
  Homolog annotation: Hit_ID=A2XFR6; Match level="QueryCoverage=53%, HitCoverage=32%, E-value=5e-13, Identity=37%"; Hit description =Putative uncharacterized protein
MPTPLAESLAFVAGSSSSTPPAPAVQAHAPTSDAPNDSSDDDEDDEEEEDEENINEEANEEQQDHYVGLWPIIEHYTSMFETGHFPNLLQDVLHALGTYIQPLYETRVMDASDRGFKTLSAHESLTPLSTYAASVSDAARRTLWSLSHTYRQQLHNMKYMYLPSRIHGENQTSIVPGGAREDRLNTLAGVVAGLNTNLDSATLDFLGYTWS

SEQ ID NO: 64789 - protein, 131 aa, Zea mays
  Coding DNA Sequence Number=SeqID_21414
MTKATSTEHARTSRGRRSDGDQCDPLRSGVARQRPRQSLWASRAVIRLGRPMCDSAHSDGPRERRQHYWRKRKARPSRTTPLKRPSKMTLSTTKDSTKTIPPPRALYTPAALKAHHKHHRQASLYQRAKTP

SEQ ID NO: 64790 - protein, 48 aa, Zea mays
  Coding DNA Sequence Number=SeqID_21415
MESASACSSWIWAPARRELRVHEQATVDSEVQQVEIAEQELIEGKLCP

SEQ ID NO: 64791 - protein, 432 aa, Zea mays
  Coding DNA Sequence Number=SeqID_21416
MECRPWRTAGYWAKVGGLGREDCGKICAEDGDSKELGIRGSNVRLNHVFELNHLSYAGYPGDDDADAAAVRRGKKVMTTVDEGPSRGAASGTTAKKRKLSTMAEGLRASERFAADFMVTCVVPRETMSLPEIRESSTRMLKSLGNWLLSRCRLATVVAVVGAKGSTQGPHGLGFAPASKIALAVVMKDVAGSVAQKLKHTAAFTEHIASGVLTVEFAAEWWRLEGRIERLRTQHTVAVQDKSAAENMSRSLLEKLSAVEAEKEDLGHRLAAEKENADRAHAEAQAARAKANLALQRAIDVESAHRSLRGYLGRAEASTRTGEELELLPAIVMGLMSFASLITYEGAANALSREGCRHFEVFDRSNEDFDRGIFQVRDEVLKRSTAALYDRIWGPHGRDTIRERSNRALEQMANDKEVNNFGGLESSVTWAED

SEQ ID NO: 64792 - protein, 89 aa, Zea mays
  Coding DNA Sequence Number=SeqID_21417
NSSRDRKKYGGAHRRWSSSGEGVSEVGEVLANPSMVGWRLEMMNKEEVEDLVSLESSMTRMGGTEVGADSHSAPQASSGEDPAVSSAPA

SEQ ID NO: 64793 - protein, 93 aa, Zea mays
  Coding DNA Sequence Number=SeqID_21418
MSMTSPSFVASSPSSGAKPGGGSCGCPPELQHEQWAPNVGTCSPGQVDPTGEWKGCNLSRALYGGIYRCPSAQRPDVRTLMPSDTWIIPRIFP

SEQ ID NO: 64794 - protein, 110 aa, Zea mays
  Coding DNA Sequence Number=SeqID_21419
MSTTTFRRTKVASAGPVGQAKDVVHAKAQALLFASTSRDEDLHDCKGWEAVWGLRLPNLLKNVPSKSDCEYTRTWLRRSLIGTAITTKDKTITKLRAEELRHNGRKRKPT

SEQ ID NO: 64795 - protein, 121 aa, Zea mays
  Coding DNA Sequence Number=SeqID_21420
MTGVFPRCDIFNPEWDQPEGRALTGGDSEQQHNDTATTTRHYSWKSSERDAALTEVAHLREMQVNLMQQLNNAEAWNANLHEEVHQLYAQLNPINPLKLEEADATAVDDGGVVSETDNIQM

SEQ ID NO: 64796 - protein, 205 aa, Zea mays
  Coding DNA Sequence Number=SeqID_21421
MAPKKASSKADEAAKAALLAEKKGKALALVDTTHQEATEDDALSKRQRNEQPTPEGSLRTCSSGGQQQLPPGFAPPEGADVIEDGEVIGVSAEEQLQLRALRIKNRNLQKQKKILEAKRQRVSAQAKVRQMIRDEEQKAQELETRDRANAARKATSACNTAHPCNSAHKSKTYTSPSAATPSHTPWHSKVSTTSMSKVPWRHTCK

SEQ ID NO: 64797 - protein, 22 aa, Zea mays
  Coding DNA Sequence Number=SeqID_21422
SSALVSHPDFRGPKPGREHNHQ

SEQ ID NO: 64798 - protein, 102 aa, Zea mays
  Coding DNA Sequence Number=SeqID_21423
GVPRRRPETSPPPRRPLGTPGFALLSRYDLSPPIQIRLFPTLPLTRAPAAGSGLSAPPWFADAQSPPISVRCTRACALAHNEQPVVPECVVEDLPEQQPGEG

SEQ ID NO: 64799 - protein, 99 aa, Zea mays
  Coding DNA Sequence Number=SeqID_21424
MNSIELHLYLRLDRRDKPSWRGHLCVTGPKNQMDKEKGPKLNDDECVSQLELKEMMCAMTEAFKKYQDSAATSYEQLDRRVAELVTRMDILEVVPHHQL

SEQ ID NO: 64800 - protein, 49 aa, Zea mays
  Coding DNA Sequence Number=SeqID_21425
MAVGVSEALYAKAIGSLEDMVAGVTWSSIFPPGWIVKWDPTSAEEEHEE

SEQ ID NO: 64801 - protein, 49 aa, Zea mays
  Coding DNA Sequence Number=SeqID_21426
MAVGVSEALYAKAIGSLEDMVAGVTWPSILPLGWTVEWDPTSAEEEHEE

SEQ ID NO: 64802 - protein, 113 aa, Zea mays
  Coding DNA Sequence Number=SeqID_21427
RIVDVRRKRCYLLLNPSVRTRMLSRLPLVMGTPHPPPRQRHPLVPCRNGDTTMMAWAEAGGEDRDGVGDSIRGAWRMELMAVEQALSVEARETLTADFEGHVRPRICSWGGVA

SEQ ID NO: 64803 - protein, 75 aa, Zea mays
  Coding DNA Sequence Number=SeqID_21428
MEGAGSKARSEQRVRKEMGRTLNHRGGEGAWLLIGWGRRRWSAARDKADGQRSEIKSENGRTDFRNDYVPNITKI

SEQ ID NO: 64804 - protein, 121 aa, Zea mays
  Coding DNA Sequence Number=SeqID_21429
MQISAYGSPGCWWFNSNLAFITPGLEILGWLVTSSAQSCKGLMDAIKVKAQSTQGTRSRLARAQPRAKAADPGGFTSRPRSPSSNGHTFGSPEAQSSQRSNLGQIVTPTDRIAGAFNARIA

SEQ ID NO: 64805 - protein, 308 aa, Zea mays
  Coding DNA Sequence Number=SeqID_21430
MPETVKPDHIVKTLLNFVKDGSARDGARRGKKQAKGKPAAFVLPCAQVGRKEKVQVYNGGVAGNDGPPCDVVGPSPRSGEAEAPPRPRSSPSSEVEAKSEPWGRARRSPSSEVEAVSEPWGRERRRPSSEAKAVSEPWGRARRSPSSEVEVESEPWGRARRRPSSEAEAVSEPWGWARRSFLWRPRPDLAAVSLTLSSGTSVGVTQAALFSCQVILALNAPAIRSVGVAIWPRLLLCEDWASGELKPPSLRTEREDGQGQTQLFSNAPASPFRKEEGESAMLPSEGAEHDVSSELLMGNPSGRPCPIC

SEQ ID NO: 64806 - protein, 241 aa, Zea mays
  Coding DNA Sequence Number=SeqID_21431
MRKKYGISSVPDSHNEQTPALKVPLQTELRFRPRGYEQPPHRRACGATSSGRLANDLCSSSDGPRTDAAAERLSFASPLKGREPDIKAKEPEVGPRVALTGLSEEKLSPAATASAPTAASTCPPAPHQRAPTAPKRTGRSSLPSSPRKRGQRTECCILAWQQQFAFPGMAGGRLLRRAGGWFPPQKLEEEVGRRPAWEVELWLASPSAPARMMKILEAEGGAEAAARLASPHHRTGGHRLG

SEQ ID NO: 64807 - protein, 248 aa, Zea mays
  Coding DNA Sequence Number=SeqID_21432
  Homolog annotation: Hit_ID=Q6J9V9; Match level="QueryCoverage=51%, HitCoverage=35%, E-value=2e-19, Identity=48%"; Hit description =Putative uncharacterized protein
MQAACNRTKGAHPFDFDASSMEAQAHTSCNQRASYYVQETAPPLMPVPRLLDCGTDAATRGDPAHDPTVPTEHIGHGTGGTFGKRSRRRFTSAMMTASKKVRHVIRFRILFRFLFLSLATGTGKGDTPKGILLCEGSGPRAPLLIRGSKAGPSEGFNSRLRALGLRAHYWSEVRRLAPWKGSTAASGHSCSAPTIDQGFIGWPPKGSNSHLRARRARDDPGYVRYITKARATLPRYPRTFPRPTGTIL

SEQ ID NO: 64808 - protein, 98 aa, Zea mays
  Coding DNA Sequence Number=SeqID_21433
MDESGCTAETTSRRASANGARGKHECWGKNSRPQERARIFGLGDNGKAREEQRKAGPTCAQHANWWRATVGNDDRIDDRLKLVDGDSMEGAGSKARSK

SEQ ID NO: 64809 - protein, 69 aa, Zea mays
  Coding DNA Sequence Number=SeqID_21434
MTRVIILNLNSSSDTRLTMLRLLLISPIWVMWAEDLNTYQMFDDKPEPEFINILTSIESRLMLVRELTT

SEQ ID NO: 64810 - protein, 247 aa, Zea mays
  Coding DNA Sequence Number=SeqID_21435
MALRFSSLNRRRGCFTGRAPARISSECSATSLGVVAGVERDGFDRLSWLEVAGVALHVWRLLGEALQVGDVGHGFGEGLGVLHALHIAFVRVSVRGADGDDPIGARHFELEVGVVGDGHELGVAWPPQYCVVGSLEPDHLEREGFPLEVGGSPEADRQIDLSEGLDAFPGDDPVKRRRACPDRGQIDLQEPEGLDVDDVEAAASVHEDLGEPDVGDDRVDNERIFPRARHAVGVVALVEGDGLVGPV

SEQ ID NO: 64811 - protein, 35 aa, Zea mays
  Coding DNA Sequence Number=SeqID_21436
SALIRALLAQPEPAAVDPRLPRLPAVLHALLSSRL

SEQ ID NO: 64812 - protein, 352 aa, Zea mays
  Coding DNA Sequence Number=SeqID_21437
  Gene Ontology: Mol. function=calcium ion binding; Cellular component =mitochondrion; Biological process=protein amino acid dephosphorylatio n
  Homolog annotation: Hit_ID=A2Z8I8; Match level="QueryCoverage=89%, HitCoverage=63%, E-value=1e-170, Identity=92%"; Hit description =Putative uncharacterized protein
  Pfam annotation: Domain name=efhand; Domain location=181-209; Score =21.4; E_value=0.0034; Accession=PF00036.23; Description=EF hand
MDMASQIFEILRKPGYTYLTQDDFKPVLKELLATHPGLEFLQGTPEFQERYAETVIYRIFYSINRSGNGHLTLRELKRGNLIAALQQLDEEEDINKVLRYFSYEHFYVIYCKFWELDADHDFLIDKENLIKYGNHSLTYRIVDRIFAQIPRKFTSMTEGKMGYEDFVYFILSEEDKSSEPSLEYWFKCIDLDGNGILTFNEMQFFYEEQLHRMECMAQEPVLFLDILCQMIDMIGPENESYLTLRDLKRCKLSGNIFNILFNLNKFMAFETRDPFLIRQERENPTLTEWDRFAHREYIRLSMEEDGEDASNGSGDVLLHEFGWTWMIMVVKRKDCKFGGYPVEAIVGSQQIQ

SEQ ID NO: 64813 - protein, 115 aa, Zea mays
  Coding DNA Sequence Number=SeqID_21438
  Subcellular localization annotation: CTP_CleavageSite=51; ConfidenceScore=5.08e-01
MAQSSAFIRSDTFTLGSHISFNSLDFLNTTTSELYLTDSDTPITASTRCPTCSTIARSKADKRCLKRHTASHKRHLNTLAVAIRQKAEGTSPSTFVAVIDHEREMCPWTISILFW

SEQ ID NO: 64814 - protein, 169 aa, Zea mays
  Coding DNA Sequence Number=SeqID_21439
MWQDAKKSFAQMNLNGNLQNGIGIQMGQIKTIEIKEAAEKGRNGESKTAEKKRKVNHGFMGILCRDSDPMTNPPRTKLPRGKDPDGHEVEKIPSPKAPSQHPVVTSNTPECHIVTRRLLLKPRRSAAISSADDVFSRSAVTSKAPTMSPVTRLLSLKRRRCPQSLGGYL

SEQ ID NO: 64815 - protein, 201 aa, Zea mays
  Coding DNA Sequence Number=SeqID_21440
MAVMGSTSEKMYLCQDLVDVGLLIEDPLTGHMPHHGKVVAEKTHDGGETLKVDASSTRLIESPSSWSTSIGPARLPNNSAQRLTNPAGAYSYNLQHMTLGGVGTDSSIKAKGVTSVELTIGTKTIAYHPIIERALYGEYQLLLAGLPDEVRLMLINEVDDELDGVMTSLSDAMPRITRESPTLATTMRSPCLTVDSAVQPL

SEQ ID NO: 64816 - protein, 126 aa, Zea mays
  Coding DNA Sequence Number=SeqID_21441
MTSHGSSNEGNAQSHTDGLAREGFPRILWELFEKHRVPRCRVRMTLEPHPLQPGWRSLDSESFGYRAEDTIEAIALHGLTTFCGFHPLELSTHPIGLFPVVGVLGPTAHPGLPLKVFLGVGRCRRL

SEQ ID NO: 64817 - protein, 131 aa, Zea mays
  Coding DNA Sequence Number=SeqID_21442
MGKNNKRKREPTPPSEDFGDSEYSEEFSSESEGSPAPVSPPASSDDSDDSQGIAAEVWTYIRAVECSGLEGSDELEYSSDEEDPPEEDGEGDDDDDNDDGDDDGDGGGRGGNGGSRGGDGGSSKGSNKASG

SEQ ID NO: 64818 - protein, 181 aa, Zea mays
  Coding DNA Sequence Number=SeqID_21443
MVGLKDSSKVSAVNIIKPTWETLPAEEQLLFEERQEQLIPEAKAKFLADFKVDRNNKVVRQRVADLASLRPTMNTPMDCIRMSIDLVTTQNLEKIRPKQALSDQLMKPLMVQCTKGDQVQCTSPPVNRALRFASITVIRAVGWWIAFARKKISSRMCSGHCGRAVPPPFASATWPNGHHRS

SEQ ID NO: 64819 - protein, 106 aa, Zea mays
  Coding DNA Sequence Number=SeqID_21444
  Subcellular localization annotation: CTP_CleavageSite=99; ConfidenceScore=5.17e-01
MAPFLLGSNAPAPLHRAELVVPAMVDARHSSSIPPACVLLRSASLTLAMCSTKCATSQALLIPRSSTVLHLASSSSFAAVFPHDQHPRSSPRPLGPPLRSAVVVPA

SEQ ID NO: 64820 - protein, 434 aa, Zea mays
  Coding DNA Sequence Number=SeqID_21445
  Gene Ontology: Mol. function=aspartic-type endopeptidase activity; Cellular component=chromatin; Biological process=RNA-dependent DNA replication
  Homolog annotation: Hit_ID=Q2QPZ1; Match level="QueryCoverage=77%, HitCoverage=23%, E-value=3e-12, Identity=24%"; Hit description =Retrotransposon protein, putative, Ty3-gypsy subclass
  Pfam annotation: Domain name=Retrotrans_gag; Domain location=285-368; Score=9.4; E_value=0.0065; Accession=PF03732.8; Description =Retrotransposon gag protein
MEGSLVIRTSYCLEVEGFTHLLRSCALRMGIRKKPEYVWKEYHENGTERCSKAVYLGESRSYPNHPPFQVTFTGHRFLDTCQNVARKALRQLCQNYSREVFETPLRYFPPSNKNTPSWRKILQALSGRDPTEDDPTIVYMAGYLHTLDNHYDDLFSHCTHLNSWVESLEQQVKELKKEKASLQESLKIAEGEEANTREAYRTLKMDYDEKLKKLTPTKKIWKRTKSQGCQTERKKEAPPALPPSRIENLSDVDMSLASLDNLLKEFGDTLEREFESTLESARVYNPLDADDWLRTIKRNAAVRDATWAEFETAFREHHVPQGIVQLKEDEFRELTQGGRSVSDSKTGTREFDPLGFHPRDQASISQWDPLRRVSVSRVKAPFRPPQLQATNHQLMPVGTAETPVTSRITAPQLKASGPTYSNSVNGESHLEGGE

SEQ ID NO: 64821 - protein, 139 aa, Zea mays
  Coding DNA Sequence Number=SeqID_21446
  Homolog annotation: Hit_ID=A9PAR8; Match level="QueryCoverage=95%, HitCoverage=66%, E-value=3e-40, Identity=62%"; Hit description =Putative uncharacterized protein
  Pfam annotation: Domain name=Mog1; Domain location=8-138; Score=39.4; E_value=9.3e-09; Accession=PF04603.3; Description=Ran-interacting Mob1 protein
MAGESCVPKPLFGGAIFTTFPDRFQDVSNIREVPDHQEVLVDPSRDESLIFELLDLKGEVDDAGSALWFLQDIANEQDAGDNLVEHSGTLELAALHLGEAPAVAATAVGQLAVSKGRQGREAQNIVRVSIPTLDDNITW

SEQ ID NO: 64822 - protein, 253 aa, Zea mays
  Coding DNA Sequence Number=SeqID_21447
MELFQGVSGPHPLAGPGLLRVLLFLLLLRGNPPRCSVHRILRDPWPRSLVPPYLLETDGNPGRKNQGQPDARGRKERTLTRVTHPWSGRIKGWEKALASGFPNATATRPWRTSMGRGSEDIHEPSKSASGVISQSGNRRSAKGSTLRRWMAAITPAAGPGKGDTPKRILLREGNRLRASLLIRGSKAGPSEGFNSRLRARGLHTHYWSEVRRPAPRKGSTTASGHSGSTPTTDQGFEGWPSKGSQPPQTQSEG

SEQ ID NO: 64823 - protein, 150 aa, Zea mays
  Coding DNA Sequence Number=SeqID_21448
MGKNNKRKREPTPPSEDFGDSEYSEEEFSSESEGSPAPIPLRESSDDSDDSQGLAAEVWTNIRAVERSGLEGSDESEYSSDEEDSDGGGEDEDDDDEGGRGGDDDGSGRGGSSGSRDGDGGGIRGGSGGGGSSRGSNRGGSGGGSNRARG

SEQ ID NO: 64824 - protein, 356 aa, Zea mays
  Coding DNA Sequence Number=SeqID_21449
  Subcellular localization annotation: CTP_CleavageSite=45; ConfidenceScore=5.03e-01
MGKPVPSLLMLLSRGRVPLNSPTRWQGGRPSYPSNHLLQRTCKNYAASKAEYTNTQLDLPGALHPHTHQPSPSIPRQQRGAHRLGVQCLTDPDWPSCSDRTCTHHNRNGRPRLRSREEGNLLPGSIRLCIKPGLAFQSSGRQVLWCRLGCWIWGYLLSSSLLRHEDVLSVSKITVYRNAMNIPSPYANSNRGKEKDGAAYRRRGRSGEGWGWLGETLAVTSRYGSTSEMAGIARSTRAGGCPRRRRVYRPNHGELVQSEGTVSFTGSRSDCVHKESKDGGVVYPVHVLRRGRELRRAWTGFSGEILSDSLLGEPHGGVHSLLRGLDGVGNGSIGRSMVAEGLGGRGLAAHGQTATS

SEQ ID NO: 64825 - protein, 370 aa, Zea mays
  Coding DNA Sequence Number=SeqID_21450
  Gene Ontology: Mol. function=carbohydrate binding; Cellular component= cytoplasm; Biological process=carbohydrate metabolic process
  Homolog annotation: Hit_ID=A2X6D8; Match level="QueryCoverage=92%, HitCoverage=90%, E-value=1e-119, Identity=61%"; Hit description =Putative uncharacterized protein
  Pfam annotation: Domain name=Aldose_epim; Domain location=31-367; Score=332.3; E_value=8.6e-97; Accession=PF01263.11; Description =Aldose 1-epimerase
MARVELLALLCLAGTLGAQATAGPRPDARVGVYELKLGDFSVKVTNWGARLMSVVLPDCKGNLADIVLGRDTVAEYFRLKVVLPTQNDTSYFGPITGRVAQRISRGRFVLDGKVYHLQRNDGRNTIHGGGTAFSKSVWTVKEYVGGGDSPYVTLYYHSFDGEQGFPGNLDAYVTYRVSGPYTLGVHMSATALDRATPVNLLLHAYWNLGGQGSGDVLGHELRLHASRYAVLDEELLPSSGRVAPVAGTPLDFRTPTPIGARIRQVTGGKVVGYDANYVVDGEGMRPVAQVRDGASGRAVELWANQATVQLYTGNWLNHTQGKGGGVYDQYAGFTLETMGYVDAVNHPEFPSQTLLPGQEYKHDMVFKFSF

SEQ ID NO: 64826 - protein, 533 aa, Zea mays
  Coding DNA Sequence Number=SeqID_21451
  Gene Ontology: Mol. function=aminoacyl-tRNA ligase activity; Cellular component=cytoplasm; Biological process=tRNA aminoacylation for protein translation
  Homolog annotation: Hit_ID=A2WQF7; Match level="QueryCoverage=80%, HitCoverage=87%, E-value=0.0, Identity=80%"; Hit description =Putative uncharacterized protein
  Pfam annotation: Domain name=S4; Domain location=429-476; Score=36.4; E_value=1e-07; Accession=PF01479.16; Description=S4 domain
  Pfam annotation: Domain name=tRNA-synt_1b; Domain location=75-398; Score=311.9; E_value=1.2e-90; Accession=PF00579.16; Description=tRNA synthetases class I (W and Y)
  Pfam module annotation: Pfam domain module=S4::tRNA-synt_1b; Domain location=429-476::75-398
  Subcellular localization annotation: CTP_CleavageSite=44; ConfidenceScore=5.57e-01
MAATAMAAAAAASRAFLRPHRCLLLPHTHPLRRRLSTNATASAPAATAASPGVVDVLMKRGLVEAITSEALAAARPGELKVYCGFDPTAESLHLGNLLGLVALSWFRRCGHTAVALIGGATGRVGDPSGKSSERPELGIAAVEGNSDAIKSLVAQILGRVPEPAHRSHSGQKELSLDNSANSSQTMGSFLILDNYDWWKDITLLDFLREVGRFARVGTMIAKESVKKRLASEDGMSYTEFTYQLLQGYDFLYMFKNMGVNVQIGGSDQWGNITAGTELIRKILQVEGAHGLTFPLLLKSDGTKFGKTEDGAIWLSSKMLSPYKFYQYFFAVPDIDVIRFMKILTFLSLDEILELEDSMKKPGYVPNTVQKRLAEEVTRFVHGEEGLEEALKATEALRPGAQTQLDAQTIEGIADDVPSCSLAYDQVFKSPLIDLAVSTGLLTSKSAVKRLIKQGGLYLNNVRIDSEDKLVEEGDIVDGKGFLTLGKEGGPKGIWVSKLALRGSFTAINIISGVEDEQECMLQAQMFKRALGSA

SEQ ID NO: 64827 - protein, 53 aa, Zea mays
  Coding DNA Sequence Number=SeqID_21452
MARGKSGKGKRDKKNQGGKRKHPPNPPSEDLDDLEYSKVLELRYVNLDQVKLT

SEQ ID NO: 64828 - protein, 96 aa, Zea mays
  Coding DNA Sequence Number=SeqID_21453
MGPSTAERVYIWDIERVGLEGFDNELVRDMYSHLNLIINELNSISINKLGDADIVRKIISLLPQQRYGSIITILHNMEDLSTPTIVIGKIVAFVMS

SEQ ID NO: 64829 - protein, 138 aa, Zea mays
  Coding DNA Sequence Number=SeqID_21454
MDALNFEYTDYERLDEGAGGAKMSHPGFKGQSRTQRRWANLTAALVDEQRARRLGGLTLAVLALCIPEKETCKMAEVLPKPLTSRGWSTVQREFGEGLHSGEEFPNLQCTTGPNSPQSRSTQPSKLPRPRDYPESMAD

SEQ ID NO: 64830 - protein, 112 aa, Zea mays
  Coding DNA Sequence Number=SeqID_21455
MELTEATDTARAQRQPQNGRETTASGGETPWTRARCEASAEGCEWASEERGGRAGARQLEKARGGDGRGLGVRRGRGVHGDAWVVRGWFGGERSDRRDPPVSESGRVNGQPG

SEQ ID NO: 64831 - protein, 337 aa, Zea mays
  Coding DNA Sequence Number=SeqID_21456
  Gene Ontology: Mol. function=nucleic acid binding
  Homolog annotation: Hit_ID=A3A4Y8; Match level="QueryCoverage=83%, HitCoverage=49%, E-value=2e-69, Identity=50%"; Hit description =Putative uncharacterized protein
MGKQLESLSRGLGTKISIQIYDGKRRPEPPIQAAKFASEGGIILRQHIPIFPHWKEYKKQENEGKITDYIGKLAGQFTMDVDSKAVKDACVDMIKGGQRQMRYRLKRKYFTGVPANQVRTTSPVPCMTDDQWKDLVQMWSTPNHKNNCVKNKLNREKVQFPQCIGSQSYIAKSYVVRQEKYKDMEPSAIDLFKEMHCSKKKGFSEAVQKAIGDMEAMVATPVEDGQHVLSSTEVVSNVLPGSSKFLHNAGLLPASKRSNTRTISTRMQELQTQLDTERQEKNGFREEMETLKAQSQASEATIANQSTEIADLKKSLSENNSLLRQILSINRGQMTPP

SEQ ID NO: 64832 - protein, 56 aa, Zea mays
  Coding DNA Sequence Number=SeqID_21457
MAMMGSTSEKMYLCQVPNFGFEIIKVKKRQTFVASVLRWYQRKSTRNEVVGGKDPP

SEQ ID NO: 64833 - protein, 146 aa, Zea mays
  Coding DNA Sequence Number=SeqID_21458
  Subcellular localization annotation: CTP_CleavageSite=28; ConfidenceScore=5.47e-01
MAFLFWFQASLRGRPSWLMSSGARAAPSAIAFFGGMTKFRESFRSSNSPPHRSHLFPSGSDDFDEEKEDGGGANEGGYDGGNEAGEDDKVDSGGGRNKRSVGSGGRNSSGKGSNSGKGSGDDDDMDSGGGNDYSKGDNTGGKAPLA

SEQ ID NO: 64834 - protein, 98 aa, Zea mays
  Coding DNA Sequence Number=SeqID_21459
  Subcellular localization annotation: CTP_CleavageSite=68; ConfidenceScore=5.63e-01
MQAACNRAKWAHLSDFQRAQHGSPGPRVMQPVRRMLRVSNCTATRATATPPRLRNQYRDSRQPYARPSSASLARWDRERGIPRKGPFSVKEPGSEPPY

SEQ ID NO: 64835 - protein, 315 aa, Zea mays
  Coding DNA Sequence Number=SeqID_21460
MSSCSLMHRVFPPSEPRMGDARSPSALSLGERNSVGVGTFQPSFGFKDFHHAAQLHPSAGGMGRGVCRVGVGPCVGGGPLLPLVIGGKGVRRPWRWQLPRAWLSDTSGFEAAPDTVFRHGSWKRFLCRRASALRSSLLLFGPPEQKSSSSPLLEQVTESLGSVGLAVRGFSCLVKGTPRPLFDEPKPGVAVSARTKAELARKEDLVGRSLAGSSVSGTDAGVDLPRPRAGLMSLGDSWPRPRGDQPSHLLEPDSWRRPGRRWPGRDDEVILQSGDPRTVSPSEARSDLAEGVVDVEGAAAPFNRQDPSLQDRIIL

SEQ ID NO: 64836 - protein, 53 aa, Zea mays
  Coding DNA Sequence Number=SeqID_21461
MARKRSQKNKKTPPKENNEGTLRYNSPDCPVHRRSNDSFAQWSTAKAEDSEEQ

SEQ ID NO: 64837 - protein, 149 aa, Zea mays
  Coding DNA Sequence Number=SeqID_21462
  Subcellular localization annotation: CTP_CleavageSite=24; ConfidenceScore=5.07e-01
MALPVDVAGPRPRSGDVGAPPKLRSKARAESEPWGRAKRSSSSSGAEPESEPWGRAERTRVRALGSGGAEFAVFRVLARVRALGSGGAEFAVFRLLARVRALGSGGAEFPMAPLARPDCLSDSLCRVALQSEWRRRRCPSVRPVSGAAE

SEQ ID NO: 64838 - protein, 56 aa, Zea mays
  Coding DNA Sequence Number=SeqID_21463
MVSHSGYGGYKCGYCTTIVGVSSLEDMVAGVTWPSILPLGWTVEWDPASTEEEHEE

SEQ ID NO: 64839 - protein, 128 aa, Zea mays
  Coding DNA Sequence Number=SeqID_21464
  Subcellular localization annotation: CTP_CleavageSite=38; ConfidenceScore=5.09e-01
MARARAYKAPRDLDCTPPHALDLTGAQPHRRLPVQSVSTAARSPCHRRPANRTLPNPVQPSEKTEHTSVKLPERGIGVCFAGEASPRSPDSIRPPASVDRVILYSILRFLVHTASTSPREAHCAFGLN

SEQ ID NO: 64840 - protein, 47 aa, Zea mays
  Coding DNA Sequence Number=SeqID_21465
MKPFHCSTSLVRARSCRLGPNGPRDDDRALMWCQPQDAVGGRLEEWT

SEQ ID NO: 64841 - protein, 38 aa, Zea mays
  Coding DNA Sequence Number=SeqID_21466
MAATGVGLRSGPALPWGMDDCLGRSIRKQGPRLDPPRY

SEQ ID NO: 64842 - protein, 127 aa, Zea mays
  Coding DNA Sequence Number=SeqID_21467
MAIISKIWGQSALELDLSLCCLVLDITPKSSQCFGWLRQWPVKLSKPSDPAGLHRKPEINFTGLRSPASARGPSSPVGLLAADDHPRLRTEYVLIPEQGSVQEEDHEQASEAAIEDLPAAPAIEGKP

SEQ ID NO: 64843 - protein, 170 aa, Zea mays
  Coding DNA Sequence Number=SeqID_21468
MGKPVPSLLMLLLSRGRYNGSSSLISCEKQMIRIEFLSLQGLTALAYNAPLTPTGRRAVTALVPTITGMGDLVSGRVRGYVCGQVHSGTRLTDLPYFSVMHKTGACLPKQWQAGPLVQTRVLDLGLPPEQLLAPARGCTLRQQDYSLSKCNEHVCHDYARFKNIKLKKLS

SEQ ID NO: 64844 - protein, 151 aa, Zea mays
  Coding DNA Sequence Number=SeqID_21469
MVKEDEKNLKKRKSSPEPKVAALKKRKAKSPSPKVTEEEEVTPSTPSAVEVAEILKNRSWPQCLTKGKELLKLLQKKKVSFFGTWSDKNYLRPRRSYMNMAFPVANSQEPYSLVESMKRPWDVFVTVPGRRMMMPKISNPKQIPKATEADL

SEQ ID NO: 64845 - protein, 98 aa, Zea mays
  Coding DNA Sequence Number=SeqID_21470
  Subcellular localization annotation: CTP_CleavageSite=13; ConfidenceScore=5.21e-01
MASALSSATSSPQREQRRSPSCKTPCTPSQPSIPNQTVRIYGYRLRLHALTLGPAYQCLRPLALGLTGLIKTNEVKLCNLLRYAVLKEPQIFRCNCLP

SEQ ID NO: 64846 - protein, 305 aa, Zea mays
  Coding DNA Sequence Number=SeqID_21471
MDNVGANPFAERRRIPSKQVVYHSEHSLSLDVLGVKSQGHGKLRQHKAETLKAKGNIELEDERAPRVGEKQDLAATRGVNPFLKADFPARAPKRHGQAGLKREEGESSHKERATALRLYALPSSPQPAVKEANSRTRSVQPPRGCAPPRFLCNRWSNLWHGGLGPHVMHPAHQFLGAEKSRRHSRQYHTSSRPSQKTEKINFQTQCSDSRHPAYGPTKTLSVEVTGQSGVETCVAVGVALGGPVVIASMGAQEQRANRQSNFGPTYRLASSPEVGPGATVDTLNQGYPLLRYEDAVPIRCSLAMR

SEQ ID NO: 64847 - protein, 129 aa, Zea mays
  Coding DNA Sequence Number=SeqID_21472
MACMLRWSPPLGRLPGVEVVAFAGEPLGAEVVIAAGEPSMQRWPLPSVLRWSPPLASHSELAANVILLVWSSPFLQSRDGARTPLESGCNTFAFCKILPWYLAPLGCRLDLSRLQTSIPKKELAMASRR

SEQ ID NO: 64848 - protein, 80 aa, Zea mays
  Coding DNA Sequence Number=SeqID_21473
MGKPVPSLLMLLFSRGEVPLDSPTQWQDGRPSHSSNHVLQRTLQYNGSRSLISCEKQTIRIEFLSLQGFNNIMLKEEKLS

SEQ ID NO: 64849 - protein, 137 aa, Zea mays
  Coding DNA Sequence Number=SeqID_21474
MTSHVPTDGGDALSHTDGLAREGFPLILWAVLQGACYTTRPLYAVQLFEEHRVPRCRVRMTLEPHPLLPGWRSLDSESFGFCADDTIEATTMHVLTTFCGFHPLEMLTHPIGLFPAEKEDDPMWKDRVDHAKDVWAL

SEQ ID NO: 64850 - protein, 95 aa, Zea mays
  Coding DNA Sequence Number=SeqID_21475
MGGGQMNAFPMTGGLLVRIGDTKERAVVINLAEPCWRPEVKKNLGAVNSCPPSWQAPRRRWDSYRELRRCGGKTRTRGTRTCDGDHRRSYPIPPR

SEQ ID NO: 64851 - protein, 43 aa, Zea mays
  Coding DNA Sequence Number=SeqID_21476
MGSAYALAPPNDDEDGYDHAYGNGKEGVEVDLQEFQDVDEFED

SEQ ID NO: 64852 - protein, 103 aa, Zea mays
  Coding DNA Sequence Number=SeqID_21477
MGKKAPKLDTDLTCPFCNHPGIVQCNIFFKERRIFVVASCSVDKETYATKQGPIYTRATRTFYRSPDCIARGSRKDSDIIEMKKMISNRQCSGKIIKNELKNL

SEQ ID NO: 64853 - protein, 180 aa, Zea mays
  Coding DNA Sequence Number=SeqID_21478
MDELGLGDLSRELDTDQGDEGELARNRAGKARVQGLCSATREVEMLSTTGMGAERHRKGGEVVGVLQEGIQGEPPWEGARAGTEKTRHGDKANGHIRRLPTLRTQEKQQVKGSWILWETNNNDRIKENSNFSTPNIEQKTLQNILYIRQWRNKNEIFLISFLTKIDRDRYDMKIVINKDD

SEQ ID NO: 64854 - protein, 49 aa, Zea mays
  Coding DNA Sequence Number=SeqID_21479
MAMEPKFLIPFTPVVLVQPWSHGGGHKNTKKGQSAMGMERWREYRVSTW

SEQ ID NO: 64855 - protein, 88 aa, Zea mays
  Coding DNA Sequence Number=SeqID_21480
  Homolog annotation: Hit_ID=A2YXM5; Match level="QueryCoverage=79%, HitCoverage=40%, E-value=5e-08, Identity=48%"; Hit description =Putative uncharacterized protein
MDNDKSEVSPAARVQCEGVVFTVTKGNEVARVTKGGEARVVLSSESYFDADTCTRHHFVDVQGKAEAMLFFVSVREDLNRIVSVRRFS

SEQ ID NO: 64856 - protein, 124 aa, Zea mays
  Coding DNA Sequence Number=SeqID_21481
MTGTAQLWYYRLKMIAGELRLIILRRKGSKKELLHRTGSMDEYQVVPDQDIPPVGEVLALTVDDMPAISLHALIGHSCAWHSNNEGACSHYGLPPHSIAGLRINPQFHQSQSGPGVATAIAAML

SEQ ID NO: 64857 - protein, 270 aa, Zea mays
  Coding DNA Sequence Number=SeqID_21482
MGWRRGVWAERLYIKSLRLPILEEAQVRRCNPVEPDQVLAAAAVPSGVRVAAILGASSGTALRRVTDDGVPLGTSDDDALEVGGQAVTALPKRAGGGGGSLGRASGSVPGGQRRYRPEAGDRRRRSTRNERRRRSRGGRASGDGAPEAGGRRRRTLGPVATPVARGAVGVGSGDGGHKGRGSLPRSHEARSSLAMATTQGVGGSGVLRRPTLPIRWLWRRPLIYRPQDRPPATNYPIHVYAIDDYVLCLLLTLFMHSSVFYDDEYDFMLP

SEQ ID NO: 64858 - protein, 69 aa, Zea mays
  Coding DNA Sequence Number=SeqID_21483
MHLIQLRFLEEFIIYLGQDFESILKALGKDLVVTLRKESIKNTREGFTNDDPYMWMANESSLLKPKRID

SEQ ID NO: 64859 - protein, 111 aa, Zea mays
  Coding DNA Sequence Number=SeqID_21484
MNKNTGIESAITNGTPVPPPQGPGKGDTPKRILPCEGTGLRAPLTDQRFEGWPSEGFNSRLRSRGPYTHYWSEVRRPAPASGYSGSVPITDQGFEGWPPKGSQSPQTPSEG

SEQ ID NO: 64860 - protein, 125 aa, Zea mays
  Coding DNA Sequence Number=SeqID_21485
  Subcellular localization annotation: CTP_CleavageSite=55; ConfidenceScore=5.43e-01
MWLKFTGMSSGAPDYPVSQQRPRQRSAARSAGDAWPKPTVTRSHRTVRCAPDNVRCANETKGSTVGFAIEGKKSGTVHVRWCTGLSNQYCKGERLQLVKIPRKGKHQLRKKAVVFKWIIVSLERG

SEQ ID NO: 64861 - protein, 132 aa, Zea mays
  Coding DNA Sequence Number=SeqID_21486
  Subcellular localization annotation: CTP_CleavageSite=37; ConfidenceScore=5.15e-01
MSGAPEDSNSNSSPSGKSRGNSTIIYRTVRCTPDSVRCSKEKQPQELAGFGKLQQLLRYNSPDMSGVHRTVRCNCGATTTSRQRSPATAINARQSAQKSGTRVVAHRTRYGTPDIQAGLEVRATTVRTQRLW

SEQ ID NO: 64862 - protein, 98 aa, Zea mays
  Coding DNA Sequence Number=SeqID_21487
  Subcellular localization annotation: CTP_CleavageSite=37; ConfidenceScore=5.25e-01
MSGAPEDFNSNSSPSGKSRGNSTIIHRTVRCTPDSVRCSKEKRPQELAGFGKLQQLLRYNSPYTGLSGVTAGQRLLRANGHLQQQLMHARARRSQARA

SEQ ID NO: 64863 - protein, 170 aa, Zea mays
  Coding DNA Sequence Number=SeqID_21488
MEGRGMSIIKDGAKAMIVTDKGENAAKVRIGKTPFSNRDGKDDISKEALHYNSPDCPVYTGQCPVTQGRAALELASLGNSLCYNSPDCPVYTGLSGESAEQRLLRANGHLQAHSMRARSAQKSGTRETVHRTIYSTCPVYTGQPGGPRSQKLQRSNPNGLVMWLAHRTCP

SEQ ID NO: 64864 - protein, 176 aa, Zea mays
  Coding DNA Sequence Number=SeqID_21489
  Subcellular localization annotation: CTP_CleavageSite=80; ConfidenceScore=5.15e-01
MVVALSELACRGTGRGAGPGRYARIMPTSDRGGRGQAARAAVPGARRARSRSDALVRRAAPGARCAGRERPRREHEATPRAAVLQREGVQGAQQAGHGRRERRGGREKEEGVRRQGGLTSMDSSAGAWDGLRRGGRRRRAERRLQTVMAVPACLLLRATGEVGKGRLGVGTGVTGM

SEQ ID NO: 64865 - protein, 71 aa, Zea mays
  Coding DNA Sequence Number=SeqID_21490
  Homolog annotation: Hit_ID=A3B342; Match level="QueryCoverage=81%, HitCoverage=16%, E-value=2e-07, Identity=55%"; Hit description =Putative uncharacterized protein
MSWAFDVYYIMDCGVISAPEVTQRRTDSNDQFVILPTVGVAFVLAWGVLSNDETMEIVTYIEVCMIPMVAM

SEQ ID NO: 64866 - protein, 102 aa, Zea mays
  Coding DNA Sequence Number=SeqID_21491
  Subcellular localization annotation: CTP_CleavageSite=25; ConfidenceScore=5.01e-01
MRTPCLTMDNVVQPRWTASKRRLCRSLSYTAAHAAMWSAVGARGVGHSGSGGRLVGRRHEESRKAYVGLLPEVELAVVKLLLVVDERRQSERLLLVVFVRGF

SEQ ID NO: 64867 - protein, 393 aa, Zea mays
  Coding DNA Sequence Number=SeqID_21492
  Gene Ontology: Mol. function=protein binding; Cellular component =membrane coat; Biological process=intracellular protein transport
  Homolog annotation: Hit_ID=O81742; Match level="QueryCoverage=21%, HitCoverage=11%, E-value=6e-35, Identity=90%"; Hit description=Beta adaptin-like protein
MTVNKAQGQTIPNVGVYLPEPVFSHGQLYVALSRATARSNIKILAIPAVDGKKRPRKGVRKNPTLDCGTYTKNIVYKEFLYSSTNLCILLYCLQHELHMGAFKVGNITNENFFEIINGLRPANTAGCSSSTDAPNIPHGVMVGSCWRLSDIQIVYVTPVLLPVEATADPLDKLERKRVIVYSTKLPGPISLFHRCRMMGAYETDDPKKGDSLCMYSEGRDEPHGEEMLEQITDSSLYQHMGSTCQNGGCVREKKDDSCCGPLYLRGDGRFFGDKKEKKSNLGTAGASPPIYNSFMSMKDDIAEVLLEFKEYATEVNVDSVRKAVRAVWRCAIKLERAAKRCISVLLELIKIKVNYVVQEAIIVIKDIFRRYPNTYESIIATLCESRFVKVWTL

SEQ ID NO: 64868 - protein, 479 aa, Zea mays
  Coding DNA Sequence Number=SeqID_21493
  Gene Ontology: Mol. function=nucleic acid binding; Cellular component= nucleus; Biological process=double-strand break repair via homologous recombination
  Homolog annotation: Hit_ID=A2X9X1; Match level="QueryCoverage=100%, HitCoverage=59%, E-value=0.0, Identity=67%"; Hit description =Putative uncharacterized protein
  Pfam annotation: Domain name=DEAD; Domain location=230-410; Score= -16.7; E_value=0.00075; Accession=PF00270.20; Description=DEADDEAH box helicase
  Pfam annotation: Domain name=SNF2_N; Domain location=232-478; Score =177.9; E_value=2.5e-50; Accession=PF00176.14; Description=SNF2 family N-terminal domain
  Pfam module annotation: Pfam domain module=DEAD::SNF2_N; Domain location=230-410::232-478
MPSRSQYDRRGSDGDEDEIISVPSDLEESESEANRGAEADDDEYVGESSDASGGDEAEEGGSSDCGEGWDGDDHGGNVRRPLRGLQRGVAAPDKEMKSQNVDALVRGNLVVRRQPLIPRILSVSDAAAIVRKPFKPPCQNGYSDSNEQLARRLSARKRFVPWGSTQTFAINIIHHLPQSPVVASDSSSEKEEPLPPGIEPLILWQRDECEKENCNSASIEVDHLLVRYLRPHQREGVQFMFDCVSGSLSADGISGCILADDMGLGKTLQSITLLYTLLCQGFDDKPMVKRAVIVTPTSLVSNWESEIIKWLKGRVQVLALCESTRADVLSGIESFLKPLSRLQVLIISYETFRMHSSKFERPGSCDLLICDEAHRLKNDQTLTNKALAALPCTRRILLSGTPMQNDLEEFFSMVNFTNPGVLGDASYFRRYYEFILRRTNALLSNHLPPKIKRLISEETKQSKILAYITALKKLCNHPK

SEQ ID NO: 64869 - protein, 157 aa, Zea mays
  Coding DNA Sequence Number=SeqID_21494
  Subcellular localization annotation: CTP_CleavageSite=12; ConfidenceScore=5.18e-01
MADAPPPTPTPRSIAEETFSSSPPRSRETATDLASPNAVETTTAFPIVFPRDLNCHAIASSLLTPPHANPTLLSLAPTSDMTVEPDDLVRPSLLHVISAKSDKEMVLMIMVGGYTNLFCSMHHTSNQPNIVCGLEFIFLLLFWRDDVAEAMARPRTD

SEQ ID NO: 64870 - protein, 60 aa, Zea mays
  Coding DNA Sequence Number=SeqID_21495
  Subcellular localization annotation: CTP_CleavageSite=38; ConfidenceScore=5.30e-01
MKARRSSRYRMNGRRSWRPRNPKPKSQGSRSSSWHRARSLEGGGVSKPEPGRNPKELSLL

SEQ ID NO: 64871 - protein, 67 aa, Zea mays
  Coding DNA Sequence Number=SeqID_21496
MGPSGEGKGREERGREERDEGGLTGDGDAAAERGGRSATATVARRRGPLWPGETRGICGSRRDTPGR

SEQ ID NO: 64872 - protein, 361 aa, Zea mays
  Coding DNA Sequence Number=SeqID_21497
MESHDLRAEWESRLVGKVVMRLMVLVMIMVLMARLRHTARKSVIPFLPSRLAERPLRRPVAGQSSHLERLHHRLREEQRSSSLSLHQEIESVRSCSPVLSLEPPPAPPLGAPASGVAAGGDPDDGGGDDSSSHDTDFSANPEPEGWVARPITRDAARGCHFHDALDTLLRRAFDRHTWSVEYRCVVYQHSRGVYPDRWEATCLVRCPEDSLQGAEACSEHYSISERDSAEAAMQDAARRALSHYCSVFGGAADGLDLKYYPRRSSGSTGGVIVSPVGEGNPRLSSTVNLAAVLNTELDHALDELSRARAEIALLRAERAERRFLDGGSPAPVGTQHPYRSPQRGHQSYGNPACKTKINLEP

SEQ ID NO: 64873 - protein, 381 aa, Zea mays
  Coding DNA Sequence Number=SeqID_21498
  Gene Ontology: Mol. function=ferredoxin-nitrite reductase activity; Cellular component=chloroplast; Biological process=nitrate assimilation
  Homolog annotation: Hit_ID=P17847; Match level="QueryCoverage=82%, HitCoverage=53%, E-value=1e-164, Identity=89%"; Hit description =Ferredoxin--nitrite reductase, chloroplast precursor
  Pfam annotation: Domain name=NIR_SIR; Domain location=202-367; Score =120.7; E_value=4.2e-33; Accession=PF01077.13; Description=Nitrite and sulphite reductase 4Fe-4S domain
  Pfam annotation: Domain name=NIR_SIR_ferr; Domain location=124-194; Score=92.7; E_value=1.1e-24; Accession=PF03460.8; Description =NitriteSulfite reductase ferredoxin-like half domain
  Pfam module annotation: Pfam domain module=NIR_SIR::NIR_SIR_ferr; Domain location=202-367::124-194
  Subcellular localization annotation: CTP_CleavageSite=53; ConfidenceScore=5.45e-01
MASTASLQRFLPASPHASSRRRAGRARAAVSIPSSSPPATRDNEVPAERLEPRVEAREGGYWSLKERYRTGLNPHEKVKLEKEPMALFMDGGVRDLAKIPMEVIDAAKLTKDDVDVRLKWLGLFHRRKHQYGRFMMRLKLPNGVTTSEQTRYLASVIEAYGADGCADVTTRQNWQIRGVTLPDVPAILDGLRAVGLTSLQSGMDNVRNPVGNPLAGVDPHEIVDTRPYTNLLSSYITSNSQGNPAITNLVRNLTVTRPGANRPRKWNVCVIGSHDLYEHPHINDLAYMPAVKDGKFGFNLLVGGFISPKRWAEALPLDAWVAGDDVVPACKAILEAYRDLGFRGNRQKTRMMWLIDELVGLLSSHSFNSTNACRRLPVPQA

SEQ ID NO: 64874 - protein, 691 aa, Zea mays
  Coding DNA Sequence Number=SeqID_21499
  Gene Ontology: Mol. function=transferase activity, transferring glycosyl groups; Cellular component=integral to membrane; Biological process=cell wall organization and biogenesis
  Homolog annotation: Hit_ID=A2X9X7; Match level="QueryCoverage=73%, HitCoverage=84%, E-value=0.0, Identity=74%"; Hit description =Putative uncharacterized protein
  Pfam annotation: Domain name=XG_FTase; Domain location=165-660; Score= 707.9; E_value=7.6e-210; Accession=PF03254.4; Description=Xyloglucan fucosyltransferase
MGRPSNSHGGGGDEERLPLRGVLETSPSHHAAVQAKDKEARRGGSRLWRASVRAGLLLCLLTVPAVLLLLWWQADSSPQWVFDFEPPEEDDDQATYWLRPPVKSPSLWGVFGWLQADTVAAVWTAAAAIHREKNTVEAAAAAGLQPQQAAANKLMEVHPSKGFWFQNRSAPLRLWHWQHPYIQDDMSDDLSPSPQIEYDRLLGGLLVEGFDDKSCRSRYRFARYHSSPSIPSPYLIERLRKQEALQKKCGPGTRAYREASKQLKSGQSMSINATDDCNYLFLIIHAGLGNRMLEITSAFLYALLTNRILLLDRYKEIADLFCEPFPGTSWLVPSDFPLNDDEFGQSSAESYGNMLQNKAFGGGTDRSLVGNRLPPYVYLHLDGNYGFHDKLFFCEDDQQFLRGVPWLVMRTDMYFVPSLFLVPAFQDELGRLFPEKDTVFHHLARYLFHPTNGVWYSVTRCFRSYLAKAEKRVGIQIRIYETKGILQRNGPFPHILNQILSCAQNEKLLPEISMAEGAADGTRNNRTAAGSGTRNNRTIAVLTTSLSAWYSEQIQEKYDEQSAVDGVSVRVFQPSHEEYQRSRNKGHNMKALAEIYLLSMTDVLITSGFSTFGYAAQGLAGLKPWIMLKSENHVTPDPPCVRAMSIEPCFHQAPFYDCKARKDTDLGKVVPYVRHCEDVSWGLKIVDQTHL

SEQ ID NO: 64875 - protein, 473 aa, Zea mays
  Coding DNA Sequence Number=SeqID_21500
  Pfam annotation: Domain name=MAP7; Domain location=165-290; Score= -79.4; E_value=0.053; Accession=PF05672.2; Description=MAP7 (E-MAP -115) family
MRGPRGKDVFARAPGVFGADAEGYRGLPEARPKKARGTAKAAAPGGSQPTLAARSVSPGSSKVPDVVKAAGAGGAKSTSAGAAKARELPPPGKRIADFGTDISVEDYFTGSGEGQLVIVPPVVATTVSVTVPGAKGGALSAGGEISALAAVKDEAGAVSRRLKEASQRLSQSAADSKCRKLAEKVAALEGERTELRRVLAEERREANQALAEAQSAQAEANVARVEGSLARQRAEEWEERFNALQARMERAEASTRSEAERTRKQLMDSYHELGARTADFEVPDRESNLRCLEWLQEKLLALPTIVEGFMSYASLVTCEGAMNALSREGCRHYEVFDRSDEDFEREIYKVEDPVVKESAGALFDWMWGPHGREVVRERSDTARGQAARDEKVDDFGALNNARPKAESNPVAAGPEGAPAPPPETVEGSLDAPAATAAGGGSTPTAVPRAEDPPKTATEQAAEDPTAAGSSQVA

SEQ ID NO: 64876 - protein, 935 aa, Zea mays
  Coding DNA Sequence Number=SeqID_21501
  Pfam annotation: Domain name=MAP7; Domain location=467-611; Score= -83.0; E_value=0.083; Accession=PF05672.2; Description=MAP7 (E-MAP -115) family
MEVVELVPCACNKWGNWWDFWFYVAEGTVEDHPGLPVAEMCSHYYSAYPQFEVAEEDADEGALRCAAGLSSGRDLVEEFVAYGVWPLARGWALGEVCPRQMPSHGRMLVRSPSFALDLHGRDPDPFVREAEDGAARIVGRYVPKTEGQRSWDIRGSNDRLNRVFELNHLPYGGYPGQDDVDRRGKKPAAETEDDPALAAAPSTKKRKLGTAMGGLGVSDSFAMELMGTCAAPGGRMSSPELRESSTRMLKVTGGWWPKNVPIPRAAGEDFFTSRMVRDMRVFPYGRNIAAVVSAVMDKDRQEAAQKRRAVVRLPEARPKRARGTAKSAALGGSQLTLAAKTAAPGSSKVPEVVKATGVGGTKSASAGAAKTRELPSPARSVADFATDISVDDYLVGSGEGQHVVVPPAVAAVVSAAVSGAKGIALSAGGEIPELAAVKDEAGAVSRWLKEASQRLSQAADFADRVASGSLTAVVSAEVERLRAQHAEVVREKSAADSKCRKLAEKVAALEGERTELRHQLAEERREANQALAKAQSAQAEANVAWVEGSLARQRAKEWEERFNALQARLERAEASTRSEVERTRKQLMDSYHELGTRTADFEVPDRESGLRCLEWLQEELLALPTIVEGFMSYASLVTCEGAMNTLSSEGCRHYEVFDRSDEGFSSVRFYKVEDPVVKGIPREPSLTGCGAPMAARDEKVEDFGALNNARPEAESNPVAAGPEGAPAPPPETVEGSVDAPAATAAGGGSPPTAVPRAEDPPKTATGLAAEDPTATGSSQVQDFGPAHATTTANFLAASTVGAGNESDESVSKFSDFGDSGSSVEWTEESSDEDLDYFAALDVVAAEASPRAADAEVVPGPSAGRRRRRAVAKRRVSEADGGRLCVGSAGKQELLSSPAVASVGEGELRSLFEGEELRIMLFNYREMGIILKVEPM

SEQ ID NO: 64877 - protein, 215 aa, Zea mays
  Coding DNA Sequence Number=SeqID_21502
  Subcellular localization annotation: CTP_CleavageSite=19; ConfidenceScore=5.24e-01
MAHLCSFSFSLCITELPCRALASPSLAARPWPELPSTRSRPPWLTRPSSMGGSLGLVSGFSATHGCSSSPSVGSQLSSPERARHLLPPRSAPCPCAAPLYYLLWCCMRVLPWPAAAPCAPNSSSLSSRSSRAVVFPAPARHPLFLHCENARLHQFVGRLRRSPAHRACHRLHVFGKSPARHPLLDFPCSTSSSNFALPVVVLRSARFRSKLRRPS

SEQ ID NO: 64878 - protein, 128 aa, Zea mays
  Coding DNA Sequence Number=SeqID_21503
MAPAGLWRDAGHAERASGVLWRAQSASNTWPLLSALVLAPAEQPNVRISPYGLCKISSLHLGLPSSWSLVRGSGAAEQGAGAVVVAGDGQWRRRSDYTARPRSWGTTRLGWVADGPNGGADEILASRA

SEQ ID NO: 64879 - protein, 42 aa, Zea mays
  Coding DNA Sequence Number=SeqID_21504
MVGVVVGGRADGSGPPASDEAAPHGPAELTTHQTRIFHLITR

SEQ ID NO: 64880 - protein, 528 aa, Zea mays
  Coding DNA Sequence Number=SeqID_21505
  Gene Ontology: Mol. function=metalloendopeptidase activity; Cellular component=membrane; Biological process=proteolysis
  Homolog annotation: Hit_ID=Q94DI2; Match level="QueryCoverage=21%, HitCoverage=35%, E-value=1e-56, Identity=93%"; Hit description =Peptidase M48-like
  Pfam annotation: Domain name=PPR; Domain location=360-394; Score =31.3; E_value=3.5e-06; Accession=PF01535.11; Description=PPR repeat
  Pfam annotation: Domain name=PPR; Domain location=395-430; Score=3.8; E_value=2.8; Accession=PF01535.11; Description=PPR repeat
  Pfam annotation: Domain name=PPR; Domain location=431-465; Score=1.0; E_value=5.8; Accession=PF01535.11; Description=PPR repeat
  Pfam annotation: Domain name=Peptidase_M48; Domain location=141-292; Score=-2.0; E_value=1.1e-05; Accession=PF01435.9; Description =Peptidase family M48
  Pfam annotation: Domain name=Peptidase_M56; Domain location=167-262; Score=-29.6; E_value=0.014; Accession=PF05569.2; Description=BlaR1 peptidase M56
  Pfam annotation: Domain name=zf-DNL; Domain location=301-353; Score =3.6; E_value=0.00071; Accession=PF05180.3; Description=DNL zinc finger
  Pfam module annotation: Pfam domain module=PPR::PPR::PPR::Peptidase _M48::Peptidase_M56::zf-DNL; Domain location=360-394::395-430::431 -465::141-292::167-262::301-353
MAPASAWRSVVDPVEYNMMLKQKLEKDLAAIAMCRFLYPIYLVISFTVHEEIVLSLQLLQMPIQVRIFALDNLYVRARARVDAIAGRVPPKAITTPKGEEDCVRARERGRLKSHRGLRGSTIDEASPSPPASSPSKKSGELLNTEAPGLYIRQNPVPNAYTLAINGKKPFIVVHTSLVELLTPRELQVVLAHELGHLKCDHGVWLTFANILTMGAYTVPGFGMVAGFLEEQLYRWLRAAELTCDRAALLVVQDPKPRDGGGLRAGSMAQGVPREGAGGDLQIKSFLSAYTLFHLGFMVGYMRVAFAYVCGQRTTRAINPHAYTNETVFVQRWSSACWTARASTTPSARCSTKCRSRLDVRAYTTVLHALSRAGRYERTLELFAELRRQGVAPTLVTYNVVLDVYGRMGRSWPRIVTLLDEMRAAGVETDGFTASMVIAACCRDGLVDEAVASTIELYIEYQKERVHMVDDARLSTVLSKEGIEVCMVPSADRPDDAKFAVPLLESDFDFAIAKLTIRLSSLNDFISCY

SEQ ID NO: 64881 - protein, 89 aa, Zea mays
  Coding DNA Sequence Number=SeqID_21506
MAGGREQSELRRGVWPAKVLLTGSRDREGTNRVCLTAVHREKIPSLTCPDHVSRCHLLAGKGSRLVGRVLKTGISAELTVESSLGILFD

SEQ ID NO: 64882 - protein, 123 aa, Zea mays
  Coding DNA Sequence Number=SeqID_21507
MRNRARPSPLLLLLLSCWSSIPLDRPTRWQGGRPSHTINHILKRTCKNYATSKAEYTNTHLDLPGYKGSSSLISCENQTIQIEFLNLAREILDGRLRSWLLDFLVDNSLLRDEHVLSVSEVAI

SEQ ID NO: 64883 - protein, 119 aa, Zea mays
  Coding DNA Sequence Number=SeqID_21508
MDEYIRADNDFRQRREEAYRYSKMTRASEEDSTLGMSSRFISPAQATTGGIIPKDKSTTLNHQGHNKVLSGHQLQEAEGGEALEEDMERNLRRQYYDAAIVAKYALLNQQKANLFLREA

SEQ ID NO: 64884 - protein, 130 aa, Zea mays
  Coding DNA Sequence Number=SeqID_21509
MDVWDFAFAGEPEAALLADTAAPSPEARQIGVLRALGVCLDCWRGENRGEVRTVTLREDSGGHKRSPGHDEDMGRRRWSYGNEPDGWPIGKFSRMLMSEDKVRIIDPCWSVGTIYDHRELPGVCTAGAGI

SEQ ID NO: 64885 - protein, 109 aa, Zea mays
  Coding DNA Sequence Number=SeqID_21510
MASATGASWGNDARTEDELMRRAGSDDGEHKWRGKAGAWRVLGDESRGATDSRGEHTPDGWAKAVREIGDGRFASTSLEGHGGAGNWGRCSPARMKKRSTIWSGSMCSA

SEQ ID NO: 64886 - protein, 134 aa, Zea mays
  Coding DNA Sequence Number=SeqID_21511
MVRHLRADGSVLRQTVRLTQPDNPHMDKGVTLHTKQGKRRKGKAHMVGPGRLLKADPTFDQLLSKSARKKTVLRDRSTKKPRSPSKMKRPNKMARKATQQASPIHPMGPGYFPPIYLSSVYYPVQIWNGTTMNP

SEQ ID NO: 64887 - protein, 91 aa, Zea mays
  Coding DNA Sequence Number=SeqID_21512
  Gene Ontology: Cellular component=mitochondrion
  Homolog annotation: Hit_ID=Q9LWT2; Match level="QueryCoverage=100%, HitCoverage=98%, E-value=3e-27, Identity=65%"; Hit description=Ozone- responsive stress-related protein-like
  Pfam annotation: Domain name=DUF1138; Domain location=3-88; Score =168.9; E_value=1.3e-47; Accession=PF06592.4; Description=Protein of unknown function (DUF1138)
MTAGYIVGSLVGSFAIAYLCDTFISDKKAFGDLDLIWISLCGHIGSTPKTVSEKEWWQATDTKFQAWPRTAGPPVVMNPISRQNFIVKSTE

SEQ ID NO: 64888 - protein, 181 aa, Zea mays
  Coding DNA Sequence Number=SeqID_21513
  Homolog annotation: Hit_ID=A2Y8J2; Match level="QueryCoverage=55%, HitCoverage=57%, E-value=4e-15, Identity=50%"; Hit description =Putative uncharacterized protein
  Subcellular localization annotation: CTP_CleavageSite=66; ConfidenceScore=5.16e-01
MATRAALVAGRRAAGQDGLALLSSGCRRALSLLRAPLRVAVYDLSRKSLFGRREGARPSSPHKSSSATEREGHGDATAAQVEAALNRKNADVVDVDRSGSATLVPADARRGAGDEWVPDQETGVFVPADEESSGPGDGGVADVGGARGQAPSVLDQAVFVREEHMEDVERPAVGVDDAGAA

SEQ ID NO: 64889 - protein, 46 aa, Zea mays
  Coding DNA Sequence Number=SeqID_21514
  Homolog annotation: Hit_ID=Q2QPX1; Match level="QueryCoverage=93%, HitCoverage=2%, E-value=3e-08, Identity=62%"; Hit description =Transposon protein, putative, unclassified
MVTSAPLGEVVHNKDVYGRITKWMIELLGFEIDYVPWMAIKSQRQW

SEQ ID NO: 64890 - protein, 108 aa, Zea mays
  Coding DNA Sequence Number=SeqID_21515
  Homolog annotation: Hit_ID=A2YHQ0; Match level="QueryCoverage=73%, HitCoverage=13%, E-value=4e-19, Identity=60%"; Hit description =Putative uncharacterized protein
MTSDPVLALLNFTRPFVVECDASTYGFGAETVTQILSCLVQKYEKKEESNEKRNLERLEMAQIRLEAALETSNKWQVTDTSLLRWRRKLKRAVEDCDATLHKSFALHI

SEQ ID NO: 64891 - protein, 151 aa, Zea mays
  Coding DNA Sequence Number=SeqID_21516
MELGADGGRELLTPAPVPEKRLLGITVAVYVCQCVALRSISPQKHPFGKLHNFTRGVAAMELGADGGRELLTPAPVPEKRLLGITVAVYVCQCVALRSISPQKHPFGKLHKCHQQTRVTAAASYNLWPFALSKSPINHVFLRPSADTSPLA

SEQ ID NO: 64892 - protein, 153 aa, Zea mays
  Coding DNA Sequence Number=SeqID_21517
  Subcellular localization annotation: CTP_CleavageSite=16; ConfidenceScore=5.05e-01
MGPNLVFGPSPLSSPSAAQVFCPHAPATLADNPDPLAGGSRCVAAVWAHINAGPRDLLTPRIEFCLGFAPPCPRVKKSAAAGEIHVRRRGTSPGLPLEPRIGARELRGAIRMLEGWRFGLGTMWNNGNPSPEHFYRAETAVCRGQGIQLRNFW

SEQ ID NO: 64893 - protein, 44 aa, Zea mays
  Coding DNA Sequence Number=SeqID_21518
MGVLRQAEITIHGATFHADLFVKPLAGFDMDNPLIPTTSISCSR

SEQ ID NO: 64894 - protein, 153 aa, Zea mays
  Coding DNA Sequence Number=SeqID_21519
  Homolog annotation: Hit_ID=Q8H613; Match level="QueryCoverage=72%, HitCoverage=19%, E-value=8e-32, Identity=63%"; Hit description =Nodulin-like protein
  Pfam annotation: Domain name=Nodulin-like; Domain location=56-153; Score=-32.9; E_value=7.9e-09; Accession=PF06813.4; Description =Nodulin-like
MALDWITYIVAGAKDLIVHFLPMGMPSAVHHARWSVLPSASEMRGPASVKAGSRPPWLGLGAAAWVQVAGGAGSTFALYSHALKVALGADQSRLALLGVACDVGENLGLLPGVLCNRLHPALLLIIGAGACLLGYGTAWLLVSGVAPALPYWL

SEQ ID NO: 64895 - protein, 55 aa, Zea mays
  Coding DNA Sequence Number=SeqID_21520
MRRIVLAIKDDQVLNMEKSNEKRQNAWAQGKDFLKAPDIFNDATYMITRNEVDMH

SEQ ID NO: 64896 - protein, 68 aa, Zea mays
  Coding DNA Sequence Number=SeqID_21521
MSYEAQPPRSMHARHWPLNAVVGLRRLFITDRGCRLGDGRCRTYQKRITSLIPCGSSDEEPMVIGSRK

SEQ ID NO: 64897 - protein, 67 aa, Zea mays
  Coding DNA Sequence Number=SeqID_21522
MAITGDVSAAVQGGAAMRGQLEDEGGVCAIGSSGGGLEGPPYRFGWMNLSPRLEIQRSVLTSTVVAE

SEQ ID NO: 64898 - protein, 175 aa, Zea mays
  Coding DNA Sequence Number=SeqID_21523
MALRIIGPAGLSREISILSFGVDDSLGAPKSKKGRSSSHHSDDKRKREPTPPSEDFGDSEYSEEEFSSESEGSSVHASPLASSDDSDDSQGIAAKVWTYIRAVERAGLEGSDESEVSSDKGDSSDSSEEGSDGDDGGEGDGGDGDGGGDGSKGDGKGDSGSGSGKGDSGSGKASG

SEQ ID NO: 64899 - protein, 75 aa, Zea mays
  Coding DNA Sequence Number=SeqID_21524
MAAHSHRRGDRERGALALLGYPARASGPTSEISEQKAGWTGRKKDDPVASGHPSRSWRAAHTVPRAEKAAPILGF

SEQ ID NO: 64900 - protein, 351 aa, Zea mays
  Coding DNA Sequence Number=SeqID_21525
  Gene Ontology: Mol. function=hydrolase activity, acting on ester bonds; Cellular component=cellular_component; Biological process =lipid metabolic process
  Homolog annotation: Hit_ID=A2ZQN3; Match level="QueryCoverage=91%, HitCoverage=79%, E-value=1e-98, Identity=53%"; Hit description =Putative uncharacterized protein
  Pfam annotation: Domain name=Lipase_GDSL; Domain location=28-337; Score=160.0; E_value=6.5e-45; Accession=PF00657.13; Description=GDSL- like LipaseAcylhydrolase
MQHVILCLQISLLLSSFSYSMQAQYTSIFSFGDSYTDTGNKIILYGPAAADLWINKPPFGMTFFGHPAGRLSDGRLVIDFIAQALGLPLLPPSLAKDQSFKQGANFAVAGATALKTSTTSPALYPQLAVAGGAVPPPNNISLADELGWFDAMKPALCGSPQACKDYFAKALFVVGELGWNDYGVMVKLINDGATAVVVSGISPMGCAPGNLVLLASQDPADYETDTGCLKGMNELSRDHNAQLSQALTTLGGRYPGALVTYADLYGPVIAFAAAPARFGFDSVLRDCCGGGGGKYNFNLSAACGMPGVAACPNPSAYVNWDGVHLTEAAYHRVADGWLRGPYANPPILATA

SEQ ID NO: 64901 - protein, 219 aa, Zea mays
  Coding DNA Sequence Number=SeqID_21526
MVTSSLMVGESEPGCGLSPSLCLKDFHHQGRGGDCNVPGFRTRVASEPLAALASAAAAGRGSSASVIAKAGHGPTSNSTAFCPSLSYEFWHGRGPPGSSIRPEVSAAAVRPPGAEVVVVAAAGAGDGAPFVGLPLLRRPSPMEWGYSPVGYLNRFTKHESPRVKMTSEHEQRRSWLENENLVGRSLTVSSVSGADAGVDQPRPRIGLAPLEDGWPRPQE

SEQ ID NO: 64902 - protein, 331 aa, Zea mays
  Coding DNA Sequence Number=SeqID_21527
  Gene Ontology: Mol. function=hydrolase activity; Cellular component =nucleus; Biological process=metabolic process
  Homolog annotation: Hit_ID=A2WKT9; Match level="QueryCoverage=99%, HitCoverage=75%, E-value=6e-88, Identity=54%"; Hit description =Putative uncharacterized protein
  Pfam annotation: Domain name=Abhydrolase_3; Domain location=77-310; Score=222.4; E_value=1e-63; Accession=PF07859.4; Description =alphabeta hydrolase fold
MSGDTAPHVVEDFFGAIQLLSDGTVVRGDEAALLPPKPFPDVPGVQWKDAVYDAARGLKVRVYRPTADAGDSKLPVLVHFHGGGYCVGSYDELGGADYLRRRLAADLPALVLSVQYRLAPEHRLPAAIEDGATFLAWLRGQAALAGAGGAGAGVEQWLAESADFARTFLSGVSAGANLAHHLAVRAGSGQVDLAPARLAGLVLLSLFLGGVERTATESAPPDGVSLTVAMSDQLWRMALPVGASMDHPLANPFGPGSPGLEPVALPPVLVEAPGVDVLRDRVLLYAARLREMGKDVELAEFPGEQHGFSVLRWGQANEELMQILKRFLHRK

SEQ ID NO: 64903 - protein, 409 aa, Zea mays
  Coding DNA Sequence Number=SeqID_21528
  Gene Ontology: Mol. function=hydrolase activity; Cellular component =nucleus; Biological process=metabolic process
  Homolog annotation: Hit_ID=A2WKU8; Match level="QueryCoverage=82%, HitCoverage=96%, E-value=1e-107, Identity=60%"; Hit description =Putative uncharacterized protein
  Pfam annotation: Domain name=Abhydrolase_3; Domain location=158-383; Score=263.4; E_value=4.8e-76; Accession=PF07859.4; Description =alphabeta hydrolase fold
  Pfam annotation: Domain name=Peptidase_S15; Domain location=126-384; Score=-111.4; E_value=0.051; Accession=PF02129.9; Description=X-Pro dipeptidyl-peptidase (S15 family)
  Pfam module annotation: Pfam domain module=Abhydrolase_3::Peptidase _S15; Domain location=158-383::126-384
MALTLVAGHPNLYPKGVRCCHVLANIGENEASPECLPDPQPRAEYKIHLQFLKPWIIGELPFHAVESSTMSSAPAPRVVEDYRGVIQLLSDGTVVRSDPAVLRPSGEHFPDVPGVQWEDVVYDAAHGLSLRVYRPAAATATAGDAAREEEKKKKLPVLMYFHSGGFCLGTFSQPNFHAGSLRLASELPAVVISADYRLGPEHRLPAAIDDAAAALSWLREQRHPWLAESADFTRVFVAGESSGANMSHHVAVRHGSSGGQLALALAPLRVAGYLLLTPFFGGAVRTAAEEASPPPGAPFTPEMADKMWRLSLPAGATMDHPATNPFGPDSRALGPVAFPRVLVVSAGRDFLHERVLRYAARLREMGKPVEVYVLEGQEHAFFSRQPWSEGTDELIRVVRRFVYTENGVE

SEQ ID NO: 64904 - protein, 96 aa, Zea mays
  Coding DNA Sequence Number=SeqID_21529
MAACPRRGGHHGFREDEDPVCGPGFGLMHKHRNLSMMHKFMFLSARLGLRGGKLGLMYLRLRGGKLGSATLNKGGELGGLELGAIEVRRERSIQLA

SEQ ID NO: 64905 - protein, 241 aa, Zea mays
  Coding DNA Sequence Number=SeqID_21530
  Subcellular localization annotation: CTP_CleavageSite=82; ConfidenceScore=5.12e-01
MEAQAHTSCNQRAGYYVQKTAPPLATTVPPRLRNQYRDSRQPSASPNGANRAHQPRDGRHLWRAKQATLHLRHNDRVKKGVRRLAPEGFDSRLRRRARDDPGVRLTAAKSGLGRHRKLRLARPQGSDSGSAPEDDELRLARPQGSDSGLAPEDDELRLARPQGSDSGSAPEDDELCLARPQGSDSVSAPDDGLRLARPGARTRPRPWKTDSTPTSEEPPPRLTQGSDRPRHRRGHHYPTPS

SEQ ID NO: 64906 - protein, 244 aa, Zea mays
  Coding DNA Sequence Number=SeqID_21531
  Pfam annotation: Domain name=zf-CCHC; Domain location=105-122; Score =9.1; E_value=0.065; Accession=PF00098.14; Description=Zinc knuckle
  Pfam annotation: Domain name=zf-CCHC; Domain location=86-103; Score =5.5; E_value=0.22; Accession=PF00098.14; Description=Zinc knuckle
  Pfam module annotation: Pfam domain module=zf-CCHC::zf-CCHC; Domain location=105-122::86-103
  Subcellular localization annotation: CTP_CleavageSite=41; ConfidenceScore=5.19e-01
MDSPTRLTRSGAESLPSFKDVVSKLQVNRVGSSKPPRPLCSASEAGAGPTDLQAEDGGGWMLVVSKSSRKQAQRKQRIAHLVELNGRCLKWLARGHFVRFCKQGTRCFCCKALGHRSYNFPEGDSLQATRHAVRVLVWEWLTPEFFREPACHGFVLRTSVWLRLKDHVGRRVLKPNAVWRLKDHAGRRMSKPNAIWKRISPSGVEIGGSWCVVSEVAAPSNGLHQQGQNPVSAEPRGDDLSPRP

SEQ ID NO: 64907 - protein, 29 aa, Zea mays
  Coding DNA Sequence Number=SeqID_21532
MAWLGMGVARARPQRTALPRLCLDKYFNP

SEQ ID NO: 64908 - protein, 62 aa, Zea mays
  Coding DNA Sequence Number=SeqID_21533
MSWLSEVRRDLREGTAVGAVEFLLDVALLSEKELGVAVVPEACEAPIMAHSGGAGPDGTAGS

SEQ ID NO: 64909 - protein, 187 aa, Zea mays
  Coding DNA Sequence Number=SeqID_21534
MRATNREMVKGFTRSTCAGEFLNSGERDLASPVTRALGLSLSKAHGFTRKRSGGLTRTEGDWRGVGHGGGSRAALAGRGEVAGGNGWLGRVRRGTEEVTGKATERWGGFYRRGRGRGAGSTVWRDAGTRGARAGVLWRAQSASNTWRVASARVLRSAERPGVRILPYRLWEISSLHLELPSSCEFQE

SEQ ID NO: 64910 - protein, 82 aa, Zea mays
  Coding DNA Sequence Number=SeqID_21535
MAGGKQLAGAKEGCLAGGGFELGIKVNTLDLWLKGSIRVFVGVAHFAFLKNPFVLNKTLLSISLVDSLFLSQFDVPAQFWFT

SEQ ID NO: 64911 - protein, 171 aa, Zea mays
  Coding DNA Sequence Number=SeqID_21536
  Subcellular localization annotation: CTP_CleavageSite=33; ConfidenceScore=5.10e-01
MASGRTLRKQGPHPRPHSRGEDKLSKPKGRRARHAAAASATNGERPSPRSLREGAGRCPRGDQPQLGALPSPALMMNILEAEGGAEAAARLASPHPGTGAATVDPGPRRVPVAAEESPEPALSLSARPARALSARPRLSACPRPALPARPRLSAAQAAARPPAGSNPDRSL

SEQ ID NO: 64912 - protein, 116 aa, Zea mays
  Coding DNA Sequence Number=SeqID_21537
MANTQWEWRDGESSVYPPCTMDQAVSLAARSRRFESNFNLARNWTDSVIEFMKSITSKRSGLWLSDFNTSKIRNWTDSGAGLVKSITPKRSDLWLSNFSTSKIINLSTTFLYAFST

SEQ ID NO: 64913 - protein, 41 aa, Zea mays
  Coding DNA Sequence Number=SeqID_21538
MAGAGDVVVRVPSLSLAAGEPLAGRFALPVEVPEALVLQMG

SEQ ID NO: 64914 - protein, 233 aa, Zea mays
  Coding DNA Sequence Number=SeqID_21539
MTCGPRPSRWPTECDEAERVHNRGAVACLLHVGMITSLVVGRSKPGCGLCPALSFKDVHHPCWGGGRTELGPASAWAGDPLLPPAFEGGGHPPALRRRRPPAMRGKANCCCQDRVQLSFFHPGDGRRRHRGVAQHVIRREGGTRVLGRSRSRSRGESGSEDLSVRFGAAAARWCGVGGQVAAVVGAEVVVAIGEAASAEAVAFADETVSATCAPNLQLFGLNGWFSSLVRGRE

SEQ ID NO: 64915 - protein, 256 aa, Zea mays
  Coding DNA Sequence Number=SeqID_21540
MGSGEAESSSRGRGLRSGEAELPVAPEAELAVVSLARVAGTAVGAGIRCQAILALNAPAIRSVGEAIWPRLLLDEACPSWASGEPRMPSRTRAHDGAGTSRGREDTPNPPLVPPTLAEAIAALVNATADNTRFLREMAGNQFQQHGGRAPPQGLHDTTYSEFSETRPPLFIKAEEPLEAYEWYAIDQVNTDLKKKNCFMRGLNDRLQRKMATCLHLTYSRAVSTSLEVESKNAGHENQRGLEVKGQIKGLRRELGW

SEQ ID NO: 64916 - protein, 310 aa, Zea mays
  Coding DNA Sequence Number=SeqID_21541
  Homolog annotation: Hit_ID=Q6J9V9; Match level="QueryCoverage=30%, HitCoverage=32%, E-value=1e-38, Identity=83%"; Hit description =Putative uncharacterized protein
MSRLLNCGTSATTRGIPAHEPTVPIEGNDHGRALSRGMKTVCPCSVPRMACTCATAAPRIACPVALTPRQASDTFGRDRERGYFERDHSPRRKRGPSPTTDQGFEGWPLGRVRQPPQSTRAPRPLLIRGSKAGPSEGFDSCPRARRVRDDSGYVHYMAEARPTLPRYPRTFPRPAGAICNGIPLEGGIEPSDPIERVRVRQITCSSGQGFVYPRDVIWPRPSPASGGNCSPRRSYVSPEGLLRQWVHPLLARGPARAGFVEKQPWPNRLSNRPYRRRIQCEDHLTPYPDTRASVGKVEVTAVTSPFHCTI

SEQ ID NO: 64917 - protein, 392 aa, Zea mays
  Coding DNA Sequence Number=SeqID_21542
MDGCMYVCTRIENDPVEEPEELTGEAPEQQSVGGGKCPLTYLCPIHSLIHLPHYTFMPKDVAMRLMVLVMTMVLMARLRHTSRKSVIPFLPSRLAERPLRRPVAGQSSHLERLHHRLHEEQERRRQEQQGSSFSLQQEIESVRSCSPVLPLEAPPTPPLGAPASGVAAGGDLDDGGGDDSSSHDTDFSADQEPEGWVARPTTRDAAHGCHFHDALDTLLRRALNRRTWSIKYRCVVYQHTRGVYPDRWEATCLVHRPENSLHGAEMLHDMRFSHYCSVLGGVADGLNLKYYPHRPSGSTRGMIVSPVGEGNPRLSSTVILAAVLNTELDHVLEELSRARAKIALLRAERAERRHLDDDSPAPVGTQHPYRSPRRGCQSYGNPDCKTKINLEP

SEQ ID NO: 64918 - protein, 177 aa, Zea mays
  Coding DNA Sequence Number=SeqID_21543
  Homolog annotation: Hit_ID=Q10P78; Match level="QueryCoverage=99%, HitCoverage=52%, E-value=1e-75, Identity=76%"; Hit description =Expressed protein
  Pfam annotation: Domain name=Methyltransf_12; Domain location=8-104; Score=6.3; E_value=0.1; Accession=PF08242.3; Description =Methyltransferase domain
MEMSKKVLELGSGYGLAGLVIAASTNADEVVISDGNPQKNISINAETFGETKVKSLILHWDKEQASEMLNTFDIIVASDCTFFKQFHKGLARTVKSLLKHSATSQAIFLSPKRGDSLDKFLGIIKENGLSCELIENYDPTVWNLHKKLVAGEDRTWPNYDKEHCYPLLVRIGYFSEF

SEQ ID NO: 64919 - protein, 471 aa, Zea mays
  Coding DNA Sequence Number=SeqID_21544
  Gene Ontology: Mol. function=protein binding; Cellular component =protein complex; Biological process=negative regulation of protein catabolic process
  Homolog annotation: Hit_ID=O82143; Match level="QueryCoverage=81%, HitCoverage=96%, E-value=1e-146, Identity=73%"; Hit description=OsS5a
  Pfam annotation: Domain name=UIM; Domain location=275-292; Score =16.4; E_value=0.11; Accession=PF02809.11; Description=Ubiquitin interaction motif
  Pfam annotation: Domain name=UIM; Domain location=343-360; Score =23.8; E_value=0.00065; Accession=PF02809.11; Description=Ubiquitin interaction motif
  Pfam annotation: Domain name=UIM; Domain location=376-393; Score =16.2; E_value=0.13; Accession=PF02809.11; Description=Ubiquitin interaction motif
  Pfam module annotation: Pfam domain module=UIM::UIM::UIM; Domain location=275-292::343-360::376-393
MKRMRMNDKTKRTQMLHGAARDPLGADDGDGEEESIGGSELEMRHRKPFPDSGGDMVLEATMICIDNSEWMRNGDYAPSRFQAQADAVNLICGAKTQSNPENTVGVMTMAGKGVRVLVTPTSDLGKILACMHGLEVGAEANLAAAIQVAQLALKHRQNKRQQQRIIAFIGSPVKYDKKILETIGKKLKKNNVALDIVDFGESDDEKPEKLEALIAAVNSSDSSHIVHVPPGENALSDVLLSTPIFTGEEGGSGFAASAAAAVATGASGFEFGVDPNVDPELALALRLSMEEERARQEAIAKKAAEDTSNTENINASSSNSDSVMAEAELASNAAAGDKQEQPKDDDDLLQQALAMSMEGGASGSAAVTDSAMAEAGAVDPDLALALQMSVQDANMSSDTDMSKVFEDRTFVSSILNSLPGVDPNDPSVKDLLASLHSQGEGIRPTFSPSSELHLIWTLYAPMKDLDMLSSM

SEQ ID NO: 64920 - protein, 69 aa, Zea mays
  Coding DNA Sequence Number=SeqID_21545
MSVPTRRDSVVSPDHADRSSAPSGGRRVGGRFAADMAIAKVCGGGVSGGLEAAEHRGSSRRYRVWRQNT

SEQ ID NO: 64921 - protein, 252 aa, Zea mays
  Coding DNA Sequence Number=SeqID_21546
  Homolog annotation: Hit_ID=Q10P95; Match level="QueryCoverage=14%, HitCoverage=15%, E-value=2e-10, Identity=88%"; Hit description =Expressed protein
MENVLLDRSSRSLEYPRRAPLGRSRRGPAGGARPAVPGGSHSSSFPMVQPFNHLRTKGGAWASAPALIPYARPSVPLLPSNQPPLLPLPPTAMEYVTFPGLPAAAQPPPPPAPRAGRAAAATATVSVPAAAPAAPAPRQRDRRRRSARPPPAAMERSTAQKKKKPLERATPLPPAPVVTEALDDLEQEVARNFVEDLLHVLAPPPSSLPLPRFSVVVKASPAKDARLVARAAAPACNVEAATADSIRGLLRL

SEQ ID NO: 64922 - protein, 156 aa, Zea mays
  Coding DNA Sequence Number=SeqID_21547
  Homolog annotation: Hit_ID=A2YA49; Match level="QueryCoverage=62%, HitCoverage=30%, E-value=2e-29, Identity=70%"; Hit description =Putative uncharacterized protein
MCATASDQSFTFSCVDLEVLQEHVVTVFSVETCYRSISVLVFWWPCFPVKIYASSLGIAKGIDNVILSVICTATGVLIAALGDFSFDLYGHCMALTSVFFQTMYLILVEKSGAEDGLSSVDLMFYNNILSLPFLFFLIIATGEFPHSLTILPAKGQ

SEQ ID NO: 64923 - protein, 413 aa, Zea mays
  Coding DNA Sequence Number=SeqID_21548
  Gene Ontology: Mol. function=transcription factor binding; Cellular component=intracellular; Biological process=regulation of transcription, DNA-dependent
  Homolog annotation: Hit_ID=Q10P96; Match level="QueryCoverage=79%, HitCoverage=96%, E-value=1e-133, Identity=73%"; Hit description=GTP -binding protein, putative, expressed
  Pfam annotation: Domain name=Arf; Domain location=17-200; Score= -85.2; E_value=0.0047; Accession=PF00025.12; Description=ADP -ribosylation factor family
  Pfam annotation: Domain name=MMR_HSR1; Domain location=27-166; Score =21.7; E_value=1.1e-05; Accession=PF01926.14; Description=GTPase of unknown function
  Pfam annotation: Domain name=Miro; Domain location=28-166; Score =41.7; E_value=2.6e-09; Accession=PF08477.4; Description=Miro-like protein
  Pfam annotation: Domain name=Ras; Domain location=28-202; Score=-6.9; E_value=7.3e-09; Accession=PF00071.13; Description=Ras family
  Pfam module annotation: Pfam domain module=Arf::MMR_HSR1::Miro::Ras; Domain location=17-200::27-166::28-166::28-202
  Subcellular localization annotation: CTP_CleavageSite=70; ConfidenceScore=5.18e-01
MFWKDSGSRSSSGSGRDQNGVGPFGQVRVLIVGDSGVGKSSLVHLILKSSAIARPSQTVGCTVGIKHVTYGSAGGSSNNISDAERNFFVELWDVSGHERYKACRSIFYTQINGVIFVYDLSQRKTKTNLNKWAVEVAETGTFSAPLGSGGPGGLPVPYLVIANKVDIVPRDGARASRGNLVDLARQWAEKQGLLRCSEELPLTESFPGNSGLVSAAKQARYDKEAVIKFFRLLIRRRYFSNEPPAPSPWSLAPREDTILPMETLGDGADSFQRKSLSGEGFLYNGLVPLPAQRNLTPPPTLNPQQPVSPLDNYRYHRFSSSSLPDITRKWFFLLFVSFPSSTCIHLEYVLTGMEAIHDTPVYLQRQILMNDAENYTFKTTAKIWIQARTILKAPWARLTRYEQIDRISRARLQ

SEQ ID NO: 64924 - protein, 126 aa, Zea mays
  Coding DNA Sequence Number=SeqID_21549
MTQMIKRTPTTRDDRTAKQLRHHITSGMAKAAMPSDGRGRSGQRMRGGGRGRGGRQAKGVQWLGAVTTREKSSGSKILHRQVKRVKLHRTRVINGKLTNGEKTLNNVRGNKNVSEAKVAGKDPITC

SEQ ID NO: 64925 - protein, 107 aa, Zea mays
  Coding DNA Sequence Number=SeqID_21550
MEGAKSEGGGEHWFQTLVLRNSGKQKWSRLGLNESEKRKFWKDLDGMVKNAGYELAHGGSRYGSRNQEEDILDFVVAYNLVIANTFFRKRDSHLVTFSSGRECCAPT

SEQ ID NO: 64926 - protein, 153 aa, Zea mays
  Coding DNA Sequence Number=SeqID_21551
  Gene Ontology: Mol. function=zinc ion binding; Cellular component =nucleus; Biological process=chromatin assembly or disassembly
  Homolog annotation: Hit_ID=Q53KK6; Match level="QueryCoverage=61%, HitCoverage=11%, E-value=4e-33, Identity=71%"; Hit description =Putative uncharacterized protein
  Pfam annotation: Domain name=Myb_DNA-binding; Domain location=9-54; Score=48.9; E_value=1.8e-11; Accession=PF00249.22; Description=Myb -like DNA-binding domain
MKDGSDTDGDRWTDQETLLLLEGIEKFNDNWNHIAGHVGTKSKAQCIHHFIRLPVADGLLENIEVPEASLPSGMQSCGFLHSDSNGSTSVHHKQRVNVRYTTTSDEATTPQEVLFFFPDCSDYRRMDEHDQYESVGLDDSLEDERNLDETMVD

SEQ ID NO: 64927 - protein, 343 aa, Zea mays
  Coding DNA Sequence Number=SeqID_21552
  Gene Ontology: Mol. function=nucleotide diphosphatase activity; Cellular component=basolateral plasma membrane; Biological process =metabolic process
  Homolog annotation: Hit_ID=Q42974; Match level="QueryCoverage=97%, HitCoverage=78%, E-value=1e-163, Identity=72%"; Hit description =Nucleotide pyrophosphatase precursor
  Pfam annotation: Domain name=Phosphodiest; Domain location=4-282; Score=242.8; E_value=7.5e-70; Accession=PF01663.13; Description=Type I phosphodiesterase  nucleotide pyrophosphatase
MASPPHSVEYKAPLPHIHRIFANGTSATEGLVPVFPTLTFPNHYSIVTGLYPSSHDIINNYFPDPISGDYFTMKNHDPKWWLGEPLWATAAAQGVLSATFFWSGSEVTKGSWNCPDKYCRHYNGSVPFEERVDTILGYFDLPPNQMPQFLTLGMFEDVNIILVGDHGMVGTCDRKLVFLEELAPWIELKSDWVLLMTPLLAIRSPDGVSPTEIVAKMNEGLGSGKVKNGEYLKMYLKEELPTRLHYSESYRIPPIIGLVGEGYKIEMKRSKRNECGGAHGYDNAFFSMRTIFVAHGPRFQGGRTVPSFENVEIYNVMASILNLKPTPNNGSASFPGTIPLPNK

SEQ ID NO: 64928 - protein, 73 aa, Zea mays
  Coding DNA Sequence Number=SeqID_21553
MCRVGAGAGQLVGGGLELAGGRVREREAAAGKGAGGGGSRALGKDVFAECQLTGTRQRHISRVPTDKHSAKRM

SEQ ID NO: 64929 - protein, 62 aa, Zea mays
  Coding DNA Sequence Number=SeqID_21554
MANEVIKKNGKESHDAREEAKRAKEATERTMIIAGLSPPPEPYNPEVDPVMKEALDVMKIAN

SEQ ID NO: 64930 - protein, 289 aa, Zea mays
  Coding DNA Sequence Number=SeqID_21555
MTSHGSSDGGNAQSHIDGLAQEGFPRILWEVLQGASYTTPPQYAVQLFEKHRVPRCRVRMTLEPHPLQPGWRSLDSESFGYRAEDTIEAIALHGLTTFCGFHPLELSTHPIGLFLAEKEDDPMWKDRVEHAKDIWAIYPGQAAHLTVRCMNALYRLQVMRGEAMSHLMALLEATKITLDNREELVVDLSTEMVEKDLQVEQMSNEIQELKELVGTRENTIKVLEDQLINTQQQLAEANQHLDMHHQEIQDMEANKDVDIEGGEEPASSLDTAGSGIPPSPESSVASFAH

SEQ ID NO: 64931 - protein, 180 aa, Zea mays
  Coding DNA Sequence Number=SeqID_21556
MARHSVPTHINRPHRFPGNKKGLTALAYNASLTPTAVVHLGRHRKLRLAQPQGLDSTSTLDDGLRLARPQGSDTASASEDGLRLARPRAQAQPRRWTTDSASPDPRAQTQPRPRKTVSASPDPGLGHSLGLGRRSPPRPTQGSDSTLEDGLDLDLGGASASPDLGLGPTTSQGGPSLPYP

SEQ ID NO: 64932 - protein, 135 aa, Zea mays
  Coding DNA Sequence Number=SeqID_21557
MVGWRGDLAKVASLRRLGLGRAEGDRTRAETNLHVFDVHCARQSTPDARPRMPHVAPSRAGTVARAHAYKATRGFGRTPPHVLDLTGALDHRRCHAHGMPAATRSPATVDRPAEPLPTPSDPWSRPCVPRSPDFA

SEQ ID NO: 64933 - protein, 139 aa, Zea mays
  Coding DNA Sequence Number=SeqID_21558
MTWLQQDSMVCVWAKLRRGAAQHGGEQRRDQSSGDGTCSSDAGNSAAGTGTRRCRTVETIAQTTCGSSSQHERWEMEATASSRGLALVFIGRGRGSSSSADMPLMTTLTPARNDREKKNGCVNGERNGLGAGLNCFEGH

SEQ ID NO: 64934 - protein, 136 aa, Zea mays
  Coding DNA Sequence Number=SeqID_21559
MVCVWAKLRRGAAQHGGEQRRDQSSGDGTCSSDAGNSAAGTGTRRCRTVETIAQTTCGSSSQHERWEMEATASSRGLALVPKVQLLELALSSKEANKGEQWRQQGYVLWGNSSVNLASHGHCAGVFIGIQVPSALC

SEQ ID NO: 64935 - protein, 1021 aa, Zea mays
  Coding DNA Sequence Number=SeqID_21560
  Homolog annotation: Hit_ID=Q7XBD4; Match level="QueryCoverage=21%, HitCoverage=22%, E-value=9e-08, Identity=26%"; Hit description =Cinful1 polyprotein
MPPAAASSEETLSNVMVEELRAGDSVDFGVSRMTSARVEDMQRLGYFGGGVARAPGTEEVPEPEEEDGGGRSSQFGSCTFTPKTGKTTMPVVELVPCARNKWGNWNEFWFYVAEGTVEDHEGLPVSEMCSHYYSAYPPFEVAEEDADEGALRCAAGHSSGRDLVEEFVAYRVWPLAHGWALGEVCPRQMPFHGGRVVRSPAFALNLRNRDPAAFVRDAEDLAVRLVGRYVPRTEGQRSFDIRGSNDRLNRVFELNQLPYDGYPGQDEADRRGKKPAVETGGDPALAAAPSSKKRKLGTAMGGLGVSDSFARELMRTCAAPGERMSSPELRESSARMLRRWTRIAKGRRKNARRLSGFTKLGRKGSGELRRLRPPAEASHRWRRRRAPSAPSKAPEATAGAGGSKLTKVVPPASGVTEASKAARTLPPPGKRVADFGTEINVDDYLGGSDEGQLAIVAPAVAIATAALAPKARGETLGAGGEVSALAMVRDEAGVATRRLKGVTEALSQATEALSQVADFTSRTASGALTAALSAEVERLRTQHADAVREKSASDSKCRKLADRVAALEKEKADLRRQLAGERREANEAIAKEQAAQAEARLARAEGNIAKELAGELQGRLTALESRAEGAEAAMRAEAERTRTQLMAAYRELGARTGDFEVPEREAGLRCLEWVQEELQELPTVLEGLMSFTSLVTCEAAMNALSREGCRHFEALDQADEDFGRDIFEVEDPVVKESARALYGRMWGSFGREVVRERAEAARAQAERGERVDDFGALNSALPDPETTPAEAATEVALGPTPETAKDAPGTPASAAAGEDLPPKVAGGAPDAPAAAVPSAEDPAAVVAEASAEASAEAPAAAGPSQVQDFGPAHATATTDFLAASTAEDGNECGGSVSELFDFIDSGSSVEWTEESSEEDLDYFAALDVAAAEAAPHAADAPDVPGPSTGRRRRRAVAKRRVSAEEGARLRVSRAGRQELLSLPAAAGAGEGELRSLFAGEELRIMLFNYREMGIIPKVEPM

SEQ ID NO: 64936 - protein, 327 aa, Zea mays
  Coding DNA Sequence Number=SeqID_21561
MARLRHTARKSVIPFLPSRLAERPLHRTVSGQSSHLERLHHCLREEQERRRQHREQQGSSSSPQQEVETVRPRPSVAQLEVPLVPPQDVPAVGGVVGGATGGDPDDDDSAHSTESSEPQEAEGWVARPITRDAARGCHFHDALDTLLRQAFDRHTWSIEYRCVVYQHSRGRYPDRWEATCLVRRPEDDLRGAEAVSEHYSISERDTAEAAMQDAARRALSQYCSLFGGVADGLNLRYYPCRPTGSTERLSSTVNLVAVLNTELDHSLDELSRARTEIAELRAELAERHHQEGGSPAPVETQHPYRSPPRGHHTYGSPVCKTRIDLDP

SEQ ID NO: 64937 - protein, 236 aa, Zea mays
  Coding DNA Sequence Number=SeqID_21562
  Homolog annotation: Hit_ID=Q6J9V9; Match level="QueryCoverage=78%, HitCoverage=46%, E-value=2e-17, Identity=39%"; Hit description =Putative uncharacterized protein
MAERTGGTFGRRSRRRFTSAIMTASKKGPGKGILRKGSFSAKEAGPEPPTDQRFEGWPLGRVKQPPQSTRASSPLLIRGLKAGPSEGFDNRLKELGLRAHHWLEVRRLAPRSGSTAASSHSGSTPTTDQGFVGWPPKGSTAASEHAERGMTLGTSDTWSRLGLRSRGTLGHFRDQQERFCNGIPSEGGIEPSDPIERDRVRQITCRLQGSDQVFITAKVEAILSRVKLRTTSNHKI

SEQ ID NO: 64938 - protein, 114 aa, Zea mays
  Coding DNA Sequence Number=SeqID_21563
MAGRRDGRVAAGASALHRGSLIRSKEVFAGRCLPPDHLDPGANRGADRSSAVRTCAGGLITNRALYHGRVAFRQPDSQFWSPILSQFLMTTHVKLCKKIVEQCTIYHVAIWCCH

SEQ ID NO: 64939 - protein, 312 aa, Zea mays
  Coding DNA Sequence Number=SeqID_21564
  Gene Ontology: Mol. function=zinc ion binding
  Homolog annotation: Hit_ID=Q5JNB2; Match level="QueryCoverage=14%, HitCoverage=14%, E-value=8e-09, Identity=64%"; Hit description =Putative uncharacterized protein P0020E09.24
  Subcellular localization annotation: CTP_CleavageSite=55; ConfidenceScore=5.10e-01
MASSGEANHWAIKNCSPVLGWSSLCRKEKMVMSPSHRSWQEMPSSHSGSQDVVCRRGLVVGECTVTLLTVKKKATLRLARQELEDLYLGVPDDSVDLTFRDFAFHPAPAAAKTSPAAAAAATTTSNFLPNNTAAIADHVSVDGDADDERKATAGALARSSTTNIFTYRPLEDHEDVAAGGGGGLAAAVGRGGLLQLSPIPASPPTPTARLAHSDDDDEDYADHHHHQYHHHPAAAANAGTTSSSRSGAAGGRPSRRSHVADDAVGGRERHAAYSSNHRRPGIPHSSICALCNNYVYVFRHRCLFEIDSGHVN

SEQ ID NO: 64940 - protein, 104 aa, Zea mays
  Coding DNA Sequence Number=SeqID_21565
MYEAKERDVLAYIGLAKIEVLSPGAIHGIRWRLRLDNRTRNGRSKIPLQRPPASRTEFWPVSSPLDTKLVWLDCGDKRGGKDAKAPTTGFITVTQPGVEALVVA

SEQ ID NO: 64941 - protein, 89 aa, Zea mays
  Coding DNA Sequence Number=SeqID_21566
MAGRRDGRVAAGASALHRGSLIRSKEVFAGRCLPPDHLDPGANRGADRSSASRSDRSHFAAPLTDLTGKQRRLPHSDCCATRQSEADSS

SEQ ID NO: 64942 - protein, 767 aa, Zea mays
  Coding DNA Sequence Number=SeqID_21567
  Gene Ontology: Mol. function=identical protein binding; Cellular component=extracellular region; Biological process=negative regulation of catalytic activity
  Homolog annotation: Hit_ID=A2YF68; Match level="QueryCoverage=96%, HitCoverage=95%, E-value=0.0, Identity=74%"; Hit description =Putative uncharacterized protein
  Pfam annotation: Domain name=PA; Domain location=377-475; Score=52.7; E_value=1.3e-12; Accession=PF02225.13; Description=PA domain
  Pfam annotation: Domain name=Peptidase_S8; Domain location=134-607; Score=52.8; E_value=1.2e-12; Accession=PF00082.13; Description =Subtilase family
  Pfam annotation: Domain name=Subtilisin_N; Domain location=30-115; Score=63.3; E_value=8.4e-16; Accession=PF05922.7; Description =Subtilisin N-terminal Region
  Pfam module annotation: Pfam domain module=PA::Peptidase _S8::Subtilisin_N; Domain location=377-475::134-607::30-115
MASSPRTAMFFLALSLALLGDDLRRCSASQVYVVYMGKAPQGDRAPRRRRHAGLHRQMLTAVHDGSSEKAQASHVYTYSAGFQGFAAKLNEKQAIRLAEMPGVVSVFPNTKRRLRTTHSWDFMGLSTSAEGQVPGLSTENQENVIVGFIDTGIWPESPSFSDHGMPPVPKRWRGQCQGGDANSPSNFTCNRKVIGGRYYLSGYQTEEGGAIKFVSPRDSSGHGSHTASIAAGRFVRDMSYGGGLGTGGGRGGAPMARIAAYKACWETGCYDVDILAAFDDAIRDGVDIISVSLGPDYPQGDYLSDAISIGSFHATSNGILVVSSAGNAGRQGSATNLAPWMLTVAAGTTDRSFSSYVSLANGTSVMGESLSTYRMETPVRTIAASEVNAGYFTPYQSSLCLDSSLNRTKAKGKILICRRNQGSSESRLSTSMVVKEAGAAGMILIDEMEDHVANRFAVPGVTVGKAMGDKIVSYVKSTRRACTLILPAKTVLGLRDAPRVAAFSSRGPSSLTPEILKPDVAAPGLNILAAWSPAKNGMRFNVLSGTSMACPHVTGIAALVKSVYPSWSPSGIKSAIMTTATVLDTKRKTIARDPNGGAATPFDFGSGFMDPVKALSPGIIFDTHPEDYKSFLCAIISRDDHSVHLITGDNSSCTHRASSSATALNYPSITVPYLKQSYSVTRTMTNVGNPRSTYHAVVSAPPGTSVRVTPEVINFKSYGEKRMFAVSLHVDVPPRGYVFGSLSWHGNGSDARVTMPLVVKLQTSGKA

SEQ ID NO: 64943 - protein, 447 aa, Zea mays
  Coding DNA Sequence Number=SeqID_21568
  Subcellular localization annotation: CTP_CleavageSite=46; ConfidenceScore=5.08e-01
MAARPFTRWSGRKWRDARNRWAVARTARGVLPPYRWRNATSRKLVPFSHRLASRIFISQPGRIPSPVVTQDGDHQLLGGEKQAGLRPLPSLSFKDVHHQCWGGECAELESVSARATARSFPQRSGGRAFAVRGAGSCRVSGSPARAASAPLPVPPSAMAAGRGFSADEIVGAARGLTFNSTAFCSSSPLEWGRGRGPYGSSIRPEVIAAAVRPLGAEVVGPSVAPQALQSWGVESLGSVGLAARGFSCLVKGNPRPLFDEPKPEAAVSARTEAELARKEDFVGRSLAGPSTGGTDAGVELLRPRAGLMSSGDSWLRLRGGRPSCLLEPDSWRRPWRRWPGRDADVVLRSGDPPTALSSEARSDFAEGVVDVEGAAAPPPSRREDLFGPRNHLSERELLIAEGVAVDLALTVGQLVRPGLQNFGDDERPFPGRREHVPPSGVLPQPKH

SEQ ID NO: 64944 - protein, 217 aa, Zea mays
  Coding DNA Sequence Number=SeqID_21569
MAPGQTLPLEGPRSRPLMGDENQPLKPKSWRPGVQVALTVSSAGATALAEATSSGDHHLSTDDSGHLPTNTAPSSGGRPKAHRQPKSARDGVSALLADSTFLEHKTRRDPLPRLTQAPSQLHRVGTAGIDGETTWGDSPPVCSARTPPRNLAWDVVRASGTRLGWSMVRMDGAVGTLQAYGAGVSHNSSSVYYTASNSHFTVAKAYEWTIRGLSSTL

SEQ ID NO: 64945 - protein, 167 aa, Zea mays
  Coding DNA Sequence Number=SeqID_21570
MGSTSVAFVLPLLEERDFVGVGALQPSLGFKDFHHAARLHSLTNEASRAAASAPPSASRIFIILVVAEGELSRGGGRTELGPASAWAGDPLLPPAFRGEGHTPALRRRRPPAMRGKANCYFVDRVQLSVLHPGDGRAARRPATSRSSLRCRLHNTSHAARVVVTPGF

SEQ ID NO: 64946 - protein, 242 aa, Zea mays
  Coding DNA Sequence Number=SeqID_21571
  Subcellular localization annotation: CTP_CleavageSite=71; ConfidenceScore=5.11e-01
MSWLARAVVGLAYQPVDGRGRAWSHQGPPASRTSDLCRSIGPSNRAMPRSLPGYALQPPPPRLRWRPDRARAGAGRPRFTRRSGQSAPLPGLLDEAARPLQGRAVGRPAAGRIRRCWDRCSARRGLAPWAPRAREAVTAPLSRRLGARARGRVVSERARVGALGQSPGTCHRASRGLGRPCPTCVGPGWPRRGRLRRARASNRVCDGLVSAGRAPVQTSLPEIGQRHRRHKFLHANEREDEQ

SEQ ID NO: 64947 - protein, 217 aa, Zea mays
  Coding DNA Sequence Number=SeqID_21572
  Homolog annotation: Hit_ID=A2YF71; Match level="QueryCoverage=65%, HitCoverage=66%, E-value=5e-16, Identity=40%"; Hit description =Putative uncharacterized protein
  Subcellular localization annotation: CTP_CleavageSite=30; ConfidenceScore=5.34e-01
MGSGLSSSHHRSSGASSSLHQPPAAAPALVVAADGSLREFVTPAAAPLLLPVSVSDVLGANADDDGGRYFVCSSSALYFETDVPALGASELLRPGQVYFVLPAAMLGRPLSGADMAALAVRASQALAAGARPPRGGRRPRGSTRARVVPAAAAHHAHAHGDEEAVNEKLNQRTLGGFETAPPRGPARKPAVAARPAPPVTVTVTERRALSTIEEGAE

SEQ ID NO: 64948 - protein, 1025 aa, Zea mays
  Coding DNA Sequence Number=SeqID_21573
  Gene Ontology: Mol. function=metalloendopeptidase activity; Biological process=proteolysis
  Homolog annotation: Hit_ID=A2YF76; Match level="QueryCoverage=100%, HitCoverage=91%, E-value=0.0, Identity=87%"; Hit description =Putative uncharacterized protein
  Pfam annotation: Domain name=Peptidase_M16; Domain location=1-151; Score=1.4; E_value=0.00027; Accession=PF00675.11; Description =Insulinase (Peptidase family M16)
  Pfam annotation: Domain name=Peptidase_M16_C; Domain location=103 -340; Score=55.3; E_value=2.1e-13; Accession=PF05193.12; Description =Peptidase M16 inactive domain
  Pfam annotation: Domain name=Peptidase_M16_C; Domain location=671 -919; Score=75.8; E_value=1.4e-19; Accession=PF05193.12; Description =Peptidase M16 inactive domain
  Pfam module annotation: Pfam domain module=Peptidase_M16::Peptidase _M16_C::Peptidase_M16_C; Domain location=1-151::103-340::671-919
MEVHVGSIDEEEDEQGIAHMIEHVAFLGSKKREKILGTGARSNAYTDFHHTVFHIHSPTKTKEYGEDLLPFVLDALSELLQHLHSENKLSNRFPIGLEEQIHKWDPDKIRRFHERWYYPANATLYLVGEIDDIPRAVREIEAVFEHTLSENEGNPVPSANPFGAMASLFAPKLPGGFTSNLTGEKSPATDKIKPAKRERQAVRPPVEHKWSLPGVAQDAKPPAIFQHELIQSFSINMFCKIPVSKVQSYKDLRSVLMKRIFLSALHFRINTRYKSSNPPFTSVELDHSDSGREGCTVTTLTVTAEPQNWRSAIKVAVHEVRRLKEFGVTMGEMTRYMDALIKDSEQLAMMIDSVPSVDNLDFIMESDALGHTVMDQLQGHESLLAVAETVTLEEVNTVGAEVLEFISDFGKLNAPLPAAIVACVPQKVHVDGAGETEFEIYPEEITEAIKAGLEEPIYREPELEVPKELITQSELDDLKSQCNPSFVPLTKEENAVKVFDSETGIAQRRLSNGISINYKITQNEARVGVMRLIVGGGRATEDSESKGSVIVGVRTLSEGGCVGNFSREQVELFCVNNLINCSLESNEEFIFMEFRFALRDNGMRAAFQLLHMVLEHNVWLEDAFNRATQLYLSYYRSIPKSLERSTAHKLMLAMLNHDERFVEPSPHSLQKLTLQSVKNAVMNQFVGGNMEVSIVGDFTEEEVESCVLDYLGTVRASSSLNTEERIEKISFRPFPSDVHFQQVYIKDTDERACAYIAGPAPNRWGFTTEGNDLFNVIRISDADAEVSEPVSLDLTGKRHVDVRSHPLFFGITLSLLAEIINSRLLQCFFKYVKCNRLHIIYAPLIGGLFTTVRDSMGLTYDVSFELNLFDKLGLGWYVIAVTSTPSKVHKAVDACKGVLRGLHSSRIVERELDRAKRTLLMKHEAETKTNAYWLGLLAHLQSSSVPRKDVSCIRELTTLYESATIEDLYLAYEHLKVDDSSLFACIGIAGAESGEDTNDDELDVDLHGMAPMGGRGLSTMTRPTT

SEQ ID NO: 64949 - protein, 293 aa, Zea mays
  Coding DNA Sequence Number=SeqID_21574
  Gene Ontology: Mol. function=metalloendopeptidase activity; Biological process=proteolysis
  Homolog annotation: Hit_ID=A3BDQ2; Match level="QueryCoverage=40%, HitCoverage=10%, E-value=3e-38, Identity=65%"; Hit description =Putative uncharacterized protein
  Subcellular localization annotation: CTP_CleavageSite=85; ConfidenceScore=5.83e-01
MASASFQPVAASAASAPPRPAPRHPFAAAAAARRSSLSLRPAAHRPVIPLRSSAVAANTLRATHRRAVSARSRRRAQGLGAAPALAASTWGGGDKGGCLSCFPKSRRGRSGLAPCALPHASGLSFRSRLSGSKVVRPSHILHAAGPDEPHVASPTWSDTSLDTTDMDHAISKEELEDVLNTPLPEHPKLIRGQLKNGLRYLILPNKVPANSHNGGTTHDETGVEAEGRSRRVEIPPQSQSREGANVAAGEETGVDSEKAIAPGCRVSRSRGGRGRKTQSRKLFFGRGSTFEHQ

SEQ ID NO: 64950 - protein, 332 aa, Zea mays
  Coding DNA Sequence Number=SeqID_21575
MGDDETEGAEEQWRMVFQQKVQLFNSAKNYPVAGIQRISLSAQNVGFILQSIIVGFADAFKVIQLSSRGFQSSVFSKNVGFSIYKLRSVDCEFFKAYFHPWNNDDPNWEFKKLSYADAVHFNILTGANSIPIKIKNGFGSSKEVASPRESEPKPFFEKPEPCQRGPCRHNAVHHLSQTRFNFRSSNEAKSSNQAKFTDPLNSNIRIANGPNSSGKLVGSPQRFMQSTRLIWRPKKNLSPQMSGAEQCRWSGIFSLRKQQGQPIFGKQCGHYQSSGNWFLSKRVHNMDISFITTFSDKFKNVKWESPPETWFRSKLKHMTSGPPIFTSLKELF

SEQ ID NO: 64951 - protein, 77 aa, Zea mays
  Coding DNA Sequence Number=SeqID_21576
MEVEYDMLEDQDIQVPIVLAPPAVPPEVNIEAEHDQDRGMVEMEPGVNMQDPNNIGPQVVDHLHVASMQWQGSTSWI

SEQ ID NO: 64952 - protein, 437 aa, Zea mays
  Coding DNA Sequence Number=SeqID_21577
  Gene Ontology: Mol. function=DNA binding; Cellular component =intracellular; Biological process=regulation of transcription
  Homolog annotation: Hit_ID=Q69XV5; Match level="QueryCoverage=66%, HitCoverage=69%, E-value=1e-135, Identity=77%"; Hit description=DNA -binding protein-like
  Pfam annotation: Domain name=HSP20; Domain location=352-437; Score= -12.8; E_value=0.029; Accession=PF00011.12; Description=Hsp20alpha crystallin family
MSQQQGVEEPPPAPLPAAEGEAQPAADIPMSEAAEVEDEEEEPVVGEGEDGADGAADAVDSVNASAKPEAEGAEEEGGSDRKERNGGPTADLVGEVVKLENGDGPVTVGGSVDEGRGGDGGDDKGLAGQNQPAVNQLLLAPAEEDLALSKISDNSFMFDYTTGGDDSGTEEEQAAFMKELERFHREKMLEFKPPKFYGEGLNCLKTCTTVSWTFRNFYEKALLEYEKHKIETGEFQVASSALPDRFGSESQVGGSHVSGSGRARRESATRAMQGWHSQRLLGNGEIADPIIKDKGHIVLKKDKTPKSSGSAKRKRTLSLEDDRVIPYKSDQLHRNDSMVIDMGPPADWVKINVRKTKDCYEVYALVPGLLREEVHVQSDPAGRLIVTGEPEQLDNPWGVTPFKKVISLPSRIDPHQTSAVVTLHGQLFVRAPFEQSK

SEQ ID NO: 64953 - protein, 158 aa, Zea mays
  Coding DNA Sequence Number=SeqID_21578
  Homolog annotation: Hit_ID=A2Y697; Match level="QueryCoverage=78%, HitCoverage=43%, E-value=5e-20, Identity=44%"; Hit description =Putative uncharacterized protein
  Subcellular localization annotation: CTP_CleavageSite=40; ConfidenceScore=5.26e-01
MDSSCGRQPSPRSAPSRERRAPADGLSTIAAVARTPSPPPADATSGRRESRGNGPARRSSSPAAKRTQEQRRAGAASATATQRKPPVPTRPCGRASPRRGQQAPPEPAQPREPEDSASPPPVQPEENAGSTTTAVAGDGEGKESLDNPLVAMECFIFL

SEQ ID NO: 64954 - protein, 158 aa, Zea mays
  Coding DNA Sequence Number=SeqID_21579
  Subcellular localization annotation: CTP_CleavageSite=66; ConfidenceScore=5.16e-01
MALASTDVAEPQDRKGSPPESCGASATRKLPGLMGSASLAHVGTRVPFSPTPSGSRNCHCWGLGVCLARRTCTAAPHPATQPATPAKAQRKGWGRGASGGQKRSGLASLPARRPHRGRRCVVSLAHCFGPGDRRLRPVRSAPPAARAVEAADRMKTSR

SEQ ID NO: 64955 - protein, 124 aa, Zea mays
  Coding DNA Sequence Number=SeqID_21580
MNLSKKKAGGHELIVTAEMPDGFQPVSLVARLPYLTSTASLPLLLRICDEQTEALAVTLPTEEQMAATLKLRILIVAAAVAASLVGTASAAEGPAPAPTSAAASMAAPAVAAASFTALVFGYLF

SEQ ID NO: 64956 - protein, 53 aa, Zea mays
  Coding DNA Sequence Number=SeqID_21581
MAAPRTARLVALTPRHDRRRPWQEKQATLRLRHNDRVKKGTGKGGYPEKDPSP

SEQ ID NO: 64957 - protein, 96 aa, Zea mays
  Coding DNA Sequence Number=SeqID_21582
MGCCISKKCDEPPGTAAGEVSRRRSEARDPPPPPPEEETVKEVLSETPKAKPRPSPRRVAASAGKEAGEMGANAKLGTARAKDCGGGGGGGKARRP

SEQ ID NO: 64958 - protein, 69 aa, Zea mays
  Coding DNA Sequence Number=SeqID_21583
MPLCRSFMDDSFSIAFERICRRLDRDHCVIVLMALLEINLKKRVLTSSKRTPTSNIVMKTLLLALGVTR

SEQ ID NO: 64959 - protein, 254 aa, Zea mays
  Coding DNA Sequence Number=SeqID_21584
  Gene Ontology: Cellular component=integral to membrane; Biological process=protein transport
  Homolog annotation: Hit_ID=A2Y696; Match level="QueryCoverage=100%, HitCoverage=100%, E-value=2e-67, Identity=55%"; Hit description =Putative uncharacterized protein
  Pfam annotation: Domain name=SCAMP; Domain location=110-236; Score =164.0; E_value=4.1e-46; Accession=PF04144.4; Description=SCAMP family
MAGKHGRNGFDDDNVNPFANTRGRGCLTTDLCRCACPCQGGSVPPATNSRLSPLSHEPADFYNVDIPLDSSKDLKKKEKELQAMEAELNKRERELKRKEEAASRAGVVIEEKNWPPFFPLIHHDISNEIPIHLQRMQYLAFSSFLGELLSVQNVLQLQQHGLKGKIHIIFCVWAAVAPPFPFKGKSLAGILPAIDVISKNAIVGIFYFVGFGLFCLESLLSIGVIQQVYMYFRGSGKAAEMKREAARSALSSAF

SEQ ID NO: 64960 - protein, 153 aa, Zea mays
  Coding DNA Sequence Number=SeqID_21585
  Subcellular localization annotation: CTP_CleavageSite=56; ConfidenceScore=5.30e-01
MTRPLRRLHRRLLAGTCRRAPPPPARPARPPARRAPACSADARLLGPPPPGRRAPSCSAARPLARPRARLLSARPPARRAPDCSLHRRSLTARPPARPAPARSTAACSSAGVPVCSAASPPPGAQPPHIPSSPFRPARYSPVPAPPVYEPEAR

SEQ ID NO: 64961 - protein, 890 aa, Zea mays
  Coding DNA Sequence Number=SeqID_21586
  Gene Ontology: Mol. function=protein binding; Cellular component =ribonucleoprotein complex; Biological process=ribosome biogenesis and assembly
  Homolog annotation: Hit_ID=Q60EI5; Match level="QueryCoverage=49%, HitCoverage=60%, E-value=1e-103, Identity=59%"; Hit description =Putative uncharacterized protein OSJNBa0017K09.13
  Pfam annotation: Domain name=NAF1; Domain location=398-564; Score =111.9; E_value=1.9e-30; Accession=PF05492.3; Description=NAF1 domain
  Subcellular localization annotation: CTP_CleavageSite=48; ConfidenceScore=5.16e-01
MADEFTPRPRASSGSGRPLGSPEAQLEQASFLGRNRKLRLARPHAPASGATGSSASPDLMLRPREEPAQATRNKTGVPSGLPRRRVMMVPRVHHDAGGSQPLTTARRRQQDPRRADSCAPTRLRRSSDGHAITCTGPKLSTNGHVGIRRTTSLSIASTPASPPSPMGRQPKPPASPSPPPCPPSDSDPDPGSGFDPIEEWLVDFDPAMSSELEAKGPELAEQAAAVPLTLETAAQKSFELEFGVKDQKVEVVSSELDGLLAPDQLLVSGIGDLAVREDIPEEAVAMKMAATPPAAADTDMNTTVSVEVESEGGKEGQEAPAAPADAEMMNTMVSVEVEAQGGKEGQESSDEESESESSEDDDELSSSEDSSSSEDEKEQGVNKDEESSEASSSEEEGLEVRRHGGKADNLQSLLEEGELMMGSDVENEEQKGGTKSKYEAEIMGERVIVEGSVQHNPLNEGSILWITESRMPLGIVDELFGPVKNPYYLVRYNSEEEVPAGISAGTDVCFVAEFADHILNMKELYAKGYDESDSVDKDAEDLPDFSDDEKEAEYKRSLRQAKRQTDRQHEPMKTSCYMKGSQPRGSGIRKPMPPRNLDTSTRGHQPQPHFRRSDMAPAGTENTARSLGPQNAPMIAPTMLQPGPMNPAVPPPVPLANQMGGCFMNLAQQQLLPQQPNMVWPGGFPQPPLPNMGVDGAALAANIMQNLLAGASQFQHQFQNLNFSGAGANQFPQQFQNQNFSGGTGANQFPQQFQNQNLSGPGTNQFQQQFPNQNFSGFPNQMPMPFLQTMHQTGMPANPMPFGGRPPANPPSGPASIAPMGQGNFGQPPNPQGFTIPAPPGEDGKQGSPPQFSSRQFHQGSSSSFGRGRTQHRGGRHSYGRGGRGGRHPR

SEQ ID NO: 64962 - protein, 301 aa, Zea mays
  Coding DNA Sequence Number=SeqID_21587
  Gene Ontology: Mol. function=acyltransferase activity; Cellular component=integral to membrane; Biological process=metabolic process
  Homolog annotation: Hit_ID=A2Y692; Match level="QueryCoverage=94%, HitCoverage=80%, E-value=1e-127, Identity=72%"; Hit description =Putative uncharacterized protein
  Pfam annotation: Domain name=Acyltransferase; Domain location=32-160; Score=32.6; E_value=8.8e-07; Accession=PF01553.12; Description =Acyltransferase
MPWSIVFGDYDINSIYDDAMWPFLFEKINKTRFVFSGESVPAKERVLLFANHRTEVDWMYLWDFALRKGRLQCIKYILKKSLMKLPVFNWAFHIIEFIPVERKWEIDEAIIRSRLSEFKNPKDPLWLAVFPEGTDYTEKKCIKSQEYAAEHVYDITIAYKHRPPTFLDNVYGVGPSEVHIHISSIQVSDIPASEDGVAGWLVERFRLKDELLSGFSALGHFPDEGTAEGDLSTAECLANFAAVVAVTGLLAYLTLFSSVWFKLFVAFSCSSLTLATCYSVHLPQMVGFGSGTPASIHAKEA

SEQ ID NO: 64963 - protein, 134 aa, Zea mays
  Coding DNA Sequence Number=SeqID_21588
MARNIFPKRAAARAALPAASRRRHGGDEPYGQLSPQTTHQTPQREEENKANPMVSGSPPIGGQGELATVCGGSTVKTEHRRAIARSSLAPSASLIHRHAPRVLMTPQATNKSPSNPADELPAMARRSAALGDFR

SEQ ID NO: 64964 - protein, 141 aa, Zea mays
  Coding DNA Sequence Number=SeqID_21589
MDKNNKRKREPTPPSEDFGDSEYSEEEFSSESEGSLAPVSPPASSDDSDDSQGIAAEVWTYIRAVERSGLEGSDESEYSSDEEDSSEEGGEGDDDDDGGDGSDDGDSGNRGGNGGGRSGDGGSNRGSGGGGSSKGSNKASG

SEQ ID NO: 64965 - protein, 194 aa, Zea mays
  Coding DNA Sequence Number=SeqID_21590
MKMVSPKLLRACTVRLGIRSQPEYDGHEFVKHGTKKCVVTVYIGSSLHHVEWSVTVAGHRFKDTCQVVARKALRALCQIYEEEVADTPLRFFRHFRESVPFGWPGCVPWKMIARAEDAEKLNRQLHVDLTSAQARATALESREVIAVQALKQAKDEHIQKLMEAYLVTHNQHRALRIQEPASSNPVQPMRAEDP

SEQ ID NO: 64966 - protein, 43 aa, Zea mays
  Coding DNA Sequence Number=SeqID_21591
MGGEEPAARKEALCARTGKTEGRDVGENGEGRWLLAAGENRAK

SEQ ID NO: 64967 - protein, 161 aa, Zea mays
  Coding DNA Sequence Number=SeqID_21592
  Homolog annotation: Hit_ID=Q6J9V9; Match level="QueryCoverage=54%, HitCoverage=30%, E-value=7e-42, Identity=93%"; Hit description =Putative uncharacterized protein
  Subcellular localization annotation: CTP_CleavageSite=51; ConfidenceScore=5.48e-01
MMTASKKGSATAQSTRAPSPLLIRGSKAGPSKGFDSRPRARRVRDDLGYVRYMAEARATLPRYPRTFPRPAGTICNGIPPEGGTEPSDPIKWVRVQQITCSLGRNRELRLARPQASASASASRGVTSSPDLGLGLRRRLKHFSDGHASTCTGLKAFLRQPR

SEQ ID NO: 64968 - protein, 190 aa, Zea mays
  Coding DNA Sequence Number=SeqID_21593
MPVRLSLAAQRTAPGVSREQLRWHSRRQRHRAQKAQDPYAHNPDPRSKVARSHWIGFGPHQALSGAPPLGRGSNAATWLIVRDVGQRAEHDVRALGGAASAFIAERTRRLSTLLTGDVPPWYLLRPVHSAGRRRQGTLQTAHLSSPVPKQCARAARCIVLIPYTRSFPLHTEATQISGVRAQEDCSSRKY

SEQ ID NO: 64969 - protein, 133 aa, Zea mays
  Coding DNA Sequence Number=SeqID_21594
  Gene Ontology: Mol. function=lipid binding; Biological process=lipid transport
  Homolog annotation: Hit_ID=Q8W0R7; Match level="QueryCoverage=66%, HitCoverage=57%, E-value=4e-38, Identity=83%"; Hit description=Non -specific lipid-transfer protein
  Pfam annotation: Domain name=Tryp_alpha_amyl; Domain location=34-119; Score=66.6; E_value=8.2e-17; Accession=PF00234.13; Description =Protease inhibitorseed storageLTP f
MAMMKKKGGAATTAVAAVALVLLAAAAVRADVNCADVDASLRPCVGYVTGKEAAPAAECCAGVKRIRAMPSGPAERRQACECVKQAAANYQPLNADAIRDLPAQCGAPLPFPLTLNFDCTTMSLSAKNSYTSF

SEQ ID NO: 64970 - protein, 578 aa, Zea mays
  Coding DNA Sequence Number=SeqID_21595
  Gene Ontology: Mol. function=binding; Cellular component=nucleus; Biological process=metabolic process
  Homolog annotation: Hit_ID=Q8W0R9; Match level="QueryCoverage=100%, HitCoverage=100%, E-value=0.0, Identity=71%"; Hit description =Putative uncharacterized protein
  Pfam annotation: Domain name=PPR; Domain location=102-135; Score=6.0; E_value=1.5; Accession=PF01535.11; Description=PPR repeat
  Pfam annotation: Domain name=PPR; Domain location=166-200; Score =17.7; E_value=0.044; Accession=PF01535.11; Description=PPR repeat
  Pfam annotation: Domain name=PPR; Domain location=228-262; Score =42.7; E_value=1.3e-09; Accession=PF01535.11; Description=PPR repeat
  Pfam annotation: Domain name=PPR; Domain location=263-297; Score =19.9; E_value=0.0094; Accession=PF01535.11; Description=PPR repeat
  Pfam annotation: Domain name=PPR; Domain location=329-362; Score =27.8; E_value=4e-05; Accession=PF01535.11; Description=PPR repeat
  Pfam annotation: Domain name=PPR; Domain location=40-74; Score=19.2; E_value=0.016; Accession=PF01535.11; Description=PPR repeat
  Pfam annotation: Domain name=PPR; Domain location=429-463; Score=9.3; E_value=0.61; Accession=PF01535.11; Description=PPR repeat
  Pfam annotation: Domain name=PPR; Domain location=464-497; Score =23.3; E_value=0.00091; Accession=PF01535.11; Description=PPR repeat
  Pfam module annotation: Pfam domain module=PPR::PPR::PPR::PPR::PPR::PP R::PPR::PPR; Domain location=102-135::166-200::228-262::263-297::329 -362::40-74::429-463::464-497
MAALRLSRAPATAGLAAAGVPHRLATPEHPLPVRVLPNRAHLNALLTSYGRRGRIQDAQQLFDRMPRRDVISWTALLTAYAEGGDFASARLVFDDMPRRNAVSWNALLSLYLGAGRPAAAHALFCKTPAKNAVSYGVIITGLARAGMLREAQAVYGEMPPRLRDPVGSNAMILGYLRAGEIDMALRVFDTMAARDVISWSSMVDGLCKYGTVSEARRLFEAMPERNVVSWTSMVRGYVKCGMYREGLLLFLDMRREGVQVNAITLSVVLDGCAQASLVGEGIQVHCLMTRMGFVTDIFLDGSLIIMYSRFGWMVDARRVFAFMKQKDIVSWNSLITGYVQNNMIEDAHVLFKLMPERDAISWTSVVVGFANRGWMRESVELFEQMPVKDDIAWTAVISSFIANGNHGLQAHAYAVNMGWIFDSAVHASLVTMYAKCAFAQHGLAEDALKLFNRMQYDGQRPNHVTFLGILTACARAGFLDEALEMINSMPQKDYPDAWAALLSSSSLHSNLDLAKLAAQRLLEIDPYDTTAYRVLTNMFSSAGLKGDEEMVKVAQLSNMASKRPGYSLIIQDKTTENN

SEQ ID NO: 64971 - protein, 196 aa, Zea mays
  Coding DNA Sequence Number=SeqID_21596
  Gene Ontology: Mol. function=ATP-dependent helicase activity; Cellular component=nucleolus; Biological process=nematode larval development
  Homolog annotation: Hit_ID=Q84T03; Match level="QueryCoverage=32%, HitCoverage=16%, E-value=5e-19, Identity=55%"; Hit description=DEAD -box ATP-dependent RNA helicase 27
  Pfam annotation: Domain name=Helicase_C; Domain location=18-82; Score= 0.7; E_value=0.036; Accession=PF00271.22; Description=Helicase conserved C-terminal domain
MVLCQATVEGLQQGYCVISSDKRIECFDIHGKQKQLKRTTTFFSFCKAGKGILLCTNVAARGLDTPDVVYDMSDSQMKLNDFISSLVLEVFVKYECCFGLKINPQKILASVSTVAHYPIISGWSRTVLCCLFLVEDHSAVVMGLGSAPYLQGLVPLPGPINESWCQGLDGSTSRTIVSIPCGPSALAVKKVAWGLA

SEQ ID NO: 64972 - protein, 100 aa, Zea mays
  Coding DNA Sequence Number=SeqID_21597
  Gene Ontology: Mol. function=transferase activity, transferring glycosyl groups; Cellular component=integral to membrane; Biological process=protein amino acid glycosylation
  Homolog annotation: Hit_ID=Q8W0S0; Match level="QueryCoverage=59%, HitCoverage=9%, E-value=3e-18, Identity=74%"; Hit description =Putative galactosyltransferase family
MADDAWALGLTAWEDAATFAGDPWALLAAATSRASDAAKCPSAVSQRARGRVVFLPCGLCREIQCNKACPIFPRLEVLPIAKRSKGLLDAVLASSYPSQV

SEQ ID NO: 64973 - protein, 156 aa, Zea mays
  Coding DNA Sequence Number=SeqID_21598
MNEKLTTSSIKDLLTSRVCVAEKRTVCLKVLLKYAIGFINDKALHNYIDAQKLITSGGKSLAIVNEEKSKLPSPIHIGETTTLRNGMEFGDVPNKKEKESNSINRRAITFYGGDGGPDMAIAPPARRSARQRAPPAGNGRRRGKGWCVRASSLTSV

SEQ ID NO: 64974 - protein, 371 aa, Zea mays
  Coding DNA Sequence Number=SeqID_21599
  Pfam annotation: Domain name=Transposase_28; Domain location=183-351; Score=-42.0; E_value=0.0015; Accession=PF04195.3; Description =Putative gypsy type transposon
MDSYLDVIIIGAEVTCLGINNDGVEVLDLARRSGLCIQGSGTSPWRSGPTVDTLEYIVSSGHVEPAPKEADSWARARTSETGSLASAEVKRRTTAGGGPLLTRRFAFFAHGDRRPRGMTRGPGPRVRVWSAAFGGDGEARRFAPHVAVHLLRTRRPTPKGDDSWAWALVPETGSPWRASGEIFCGVSGPAMALLDPPERLQLEVALNLVRNLLGWGVPAFTGRIRVGASPHGDLTTGEFVLFVSNLPSGLALSISSFFVLLLEELGLQPQHFTPCFILQAAIIAYLCKMSVGATLLPPAFGFKDVHQPCGGGKRDELRLHLSRELHQCLMASVPPPTVIAGPTAEDAAQEVVQDVVEMAAARFQRDPTDVE

SEQ ID NO: 64975 - protein, 530 aa, Zea mays
  Coding DNA Sequence Number=SeqID_21600
  Gene Ontology: Mol. function=drug transporter activity; Cellular component=membrane; Biological process=multidrug transport
  Homolog annotation: Hit_ID=Q10HY8; Match level="QueryCoverage=95%, HitCoverage=97%, E-value=1e-163, Identity=60%"; Hit description=MATE efflux family protein, expressed
  Pfam annotation: Domain name=Ctr; Domain location=170-284; Score= -38.3; E_value=0.052; Accession=PF04145.6; Description=Ctr copper transporter family
  Pfam annotation: Domain name=MatE; Domain location=305-468; Score =147.2; E_value=4.6e-41; Accession=PF01554.9; Description=MatE
  Pfam annotation: Domain name=MatE; Domain location=67-244; Score =119.7; E_value=8.6e-33; Accession=PF01554.9; Description=MatE
  Pfam module annotation: Pfam domain module=Ctr::MatE::MatE; Domain location=170-284::305-468::67-244
MDSTTTAPLLQPSAASSKEGPGPAPAQHGEGSRELEAILADASKPWAWRAWEGARLELPLLLRVALPAVAVYMINFVMSMSTQIFCGQLGNLELAASSLGNTGIQPLAYGLMNFRYYSYSDNAVSLSVHLGMGSAVETLCGQAYGAHKHRMLGVYLQRSTVLLMATAVPLTVVYAFSERILVLLGESERISRAAAVFVYGLIPQIFAYAANFPIQKFLQAQSIVAPSAYISVATLALHLGLSWVAVYRLGLGLLGGSLVLSFSWWVIVAAQFGYIVTSARCRDTWTGFTTQAFSGLGTFFKLSAASAVMLCLETWYFQIIVLIAGLLKNPELSLDSLSICMNVNAWVFMISVGFNAAASVRVGNELGAGNPRAAAFSVFMVTSLSFIAATVCAVVVLCLRDQLSYFFTGGEAVARAVSDLCPLLAATLVLNGIQPVLSGVAVGCGWQAFVAYVNVGCYYVVGVPLGVFLGFYLDLGAKGVWSGMVIGGTLTQTLILLWVTVRTDWNKEVENAKARLDKWDDKKQPLLVED

SEQ ID NO: 64976 - protein, 25 aa, Zea mays
  Coding DNA Sequence Number=SeqID_21601
MAGQGRAGADRGRPDTIRADSLGPS

SEQ ID NO: 64977 - protein, 107 aa, Zea mays
  Coding DNA Sequence Number=SeqID_21602
MLPASAATPPPAYDRLDKKDAEEARHVRAQFLIHKVLNDPTPSSSSRAARVGVRLKKLRLAIRGVRARARRAVQRHLRNLRRLIARGGGGGRGSSSVRPAAAGPPPS

SEQ ID NO: 64978 - protein, 37 aa, Zea mays
  Coding DNA Sequence Number=SeqID_21603
MEGNQSHPFRTDWNKEVENARARLDKWDDKQQPFLEG

SEQ ID NO: 64979 - protein, 130 aa, Zea mays
  Coding DNA Sequence Number=SeqID_21604
MAALGLGRRAHYRREWEAKHPGAPCAPWGIYPSRGRATERAERRKKNGAAAWREQNAEGDGEKGRRGARPGKAGEERPAGWVSGTMARSPSSGVRGACGWKNGRGGREEMLAARGGNGNFPICKGESSYL

SEQ ID NO: 64980 - protein, 92 aa, Zea mays
  Coding DNA Sequence Number=SeqID_21605
MESHDLRAERESQLVGDNEIDGSGYDYGTGKWYSFRLERPNKILAEYVDVYSPLLYTPNPPIPRLSALQPTAQEKMKPWEGDFQEFQDYDEF

SEQ ID NO: 64981 - protein, 217 aa, Zea mays
  Coding DNA Sequence Number=SeqID_21606
MGLMSFASLITCEGTANAFSCEGCRHIEVFDRSNEDFDREIFQVEDEVLKRSAGALYDRMWGPHGRDTVRERSDRALEQMANDEEVNDFGGPESSVTQGLFCVVLKVGCCARFPMSRPAQATPTDTNFVVIANAVPANDSLSGFESGSWSSDGGEFGSPFSWTESSDEDLDYFPVLDVAAVESSPRPEVCEAFDPPAGVRTERRRQKVVSKHSVGEM

SEQ ID NO: 64982 - protein, 309 aa, Zea mays
  Coding DNA Sequence Number=SeqID_21607
  Subcellular localization annotation: CTP_CleavageSite=59; ConfidenceScore=5.25e-01
MNSRLPKRSFVPGWRGAGNSPFGFDGKLFVNTQQAPTWRANCRRFDPGGGGCACSRGLQAFAREREGEGVRLCVSPFSRAANLSYKGTGPSFYRRKERVQSEPKVGRGSGSFEVEAESVPWGRARRRPSSEVEVESEPWGRARRRPSSEVEVESEHSVGRETVFQSRGGVQALGSRKAEIPMAPEAGLGCCQPHPGGWHRSRSSAGGAVFLSGQSVEGRSDCGHFGLVDWKARVRIRCQAILALNAPAIRSAGEAILPRLLLREACPSWASGESKVRPLLEKTLGRGANQPWSTVPARGWARARRDHVP

SEQ ID NO: 64983 - protein, 62 aa, Zea mays
  Coding DNA Sequence Number=SeqID_21608
MLDGVARRDDLVIGLRPVAYEAKARTAKASSEEWRLRLRPNKELPIAFCFLRWLQVIVPRTR

SEQ ID NO: 64984 - protein, 106 aa, Zea mays
  Coding DNA Sequence Number=SeqID_21609
  Subcellular localization annotation: CTP_CleavageSite=66; ConfidenceScore=5.78e-01
MAAQQGAGWARAKAGPASRARVVPRGRAPHPGQGRSPLPSTHDFTASLPSSRRSWGLRLCGTFSPSSAKAVPLVFGEPSPQERVAPPRPCLASGFWISSVGPKSGG

SEQ ID NO: 64985 - protein, 166 aa, Zea mays
  Coding DNA Sequence Number=SeqID_21610
MCSRHMFLATDSKTLKGLLATDINLMLHAQFGSNEMCDTGVSQHRRKGADNDEINEALSPNMDGKEKASKGRFKDGKEKAPKARFKVSGHIVIKALVPLMSHPVLEGKPNANHVLTETYSGNNVKQYHEANHNNPKGQRTLAFTKQMLRVFNFAELEEADNLVAEA

SEQ ID NO: 64986 - protein, 100 aa, Zea mays
  Coding DNA Sequence Number=SeqID_21611
MEGLPDLGNDGWGRTQWLGDLGGGIKAVLGEEGGEGRVCHLFHFVLKVKENRKDCNLADGEYVLVPEQGAAQEVAPDPAPEPAREDLPATALEGKPRFYA

SEQ ID NO: 64987 - protein, 148 aa, Zea mays
  Coding DNA Sequence Number=SeqID_21612
MAAAMPCPCLRASQLAGEPRRHRVRPPGARPLLPWHAASAPPGLGMGIVLRLFPEDGGIGFGTSDGLYAVVASVMAPIFSLRDLGMGIVPRLFPEGGDPLGSDQWGVALLGHKGNHGSWVKCATSVECSETNISVVLMVMSGLGILID

SEQ ID NO: 64988 - protein, 67 aa, Zea mays
  Coding DNA Sequence Number=SeqID_21613
MGTALSTIVGRMGLGMYLPTLTSCPMVGVILKVLFLFHRYLSPIRSHQCCLPRNQYPKGLVMEYRLS

SEQ ID NO: 64989 - protein, 90 aa, Zea mays
  Coding DNA Sequence Number=SeqID_21614
MGVIKSGISPFEGLDHASPEPSLGQGQPTPEDLRLARGPPPAANIFPPRWVERVGERDGGRGEAAGAERERGGSPAAFVFVPRPGQVRLQ

SEQ ID NO: 64990 - protein, 356 aa, Zea mays
  Coding DNA Sequence Number=SeqID_21615
MGCTSVALLLLSLEERGLVEIGALQPSLGFKDFGRAARLHSLTNGEKALTGLTEGTNFSNAGPVGCKRRQLQRAWLAGSAGSVAASDAASCRLIRAWPSVHRAGDCCVVHTGGSSKTSYAAWAAFVFLDCLVLTPARCLRAVVAAVVGAEVVAAREGFSADETIDAICGRTPGSLALMACPRPSSGDVGEGLVTATFALRPSGVEVVHTRGSETGVPFVREYTGFLPEQNKVVFLSHFEHWDLPVGQPNHLTECELPCAEGDDCSAMSQSQRQRCWRGQRRSRLEKRLRRPGSWWLPRPRKMWQQQLELGQDIRWRGSSVLPWVEVLSPGSPSEAGPGSAEGGNNAEGAAAPPADA

SEQ ID NO: 64991 - protein, 424 aa, Zea mays
  Coding DNA Sequence Number=SeqID_21616
  Homolog annotation: Hit_ID=Q6J9V9; Match level="QueryCoverage=17%, HitCoverage=26%, E-value=3e-24, Identity=74%"; Hit description =Putative uncharacterized protein
MGQSAAGEGTTVGMAKSGPSVTAAADERKQQSNRQDRKRGCCGKDPSRRRKRAPSPPTDQGFEGWPLGRVSIAAPEHSGFKPITDQGFEGWPLGRADPSEGFDSRPRTRIVRDDSGYVRYMAEAQATLSRYPRTFSRPAGTICNGIPPEGGIEPSDPVEGVWVRRITRRYFWSMPLGHQPTPNERGTGVHSDYPLAAHWKHHVRRPPRATWRFPPSSLWKGDAGAGRLTPHPDTRASVGQAEAKTDNKSRSTTEFGLGRNRKLRLARPQAPASGGGLRLARPPNSASTSVSGGIASSPDPASASREATKNKIDVPSGLPRRRVMMVPRVHHDAGDSQPLTAARRRQQDPCRTASCAPTGLKHSSDGHAITCTGLKLSPDGHVGMAILKEGSRGGKERTNGLPLSLSPSRDVLVTPTTSGTPGAG

SEQ ID NO: 64992 - protein, 306 aa, Zea mays
  Coding DNA Sequence Number=SeqID_21617
  Homolog annotation: Hit_ID=Q2R358; Match level="QueryCoverage=54%, HitCoverage=57%, E-value=5e-28, Identity=48%"; Hit description =Expressed protein
MRQWKSLVPALHLHGPVASCFPHPPPPSPPRGDDEETDLLPAPPSQAGAALAVRLVGCDGRVPAYAPPVTTRELMQEHLRHLVCRADALLIGERIPAVAAAEELQPGEAYFLLPAHLFCSVLSFVSLTSSLLLLLSTTASSASGKKPAAGRPFELHRMASGTLQIKFSSALVRFPGHGATAPRHRPPRFLAFLAAPDRPCQRLALLIRCRLPVHVRAGACAAHPSLLRLYSVARIRAATASSDCAVTEQCLLTLLLSPASPIPCQVRRRPLPGWTHPVAHPLHRLRWIRRCRGLPDRIPVATTFPA

SEQ ID NO: 64993 - protein, 53 aa, Zea mays
  Coding DNA Sequence Number=SeqID_21618
MERVRRHRHGSNGCPRQWMNRLGLGHKTLTLNSCESSLWFEAETHCVSYSGQT

SEQ ID NO: 64994 - protein, 335 aa, Zea mays
  Coding DNA Sequence Number=SeqID_21619
  Homolog annotation: Hit_ID=Q10NY2; Match level="QueryCoverage=11%, HitCoverage=3%, E-value=6e-11, Identity=79%"; Hit description =Expressed protein
MALQPRKWAAYWILASHRRRSLPLHLLSEALRMPQPVAFVFVQPSDGQPTPSNVSNKKMKHGGEVLFLDGAGEVTVTIGRNSQQPLSTAPPPVGTNVGDIGSWDVGTKDRLVVRNFKVWDLSKCTIILQLSENMSLKLDKLLSSSTDNFWASGLDEMEEVDEHEGQHGIISRKQLKEMSIMLHVKEAKSPIMLSVKFKERRCPRDEERAMIAARHEEQAILVECKAGSPPPCGKRKDRAKLRLLGSHVHLLDRAPPSPRPPPVAAGSSISSKKLSTVGFGHSKERAPQRLPPAIASPWSGCAAVGMAPMGVLDSGNVRNEYYVLGAFGFRRSSKA

SEQ ID NO: 64995 - protein, 263 aa, Zea mays
  Coding DNA Sequence Number=SeqID_21620
  Gene Ontology: Mol. function=transferase activity, transferring glycosyl groups; Cellular component=membrane; Biological process =mitosis
  Homolog annotation: Hit_ID=A2X8C0; Match level="QueryCoverage=36%, HitCoverage=20%, E-value=7e-24, Identity=58%"; Hit description =Putative uncharacterized protein
  Subcellular localization annotation: CTP_CleavageSite=32; ConfidenceScore=5.13e-01
MLTASFLRFLLLLLLPLTALYFFYMLHLLLTSASSAASNCAPDTVSVSRMSANLTHEVFDIAALSRSRLWDKRKEYIKVWWRPRGAMRGYVWLDREVRESNMSTACTGLPAIRISSDTSAFPYTHRRGHRSAIRISLKFLPYMKKYEYQQAFLHGAVAKASEKDVKEHKEKIGDQNLEIKALRNKAAEWQLKVLENEGILNTKEKERDQRVVENNLKMNTLKSEVESEHKCLAEKEIKIKEKLEKDPFEIALHELPNPVYLGA

SEQ ID NO: 64996 - protein, 235 aa, Zea mays
  Coding DNA Sequence Number=SeqID_21621
MAPRGRHHTLMYSLRLSHNRDRDNAAMSNTSCCSVVDVDPATAEGGSYFSATTVRLADIRETETVSGAQLEAADDAEHVEEVEGGEGEEKQEEEAEEGGGEHLLPAPPFIIPVTVAAAPHELTLTVSNEPLGTAVHCLAGRAARRPISPAESESVGFRGGERLTRAAHSLRVLLRAAACCPLSPQLGFSPIGRRFGWESGAVGGSASGSLQRVLRSRTSHDRRCGSYASSVRKQS

SEQ ID NO: 64997 - protein, 248 aa, Zea mays
  Coding DNA Sequence Number=SeqID_21622
  Gene Ontology: Mol. function=transcription regulator activity; Cellular component=nucleus; Biological process=regulation of transcription
  Homolog annotation: Hit_ID=A3A0W1; Match level="QueryCoverage=19%, HitCoverage=7%, E-value=3e-14, Identity=83%"; Hit description =Putative uncharacterized protein
RPPRNTPSLERRQDGEGNNWGQGSHGHQHDEVVAVEEGKKKNKSLPSAAAPTPPPLEGAVDPKACPLLPGTLTLATAISSRLAAARPRHACPLASPQARRGPHPCPGFLSSIPKIATNSGILMSYIADFAFAGLPTPLSWRLRLERPLLHYVCAAQCKKGEDFFLLRTDCPRSAISVSSPASWHPTFVVFDVVGKAVMLGEIINYVQSLQRQVEFMSMKLPTVNPQVDLNSLPNVLPKDAQKQELARQ

SEQ ID NO: 64998 - protein, 292 aa, Zea mays
  Coding DNA Sequence Number=SeqID_21623
MARRAPSLGTMLEVVMMLRLLAVPDDGLQPHDSAGQEITRVVSRASSTLEGGLPREDTDPSHPAPMDVAEGSSALEVAVTEDPTPEGGVGSDPAPKGIGAGSPSAASMDVHVGSSSVQSEESVVTHLSTALAGLVTLEVIEPDARSPPPADGAEVPPSHAFDIIPADLPSSSNVSTLPALGLPLFLSNLQWNLLLLQKQIDNMRASNIDLARRCSDIEEKYSQSQADLSQTSAFLDGARSLNSSLNAQLNSEKIVHEVNFLGCFCSVSLASMLSVVLACRRKNEHSLLRVII

SEQ ID NO: 64999 - protein, 47 aa, Zea mays
  Coding DNA Sequence Number=SeqID_21624
MGISARQGEGANTTELCAALGEAEPVDRTWDKNRRYFGLRFLDRSEI

SEQ ID NO: 65000 - protein, 284 aa, Zea mays
  Coding DNA Sequence Number=SeqID_21625
MVTSSLMVGESESGCGLCPSLSLKDFHHQGWGGEEGRPSSVAPAAAPCLALGREWLRSRSQRRRLPRQLEEVLPPALIAKAGHGLTSNSTAFCPSLPHEFGHGRGPPGSSIRPEVSAAAVRPPGAEVVVVAAAGAGDGMPFAGLPLLRRPTPIEWGYSSVDYLNRFTKHESPRVKVTSEPGCPLAGPTSELISRGLRSGWRPWEMVGRGPRGNRPSRLLGPDSRRSPWQRLPGRDDDVVLRSRDPRTASPSEARSGLAKGVVDAEGVAAPFQRQDPSLQGQSVL

SEQ ID NO: 65001 - protein, 515 aa, Zea mays
  Coding DNA Sequence Number=SeqID_21626
MTVAGAREQRSRRHPSSRPIRGQQENPLSRREDNAPEQQATLRLRRNNRAKKKAPSLLTDQRFEGWPPEGFNSRLRSRGPYTHYWSEVRRPAPRRVPRPPQATRAPRPLLIRGSKAGPRRVHSRLRRRARDDQGYVRYITKARAALPSSPETPCSTPIEGNMALSPLLLAERRRRGRLGGCSRKPGSGQTVDSVNIPARELGPRPYTRATASSHEGTTRPAEALHKALRPRRSETTPPRPRGLHPAGALARTHRNKMQPRKAGPLAKKCDESLQASANTPFEARGLLSGTITRGTLKTPNSQLGSDSGSAPEDGELRSARPRARTRAQPRKTANSAPPDPGLGLGLRPGRRRTPLRPTPGLGLGLSPGRRRTLLRPTQGSDSGSAPEDGELRFARPQGSGSGSAPEDDELRFARPQGSDTALASADDPRLARPRGSDSASAMEDRLDLGFGGASTSPNLGRRPATSTGSAIITLPRADSGRREQDRLRRSSDGHDITLVGFQDLSGCHIGMYSGH

SEQ ID NO: 65002 - protein, 354 aa, Zea mays
  Coding DNA Sequence Number=SeqID_21627
  Gene Ontology: Mol. function=structural molecule activity; Cellular component=protein complex; Biological process=microtubule-based movement
  Homolog annotation: Hit_ID=P29512; Match level="QueryCoverage=75%, HitCoverage=58%, E-value=1e-106, Identity=75%"; Hit description =Tubulin beta-2/beta-3 chain
  Pfam annotation: Domain name=Tubulin; Domain location=83-245; Score =130.6; E_value=4.7e-36; Accession=PF00091.16; Description =TubulinFtsZ family, GTPase domain
  Pfam annotation: Domain name=Tubulin_C; Domain location=247-354; Score=128.9; E_value=1.4e-35; Accession=PF03953.8; Description =TubulinFtsZ family, C-terminal domain
  Pfam module annotation: Pfam domain module=Tubulin::Tubulin_C; Domain location=83-245::247-354
VEKAHSGDVHCVDWNPLDVNYILTGYDGIKARFSIIVETNLISISSLYVQVMNVSIDISGLPITLSECGIVEIWVQEELWSPDRASVFGSSAEDGFLNVWDHEKIWRMSDLIYRPEDEVLAELENFKAHLASCFQVCHSLGGGTGSGMGMLLISKIGEEYPDRMMLTFSVFPSPKVSDTVVEPYNATMSVHRLVENADECMVLDNEALYDICFRTLKLTTPSFGDLNHLISATMSGVTCCLCFLGQLNSDLHKLVVNLISFPRLYFFMIGFAPLTLRGSQQYRALTVSELTQQMWDAKNMMCVADPRHGRCLTASAMFRGKMSTKEVDEQMINVQNKNSSYFVEWIPNNVKSSL

SEQ ID NO: 65003 - protein, 292 aa, Zea mays
  Coding DNA Sequence Number=SeqID_21628
  Homolog annotation: Hit_ID=A2YWR8; Match level="QueryCoverage=34%, HitCoverage=57%, E-value=1e-39, Identity=75%"; Hit description =Putative uncharacterized protein
MPPAAREGRADAGTKFRARGLFGGGGGGDRLRAVMRMVKLNSAIQNRSVRELLELLGDECLYFLGNLRSVDVPRLGKDMFLLLHALMVRHHVSFVLKPSPDDEAGFDLGVKWSLEWKGKKLPWDLDCNVSTTHVYRGLLLIRYLLLAAFACLHVQQKNDRLNNRLVSPSPSHRTQPSEQDLRAAAPEDSWDHAAGKQAHDAINGKQIAKQGLKQFEIPLSFATAEPGRGSPGRRAQGAARRHPRREAEEHDGFLRRHRPPRHAAVLRIAQELVASSSPSPPAAPPGGQGASI

SEQ ID NO: 65004 - protein, 175 aa, Zea mays
  Coding DNA Sequence Number=SeqID_21629
  Subcellular localization annotation: CTP_CleavageSite=22; ConfidenceScore=5.08e-01
MPMSPPPSLSCLPLCWLAGPTVCAVLKVLLTGLLVDSASRVSHHADTFSPSLDSVLSALTITASLLAGALSSTHLGEGHRPLLHCALGINFLVHTDTTLWSRALHRTLRHLPLFVTSGLRRHPYFAGCQLRWLCSTSSHVTIVPFIRSKVRPPSFDLQECSSFYWWPMSFSGCDL

SEQ ID NO: 65005 - protein, 165 aa, Zea mays
  Coding DNA Sequence Number=SeqID_21630
MANARTWRGRHTKPLLEINIIGWEKTLSVPSNAEDMYQRFIYNYTKLTVRNTVDYSGQEKLFGKIGQARTVRALVADRPRHKDDPRTEPMQKSESALWTVRRISADRLRPRADRPASGADRLVGEEPKNPKPLLLTVAFSAVDLQAQTVRTRRADRPRSAEWSNG

SEQ ID NO: 65006 - protein, 532 aa, Zea mays
  Coding DNA Sequence Number=SeqID_21631
  Gene Ontology: Mol. function=transporter activity; Cellular component= membrane; Biological process=oligopeptide transport
  Homolog annotation: Hit_ID=A2Y4Z6; Match level="QueryCoverage=79%, HitCoverage=91%, E-value=1e-124, Identity=53%"; Hit description =Putative uncharacterized protein
  Pfam annotation: Domain name=MFS_1; Domain location=19-470; Score =23.9; E_value=0.00059; Accession=PF07690.7; Description=Major Facilitator Superfamily
  Pfam annotation: Domain name=PTR2; Domain location=81-462; Score =236.3; E_value=6.7e-68; Accession=PF00854.12; Description=POT family
  Pfam module annotation: Pfam domain module=MFS_1::PTR2; Domain location=19-470::81-462
MEAAVDGGVGVGLGPVIWVVAAEIGERFAFYAVASTLITYLTGPLQEGIAAAAAATNVWNGTALMLPLLGGAIADLWLGRYLTIVLASLLYILGLGLLAVSTVVGGQHCDAAAHTAGEKCPPPPAAQVVLFYVSLYVVAVGEGGHKPCAHAFGADQFSGSDPGESVSRGAFFNWWYFGVCAGTVATLLVVSYVQENLGWGLGFAVPCAVMACALAVFLLGTRTYRHTGDTVGTRNGLFAHAAEAFAGCWRRQRRSSSSSRVDEEAQVATTNTAVLLVSETKDVLRLLPIWATTLVYAVVYSQSMTFFTKQAATLDRRVGELAKVPAAALLAFISVTIMALIPVYDRVVVPLARRYTGRPSGITMLQRIGAGMLLSVASTVTAALVEARRLRVARAAAGLLADTPGKAAAQQQLPMSLWWMVPQYVVFGAADVFAMVGLQEFFYDQVPDRLRSVGLALYISVFGVGSFVSSALVSGIHRATAARGQSWFSDNMNGGHLDYFYWLLAALSALQFFAYVFVAWRYKYKDAGAEHT

SEQ ID NO: 65007 - protein, 144 aa, Zea mays
  Coding DNA Sequence Number=SeqID_21632
MGKNNKRKREPTPPSEDFGDSEYSEEEFSSESEGSPAPVSPPASSDDSDDSQGIAAEVWTYIRAVERSGLEGSDESECSSDEEDSDGGDEDEDDGDDDDDDDDDDGDGGGSGRGGGDGSRGSTKGDSSEGSTKGGGSGRGRASG

SEQ ID NO: 65008 - protein, 70 aa, Zea mays
  Coding DNA Sequence Number=SeqID_21633
MAWLSPPALSPPRSDLSLPSFDGGREEERKVRYAYALCWRGVCAAATAACLRLDRLALFMHEGDTNEITV

SEQ ID NO: 65009 - protein, 146 aa, Zea mays
  Coding DNA Sequence Number=SeqID_21634
MGNHGGGPRSGLAGDMAPMSLPQLTSGWGGGRRREAPGIGACGLEVAAAAVGARGRSCGGGGSGLGPRQLVKKNPHLHECHSTRRKGQTRKRIKKQKKRWQDMGRKIRESQKSSDLLQWELEAKPVAVAVLPWELEAKESSMSNWN

SEQ ID NO: 65010 - protein, 107 aa, Zea mays
  Coding DNA Sequence Number=SeqID_21635
  Subcellular localization annotation: CTP_CleavageSite=57; ConfidenceScore=5.28e-01
MSPFPFPKSDEFAADDSPDSPVNHRTIRRRPYPPPALAPAAALAVGRPSPRIRGVVRFAVVPSMGLGVCGSLCQGDNEIDGSDYDYGIGEDEAVEGDFPEFQDYDEF

SEQ ID NO: 65011 - protein, 160 aa, Zea mays
  Coding DNA Sequence Number=SeqID_21636
  Homolog annotation: Hit_ID=Q6QP51; Match level="QueryCoverage=43%, HitCoverage=40%, E-value=1e-09, Identity=46%"; Hit description =Putative growth-regulating factor 1
  Subcellular localization annotation: CTP_CleavageSite=67; ConfidenceScore=5.28e-01
MVDRATDVSGTIIRGTLKSPNSQLVTPNSIKLQRPDGRQSRSDRSHFAAPLTGLTEGQRRLRRSDCCAARQSEADRQSGPTSGTIGSSASPDPGLGLGLSPERRQTPLCPTQGSDSGSAPEDGELRSARPRARTRAQPRKTANSAPPDPGLGLGLSPRRR

SEQ ID NO: 65012 - protein, 119 aa, Zea mays
  Coding DNA Sequence Number=SeqID_21637
MEHRPGLKRLLETAHLELDEKLFVNTQQAPTWRANCRCFETGGVMMAPPVDVVGPRPRLGDVEAPPRSRSSLSSVAVVESEPLGRARRRPSAEARAESEPWGRAQRSSSSSGAEPKSEP

SEQ ID NO: 65013 - protein, 141 aa, Zea mays
  Coding DNA Sequence Number=SeqID_21638
MGKNNKRKREPTPPSEDFGDSEYSEEEFSSESEGSPAPIPLRESSDDSDDSQGLAAEVWTYIRAVERSGLEGSDESEYSSDEEDSSEGVGSDGDDDDDDDGGGGGNDGDGGGRGGSKDGDGGSGSGSGRGSSSRGSNRASG

SEQ ID NO: 65014 - protein, 188 aa, Zea mays
  Coding DNA Sequence Number=SeqID_21639
MSDDLVVPVHFEVGQELCFRLLDHPLLVLLKLELLVSRQGAGRSAAWCEARWCSLRKGGLSAAWGRTVRGLGRREIADGAWISLPGGTPSGSRDPRCGFLRVILQSLIEELLSRAAKKAGKLIPRARLLAAALAITVAALQQTTEHADTKERPLLRFGLGTRGRQGAAAAVAHLFGCSAGSFSSLALS

SEQ ID NO: 65015 - protein, 699 aa, Zea mays
  Coding DNA Sequence Number=SeqID_21640
  Gene Ontology: Mol. function=phosphoprotein phosphatase activity; Cellular component=nucleus; Biological process=multicellular organismal development
  Homolog annotation: Hit_ID=A2X8H4; Match level="QueryCoverage=34%, HitCoverage=44%, E-value=6e-69, Identity=56%"; Hit description =Putative uncharacterized protein
MTAVRADDARDARGEETTYDAVEVFIRTCVGTPTVVHVLPHPKRPTRIQRPCRIPRPSRARPCRSPRDPLPRMAFLPQPRDPACQAWRRRGRCPRRLSRPAGVPLCMEGEPLAPKSTESQPVHPHLSRSTWKARPRQSRSICSLKAGAPLSPALALYMEGVAGAQIDGITVRGRRPRSALSPALALYMEGGDSAQIDTSECRPPPSDSKRGASPDQERAKPDAPRTTPSKPSSESAMRKSWRSLASALLAAALAITVAALRPVTEHADAKGPPPLWFGLGAFKDATSDRVMAAVLDAENPDLVVYLSDLVTAYNLLVPNASPRPGRVVGDGVRQPRRHGRREAARVVLPRRRPAAALAAGSRIRVRLTGDSPDGPRGGGDRCESVAVLLVQRAQGVVALRGASRRRTDHAPCRSAGRTAFSGRTTAPGRTRSTWLSPRISAGFSSASMTASTAPEAPDFLIANLYRFLLRELRGIFYKEADPKSKRLWQFLADGEDEDSELDFSGSGRFALSLARLKEQRHPLWALVAAAGDGQSGRECGVKRLTAAPAVRDHRAVLSALARALATTESAYLDRTSQSMGSHLELARWDDEDWLIGSMWVEDIGVGLETETRIPGYLAIGLEALQLSTDHSTSIEEEVQRIRREHLDDDQCVVNDRVKGRLTVTRAFGAGYLKQGRREIADGAWISLPGGTPSGSRDPR

SEQ ID NO: 65016 - protein, 105 aa, Zea mays
  Coding DNA Sequence Number=SeqID_21641
MYSASAVERATEFCFFEAQDTKDLPKNWQVPDGDVGAPPKPRLSLSSVAEAEPEPWGRARRKSFGRGQGGVRALGSGEAEVVRPRPGQSPSPGVGRGGVSSSSGS

SEQ ID NO: 65017 - protein, 147 aa, Zea mays
  Coding DNA Sequence Number=SeqID_21642
MALLGPPERLQSEVALSLVCNLLRWGVPAFAGRICAGAFPHGDLAAGEFVLSVSNLPSGLVLLISSFFVLLLEELGLQPQHLTSCFILQVAIIAYLCKHSEERMFTSLVKVDSGLSCGSIPRASFNSMEWEASRAVAPSLAPPSLWL

SEQ ID NO: 65018 - protein, 247 aa, Zea mays
  Coding DNA Sequence Number=SeqID_21643
  Gene Ontology: Mol. function=catalytic activity; Cellular component =endoplasmic reticulum membrane; Biological process=metabolic process
  Homolog annotation: Hit_ID=Q67WK8; Match level="QueryCoverage=100%, HitCoverage=100%, E-value=1e-130, Identity=84%"; Hit description =Acid phosphatase-like
  Pfam annotation: Domain name=FA_hydroxylase; Domain location=73-195; Score=100.9; E_value=3.8e-27; Accession=PF04116.4; Description=Fatty acid hydroxylase
MAFAVSDELLGTFVPIAVYWLYSGLYVVLDGLGMDDYRLHPKGEEEAKNIVSRSTVVRGVLVQQAFQIAVSLLLFTVLGDENGAVRKQPPALYFMHRYMHINKFLYKHVHSKHHTLVVPYAFGALYNHPLEGLILDTIGGALSFLISGMTPRTGIFFFSFATIKTVDDHCGLWLPGNILHVFFSNNSAYHDIHHQLYGNKYNFSQPFFVMWDKILGTYMPYTLETRKGGGLEARPVKLNQAQQTKAD

SEQ ID NO: 65019 - protein, 738 aa, Zea mays
  Coding DNA Sequence Number=SeqID_21644
  Homolog annotation: Hit_ID=A2YAX2; Match level="QueryCoverage=42%, HitCoverage=50%, E-value=2e-56, Identity=40%"; Hit description =Putative uncharacterized protein
  Subcellular localization annotation: CTP_CleavageSite=53; ConfidenceScore=5.51e-01
MVKKPNDVAKAAATSADAAARPSKANPSTPQSVKTSKFKKRKVKANRQKPAVAAAAVDDVAPVGAGTGDGDASASAVLPQPSNVAEASPVVQTPKSTTFVEASPVVQTQKTATDAEVPVHSPMPATAEASALSPKPKPKPAHANADAAAAISVSKGKGVGADNSGGDGRMKSRKERARSGKGKEVLGDGGSKGKGKGKGKKAVGKKEERGDHKVAGFIFMCNAKTKKECYQNRLFGMPGGKIGMVKKIRPGVKLFLYDFDLKLLYGVYKAASHGGLNLVQGAFSGKFPAQYALDILEWAGMSGCKAYSTPVDTHAKLSEDDGPSVADAMAYWSLTDALYLCRRLPALCGVWGRVSLSAKPYPHNMQRLGLEPGTFRLQTVKFKIDKDCRPLPESSLKQAIKENYSAKSKFDPELTTKQVQRLLLLFKPLSAPQSVPNNHFEERRHYEEQRKPYYHFEERLPLLPIEEVRQPRFDDERRPAVRHVPLEDPYRAQAPRFAPVPVESQLGHSLASAQGDHGRYYQPPALAPEPRHIPLVLEPRYVPPAHVPTVPELQHVPAAYYRTSAPSGDSYYRPVDNLVPEGYADRIVANITARDPIISDHTALPVEASARPDRLDDLYRIRGAHVEELYRPREIADRAGITARADRVEELYRYDRLANRAVDPPHSAYLTTAYENNPAYAETSVRPISARVGGSGAPVSSLYSFSGGPYIFLQYLTTPLLTNGEHQENEHVAFLQYD

SEQ ID NO: 65020 - protein, 237 aa, Zea mays
  Coding DNA Sequence Number=SeqID_21645
  Gene Ontology: Mol. function=nucleic acid binding
  Homolog annotation: Hit_ID=Q2QUK2; Match level="QueryCoverage=59%, HitCoverage=30%, E-value=2e-37, Identity=47%"; Hit description =Putative uncharacterized protein
MPILTRWKDYKDDQKYYNNFVSQLNGRLSVNTEDKATKEACTDMLRSAVKNQRYRLKQKYFNGVPANEISTTSPVSYMTDEQWRALVAKWSDPKNMKQKRNREEPSLDQSEELDAVDAFKTCHTSSKRGLSEPAREALSSSHQFLKSVGIKTSATSKASSSNHSELREQLAAEATAAVQGELDQLRKKCEEAEEQQARTQRELEEYKKITEKNNKEMEETNVLIKKLLSLHGNSSST

SEQ ID NO: 65021 - protein, 238 aa, Zea mays
  Coding DNA Sequence Number=SeqID_21646
  Homolog annotation: Hit_ID=Q6JAD6; Match level="QueryCoverage=98%, HitCoverage=46%, E-value=2e-54, Identity=75%"; Hit description =Putative uncharacterized protein
MVWKKNVTPSGGGDDEDPPCPFRQVKGKTLYLEQQEGRKKRPSLHCSPTPSATVSTPPPTSLAPVALELCTTSVVPTTSTTLASTAPGPAPASAPPIPPPRFRERDKTEIALRAHWLLDLPAFLLAIGVESEGHLSYLPGLLSLLTSSGRYIEEWVRVFYATVWIDPDHQWLRFRFEREDVTLHATQIRQLFGFPESTTRLHSLCYGTSDPPCRPHNGVAPATAHVAALFRPPFTDGS

SEQ ID NO: 65022 - protein, 29 aa, Zea mays
  Coding DNA Sequence Number=SeqID_21647
MEKPRRKDHFSYGSPAQRLADVSHPVLER

SEQ ID NO: 65023 - protein, 158 aa, Zea mays
  Coding DNA Sequence Number=SeqID_21648
RICPGASQLSDSPRCQEEVCAGLLQRFARLRRLATFEHWKKQIATCSTPSAAPEHARARARAAPKPSQCPAIPNPVQPSEKTVHVSVKLLERGIGLCFTGEAGPRSPDFNRPPATVDREYILVPEQGAAQEVAPDPAPEPAPEDLPATALEGKPRFYA

SEQ ID NO: 65024 - protein, 226 aa, Zea mays
  Coding DNA Sequence Number=SeqID_21649
MAVYFGESRSYPNHPPFQITATGHRFLDTCQNAAQKALRQLCQNYSREVFETPLRYFPPSNKNTPAWRKRLQALSRRDPNEDDPTIVYMVGYLHTLDNHFDELFSHCTHLNSRVESLEQQIKELKEEKAALQDSLEMAEGEEANTREAYRTLKMDYARRLKKLTPVKKIQKCFKSQGCQTHPKEEAPPTLPSLGIENFFDIEEVSLASLDDLLREFGDTLVDNAHA

SEQ ID NO: 65025 - protein, 41 aa, Zea mays
  Coding DNA Sequence Number=SeqID_21650
MELLSKSYPTKEKTLKGMLVIWESRVSRRVIKIKEGNAGIV

SEQ ID NO: 65026 - protein, 92 aa, Zea mays
  Coding DNA Sequence Number=SeqID_21651
MDNIGYPKLELGLSAMLKDQLADSLAYNSLKDRLRSNEAELAAQAEVEELKRKVVEATEKFEVEVVKHEICEIERSRAQKNADELRASKERC

SEQ ID NO: 65027 - protein, 114 aa, Zea mays
  Coding DNA Sequence Number=SeqID_21652
  Subcellular localization annotation: CTP_CleavageSite=84; ConfidenceScore=5.37e-01
MPPPPHDIAHPLFSLPSLSAVDVRSPGAIACARLPPSLAPRWTSRLVWGHGSPTDRGSRRLMRSVSPPTLYLLAPCSTSFGCAEAVMVAVHVELDKNHLFGSNRKYLKLQFDIV

SEQ ID NO: 65028 - protein, 60 aa, Zea mays
  Coding DNA Sequence Number=SeqID_21653
MKNKSPTGAAELSPPPEPYNLEANPFLKEALETIKIANEVVDEAVNKLLNEAAEKVMKED

SEQ ID NO: 65029 - protein, 127 aa, Zea mays
  Coding DNA Sequence Number=SeqID_21654
MLRQSRCLLLHLLLSLSSIGSLGPCYFDPYFQNMQQRLQTHLDTRFEGMLTHMDQRLDVMQSSFDSNWDALNAEYSKFRDHIQTNVTDPIMTRLNNMQQSFQDNMGALSSQFDNLSTNDSMHEISQR

SEQ ID NO: 65030 - protein, 202 aa, Zea mays
  Coding DNA Sequence Number=SeqID_21655
MSSSRGLGGLRKKLAGRFKSKCPRAYDADYAPTTDSEAQSLAGGTESMDTEDIPHIHPDYPIDITGWTFPKRRFSMAEYCSRRTVNQYTLPSDTNVQFFHTQLQFDVFWGTLMDTNFHKHQVIDWSFMLGQSVMEDPKFETCVGLDLYTEDNFEDFVQFYEPARLGIPRRFGETAGLRHHPAVINKIARVTILPKSGDKSKI

SEQ ID NO: 65031 - protein, 26 aa, Zea mays
  Coding DNA Sequence Number=SeqID_21656
MAGGKELAVAKEGRLAGKGFANWIKR

SEQ ID NO: 65032 - protein, 62 aa, Zea mays
  Coding DNA Sequence Number=SeqID_21657
MARWRSEKEKSTVARDWWLSPWRAHQRSPDMCNMSYCDVVSSDSYQRGRSSKDTKVDTAPKL

SEQ ID NO: 65033 - protein, 217 aa, Zea mays
  Coding DNA Sequence Number=SeqID_21658
MGCTCVAFFLLLFEERDPVGGWRSPVTARLQGFSSCSPAAVPHQWSSVGMITSLVVGRSKPGCGLFPTLSFKDVHHPGWGKGRIEVGPASAWAGDPLLPPAFGGEGHPPALWRRRPPAMRGKVNCCCLARVQLSVLHLDDGRAVRRRLLSPVLKRRPPLVRLPTATVVASTDETVNATCAPDLRLFGFNGWFSSPVRGRERGPSSGSVCPEAIAAAV

SEQ ID NO: 65034 - protein, 106 aa, Zea mays
  Coding DNA Sequence Number=SeqID_21659
  Subcellular localization annotation: CTP_CleavageSite=45; ConfidenceScore=5.59e-01
MGKSLWPASLTPLTLAVTLKPSQPSAAHNNLLVNCPSSQPSSRLLAAEESSSPGPLPTTPSISLFTVPMFVPPQQHYDGVCYGGVDGIRASTAQLQPTTRCLLARW

SEQ ID NO: 65035 - protein, 97 aa, Zea mays
  Coding DNA Sequence Number=SeqID_21660
  Gene Ontology: Mol. function=aspartic-type endopeptidase activity; Biological process=DNA integration
  Homolog annotation: Hit_ID=Q2QYR6; Match level="QueryCoverage=75%, HitCoverage=5%, E-value=5e-09, Identity=42%"; Hit description =Retrotransposon protein, putative, Ty1-copia subclass
MGVLETQPELQKPKIPVNLSIEMFCDMKTLTVEDLVGRLRAAEDRLEDKMAHITDKTGRLLLAEDEWLERHKHRFQTSSQKDEGSAGSSQWKAKTNL

SEQ ID NO: 65036 - protein, 34 aa, Zea mays
  Coding DNA Sequence Number=SeqID_21661
MALAPPLQVLGCEEELAKWAEMKACGPGANSISC

SEQ ID NO: 65037 - protein, 100 aa, Zea mays
  Coding DNA Sequence Number=SeqID_21662
AEQSVFPEAVAEEVPDQQFGEGKGLRLFPEYLSVRTAVVPSMGLGVCGSLCQVWVRPLGRSARHYGTGGYEIDGSGYDYGAGEDEAVEGDFQEFQDYDDF

SEQ ID NO: 65038 - protein, 122 aa, Zea mays
  Coding DNA Sequence Number=SeqID_21663
MQEGKTKVRAYLVCSSPAKGPKKIWAPGVGGNDLGPKKTRRSRRRRRGGESAHAGAWSDIKASKSIQPNFDCKAHEHCNYRGTRLVAHDPTLGGENREEGRLVLATKVSERMQTGANLYSAE

SEQ ID NO: 65039 - protein, 191 aa, Zea mays
  Coding DNA Sequence Number=SeqID_21664
  Homolog annotation: Hit_ID=Q6J9V9; Match level="QueryCoverage=70%, HitCoverage=46%, E-value=3e-59, Identity=85%"; Hit description =Putative uncharacterized protein
MPRLLDCGTSTVTRGSPARDPTVPIECNDYGASDTSGRKSGHRFTSVMMTASKKGPGKGVFRKRILPSEGNGPRALLLIRSSKVAPSGVQQSPQSTRAPSPLLIRGSKAGPSEGFDSRPRACRVRDDPEYVRYMAEAWATLPRYPRTFPRPAGTICNRIPPEGGIEPSDPIEWVWVRQITCRYFWSTPLGH

SEQ ID NO: 65040 - protein, 299 aa, Zea mays
  Coding DNA Sequence Number=SeqID_21665
  Subcellular localization annotation: CTP_CleavageSite=41; ConfidenceScore=5.51e-01
MSSHSPHASCPSTFRAPGWGALALLLSCRRWRNATSRKLVPFSHRSASRIFIRQPDCIPSPVVTQDGDHQFDGGEKQAGLRPLPRPQLQGSSSSVLGRGVRRVGACLRAGSGLLLPSVIGGEGVRRSWRWQLSHVWLSGLSGFGAASGATSHRGSRKRFLRRRDSRSHPRTDLRLHGLGSLSSPLEWGRGRGPCRSSVYPEVIAAAVWPPGAEVVVAAAGAGGGEPPIGVLLSRRPSSVGGCSYLRGWNRSSVCNGTLSAGVCSLWLSGPEHVGISGCNTMFFSSFSSTGTRLSASRTA

SEQ ID NO: 65041 - protein, 104 aa, Zea mays
  Coding DNA Sequence Number=SeqID_21666
  Subcellular localization annotation: CTP_CleavageSite=58; ConfidenceScore=5.38e-01
MDFASPDPRARTQPRLRKTTVSASPDPGLRLNLDAGRRTPPRPTQGSDSTSTSEDRLRLARPQGSDSASTPEDGLDLDLGGASASPNLGLGPTTSQWGASLPYP

SEQ ID NO: 65042 - protein, 128 aa, Zea mays
  Coding DNA Sequence Number=SeqID_21667
MEGSDFIPMGRAKSVQARITRPRNQGTACKLTADLAAVRCGREDSEPQVPHTVTRAIHPEEMALTGRARFAVSRVRAVGSVWFPGPHASDDSHAQETDDRAHGVGATSPGVGLCGGVGQMGRNEGLRP

SEQ ID NO: 65043 - protein, 106 aa, Zea mays
  Coding DNA Sequence Number=SeqID_21668
  Subcellular localization annotation: CTP_CleavageSite=69; ConfidenceScore=5.56e-01
MAVRRRSSGPGPLPLTPSLCPLGPACQPARALALPFGPSLSARPVRALSARPRLSACPHPALPARPRLSAAQAAARPRARPQDLILIVRFRSDGCRRSIPLRPRFS

SEQ ID NO: 65044 - protein, 115 aa, Zea mays
  Coding DNA Sequence Number=SeqID_21669
MAPKRTTSKAHEAAKAALLAEKKGKALVDTTPQEPCEDDTNSKRQRNEQPTTEGSLRTCSSGGQPHLPPGFAPPECADAIEDGEGIGFLAEEQLQLRALAYQEPQPPEAKRDPRG

SEQ ID NO: 65045 - protein, 131 aa, Zea mays
  Coding DNA Sequence Number=SeqID_21670
MAPCGPGIFMHRYSPWIAASNLLMEPRPIMALYGYTMSMMLNVTCSLRALGATPKERGNSILPMGKVPLPPKPVEGVVRWLEQAVAYAHAIEGMEENDIPPGCHCRLRLCASPQPATLQFDNHGIDVEGAA

SEQ ID NO: 65046 - protein, 102 aa, Zea mays
  Coding DNA Sequence Number=SeqID_21671
MCDRSSARQDTRWRTFQELFMLVGPTTSLGPEKKCNQPIICSNGAYEEALFSAAVCQLQADRPLKKPTLLAIEDLTSQFQLFYYVFAFNITVKIDRRTKDQV

SEQ ID NO: 65047 - protein, 267 aa, Zea mays
  Coding DNA Sequence Number=SeqID_21672
  Gene Ontology: Mol. function=carbohydrate binding; Cellular component= endoplasmic reticulum membrane
  Homolog annotation: Hit_ID=Q67WN6; Match level="QueryCoverage=61%, HitCoverage=76%, E-value=1e-54, Identity=70%"; Hit description =Putative uncharacterized protein P0017B12.6
  Pfam annotation: Domain name=DUF2012; Domain location=82-250; Score =164.8; E_value=2.4e-46; Accession=PF09430.1; Description=Protein of unknown function (DUF2012)
MATMAASSCHGQLLLFLLVAVASACLGSAAAHQAGSGEGYTIAGRVKIDDVKQFMCLKLRTEAISIGRKLVVCDHPLTVELMQIDDALLLVGFGIFRGTSVKGFGLATKTSNTKVILNGGQRISVRRSLYLLYCWLLDLIYFSHNVPAGTHLIEVSSIGYFFSPVRVDISARNPGYIQAALTETRRVLNELVLEPLKEEQYYEVREPFSVMSLLKSPMGLMVGFMVLMVFVMPKMMENIDPEEMKQAQEQMRNNPVSLSGLLARAQG

SEQ ID NO: 65048 - protein, 867 aa, Zea mays
  Coding DNA Sequence Number=SeqID_21673
  Gene Ontology: Mol. function=transferase activity, transferring glycosyl groups; Biological process=sucrose metabolic process
  Homolog annotation: Hit_ID=A3A3V7; Match level="QueryCoverage=100%, HitCoverage=84%, E-value=0.0, Identity=78%"; Hit description =Putative uncharacterized protein
  Pfam annotation: Domain name=Glycos_transf_1; Domain location=333 -516; Score=58.7; E_value=2e-14; Accession=PF00534.11; Description =Glycosyl transferases group 1
MSEDLFEGVKGEDVGDPSVAYGDSTAGNTPRISSFDKLYIVLISLHGLIRGENMELGRDSDTGGQVKYVVELAKALSSCPGVYRVDLLTRQIIAPNFDRGYGEPDEMLALTSFKNFKCERGENSGAHIIRIPFGPKEKHLAKENIWPFIQEFVDGALGHIVRMSKTLGEETGSVCPVWPAVIHGHYASAGVAAALLSGALNVPMVFTGHFLGKDKLEGLLKQGRQTREQINVTYKIMRRIEAEELSLDASEIVIASTRQEIEEQWNLYDGFEVMLARKLRALVKRGANCYGRYMPRMVIIPPGVEFGQLIHDFDIYGDEDNPSPASEDPSIWFEIMRFFTNPRKPMILAIARPYAEKNIATLVKAFGECHPLRELANLTLIMGNREAISKMNKISAAVLTSVLTLIDEYDLYGQVAYPKHHKHSEVPDIYRLAARTKGAFINVAYFEQFGVTLIEAAMHGLPVIATKNGAPVEIHQVLENGLLVDPHDQHAIADALYKMLSEKQFWSRCRENGLKNIHQFSWPEHCKNYLSRILTLGPRHPAFACKEDHKVPVKCRKHIFVIAVDSVNKEDLIQIIRNSVEATRSGTMSDLTGFVLSTSLTIAELQSVIVRTGMLPTDFDAFICNSGSDIYYPSQSSDVPSNSRVTFASDHNYRSHIEYRWGGEGLRKYLVKWASSVVERRGRTEKQVIFEDSEHSSTYCLAFKVINPSHLPPLKELQKLMRIQSLRCHALYNHGATRGSVLLIMVFEKHFMYLFPYAPCRKQVCQPTKKIFYYRYLSICWGIELPDAVVIVGETGDSDYEELFGGLHKTVILKGGFNTPANRIHTVRRYPLQDVVALDSSNIIAIEGFSTGDIRSAMQQKLGIPTR

SEQ ID NO: 65049 - protein, 60 aa, Zea mays
  Coding DNA Sequence Number=SeqID_21674
MELRLFFTLQLQLRLGQPVSRFQERSSGAPRSYQDTKVVVSGNNIIEVINLTFDVFEGSW

SEQ ID NO: 65050 - protein, 394 aa, Zea mays
  Coding DNA Sequence Number=SeqID_21675
  Homolog annotation: Hit_ID=Q6J9V9; Match level="QueryCoverage=15%, HitCoverage=31%, E-value=5e-07, Identity=43%"; Hit description =Putative uncharacterized protein
MAEKPSRAESSPTRSKDLPLRHGGWVPRIVQAGPGQKEPKPPRVMRATEQRLQAFLHFRPDQRVKGRTAMQAACDRTEGAHPFDFDASSMEAQAHTSCNRRAGYYVRETAPPLAPVSCLLDCGTSAATRGDPAYGPTVPTGHSGHGSVSRGRRRDGRYGQKWACSNGGGRRAEAADRRHLWQAKQATLHLRHNDRVKKGTGKGDIPKGILLREGSGPRAPLLIRGSKAGPSEGFNSRLRALGLRAHYWSEVRRLAPRKGSTAASGHSGSAPTTNQGFDGWPPKGSTTASDAERGMTLGSGAALANPAPAKPLTVSTYQPESLGPDCAPGLRPARMREQPDRPKCAKTSKESNHSSEASGATPGGCARAHPQERNATEKGRSPCKKVRQKPPSEY

SEQ ID NO: 65051 - protein, 89 aa, Zea mays
  Coding DNA Sequence Number=SeqID_21676
MEVGSLYASMTEFRLAMWQYAIEKEFELGIEASTPKKYRGQSEFNKFSSVSSSITVMHLETRSGFNMNPLTEWSNRKLDRTLYDHKTII

SEQ ID NO: 65052 - protein, 257 aa, Zea mays
  Coding DNA Sequence Number=SeqID_21677
  Gene Ontology: Mol. function=transferase activity
  Homolog annotation: Hit_ID=Q6QP44; Match level="QueryCoverage=21%, HitCoverage=7%, E-value=9e-16, Identity=74%"; Hit description =Putative aminoalcoholphosphotransferase
  Subcellular localization annotation: CTP_CleavageSite=57; ConfidenceScore=5.44e-01
MGDRPRNFFGCVRARTKCTQKTRVGLEFFGTQSPVTPAVTSSSPRPVPGNGSQAAVAADSGGSASGAVWAATPVAAQYKRIGGLLYHAHVRSSRPVAAHVASSTASCFRGRACLRVGRICVPVALCSDIFRYEFPSSTPPSTLWKWRRQQVDSAAGGLHAAEFPSSLTRMEAPPAGTNAVEAPSERLNRVWNGLLDVIRHMQVSADELRRLTRRNHVPEYVEYLHKNSLVNAMSVVTEIAQGLDHVSTDLEEVLIGL

SEQ ID NO: 65053 - protein, 190 aa, Zea mays
  Coding DNA Sequence Number=SeqID_21678
  Homolog annotation: Hit_ID=A7PVI8; Match level="QueryCoverage=36%, HitCoverage=22%, E-value=5e-13, Identity=59%"; Hit description =Chromosome chr9 scaffold_33, whole genome shotgun sequence
  Subcellular localization annotation: CTP_CleavageSite=39; ConfidenceScore=5.67e-01
MALKAAVSVTPLLPSPPLRRLLLSPSPSSAAARRIARVSAAMATTEVHPAVVVGGGRVGQALVSMGPPGGDVLVGRGEKVPDDAPGPILVCTRNDDLDAVLEATPKSRWRGLLGQGFGPSGLVKRVYLNPESSGNRQEENRRKTTKQNFCLPALVLPIGGSHRECSRRSWRYSGHGSHTWYQRRVSGLAG

SEQ ID NO: 65054 - protein, 193 aa, Zea mays
  Coding DNA Sequence Number=SeqID_21679
  Gene Ontology: Mol. function=NAD-dependent histone deacetylase activity; Cellular component=chromatin silencing complex; Biological process=regulation of transcription, DNA-dependent
  Homolog annotation: Hit_ID=Q2QWW9; Match level="QueryCoverage=48%, HitCoverage=23%, E-value=4e-42, Identity=88%"; Hit description =Transcriptional regulator, Sir2 family protein, expressed
  Pfam annotation: Domain name=SIR2; Domain location=63-185; Score= -39.6; E_value=2.2e-07; Accession=PF02146.8; Description=Sir2 family
MLGRLIAGLEARGMFEDVNIILVGDHGMVRTCDRKLVFLEELAPWIELKSDWVLSMTPLLAIRPPDESYRIPPIIGLIGEGYMIEMKRSKRNECGGAHGRAQPNAAHYALASLERIGHVHSMVTQNVDRLHHRAGSNPFELHGSVYEVICLECGTSISRESFQEEVKNLNPKWAQAIDSLEVGQPGSGKSFGM

SEQ ID NO: 65055 - protein, 219 aa, Zea mays
  Coding DNA Sequence Number=SeqID_21680
MAPRVHHDDGGSQPPTEAGKRQQDPSSTNSCTSTGLKHFSDGHVIAYAGLKHFSDGHVIAYAGLKHFSDSHVGIPTPGATRQDRAPVATRADAPCQDAARAQAPKLRNPMPRPPSVPLHASRSRAVARRPAQARPRPWPPAPLPVRTRATQRPAPKPRTAPEQPTRPKIPQPFLLCVHGVAMRPFSLPYYSLSPLMNAINGALNPLAAVSHHSPGALSL

SEQ ID NO: 65056 - protein, 140 aa, Zea mays
  Coding DNA Sequence Number=SeqID_21681
  Homolog annotation: Hit_ID=Q6QP51; Match level="QueryCoverage=32%, HitCoverage=20%, E-value=4e-12, Identity=73%"; Hit description =Putative growth-regulating factor 1
MSYEGLTGNCGVDRGSRPCRQGRSDRSHFALSLTDLTGKQRRSLRSDCCATHQDESDNSQVQPQAQQEAPPRPTPGLSLNLGLGRWSPPRPTPGLGLNLGLGRWSPPRPTSGLGLGRSLRLARPWARTGRAMEDTSLPYP

SEQ ID NO: 65057 - protein, 140 aa, Zea mays
  Coding DNA Sequence Number=SeqID_21682
MTSTGCTRVDLCARHGQGYSWGRKESRGTCLGWDNHSIIVRVILELKILLGEAGSEQELPVIESTSFGAEATPALNEAISSESGSEFTGGGRQCWGLVLKCYELRTRQHKDVKYKCPSSAEPLGFKLGIKVNIPDLWLKV

SEQ ID NO: 65058 - protein, 142 aa, Zea mays
  Coding DNA Sequence Number=SeqID_21683
MARGTRGEEKKVEGPVQREEEIEVTEDRTPPPSDSQAGNCFYFDICGSEPESPVNEGKPRIHFSKHFCKTESLIIEKPYLDSLTTSIPLRVFSLVGWFPKKKNKTEVREDSVLHIGSFAYNLSGGVCASLGLYNITTQHSPF

SEQ ID NO: 65059 - protein, 278 aa, Zea mays
  Coding DNA Sequence Number=SeqID_21684
MTSHGSSDEGNALSHTNGLAREGFPRILWEVLQGAGYTTPPQYMMQQFDKHRVPCCRPSWRSLDSESFGYRAEDTIEVIALHGLTTFCGFHPLELSTHPIGLFPAEKEDNPMCKDRVEHAKDIWAIYPGQTAHLTVRCMNALYHLQVMRDEAMSHLMALLEATKITLDNREELVVDLSTEMVEKDLQVEQLSNEIQELEELVGTRENTIEVLEDQLINTQQQLAEANEHLDMHHQEIQDMEANEDVDIEGGEEPASSLDTAGSGRPPSPESSVASFAH

SEQ ID NO: 65060 - protein, 78 aa, Zea mays
  Coding DNA Sequence Number=SeqID_21685
MENNWVMLLKSRSDQRTRARITCGHTHSPAVQIRGQSRNHAHHNGGCSGVGGGDGRGQRRRQAAAEDGTGASGSAAAA

SEQ ID NO: 65061 - protein, 144 aa, Zea mays
  Coding DNA Sequence Number=SeqID_21686
MRKLELEPWRREGSSQGRTAGRWERLLPALGEEGCPTCRCAEPGRKEGAQWREPAELWPSQGWLLPAPCSIGGDSRVVGVEGGGCRELGAAAGRRPWRSFYAASKAGEVELTPMGGEGQGTPWLAEGRSRPGRHGEEHDSLLLR

SEQ ID NO: 65062 - protein, 53 aa, Zea mays
  Coding DNA Sequence Number=SeqID_21687
MDLARAVTDPRVTDHWVQAVSATEELRARSLADGWALVVGVVMPGGRAGLFRI

SEQ ID NO: 65063 - protein, 31 aa, Zea mays
  Coding DNA Sequence Number=SeqID_21688
MAAAAVATAPPLGLRWGAWAETIEYLFAQVK

SEQ ID NO: 65064 - protein, 148 aa, Zea mays
  Coding DNA Sequence Number=SeqID_21689
  Subcellular localization annotation: CTP_CleavageSite=54; ConfidenceScore=5.42e-01
MSSHRCAIPGHQVVNPTRQSRNPSPELRSEASTTEPKRSSTRLVFSLACLQLVSATWRGSRDGARRAEATGEGAWGTRGLKGEPAQRPHLCQRRKGDYASCQRRSRIPFGGRRVLRGGASIELGRGVRDGGDPGSSGPPASGEIDTGA

SEQ ID NO: 65065 - protein, 146 aa, Zea mays
  Coding DNA Sequence Number=SeqID_21690
MDRGLIIYFFKGLFVNLAQRRDHGFRLVVGEYFAGALPLNSAAEPASGTSEIPARGSSVCERKSWEKILGEGARMPVTAHPHDSIWLQVMRLAVRNSETIDQAKDGGKKRFEVPSAREKVKETRNPKPGVKKKTCKVKVDRVKKSY

SEQ ID NO: 65066 - protein, 51 aa, Zea mays
  Coding DNA Sequence Number=SeqID_21691
MKPSEVDRKYYYFITKEEFLMMNEREELLEYALLCLWGVQGDPQQQLQLPL

SEQ ID NO: 65067 - protein, 349 aa, Zea mays
  Coding DNA Sequence Number=SeqID_21692
MSDGTPDSPVVRIVTTAQEKAKPWKETSRSFKTTMNSRWLVLDTLHSSHLERLHHRLREEQERRRQHGEQQGSSSSPQQEVETVRPRSSVAQLEAPLVPPRDAPAVGGATGGDPDDDDSDHITESSEPQEAEGWVARPITRDAARGCHFHDALDTLLRQAFDRHTWSIEYRCVVYQHSRGRYPDRWEATCLVRRPEDDLRGAEAVSEHYSISERDTAEAAMQDAARRALSQYCSLFGGVADGLNLRYYPCRPTGSTESVVVSPVGEANPRLSSTVNLVAVLNTELDHSLDELSRARTEIAELRAELAERHHQEGGSPAPVGTQHPYRSPPRGHHTYGSPVCKTRIDLDP

SEQ ID NO: 65068 - protein, 150 aa, Zea mays
  Coding DNA Sequence Number=SeqID_21693
  Homolog annotation: Hit_ID=Q6F2U6; Match level="QueryCoverage=53%, HitCoverage=22%, E-value=4e-07, Identity=42%"; Hit description =Expressed protein
GDGEQGSGLKWPRARWGEPHARRGRGDRGTHGGGYAKTEKLTSRARGAEREKKAGAGAREAGLTDRARGHTDSRERARARGCYSAIPVADGDQRWRLRELEAEAEAEAGSILGPPRSSPREVKEEMARCFDLVRRLGRGTVYRCPISTSH

SEQ ID NO: 65069 - protein, 962 aa, Zea mays
  Coding DNA Sequence Number=SeqID_21694
  Gene Ontology: Mol. function=phosphoprotein phosphatase activity; Cellular component=nucleus; Biological process=multicellular organismal development
  Homolog annotation: Hit_ID=A2XH85; Match level="QueryCoverage=100%, HitCoverage=98%, E-value=0.0, Identity=71%"; Hit description =Putative uncharacterized protein
  Pfam annotation: Domain name=PP2C; Domain location=582-925; Score =28.8; E_value=1.3e-07; Accession=PF00481.12; Description=Protein phosphatase 2C
MGNSTSRVVGCFAPPDKAGGIDLDFLEPLDEGLGHSFCYVRPGAVADSPAITPSNSERYTLDSSVMDSETRSGSFRQEPADDLAAAAAAGLQRPCRSFGETTFRTISGASVSANASSARTGTLTVSLIRDVQEPAAAFESTASFAAVPLQPVPRGSGPLNTFLSGPLERGFASGPLDKGSGFMSGPLDKGAFMSGPIDAGSRSNFSAPLSYGRRKPRLRLLVHRISRPMKTALSRTFSRSSQNPGWVQKFLSHPMSQLPWARDAKSRSEGSQDGLESGIPEPEYNVTRNLQWAHGKAGEDRVHVVLSEEQGWLFIGIYDGFSGPDVPDFLMSNLYKAIDRELEGLLWVYEDSSERSDHVSTHEEGGLVAASVDAPHDDSGQCQSDSGRQELGNFGKQNVSPGKGCDDSALQFQPNCTSSEEKDLAPHGSSSEMLGRDEIVEEMVEADLGNDLQSREPHSSNRDLSGTDLNTSCRCATETSSYCDQHAKFLKGNRKSKRLFELLQMELLQDYNTRLSKEPPEESKIPNLHVTQADTAEARSRNTAEVSRCSLAATGECFDDSEGLGSSRHADSVLGIGIKECTGCSISTSSSGHKQVTRRILIGSKLRKMYKKQKMLQKKFFPWNYDWHRDQPHVDESVIKSSEVTRRCKSGPVEHDAVLRAMSRALEITEEAYMKIVEKELDRYPELALMGSCVLVMLMKDQDVYVMNLGDSRAILAQDNDHFDQYDSSSFSKGDLQHRNRSRESLVRVELDRISEESPMHNPNSHLNSNAKAKELSICRLKMRAVQLSTDHSTSIEEEVLRIKVEHPDDPQAVFNGRVKGQLKVTRAFGAGFLKKPKFNEALLEMFRIDYVGTSPYISCNPAVLHHRLCANDRFLVLSSDGLYQYFSNDEVVSHVLWFMENVPEGDPAQYLVAELLCRAAKKNGMNFHELLDIPQGDRRKYHDDVSVMVVSLEGRIWRSSG

SEQ ID NO: 65070 - protein, 28 aa, Zea mays
  Coding DNA Sequence Number=SeqID_21695
MEAGLWWGFAHIRKTLFLIKHASSLRSD

SEQ ID NO: 65071 - protein, 75 aa, Zea mays
  Coding DNA Sequence Number=SeqID_21696
MTVGGGCLSYGAPDSPVHTGHVRCASHVTNAVGFRPLELLSSGPAWMSGDRWREVAVALLVHRTVRCTPDMSGKL

SEQ ID NO: 65072 - protein, 227 aa, Zea mays
  Coding DNA Sequence Number=SeqID_21697
  Subcellular localization annotation: CTP_CleavageSite=25; ConfidenceScore=5.39e-01
MEGAADPGPPPTLPLPPPVLHLAVSAMEPTRGSRPRCTPPPRRRWKVPRIPARPLARISPCPRMDPARSPGLGTLSWWRHPLARMLMNTVQAREASARLPHRDSRTPSPPSIHGIARPRPYAATSLLVLSLAPIPHESHLRDALSPLPLSDFGISRIRPLARAFCDAPASRADAGANGTPSPQDHAEKDPPDVLDVAIVGGGMMGLAVACAMRKERIQVYNGGVAEC

SEQ ID NO: 65073 - protein, 39 aa, Zea mays
  Coding DNA Sequence Number=SeqID_21698
MPSKPVVRNTPLLSSLFIFLMLCCQKGIDKNLCDDKNNI

SEQ ID NO: 65074 - protein, 85 aa, Zea mays
  Coding DNA Sequence Number=SeqID_21699
MQWRKGAHDCWPELELGLEVRAQGIPDAMASRRSRASPTAQGKPWRRELAGRDAEHREQRSGHGRKKVWATAVWRRRQGEKESGN

SEQ ID NO: 65075 - protein, 45 aa, Zea mays
  Coding DNA Sequence Number=SeqID_21700
MGKPVPSLLMLLLCRDNASPWTVVNRPSSFQYKLDTSNFLTSREC

SEQ ID NO: 65076 - protein, 53 aa, Zea mays
  Coding DNA Sequence Number=SeqID_21701
MGKSTRSTANSVLSLEITCTIAPDFPEEPVTEDPGEQQIEVAVQELIEGELCP

SEQ ID NO: 65077 - protein, 280 aa, Zea mays
  Coding DNA Sequence Number=SeqID_21702
  Gene Ontology: Mol. function=calcium ion binding; Cellular component =cytoskeleton; Biological process=actin filament bundle formation
  Homolog annotation: Hit_ID=A2WQN6; Match level="QueryCoverage=96%, HitCoverage=39%, E-value=3e-85, Identity=62%"; Hit description =Putative uncharacterized protein
  Pfam annotation: Domain name=CH; Domain location=156-269; Score=63.3; E_value=8.1e-16; Accession=PF00307.22; Description=Calponin homology (CH) domain
MGFDGLVVVSDPYLQRRFTQAELRALQAQYAALRDASPNGRLRMRDLPAAISGVRGAAKSRDAEKENSAPEPGPCHGLTDEEWASVLKAVARADEKPHQDASFELFLRVYAEMQLRLKAVSVCSGRAGGIVRSSSSSAVAFLTAATTTLLHTISESEKASYVGHINAYLADDPSLKSALPIDPATDHIFHITKDGVLLCKLINLAVPGTIDERAINTKRVLNLWEKNENHTLCLNSAKAIGCTVVNIGTQDLAEGRVKNLASFLSDFDELRQEIIRAELS

SEQ ID NO: 65078 - protein, 138 aa, Zea mays
  Coding DNA Sequence Number=SeqID_21703
MVGHDTVSDYPKEESRKVRLHGYGAAVPELARRRCLVSGVDGHIWTVDAIWTIINVNWNMEHNLRNMCHHKGLMGTPFGQLTRKASGRLPYPKGARAVGDCMQGGSRVDFAAMAVRRRILASALPINCSGFSEASGTL

SEQ ID NO: 65079 - protein, 51 aa, Zea mays
  Coding DNA Sequence Number=SeqID_21704
MVGTSAATARRQPQSVEHCTLQDMVDGVTWPTTLPPGWTVEWDAAPAGEEQ

SEQ ID NO: 65080 - protein, 288 aa, Zea mays
  Coding DNA Sequence Number=SeqID_21705
MTSYGSSDEGNAQSHTDGLAREGFPRILWEVLQGAGYMTPPQYAVQLFEKHRVPRCRVRMTLEPHPLQPGWRSLDSESFGYKAEDTMEAIVLHGLTTFCGFHPLELSTHPIGLFLAKEDDPMWKDRVEHAKDIWAIYPGQTAHLTVRCMNAMYRLQVMRGEAMSHLMALLEATKITLDDREELVVDLSTEMVEKDLQVEQLSNEIQELEELAGTRENTIEVLEDQLINTQQQLAEANQHLDMHHQEIQDMEANEDVDIEGGEEPASSLDTAGLGRPPSPESSVASFAH

SEQ ID NO: 65081 - protein, 177 aa, Zea mays
  Coding DNA Sequence Number=SeqID_21706
MEMGAQRGRSRGRERSSWARRENAPWLRELGTQERREEEALRAGIRRPGKEERRAAVRRGGDAAREGLRWCSTRRPEMRRLGKSLGVGQEDRSGGTAAWRGSRRAQGLHELRGRGDGSSARILARRGHGRSDRRRELEERAIGRWSREMKKGVVLINRKGRSRGRPWESGNREERAA

SEQ ID NO: 65082 - protein, 77 aa, Zea mays
  Coding DNA Sequence Number=SeqID_21707
  Subcellular localization annotation: CTP_CleavageSite=21; ConfidenceScore=5.03e-01
MAPRLKFTRLSGEPKPHAPTVDSAISGRRVARANGRLVTPDCPGERLQLVRFLANGKRTLKKKTVVFKLIIGSLERG

SEQ ID NO: 65083 - protein, 71 aa, Zea mays
  Coding DNA Sequence Number=SeqID_21708
NEAEAFEEVLSGRGDICAFSAELSPSPEPFEPTAVPEAKREEEITKMAEAILDEAVSRLLNEAAEAILKEE

SEQ ID NO: 65084 - protein, 157 aa, Zea mays
  Coding DNA Sequence Number=SeqID_21709
MDESCTQLLSGDPMINLNTTVFFLLCSFPVCEESPQLGISRPYNKNQYEAQEFLRGGDPPTVLPFEAGSDSVEGGVDAEGAAAPPLMSDPARTVYLVVCEPEGLGVDDVEAAASVHEDLGKPDVADDGIDNERVLPWARHTIGVAALVEGDGLVGPV

SEQ ID NO: 65085 - protein, 591 aa, Zea mays
  Coding DNA Sequence Number=SeqID_21710
  Gene Ontology: Mol. function=hydrolase activity, acting on glycosyl bonds; Cellular component=cellulose and pectin-containing cell wall; Biological process=cell wall organization and biogenesis
  Homolog annotation: Hit_ID=A2X336; Match level="QueryCoverage=67%, HitCoverage=90%, E-value=0.0, Identity=83%"; Hit description =Putative uncharacterized protein
  Pfam annotation: Domain name=Glyco_hydro_28; Domain location=83-437; Score=55.0; E_value=2.5e-13; Accession=PF00295.8; Description =Glycosyl hydrolases family 28
MAAATSRGPASVAICALAVLHAMAALCDSATAAAATCAGLAPAKHRPEVISIADFGGVGDGRTLNTWAFRKAVYRIQHQRRRGGTTLHVPAGTWLAGSFNLTSHMTLFLARGAVLKATQDTRGWPLVEPLPSYGRGRELPGPRYASFIHGDGLRDVVITGDRGVIDGQGEVWWNMWRRRTLEHTRPNLVEFMHSTGIHISNIVLKNSPFWNIHPVYCDNVVVTNMMILAPRDSPNTDGVDPDSSSNVCIEDSYISTGDDLVAIKSGWDEYGIAYGRPSAGVTVRRVRGSSPFSGIAIGSEASGGVRDVLVEDCAIFDSGYGIHIKTNVGRGGYIRNVTVDGVRLTGVRSGVRIAGDVGDHPDAHFSQLAVPTVDAVRISNVWGVNVQQPGSLEGIRASPFTRICLSNVKLFGWRSDAAWKCRDVRGAALGVQPSPCAELATSFASARYSLRALHRCDRFEKYTDNSWASPQWVWARDGLTTPQGIAAEVWTYIRAVERSGLEGSDESEYSSDEEDSDGGEDEDDDDDDGDDDGDGDGDGSGRGSGDGDRDGDGGSSKGSTKGGSSKGSTKGGGSKGSTKGGGSGSSNRASG

SEQ ID NO: 65086 - protein, 79 aa, Zea mays
  Coding DNA Sequence Number=SeqID_21711
MASTTRLYRCAESVARQATNPAQLARSWRQATEIADGRWGKYSGLCWDLVWVMKLIGMAHRQCLIHARGLRVAAGRAQV

SEQ ID NO: 65087 - protein, 182 aa, Zea mays
  Coding DNA Sequence Number=SeqID_21712
  Subcellular localization annotation: CTP_CleavageSite=46; ConfidenceScore=5.67e-01
MQAACNRTKGAHPFDSDASSMRAQAHTSCGTFGRRSRRRFTSAIMTASKKGSTAALEHSGSAPTTSQRLAPEGFDSLLRARRARDDSGYIRYMAEARATLPRSDSVTESHQREASSPRTLSNGTGFGKSPAGSGAALANPAPAKPLTASTYQPENLEPAYALGLRPVRIREQPDRSKHHETR

SEQ ID NO: 65088 - protein, 129 aa, Zea mays
  Coding DNA Sequence Number=SeqID_21713
MGSAHGSSVLSSLEERNFAEVGTFQPSLGFKDFHQAARLHPLAGASGGGNHPPALRRRRPPAMPGKASCCCPARVQHSVLCPRFRGEDGSEDLPVCFGAAGTGWCGVGGQVVAAFGAEVVAAGESLHTV

SEQ ID NO: 65089 - protein, 235 aa, Zea mays
  Coding DNA Sequence Number=SeqID_21714
  Subcellular localization annotation: CTP_CleavageSite=56; ConfidenceScore=5.13e-01
MTSQTAAESTILSMRGSGNSSLGQALFRQALIALQPRIALYGYTMSMTSKVMGSVCAFALVPKDSDRTIFPRGVKEDGIRLTAIVHDGLANFLVCYIAFDDHGIGVWAGVLWRLTLFESNDVVNRRLRVALFFFWRQRGLLPLMVDWLRRGRGLWLSDWSFHEICSKVCIRKEDLVHAPFPLGPCALPAEAVAFAPKFWSSLGVKGPLDCVVLRPCDSGGLRVTPPGSTNTPKCY

SEQ ID NO: 65090 - protein, 275 aa, Zea mays
  Coding DNA Sequence Number=SeqID_21715
  Homolog annotation: Hit_ID=Q6QP51; Match level="QueryCoverage=12%, HitCoverage=15%, E-value=1e-07, Identity=81%"; Hit description =Putative growth-regulating factor 1
  Subcellular localization annotation: CTP_CleavageSite=28; ConfidenceScore=5.13e-01
MQAACNRTKGAHPFDFGASSMGTQAHTSCNRRAGYYVRETAPPLAPVPRLLDCGTGAATRGNPAHGPTVPTEHISHGSVSRGRRRDGRYDQKWADSNGGGRRAEAAVKSSASSRLLLGQRENPLPRRDDDAPEFRSSNGSRTRNGCPANHSSCRINSAAGQATPLAGTEKGDTPKGILIREGSGPRALLLIRGSKAGPSEGFDSRLRALGLRAHYWSEVPRLAPRKGSTAASGHSGSAPTTCQRFEGWPLRRVRQLPQATRAPRPLLIRGSQAGP

SEQ ID NO: 65091 - protein, 267 aa, Zea mays
  Coding DNA Sequence Number=SeqID_21716
MHRALPPSEPPDGGARVAFVLSSLEERNFTEVGTFQPSLDFKDFHQAARLHPLAGGHPRRGGNHPPALRRRRPPAMPGKANCFCPARVQHSVLYPRFRGEDGSEDLPVRFGATDARWCGVGGRVDAAVSADMVAAGESFFADEPVSATRGPTSGSLALMSGSRPLSGDANKSLPVAASVLAPSLLLQRSLASHQEFVVPRALRCGGCSYPREWNRCSVCNGTLSAGTLGRSAMSRSQRQRCQHGQRQSWLEKKLRRPEPDRAVHWPD

SEQ ID NO: 65092 - protein, 543 aa, Zea mays
  Coding DNA Sequence Number=SeqID_21717
  Gene Ontology: Mol. function=cysteine-type peptidase activity; Biological process=proteolysis
  Homolog annotation: Hit_ID=Q5NKQ2; Match level="QueryCoverage=99%, HitCoverage=82%, E-value=1e-134, Identity=53%"; Hit description =Putative uncharacterized protein 9C20.3a
MEKLDHNDMTIRAGPGKELKITKDTVHFILGLPNASGGTALGIDEAVAANNLRAELALSKEDFGVAALQDRLRKGSDDDLTIRSFFLILFNRLLFPTASWGITNHEVLLTEEMDRFHQMDWCQLIFNDLCQAAKKWHTRSVTNVSTTIYGCSIVILLYYLDHLHDSAAPQNKRETPRIKYFDRNIIQALARADKGKIRQGQEPFGHCSTRTNTFDVPRPNPSGQHTIHIKLPLIRDLISSKLNQLPSHHRLSFIEKLSHYDTEVGKACSVIKQTLQKIVEKQYNLSDVFSELIDEVLRAESGDNEDGYDVQKTTTKSDDILPHTAESCPDEAYIDPLVHTNLTKQNKTPTTPVGKHGDGGKNMPTNTNVTPIATPHTESSAPIFDATPQIKFPGGVQQAAETDLSDSGPCFDQTPSEHVSVETDPATNTPQSLLNFEEQERHSRNPQPFDESVLHTLLDNSLPEADELDQCKASDHGSHAGSNDCGFYVMGYILFYECDEGSLRSDIEAGNTSEIRSIALHYITFHPKNKALSLLEDIQRFKV

SEQ ID NO: 65093 - protein, 83 aa, Zea mays
  Coding DNA Sequence Number=SeqID_21718
  Gene Ontology: Mol. function=cysteine-type peptidase activity; Biological process=proteolysis
  Homolog annotation: Hit_ID=Q5NKP7; Match level="QueryCoverage=98%, HitCoverage=11%, E-value=5e-14, Identity=45%"; Hit description =Putative uncharacterized protein 9C20.3c
MKNVDQPPSNPKRIIIQSTQECFSVDIPHVLAETVRHNTRQAADEDDEFMSLSKKRNFDDSPPKVLKKIVTKRRKVVDPPRQM

SEQ ID NO: 65094 - protein, 188 aa, Zea mays
  Coding DNA Sequence Number=SeqID_21719
MVALLSRVVTQRTGPYREARTDQRARVVSDRGRGSRLTGRAQCQGHKRPTGGSRRWVHVREAVSGDPDRAIETRRPKSSTRRRGWGSRRAYALVHGGSWGRWSWQVCPTAQRGAAGAWRERLGVLTKWAHEAEIEEGRVDEQVTSVDNPVPLSRGRKRGRESVRGKKLPLTGGAHLWGSAGACAAPLG

SEQ ID NO: 65095 - protein, 449 aa, Zea mays
  Coding DNA Sequence Number=SeqID_21720
  Gene Ontology: Mol. function=protein binding
  Homolog annotation: Hit_ID=Q6YWE7; Match level="QueryCoverage=65%, HitCoverage=67%, E-value=1e-120, Identity=73%"; Hit description =Putative uncharacterized protein OSJNBb0042G06.17
  Pfam annotation: Domain name=DUF266; Domain location=148-439; Score =571.5; E_value=8.5e-169; Accession=PF03267.5; Description =Arabidopsis protein of unknown function, DUF266
  Subcellular localization annotation: CTP_CleavageSite=58; ConfidenceScore=5.42e-01
MTTTTKNHKQQQLLHMLPTAAAPPWPVRTKLLLCAALGFALGVVATASLVNSPSYATSSAAAAALRGGGGALGLVLPPSATRNAAQDRRPPPKQAGAARATVRRSRPEPPAGTGITSAAAPPPSVVGAEGPAAPSATSRVNGGSIVSDSDGDDEELMARAEASAPREVPAGCRVPRVAFLFLARWDLPMAPLWDEFFRGHRGLYNVYVHSDPAFNGSDPPETSAFYRRRIPSKEVKWGEISMVEAERRLLAHALLDDHCNARFVLLSESHVPLFDLPTVHSYLVNSTRLYLESYDQPGATGRGRYNRRMSPVVAAGQWRKGSQWFDLDRALATDVVADRVYFPLFRRFCRRRHCYADEHYLPTLLNIVRRPSAGANRSLTWVDWSHGGCHPARFTRMEVTVDFLRWLREGSTCTYNGRTTTVCFLFARKFLPNSLTRFLRFAPKVMGFG

SEQ ID NO: 65096 - protein, 135 aa, Zea mays
  Coding DNA Sequence Number=SeqID_21721
MRGVVSRSRTQLCRDYHELGVEVSPFNKKGTNLDNWFLGWLEDELKSLPSVIKGLMSYSALVTHKGTMTALAHVGCRHFEPFGYINLDFNGAVYDVEEDLTLKLPVGVLFDWMWGPHNVSVVRESIDREVKHVMN

SEQ ID NO: 65097 - protein, 161 aa, Zea mays
  Coding DNA Sequence Number=SeqID_21722
MPPRTRLTARKSMGPIGVPRHQLAPRHESSSSGSNDPIGDLEARDQLADRDLALDWAVQSRLLACAKEARAQARIKELSSTVDNLQVYCNTLHEEVHVLYSQLHPSVPAHPAEVEAGPSHVAGRALGGELDLFEPPPSLRLVDVWTPTPDDEAAKSNGKQD

SEQ ID NO: 65098 - protein, 662 aa, Zea mays
  Coding DNA Sequence Number=SeqID_21723
MPSSSSSATATPPAAASSEETLSNVMVEELRAGDSVEFGVSRMTSARIEDMQRLGYFGGGVARAPGTEEVPEPEGELVVFEAFFAAGLRLPAHRVFELNQLPYDGYPGQDEADRRGKKPAVETGGDPALAAATSSKKRKLVMDKDRQGAARKRQSTVRVHEARPKRQRGTAKAEASGGGKPPLPAKVGASAPGKAPEATVGAGGPKLSKVAPSVSGVAEAAKAARSLPPSGKRVADFGTEINVEDYLGGSDEGPLALVVPGAAIATAAPAPKAGVETLGAGGEVSALALVRDEAGVATRRLKEATEALSQVADFTSRTASGALTAALSAEVERLRTQHADAVREKSASDSKCRKLAEKVAALEKEKADLRRQLTEERREANEAIAKEQAAQAEARLARAEGNIAKELAGELQRRLAAFESRAEGAEAAARAEAERTRTQLMTSYRELGVRTGDFEVPEREAGLRCLEWVQEELQELPTVLAGLMSFTSLVTCEAAMNALSREGCRHYEALDQVDEDFGRDIFEVEDPVVKESAGALYDRMWGSYGREVVRARAEAARAQAERGERVDDLGALNSALPEPETTPAEAATGGAPGLTPVTAEDAPGAPAPAAAGEGLPPKVAEGAPDAPAAAVPSAEDPAEVGAEAATEAAAEAPAAAGPSQVA

SEQ ID NO: 65099 - protein, 86 aa, Zea mays
  Coding DNA Sequence Number=SeqID_21724
ETRKCSWESYDDKGEVMRTIESKRLMGQKMHCGSRLVDSYINDPLAEYMRLKAADEKRAQDAREWEATQAEKQMLDNLADRLKGSE

SEQ ID NO: 65100 - protein, 98 aa, Zea mays
  Coding DNA Sequence Number=SeqID_21725
MALLLSRETADPSPPDAIAPSHPDACAPAAVARAQEPPKPDAVGRPPPPSRYAAGPLLPPPSAATPKAAAAASYCLSRTAAAIVRAGRRGGWWPKGGG

SEQ ID NO: 65101 - protein, 108 aa, Zea mays
  Coding DNA Sequence Number=SeqID_21726
  Gene Ontology: Mol. function=nucleic acid binding; Cellular component= ribonucleoprotein complex; Biological process=nuclear mRNA splicing, via spliceosome
  Homolog annotation: Hit_ID=A2XFN6; Match level="QueryCoverage=87%, HitCoverage=35%, E-value=4e-44, Identity=92%"; Hit description =Putative uncharacterized protein
  Pfam annotation: Domain name=RRM_1; Domain location=36-103; Score =33.0; E_value=1.1e-06; Accession=PF00076.13; Description=RNA recognition motif. (a.k.a. RRM, RBD,
MGRILFALTPATWKGYQASRLGKASQEPPAPPNNILFIQNLPDQTTSMMLQILFQQYPGFREVRMIEAKPGIAFVEFEDDGQSMVAMQALQGFKITPENPMAISYAKK

SEQ ID NO: 65102 - protein, 217 aa, Zea mays
  Coding DNA Sequence Number=SeqID_21727
  Homolog annotation: Hit_ID=Q10MR5; Match level="QueryCoverage=60%, HitCoverage=62%, E-value=9e-18, Identity=41%"; Hit description =Expressed protein
MAMVMTDADAATATATADAATATATATADAATATVDADSVTATAAEKPKHAEKPDYAPYNGASTADGGTGARVRRGGGVVDSVVARWRREDMLDKSPLALHAAAAVFAFVALVLVASNQHGDWMQFDRYQEYKYLLSIASLALLYSLAQAARHAHRMRGGVDPISSASGRLLDFVGDQASHCFQLLVCSYKCCADTGISLSQQKSDVFFDLVEIPAQ

SEQ ID NO: 65103 - protein, 159 aa, Zea mays
  Coding DNA Sequence Number=SeqID_21728
  Homolog annotation: Hit_ID=A2X1L7; Match level="QueryCoverage=47%, HitCoverage=14%, E-value=1e-14, Identity=52%"; Hit description =Putative uncharacterized protein
MSSFRLSSRRAWERQVRPRGLLRLRTLAPRAAPTHAGPQRCTLADFGYLKDLPELLHRIVHGGVSTRTPGKKARLTTKCSWGRSRVCFGNRTRRSRAERATHVGSTEERVAASLERDWGLAAAAVVARRTRRAEAAARAVEMYIKNNKSPAKPSTSSSN

SEQ ID NO: 65104 - protein, 1288 aa, Zea mays
  Coding DNA Sequence Number=SeqID_21729
  Gene Ontology: Mol. function=protein binding; Cellular component =cytoskeleton
  Homolog annotation: Hit_ID=A7QFI1; Match level="QueryCoverage=20%, HitCoverage=75%, E-value=2e-61, Identity=50%"; Hit description =Chromosome chr8 scaffold_88, whole genome shotgun sequence
MPLSRHTVGNEYALGGRDLYRAADQHDPEDVLDGVAMAGLVGVLRQLGDLAEFAAQVFHGLYDEVMSTSARGHGLMLRVQQLEAELPLLERDSCQRDYLHVASNRGVDWRSNPRVDQGVVTRGDTPRFIMESIKQCRGPPKLFMLDKYDIGGEGACLKRYTDPSFFRTDSACSTLPHEEGIRDERRPPKAMEIRPNLENAQIFQPPNAADNVSKLETDPSAEAMDEVPTNRRRLKYRQLNGSVFQSFRPLMLNLYEKPSSEEKLVTGGHSKVRISVNGSPESDTEERDTMVDTSVNMGKGKVAVRKNRPVSEEALSRSSDARSAGSSKGYNSELDVYVDALTTVDSEAETDSEHRGHGQCTFDRMDSDNRFSNAQNAMTSRNSNFDKKDRPDVPSANRDMSNQHEEATVSTQNTKPVVVGEHERTSSLEELLGQEKPASWDHERTSSLEELLTEDFNAPESGAREQATEEQSCNGSATGAVSNGTQDITKKTKEVKENSNIATISFKKIASKRSRYVGSMAAKVGILPRKLSKKHDPFSDSLRCMAKQLLELKYDGTKDSDLYDFEANSVGCDVKYQGISDPPVEIKESDVHKFLPDSSYDDVGSRKCPQEEMNHGQEHDAPPTDSPHDSVPDEGNGFQDPNMIYLASIITSSSSQEEEGCASTSLHENSSMAVLNHILEHAQEKFEEHLDKDVNEDIHTEVISENSSGKCEDLKEVSIYSEQVNVEDMEESNKSDVYVLDDETAEYIEEQVVSDGMNSSPVSSKQSDDPCRITPLALADEDDTVACKVIDSPEVDHITLSETFTDIDLPNVVNESVISSEHAMPENEQYYFHPETTFGQDLCLDNNEIVGENGEVPLCSSTTVAITPEPTVNREIEHEFHQAVYQEPSNSFNSSKVFGDPLASDSRDVAPSVISSFDWMLNGAMQQSFNVFPSHPTNGNEQENGSSEDAPPLPPLPPMQWRTNKIQTCSSPLSAKIGRPPRPKPPAKQQESEAAHILQENNLHKGLSLQNEVAQATISSDHETNQLLNMDFHENHHQEGDEYHAQDSNPFPSSEAECLAEIDSVKSENLHPLQLPELIVVPEEAWSEFGNIKFMPEQEGKLQLNNGLSGLAAQKTSGKPDLFAYYKEKELSFAGSDKVANSEENKPNGAVKHMQNLDLPAQQKNDKNDCDRKAEEFSSALEDESSKSPTHTVPKPPRYPLLPVTSHDRSMLRKVPTLVQPSSKLADEKNTLLEQIKNKSFNLKPVLAKRPNVMGGPKTNLQVVAILERAHAIRQAVADDDDDDSWSE

SEQ ID NO: 65105 - protein, 70 aa, Zea mays
  Coding DNA Sequence Number=SeqID_21730
  Gene Ontology: Mol. function=structural constituent of ribosome; Cellular component=intracellular; Biological process=translation
  Homolog annotation: Hit_ID=A3AEH6; Match level="QueryCoverage=55%, HitCoverage=14%, E-value=2e-14, Identity=100%"; Hit description=Non -specific lipid-transfer protein
  Pfam annotation: Domain name=Ribosomal_S28e; Domain location=3-70; Score=122.1; E_value=1.6e-33; Accession=PF01200.9; Description =Ribosomal protein S28e
MGLDNCERVGGIVSTMHVMGRTGSRGQVTQVRVKFLDDQNRLIMRNVKGPVREGDILTLLESEREARRLR

SEQ ID NO: 65106 - protein, 147 aa, Zea mays
  Coding DNA Sequence Number=SeqID_21731
  Subcellular localization annotation: CTP_CleavageSite=81; ConfidenceScore=5.42e-01
MSSRSLMHRVFPPPKPPDGGYPPSFRPIVGGTQLRGSWYLSAIVRLQGFSSTSPAVPPPPPRWRSPKMVTTNPWVGRSKTGCDLGPTLSFKDVHHPRWGGGRAEPELYLPREFVGHPLLRRSRERALTGPAGGSDFDNAGLVDSGRR

SEQ ID NO: 65107 - protein, 239 aa, Zea mays
  Coding DNA Sequence Number=SeqID_21732
  Homolog annotation: Hit_ID=Q8H6I2; Match level="QueryCoverage=100%, HitCoverage=100%, E-value=1e-102, Identity=80%"; Hit description =Putative MURBZC
  Pfam annotation: Domain name=Zea_mays_MuDR; Domain location=47-239; Score=-35.5; E_value=0.0042; Accession=PF05928.2; Description=Zea mays MURB-like protein (MuDR)
MDSAAELCAQKLSLAAVAARDTLNASAATSIVAGDYCATFSLGNDVVSTLDVLESAVAAEKSVMRSYKQASAAVDCAKETVAKYFEPVCWYALVTLNPQFTLAVLLVWMFSACLLVNQKLAQALRYAMSQMSDMAKKLQDTASLCYTDEDVVDGFKLTQVARSMDELAEMLEVTAIDCQVSMMDPTTMLEAGYASEDSAVWEDVFRDREIMNQPLEAETLAEHYAKWGLNYNEIWDRSV

SEQ ID NO: 65108 - protein, 652 aa, Zea mays
  Coding DNA Sequence Number=SeqID_21733
  Gene Ontology: Mol. function=transferase activity, transferring nitrogenous groups; Cellular component=chloroplast; Biological process=biosynthetic process
  Homolog annotation: Hit_ID=Q10MQ2; Match level="QueryCoverage=85%, HitCoverage=92%, E-value=0.0, Identity=82%"; Hit description =Aspartate aminotransferase, putative, expressed
  Pfam annotation: Domain name=Aminotran_1_2; Domain location=191-557; Score=56.0; E_value=1.3e-13; Accession=PF00155.12; Description =Aminotransferase class I and II
MTSHRRPAGRVSVDMRCVSRPTAVDMCTTKTNNVPRYANMSKLQAGYLFPEYQFLTVKQIARRRTDHLLKHPDAKIISLGIGDTSEPIPDAITNAMAEIARRRADHLLKHPDAKIISLGIGDTSEPIPDAITNAMAEIARRRADHLLKHPDAKIISLGIGDTSEPITDAITNAMAEIARRRADHLLKHPDAKIISLGIGDTSEPIPDAITNAMAERPAHALSTIDGYNSYGVEQGEKKLRAAIAATYYADLGIEDSDIFVSDGAKCNISRLQVLFGSNVTISVQDPAYHAYVDSSVSTGQTGLYQQDVQKYGNVEYMRCSPENGFFPDLSTVPRTDIIFFCSPNNPTGAAASRDQLTRLVKFAKDNRSIIVYDSAYAVYISDDSPKSIFEIPGAKEVAIETASFSKYAGFTGVRLGWTVVPKELLFSDGHQVAKDFNRIVCTCFNGASNIAEAGGLACLSPEGLKAMHGVVGFYKENTEIIAETFTSLGFNVYGAKNAPYVWVHFPGRSSWDVFAEILEKADVVTTPGSGFGPGGEGFVRVSAFGHRENIIEAARRLKQLYRSTKPLISRCSLSYLVMDLNQSHHIHGIVLCLFVLASDLSNLCKSLRYYSLAVVAEESYSFQIHMHFCGDAVHTSQMPTKFCWDPTEGSMH

SEQ ID NO: 65109 - protein, 297 aa, Zea mays
  Coding DNA Sequence Number=SeqID_21734
  Gene Ontology: Mol. function=metal ion binding; Cellular component =cytoplasm; Biological process=apoptosis
  Homolog annotation: Hit_ID=Q10MP9; Match level="QueryCoverage=95%, HitCoverage=86%, E-value=5e-74, Identity=73%"; Hit description =Programmed cell death protein 2, C-terminal domain containing protein, expressed
  Pfam annotation: Domain name=PDCD2_C; Domain location=171-295; Score=- 51.0; E_value=0.0049; Accession=PF04194.4; Description=Programmed cell death protein 2, C-terminal putative domain
  Pfam annotation: Domain name=zf-MYND; Domain location=126-150; Score =14.0; E_value=0.001; Accession=PF01753.9; Description=MYND finger
  Pfam module annotation: Pfam domain module=PDCD2_C::zf-MYND; Domain location=171-295::126-150
METSTKKLSSLRITSLDDDDDETEIPHQPPQAGLSTAEADYEDDDDEEEEAEVTLGVLSKPKHPGLLLRHLFPSKAGGIPAWLDPVNLPSGKSSYCGFCGEPLQFVLQLLYATGVVPGKVIKYVVAARKARYCSEKHQALHWRTGHKNDCLQIISSAASNSVLPAVGIVPASISWPEFEIKIDYEGTFDSDSGDENNSKSLVMQRHGKLDAMMQSWMDHFEADADNKCWASFQERVSRAPNQVLRYCREPNAKPLWALSFGCPSDADIPSCSYCRGPLCYEFQGSVGTEKIVDLGIE

SEQ ID NO: 65110 - protein, 94 aa, Zea mays
  Coding DNA Sequence Number=SeqID_21735
MHISYSLHSLDCNLADGEYVLIPEQGAVHEKDQEQAPETATEDLPAAPAFEGKPRFMHNRTLQYMVDGVTWPTTLPLGWMVEWDAAPVGEEQEE

SEQ ID NO: 65111 - protein, 466 aa, Zea mays
  Coding DNA Sequence Number=SeqID_21736
MGMHPFDFNQSGMESQAHTSCNRRAGYYVRKTAAPLAPAPRLLDCRTSAAIQGNPARGPAVPAKHAGHGDRERGYSKRDLSPRRKQAPSPPTNQRFEGWPPRKGSTAASEHSGSAPTTGQRLGLRSRCTLGHFRDQQERFCNGIPSEGGIEPSDPIKWDRVRQITCRGSGAALANLAPVKPLTASTYQPKNSEPDYAPGKRLVRMREQPDRSRHHERHQDHEGVKPLLRGLGGYTRRENSVACTTPTVVPPARVRLTAAKSSLGRHRKLRPARPQGSDSTSTPDDGLRLARPQGSDSTSTPNDGLCLARPQGSDSTSTSDDGLRLTRPQGSDSTSTSDDGLRLARPRARTQPRLRTTVSASPDPRARTQPRPRRSLHLARPWARADHVAGGHIITLPLASSGYGEQDRRPIWLASIKQVMMTPRVLHDDDGSQLPMEARRRQQGPDSPDSYASTGFKRSSNSHDIT

SEQ ID NO: 65112 - protein, 339 aa, Zea mays
  Coding DNA Sequence Number=SeqID_21737
  Gene Ontology: Mol. function=hydrolase activity; Cellular component =membrane; Biological process=auxin mediated signaling pathway
  Homolog annotation: Hit_ID=Q5Z9H6; Match level="QueryCoverage=99%, HitCoverage=88%, E-value=1e-113, Identity=59%"; Hit description =Nodulin-like protein
  Pfam annotation: Domain name=DUF6; Domain location=177-304; Score =46.9; E_value=7.1e-11; Accession=PF00892.11; Description=Integral membrane protein DUF6
MVLVMLAYSGYHVLAKSVLNVGMNQVVFCVYRDLLALLVVAPVAFLRERLYGNPLLCLVGLRYTNASYAAAFQPSIPVLTFLLAAIVGYSVEAISVFTKDGILKVTGTAVCVSGAILMALYRGPSLIALLRSMPTAWTSAPYHPATPDWFTPAVPVLEQGVEAWQLGVLCLIGNCLLVAVYLVVQAPVMIKYPASLSVTAYSYFFATTFMVLTGVCATSGLHEWALTKAEVIAVLYAGIVASCLSYSIMTWANKVLGPSLVALYNPLQPAFSTALSTVFLGDPVYLGSVIGGVSIIAGLYLVIWARYNQGQRAPTDGCLDPLIIVDNPRIHKTQESPFV

SEQ ID NO: 65113 - protein, 94 aa, Zea mays
  Coding DNA Sequence Number=SeqID_21738
MAHEIIKKSEKDTHDAREEAKRAEEATERERRIGFELTCLPITAELSPPPEPYDPLVDPEMKKSLKIISTIESIVDEVVNKLLNEIAEKVLKEE

SEQ ID NO: 65114 - protein, 146 aa, Zea mays
  Coding DNA Sequence Number=SeqID_21739
  Subcellular localization annotation: CTP_CleavageSite=35; ConfidenceScore=5.62e-01
MVHWTVSSAQAGPTVNSSLSGKSKGATAKIHRTVRCAPDCPVSQRRLRPTVVYTISGRRVAHANGRLVTPDYLVCIGQCSVRQQDPRSNAALDKEGDQAPDWYCSCLVVHRTVRCATQQKGERLQLMEIPRKRERTTKEANCGTQS

SEQ ID NO: 65115 - protein, 99 aa, Zea mays
  Coding DNA Sequence Number=SeqID_21740
  Subcellular localization annotation: CTP_CleavageSite=49; ConfidenceScore=5.10e-01
MARLKVDGERGCSTVFILRTAASSEGSQRTTLFHRLGRVRLAESARFLRASVRTERRLGMTDHEGPLARITGTRELVGCEEEIGPCMRFKFNFTNFKFI

SEQ ID NO: 65116 - protein, 382 aa, Zea mays
  Coding DNA Sequence Number=SeqID_21741
MARVCVGLGGRRKHTLQDDPILQARILTLEGSSSTLGVDNTFGEVRPGLGRRHGPRVSALNDNVITKPGPSPPGRNSGSVPAGMYNLHTGEPAGRRAPGDPPATSAAAAMVPGQTRPSEGSRSRSRSRDANQLLKPKSGPLQSAPAGPPLRRGGWVPHVMQVGSEQKKPNRRAWCVQPPSGYKRLSTFAQTNGRKGGQPCRRHATAPSGHTSPTPNTPGMETQAHASCNQRAECFVHATAPPLAPPSRLLDYGTNTATRGGPEHDPAAPAWRDGQCGQKWAGSNGGGRRGSGHVVSQAYVPSGGSEGTHSHGVKTTRPCSVPRTARARATAAPRTTRPVALTPRRDRRRLWQEKRATLRLRHNDRVRKGTGKGGYPEKDPSP

SEQ ID NO: 65117 - protein, 206 aa, Zea mays
  Coding DNA Sequence Number=SeqID_21742
MLAHQTLYSACPVRHRTSRRAQKTELQWSNPNGFGDVAGAPDMSGNSASPDPGLGLGLGTGRRRTPPRPTQGSDSGSAPEDDKLRLARPRAQTRARPWKTTNSASPDPGLGLGLGPERRRTPPRPTQGSDSSSAPEDDELRLARPQGSDSASASADGLRLARPKGSDSTSTSEDRLDLDLGRSLRLALPSGSDRPRHRRGPSLPYP

SEQ ID NO: 65118 - protein, 351 aa, Zea mays
  Coding DNA Sequence Number=SeqID_21743
  Gene Ontology: Mol. function=methyltransferase activity; Cellular component=chloroplast; Biological process=metabolic process
  Homolog annotation: Hit_ID=Q67W64; Match level="QueryCoverage=82%, HitCoverage=85%, E-value=1e-148, Identity=88%"; Hit description =Methyltransferase-like
  Pfam annotation: Domain name=Methyltransf_11; Domain location=182 -283; Score=101.9; E_value=1.9e-27; Accession=PF08241.3; Description =Methyltransferase domain
  Pfam annotation: Domain name=Methyltransf_12; Domain location=182 -281; Score=63.9; E_value=5.3e-16; Accession=PF08242.3; Description =Methyltransferase domain
  Pfam annotation: Domain name=Ubie_methyltran; Domain location=131 -349; Score=-108.8; E_value=0.0002; Accession=PF01209.9; Description =ubiECOQ5 methyltransferase family
  Pfam module annotation: Pfam domain module=Methyltransf _11::Methyltransf_12::Ubie_methyltran; Domain location=182-283::182 -281::131-349
  Subcellular localization annotation: CTP_CleavageSite=49; ConfidenceScore=5.30e-01
MSVAVLRVRAMELLARPAAAASSSCARPSLQLPAPGTSRPRRPGFPTLRAAAAAAAAIAAEPQSNEQQNIIMETEVFACPVCYEPLMRKGPPGINLPAIYRSGFKCSKCNKSFTSKDIFLDLTVTAGTKEYSEQKPARTELFRSPLVSFLYERGWRQNFNRSGFPGLDEETIFQPIAGGILLDVSCGSGLFTRKFAKSGTYSAVIALDFSENMLRQCYEFIKQDDSLLNVNLALVRADISRLPFASCSVDAIHAGAAIHCWPSPSNAVAEISRVLRPGGVFVGTTFLSSPRNNPFSVEALRPLRQIVGPVNTSYNYFTEGELEDLCKSCGLVNYSSNVQRSFIMFSGQKPY

SEQ ID NO: 65119 - protein, 511 aa, Zea mays
  Coding DNA Sequence Number=SeqID_21744
  Homolog annotation: Hit_ID=Q67W66; Match level="QueryCoverage=72%, HitCoverage=67%, E-value=2e-90, Identity=47%"; Hit description =Putative uncharacterized protein OJ1226_A12.5
MGPSGSGRSWLVVLVVVSATLCAHASAAASDTTTTVLAAERTRRKDPLDGLRYYTGGWNISNRHYLASAGFSAAPVFAFAALWFIAAAAALVCCCCCFCCRGGGNGNSYSYSRRVFALSLLLLLAFTAAAVVACAVLYDGQRKLSGSTTATLDYVVGQADGAAATMRNFTALLEAAKTAGGGVASLPPDVARGVDDVARRVDAAADATAARAASNSRRIRTSLDAVRKVLIGVAAVMLALVLVGFAFSLTGKKSLVSTVIGDTCVAMDEWVAQPQGQGQSHTALDDILPCADAAVTAEALRRSKEVNYQLVSKLNQLLSNVSNGNVPPQAGPPLYYNQSGPPVPLLCSPYSADLSDRPCAVGEVTAADAQQVWQRYVCRAAAGSGREEVCSTAGRLTPAMYSQMVAVAGLSDGLRRQSPALADVASCVTVRRAFRTVGQRGCPPLRRDSRRVYQALLAASAAGMLAAAAWLVHSRERRRRRDSERFKVSPYRLPIEDKVLLNSPRRPYRRV

SEQ ID NO: 65120 - protein, 398 aa, Zea mays
  Coding DNA Sequence Number=SeqID_21745
  Gene Ontology: Mol. function=aminoacyl-tRNA ligase activity; Cellular component=cytoplasm; Biological process=tRNA aminoacylation for protein translation
  Homolog annotation: Hit_ID=A7QM46; Match level="QueryCoverage=96%, HitCoverage=45%, E-value=3e-60, Identity=43%"; Hit description =Chromosome chr5 scaffold_124, whole genome shotgun sequence
  Pfam annotation: Domain name=Anticodon_1; Domain location=25-173; Score=13.1; E_value=2.1e-06; Accession=PF08264.4; Description =Anticodon-binding domain
DGKKMSKSKKNYPSPKDLIDEFGADSLRLYLVNSPVVRAESLRFKRTGVFAVVKDVFLPWYNAYRFFVQNAKRLEVEGLASFSPMEQAVLVTTCVVMAPFTPFFTEVLYQNLRKVSSKSEESIHFCKFPSTTGERDERVEQSVNRMVTIIDLARNIRERHNKALKTPLKQQIGERERRSGFAVEREAKVARGRRGFGRDNDFLEDITGKLKEVVRQFKRPENVSEKEIDAAGDGDVLVILDLRADQSLFEAGVAREVVNRIQKLRKTAQLEPADPVDVYYESVGSDKNTLEEILKSQDQYIRDALGSPIMPKEMAPTDDVILGEESHNVHDMSFVICIARSTPILAPDLLSHASGKSNHVEALRVYLLSRSLSRLKNQFQAGKGMLTASKVIHRSVYC

SEQ ID NO: 65121 - protein, 151 aa, Zea mays
  Coding DNA Sequence Number=SeqID_21746
MGKNNKRKREPTPPSEDFGDSEYSEEEFSSESEGSPAPVSPPASSDDSDDSQGIAAEVWTYIRAVERSGLEGSDESEYSSDEEDSDGGGEDEDDDDDDGGDGDGDGSGSGRGSSGGGRDGDGGSSRGSNRGGSSKGSTRSSGGGSSNRASG

SEQ ID NO: 65122 - protein, 113 aa, Zea mays
  Coding DNA Sequence Number=SeqID_21747
MDMWLPAKGNWLLGSIGGITTADELARAKGNRRHLWSGGTGLSGVHRTVSGAPPDMSGAPEDSNSELLTFGKFQGRLRYNSPDCPVYTGHVRCSKEGRPPELASLGFSLLLLR

SEQ ID NO: 65123 - protein, 198 aa, Zea mays
  Coding DNA Sequence Number=SeqID_21748
  Pfam annotation: Domain name=bZIP_1; Domain location=108-171; Score =29.9; E_value=9.1e-06; Accession=PF00170.12; Description=bZIP transcription factor
  Pfam annotation: Domain name=bZIP_2; Domain location=108-162; Score =11.4; E_value=0.029; Accession=PF07716.6; Description=Basic region leucine zipper
  Pfam module annotation: Pfam domain module=bZIP_1::bZIP_2; Domain location=108-171::108-162
MHHPAGEVVAGVFLPYLPPAAAAATAPFGFGTGPQSHNHAPADDDGHLLFPCNDDSDLLTLLLPPYSAVGFHYAGQQPLLLHHRHDHDDDKASQAAENRQTHRPRQLLAEERRRRRTASNRESARRSRVRKQKQLGQLWDQVVHLRGDSRDLLDRLNRAIRDCDRVMRDNARLRNERAGLQRRLLDLITDGDGDDRPF

SEQ ID NO: 65124 - protein, 389 aa, Zea mays
  Coding DNA Sequence Number=SeqID_21749
MPRAARAAFVFWGGPAFAPGWRPPAEAGALLVWEDLSGDLPGGRRPPLSAPRRKRLEKSPSPTGSLPPSAPRASGSSYLSSPLERRRGRGQDCSSAHPEACTAVARPSGAGVVVVVRAGGGEPLVSLLLFRRPSPWSGVVRTCGGGTGVPFVMALRMPVFLFIVAVEASTCSSSLVKGTPWPLFDEPRPGVAISVRTEVELARKWEPGWPEPSRVARQRGSTSESISRGLGSGWRPWKMLGRGPRGNRPSRLLGPDSRRSPWTASPSEAGSDLAKGVVDAEGATAPFSVKTRACRIRSSCSVCLLRPPRPENTLSLRCKAASPFLLFQASGLSIGNRDVCVGESCFSRKVMSEKVMSEVSVSRRRRSPSARSALAAYVYSVVSRIRFSK

SEQ ID NO: 65125 - protein, 27 aa, Zea mays
  Coding DNA Sequence Number=SeqID_21750
MTPISIEMDKGKEYPVLKDPTNCRGRC

SEQ ID NO: 65126 - protein, 301 aa, Zea mays
  Coding DNA Sequence Number=SeqID_21751
  Gene Ontology: Mol. function=DNA topoisomerase type I activity; Cellular component=chromosome; Biological process=DNA unwinding during replication
  Homolog annotation: Hit_ID=A2YBQ9; Match level="QueryCoverage=53%, HitCoverage=45%, E-value=4e-65, Identity=68%"; Hit description =Putative uncharacterized protein
  Pfam annotation: Domain name=zf-C4_Topoisom; Domain location=178-217; Score=20.7; E_value=0.00073; Accession=PF01396.10; Description =Topoisomerase DNA binding C4 zinc finger
MRIQEISISMDIGTLLILLMIILGFKTLGTLLSVVVELIQDCCHGLNALVYYPGIGQFCLNYSLYASNLSLVILGAWIIWKHINRCVFEGFAPNLAVAQQAAREGINLWAIAGAKAFHCHRLDNVSAGSTEWKGLLKDYWERFSKYCADVSKLDGRKVERMLEEKFGPILFSDVYKDCRICPSCSEGTLRFKVSRYGEGYFVGCDRHPKCKSNYCRYIARSLSQQEDETEPIEENAKSFEPRLLGVMPDSDQKVFLKQGPYGYYVQVGEDKKGLFPKRVSLSKGLFGSLSHLPQFAKIRQV

SEQ ID NO: 65127 - protein, 138 aa, Zea mays
  Coding DNA Sequence Number=SeqID_21752
MEGDARVLTEDEDVLNTNLNLNETTLCGTHQVQQHGRRASYRDLHVGQMRHDVVPRVSIILQNPKFQSFASVLCKTEAFCLKGSGLGYVHISVDRISMNFVCQNAAMHFWNGASSIFPVASPHRDDLRTMGPFRSRFP

SEQ ID NO: 65128 - protein, 164 aa, Zea mays
  Coding DNA Sequence Number=SeqID_21753
  Homolog annotation: Hit_ID=A2Y4X4; Match level="QueryCoverage=98%, HitCoverage=13%, E-value=1e-11, Identity=30%"; Hit description =Putative uncharacterized protein
MKVDSQSFPDINMVECANPVLSFDINMVGSTRHQNTQKDKADLGDRPQKDEKEYITKEQVKHMRYRRPTSEHPLRKYEYQYRQRCQHEPEDEEYKHHTGKLLKRCEDTRDHWHCPFFKHRWNAGMSLPNASNCPECGPWRRETDEVSVFHRLGPMTHQDERTDP

SEQ ID NO: 65129 - protein, 74 aa, Zea mays
  Coding DNA Sequence Number=SeqID_21754
MAVLGQRWRAAVLAFHGDLGPLRGVGRDYLHRLSLGRVGSGVLFGIHRGIGLHNEHIGCQMLDPDSWSHALRNK

SEQ ID NO: 65130 - protein, 156 aa, Zea mays
  Coding DNA Sequence Number=SeqID_21755
  Homolog annotation: Hit_ID=Q2R1H4; Match level="QueryCoverage=25%, HitCoverage=4%, E-value=4e-08, Identity=66%"; Hit description =Retrotransposon protein, putative, unclassified
  Pfam annotation: Domain name=RVT_2; Domain location=40-117; Score= -178.5; E_value=0.0062; Accession=PF07727.5; Description=Reverse transcriptase (RNA-dependent DNA pol
PFIRQPHTGSYSKAGGHYPSLPGVGRFPYPFPLPNEVQRSFKDVMLAVKPPDPGGAGGVDADDGWVRVEAHPNMVCKLNKSLYGLKQAPKAWYSYFASLATLAGMADCKPCSTPIPRLRSPPPLVPLSVIPLRTRASLALSTLFLGGNLVYWSSKR

SEQ ID NO: 65131 - protein, 63 aa, Zea mays
  Coding DNA Sequence Number=SeqID_21756
MTSGSPCQRAVAEFRVVAEQISTRDLVQEYLANWAARMVKEDEKTLKKRKSSLEPKVVTSKGN

SEQ ID NO: 65132 - protein, 49 aa, Zea mays
  Coding DNA Sequence Number=SeqID_21757
MTVGGGCLSYGAPDSPVHTGHVRRRWREVVVAPQLHRTVRCTPDMSGEL

SEQ ID NO: 65133 - protein, 141 aa, Zea mays
  Coding DNA Sequence Number=SeqID_21758
  Subcellular localization annotation: CTP_CleavageSite=61; ConfidenceScore=5.19e-01
MTITTARASSCAGPAVARPAALGLMPPLRWGPRIGGLAAHAQAKASSTGRITLGGAWVPTTCTMAFAPWLLGVAPNGREIGREERRERGRGVGKESIREELQRNSEKRRIEEETIEFTHRRIRYRPNREEIRRLTEIRRSD

SEQ ID NO: 65134 - protein, 750 aa, Zea mays
  Coding DNA Sequence Number=SeqID_21759
  Gene Ontology: Mol. function=ATP-dependent helicase activity; Cellular component=intracellular; Biological process=cellular metabolic process
  Homolog annotation: Hit_ID=A2XTM9; Match level="QueryCoverage=40%, HitCoverage=23%, E-value=5e-65, Identity=63%"; Hit description =Putative uncharacterized protein
  Pfam annotation: Domain name=DEAD; Domain location=102-230; Score =24.3; E_value=6.6e-07; Accession=PF00270.20; Description=DEADDEAH box helicase
  Pfam annotation: Domain name=RQC; Domain location=259-370; Score =65.9; E_value=1.4e-16; Accession=PF09382.1; Description=RQC domain
  Pfam annotation: Domain name=ResIII; Domain location=98-232; Score= -30.8; E_value=0.018; Accession=PF04851.6; Description=Type III restriction enzyme, res subunit
  Pfam module annotation: Pfam domain module=DEAD::RQC::ResIII; Domain location=102-230::259-370::98-232
MAWMRLIYHENYLNYVTINAREAMTHLQEMKDELLAVANELLDDDDNLSTPLNSVWKSYTPKVIDINYTEGSGDRKWSSTNFPWTKELEAKNRNKFGNHSFRPNQREIINATMSGHDVFVLMPTGGGKSLTYQANIPATYLSGNLDWSEQQEIMKDLMSCRYKLLYVTPEKIAKSGALSRLLDNLNSQGHLSRIVIDEAHCVSQWGHDFRPDYKVSYCENDVDCRRLLQLIHFGEKFDPSLCARTCDNCLKESGWVEKDVTNIARQLVELVTRTGHSHSSTYILEVYRGSMSQNVKKQRHDALALHGAGRHLAKGEAARIMRHLVTEEILNEDVKKSDMYGSISSVLKVNHLKASGLLSGKHNIVLNLFHGIELGSHLLSPTLPPSAAGWLSHSRRLVDIAPTPTSPRPASRQAPCSPCPVRATATMADSSWATVAASVHPATSVATSPVSTTEAHATSVATTPCAYDAFSVGTTSSRVCGAWGSPGFGHLVLAAAATQSISNLATTVVPPSTFDLDVAGTHADMLSASPASARSLPPSGPCALQASYAPHGVPPTPPTQLLGVPSTVVVFPQHDSTFSSLDSMSSLGVVVDAGLVHGEPPTAPLSPASTALYTAFAGMGVDTHVPAAPMPSLPCRRSSLPRLRHGRCSPGTPSCSWAHPWGLLPHVPLSRLFRRHILQCPTALNACGFAPPIDSGDPYLCRSPYESLCHACQLVFPFLPPRLGLLKPLILFIVISGHLFSVSVVTNTIW

SEQ ID NO: 65135 - protein, 84 aa, Zea mays
  Coding DNA Sequence Number=SeqID_21760
MCVLRNPKSPLKLKINHHLPCKHLHQLKMRIRLKAMKMKIKRMSHLKRRTRIKGEMKLIKTRKMIRVKDRHTQESTRPFKEITP

SEQ ID NO: 65136 - protein, 170 aa, Zea mays
  Coding DNA Sequence Number=SeqID_21761
MELDVAATQTEPTQGREGAATAMEMEVRPWASAGAGHLQRPREFHWGVERPSKATEHHGFEEERRSDAGLAGHAMARRGEQGRQLVLREMAGWSRGARGTRLRQGREQGAPGLGARLLKPRRCHGRKGAELPARWGRRRCAWGKKPGRRKWRLRKVRGGSENLPSEHPYL

SEQ ID NO: 65137 - protein, 63 aa, Zea mays
  Coding DNA Sequence Number=SeqID_21762
MAAPRTTHPVALTPRRDRRRLWQEKRATLLLRHNDCVKKRDRERGIPRKGSFSVKETGPEPPY

SEQ ID NO: 65138 - protein, 20 aa, Zea mays
  Coding DNA Sequence Number=SeqID_21763
MAVKNKYHRMRRKEDVAMSS

SEQ ID NO: 65139 - protein, 268 aa, Zea mays
  Coding DNA Sequence Number=SeqID_21764
MDEGAPLGGLESEDNAEPSHGLHTVLSSLWGRGHLAHRLRIRFPEGGGLRRPKQSNKPRRLTGPARRGSGPEGGISSPCDATTPEGFGPGTSRWVTWCFGCDKTPEGDISSRLLGKGRSSSPRKHTHTTRGTDPAGSDVDGGGVAAPSASTPPSAKSDRASDGNTVGGSPLRRRTSAPRLGHRRQGLLQESGPSRRLGRPPRSLSQLSPEDTIPARGLGNSTPASVPPVDGPTRLRPSKSSFRTNSASVHADTAASGSGSSKSDRGFL

SEQ ID NO: 65140 - protein, 85 aa, Zea mays
  Coding DNA Sequence Number=SeqID_21765
MALMPLVASSCELAARSVTNCLYDLDVASESPCRVASWLGLPASPPKLFCYSIYVHVKIINVNWNIELNLRNTCHHKGLWTPLAD

SEQ ID NO: 65141 - protein, 307 aa, Zea mays
  Coding DNA Sequence Number=SeqID_21766
  Homolog annotation: Hit_ID=Q6QP51; Match level="QueryCoverage=48%, HitCoverage=63%, E-value=2e-07, Identity=33%"; Hit description =Putative growth-regulating factor 1
MGPQVPVGGNPQISFTNRREDGCLRDGVGTEIVQLHPVDVQNRPHKTACRHSEPPLVKGDEAQHIPRRRGWGGSARRGHPLRLRVTGERAKQTVSNKGLQILRRDGGERPRVARRNNGHPVGHHQAEEVATERTRCAQDRRHLWQAKQATLHLRHNDRVKKAGPSEGFNSRLRALGLRAHYWLAPEGFDSRLRARRARDDPGYVRYITKARAMLPSLGRHRKLHLARPQGSGSTSTLDDGLRLARPQGSDIASASEDGLRLARPRARTQPRPRKMDSASPDPRARTQPRPRKTDSTLTSEEPPPRPT

SEQ ID NO: 65142 - protein, 61 aa, Zea mays
  Coding DNA Sequence Number=SeqID_21767
MGKPVPSLLMLLLSRVTALVPTITGMGDHVSGRVRGKVYYQVQSGTRLTDLPYFSDLITLC

SEQ ID NO: 65143 - protein, 130 aa, Zea mays
  Coding DNA Sequence Number=SeqID_21768
  Subcellular localization annotation: CTP_CleavageSite=39; ConfidenceScore=5.65e-01
MAKLPGPSCKGAMTPNRGPPPRGGFRSHRMRRTQVLSAPCSTWSVTMPSTRSREGHWHDSQAHMAPLKRSPKRRPSLLSPISRVPWRLYASSARLWLVRGLIGLGLRKSGSAQLGQSGYNGIGESVGENP

SEQ ID NO: 65144 - protein, 221 aa, Zea mays
  Coding DNA Sequence Number=SeqID_21769
MTRARAYKAHSGVDHTLPRTLKPHRSSTHRRLPPSEKTEHTSVKLPERGIEVCFAGEASPRSPEFTTPPECVDKGAGYTTPPQYAVQQFEKHRVPRCRVRMTLEPHPLQPGWRSLDSESFGYRAEDTIEAIALHGLTTFCGFHPLELSTHPIGLFPTEREDDPMWKDWVEHAKDIWDIYPGQTAHLTVEQLSNEIQELEELVGTRENTIEVLEDQLINTQQ

SEQ ID NO: 65145 - protein, 345 aa, Zea mays
  Coding DNA Sequence Number=SeqID_21770
  Gene Ontology: Mol. function=voltage-gated chloride channel activity; Cellular component=integral to membrane; Biological process=chloride transport
  Homolog annotation: Hit_ID=Q2VBU9; Match level="QueryCoverage=68%, HitCoverage=36%, E-value=1e-102, Identity=81%"; Hit description =Chloride channel-like protein Osclc
  Pfam annotation: Domain name=Voltage_CLC; Domain location=1-257; Score=-182.9; E_value=0.074; Accession=PF00654.11; Description =Voltage gated chloride channel
MVAVVLRALIDFCQSGKCGLFGKGGLIMFDVTADYVTYHLIHLHPVITLGVFGGILGSLYNFFLDKVLRLYNRINEKGKAYKLLLAATVTVCTSCCIFGLPWIAACKPCPTDTREACPSIGRSGNFKKFQCATDEYNDLASLFFNTNDDTIRNLYRAGTDDEFHISSILVFFIASYFLGIFSYGLALPSSLFVPVILTAAAYGRLVVADAFNANVYDLLVRLKGFPHLEGYAEPYMRLWVVVTHGVRLTAAKSSLGRHRKLRLARPQGLGSTSTLDDGLRLARPQGSDIASASEDRLRLARPRARTQPRPRKMDSASPDPRARTQPRPRKTDSTSTTEEPPPRPT

SEQ ID NO: 65146 - protein, 386 aa, Zea mays
  Coding DNA Sequence Number=SeqID_21771
  Gene Ontology: Mol. function=translation release factor activity, codon specific; Cellular component=cytoplasm; Biological process =translational termination
  Homolog annotation: Hit_ID=A1Y2B7; Match level="QueryCoverage=61%, HitCoverage=45%, E-value=1e-105, Identity=72%"; Hit description =Leafbladeless1
  Pfam annotation: Domain name=eRF1_2; Domain location=177-299; Score= -18.2; E_value=0.014; Accession=PF03464.6; Description=eRF1 domain 2
  Pfam annotation: Domain name=eRF1_3; Domain location=273-386; Score =17.5; E_value=5.1e-06; Accession=PF03465.6; Description=eRF1 domain 3
  Pfam annotation: Domain name=zf-XS; Domain location=142-180; Score =51.5; E_value=3e-12; Accession=PF03470.5; Description=XS zinc finger domain
  Pfam module annotation: Pfam domain module=eRF1_2::eRF1_3::zf-XS; Domain location=177-299::273-386::142-180
  Subcellular localization annotation: CTP_CleavageSite=58; ConfidenceScore=5.36e-01
MGKKLKKPGQAGGRYWAQAPDHGAATRGNPRPPSQTSRHVLTPPLANGWQWQSRPRPSGSEVKKDDAPPSSSVPEVENFDGNNTSDDDDDDLSDDISDDYDSDASEKSFETRKTNKWFKEFFEVLNTLSLEQINEQTRQWHCPACKNGPRAIDWYKGLQPLVTHARTKGSTRVKLHRELAALLEEELSRRGTSVLPAGEQFGKWKGLQESTDREIVWPPMVIVMNTFLEKDEDDKFFINPATSQPNVVGLILADSANFKTELSQSDMFDQRLEAKILNAVDSSQYTGKYVFGVDDTLKALEMGVVETLVVWEILDINRYILKNSYTREITIKHMNKEQEAERSQSPEYMPTWQLERCCCPIHVMSWPSEERLSPEGAQLSKLSGPC

SEQ ID NO: 65147 - protein, 300 aa, Zea mays
  Coding DNA Sequence Number=SeqID_21772
  Subcellular localization annotation: CTP_CleavageSite=44; ConfidenceScore=5.52e-01
MAAAGGRKQQSSRLQAHVPSWDSERALSNGVKTTHPCSVPQTVRARTTAAPPTTRLIALTLQQDMDRERGCSERDPSPRRKQAPSPPTDQRLAPEGFDSRLRALGLRAHYWLAPEGFDSRLRARRARDDSGYVRYMVEARATLLRAVLANPAPAKPLTASTYQPENLEPDYAPGLRLVKAPSNQGTRSRRARAQPRAKAADLGGFTSRPRVPSNSGRTFDSPRGPARENSVACPAPAVVPLDRVRLTAAKSSLGRHRKLRLTRPQGSDSTSTPDDGLRLARPQGSDSTSTSEDGLCLARP

SEQ ID NO: 65148 - protein, 145 aa, Zea mays
  Coding DNA Sequence Number=SeqID_21773
MGAGVVERGERREREDDGRNGGRGAATLFPPGLGGGYGRGAGALGAGITTAGEWGLGGGERERKHAEVTTGGVEGGGRTRSHAWGHGGGEIRDDCSGVGEILARAWSRIWQEPQLTARAWGRGTVCVGRPQAVTEAHKRALECGR

SEQ ID NO: 65149 - protein, 444 aa, Zea mays
  Coding DNA Sequence Number=SeqID_21774
  Gene Ontology: Mol. function=nucleic acid binding
  Homolog annotation: Hit_ID=Q53MN9; Match level="QueryCoverage=62%, HitCoverage=40%, E-value=8e-10, Identity=23%"; Hit description =Transposable element protein, putative
  Pfam annotation: Domain name=zf-CCHC; Domain location=376-393; Score =18.9; E_value=0.0021; Accession=PF00098.14; Description=Zinc knuckle
  Pfam annotation: Domain name=zf-CCHC; Domain location=401-418; Score =11.1; E_value=0.032; Accession=PF00098.14; Description=Zinc knuckle
  Pfam module annotation: Pfam domain module=zf-CCHC::zf-CCHC; Domain location=376-393::401-418
MSSQEVTVELLLGDGSNYKSWSVSIYNAFMSVDSDLRQIFSRSIFPSDISKNPSNDELRCFSLNHRACSILVDSLSRGAYFAIMSNDNDLIVDAHDLWNRIKVKYFVANCTTSTPYIACDANHSKGEDQERWTPNDESTSSTGLVSTNNKCFIANNDGGDKSHDEEEYEDDSEDESSSPQGTFSYLASTDVNDRENETDDVEEEEIRRFYIHLNKEDKALLVKLLRRNKEQGETLLRLEESLIKTNNSLEKMTKEHEELKYSHGNLVQRYEYVLIEQRNSHDALSNIAQLKTENSMLKSQVQTIDLEKRALDIHGRVVKKLEKGKTAASVKLNKKSVPKDEEINMSLEKGKDSINHVVCTDHLSMSFKHKKGRRKRRCFKCKEIDHLIASCPYKNKDEGTRSCFGCNNKDHTITSCPVMKNQGCASFQVTLTKESDTQPSVMSG

SEQ ID NO: 65150 - protein, 488 aa, Zea mays
  Coding DNA Sequence Number=SeqID_21775
  Gene Ontology: Mol. function=hydrolase activity; Cellular component =cytoplasm; Biological process=glutamine metabolic process
  Homolog annotation: Hit_ID=Q5ZC52; Match level="QueryCoverage=85%, HitCoverage=96%, E-value=1e-165, Identity=71%"; Hit description =Putative uncharacterized protein P0443D08.44
  Pfam annotation: Domain name=GATase; Domain location=145-329; Score= -37.9; E_value=0.0047; Accession=PF00117.19; Description=Glutamine amidotransferase class-I
  Pfam annotation: Domain name=Peptidase_C26; Domain location=74-316; Score=142.1; E_value=1.6e-39; Accession=PF07722.4; Description =Peptidase C26
  Pfam module annotation: Pfam domain module=GATase::Peptidase_C26; Domain location=145-329::74-316
MLSKISDIRLARLRPPSVADIVTHYRVTFTARTFCYIDPEYQWQIQETNLARLANHKKDRALREAPAMSSCVAPRVLIVSRRTVRKNKFVDFVGEYHLDLIVGYGAVPVIVPRVAGVDALLDSFEPIHGVLLCEGEDVDPSLYESADDADGSLSPEQLEAMRRLHPSDVAIDREKDSIELRLARRCLERNIPYLGICRGSQVLNVACGGSLYQDLEHELVRPAAQVQHINYGDYDGHRHPVRVLSGTPLHEWFARDLADGAQLMVNSYHHQGVRRLAQRFVPMAIAPDGLVEGFYDPDTYNPGEGRFIVGLQFHPERMRKPGSDEFDYPGCARAYQEFVRAVVAYQEKTAAPPHLPLSAPLPASPKLSKEMMRRRKVIPRSFSLAMDMYLSDSHTKPAEKRDHEAGAEFLESNTASVSAWQEKRLKQMGATARNASGYLNGVKVNGVREAAARALMAEMSVNQLSDLATFYQTMGKICSEVLDTKLQG

SEQ ID NO: 65151 - protein, 860 aa, Zea mays
  Coding DNA Sequence Number=SeqID_21776
  Gene Ontology: Mol. function=oxidoreductase activity, acting on other nitrogenous compounds as donors, with NAD or NADP as acceptor; Cellular component=mitochondrial intermembrane space; Biological process=nitrate assimilation
  Homolog annotation: Hit_ID=P16081; Match level="QueryCoverage=98%, HitCoverage=95%, E-value=0.0, Identity=76%"; Hit description=Nitrate reductase [NADH] 1
  Pfam annotation: Domain name=Cyt-b5; Domain location=535-731; Score =27.5; E_value=4.9e-05; Accession=PF00173.19; Description=Cytochrome b5-like HemeSteroid bindin
  Pfam annotation: Domain name=FAD_binding_6; Domain location=647-735; Score=73.4; E_value=7.4e-19; Accession=PF00970.15; Description =Oxidoreductase FAD-binding domain
  Pfam annotation: Domain name=Mo-co_dimer; Domain location=342-475; Score=295.8; E_value=8.4e-86; Accession=PF03404.7; Description=Mo-co oxidoreductase dimerisation domain
  Pfam annotation: Domain name=NAD_binding_1; Domain location=754-852; Score=121.7; E_value=2.1e-33; Accession=PF00175.12; Description =Oxidoreductase NAD-binding domain
  Pfam annotation: Domain name=Oxidored_molyb; Domain location=130-317; Score=278.6; E_value=1.3e-80; Accession=PF00174.10; Description =Oxidoreductase molybdopterin binding d
  Pfam module annotation: Pfam domain module=Cyt-b5::FAD_binding_6::Mo -co_dimer::NAD_binding_1::Oxidored_molyb; Domain location=535 -731::647-735::342-475::754-852::130-317
MAAVEPRQFGRLEPARVGAYPPPPSHIPRRADSPARGCGFPPLVSPPRSTSDDASSSDDEQDDWRELYGSQLQLEVEPAAQDPRDEGTADAWVERNPCLVRLTGKHPLNCEPPLARLMQHGFITPAPLHYVRNHGAVPRGDWATWAVEVTGLVRRPARLTMDELARDFPAVEIPVTLACAGNRRKEQNMVRQTAGFGWGAAGVSTSVWRGARLRDVLRRCGVAPRHGGALNVCFEGAEDLPGGGGGGSKYGTSVPREWALDPSRDIMLAYMQNGEPLLPDHGFPVRVIIPGCIGGRMVKWLKRIVVTPAESDNYYHYKDNRVLPSHVDAELANAEAWWYKPEYIINELNINSVITTPGHDEILPINGITTQRGYTMKGYAYSGGGKKVTRVEVTLDGGETWLVCDLAHPEKPNKYGKYWCWCFWSVEVEVLDLLGAKEIAVRAWDQSLNTQPERLIWNLMGMMNNCWFKVKVNVCRPHRGEIGLVFEHPTQPGNQAGGWMARQKHLEKTAEAAAPGLKRSTSTPFMSTTDGGHQQLTMSEVSRHASRDSAWVVVHGHVYDCTRFLRDHPGGATASSSTPAPTAPRNSTPSTPTRPRLCSTPTVSRAHRHRTSDSSVHAAPAAVPPPRAHPRAARPGPALSGPRDKVRCRSSQDELSRDVRLLRFSLPSPDQALGLPIGKHVSVCAHRREAVHAGVYFRDEAPPSSPAAGLMTQHLDSLPLGSCIDVKGPLGHVEYTGRGGFVIDGRDRYAHRQIMVCGGSGITPMYQVIQAVLRDQPEDRTEMHLVYANRTEDDILLRDELDRCAAEYPDRLKVWYVVDQVKRPEEGWKYSVGFVTEDVLREHIRKAVTTRWPLPAGHRR

SEQ ID NO: 65152 - protein, 409 aa, Zea mays
  Coding DNA Sequence Number=SeqID_21777
  Homolog annotation: Hit_ID=A3BU03; Match level="QueryCoverage=100%, HitCoverage=97%, E-value=1e-160, Identity=68%"; Hit description =Putative uncharacterized protein
MDTLPEGVVQHILSQLSNARDVAGCAAVARCWRDCVAFLPSLYFPRGAFEALAGGPASAVAFADDAIGRMVDAAARLEELVVYCPFSASLLPHWLAARAATLRVLELRMDSAAADKSGHLNLDSIGVAAGLEELRLWGLTMTRAPAWGPDGAAPPVNDVLAACPNLTDLSLLGCQCDGEAVISLASLERCRLDFLGSGNSSLRFAAPRVESLEVQGFSFIYLQGGNRLKHLTISKNTGSVHHVEMGKLPELDQLSLRGVQWSWGAISSVLQCASEVKHLVMKVEFSGDYDTLQPFPEIDLVEFFNSHPKLRKFEVHGAMFAALSQENSLKNLDSRFVIPFLEQVVVTVRSSLNAKQKLNTLKSVVRYSVRLRRMIIRISQMKNCHAAGDDFFEEICKFTYMNSGTVCIE

SEQ ID NO: 65153 - protein, 429 aa, Zea mays
  Coding DNA Sequence Number=SeqID_21778
  Subcellular localization annotation: CTP_CleavageSite=67; ConfidenceScore=5.14e-01
MQTACNRTTGMHPFDFDASSMEAQAHTSCERKRRSNRLQAHVPSWSSRRALSHGDTFGRRSGRRFTSAMMTASKKGTGKGDTPKGVLPREGSGPRALLLIRGSKAGPSEGRLRALGLRAHYWSEVRRLAPRKGSTAASGHSGSAPTTDQGFEGSGAALANPAPAKPLTASTYQPENSEPDHAPGLRPENSAACPAPTAVPPARVRLTAAESSLRRHRKLRLARPQGSDPTSTSEDGLRLAQTQGSDSTSTSEDGLRLARPQGSDSTSTSEDGLRLARPQGSDSASTSEESSYEKVVARENGLADGLSLSLANACNPLLTARIAPTAAPLDRVRLTAAKSGLGRHRKLCLARLRARTRARSRKTTNSARPQGSDSTSALANGLRLARPKGSDSTSTSEDRLDLDLGGASVLPYPGLGPTTSQEGPSLPYP

SEQ ID NO: 65154 - protein, 131 aa, Zea mays
  Coding DNA Sequence Number=SeqID_21779
MSVLRRYCRRPQIVLVHGSVDPTAHPPPPLLPAINAMPHLFGGWHVVDRRRAFFGSRSGRIARMPSGRAILACGDKSREEAGTKIYGQSDLYVKADITPSNNVYTSTYSYASEKPLQQDKPDEEGYVDNCF

SEQ ID NO: 65155 - protein, 31 aa, Zea mays
  Coding DNA Sequence Number=SeqID_21780
MEPSSMVLRSDPVPLPENASEKEVARAKVEQ

SEQ ID NO: 65156 - protein, 691 aa, Zea mays
  Coding DNA Sequence Number=SeqID_21781
  Gene Ontology: Mol. function=zinc ion binding; Biological process =regulation of transcription
  Homolog annotation: Hit_ID=Q5NB82; Match level="QueryCoverage=83%, HitCoverage=64%, E-value=0.0, Identity=57%"; Hit description=Nodule inception protein-like
  Pfam annotation: Domain name=RWP-RK; Domain location=555-596; Score =3.0; E_value=0.0079; Accession=PF02042.6; Description=RWP-RK domain
MEFDFDSHGGDAWLLDAMSTSLHFSAVSPPVPSPWPCGDPHHPSMWLDTVALQDDGPSVPAEKSEISKKCEHLNGKCQVHLSLVDGCSDSSYFLKEKLTVALMYFKESTKQHLLVQVWVPIRKGDHYMLSTSGQPFVLDEQSIGLLDYRAVSMMYTFAVDGDSVEELGLPGRVYKQRLPEWTPDVQYYSSIEYARLNHAISYDVHGTVALPVFDSSMKSCIAVVELIMTSKKVNYAREVGEVSKALEAVNLKSTEVIEHPYVQIFNEGHQNVLVEMLEIITVICEELKLPIAQTWVPCKYQNLLIHCGGENKSCFDIHESCAQELCMSTSAVMFHIIDAHMWGFRDACVEHHLKKGQGVSGKAFILRRPCFTKDVTRFSKMEYPLVHYARMFGLAGCFSICLQSAYNRNEDYVLEFFLPPDCREDGEQKVLLDSILALLRQYLNRLQVATDEGSNEVYLQVDAITIIENGDIKNAHVQHMNCEGGIHASDERNMHVIHESDSQKRISPTESETCPSPDNTKCNDKLFARQNGGCISDSLLLENNSKHSGRRQGKEEKTFSLEVIQQYFTGSLKNAAKSLGDDHTTKQPGHSKLDQLVARLVNIAKSPCNARSSSNANPSGVMADRLMRDGVTRLVDGGDVLGLTTTVHGRYALETNTAPPMVVTILWSATTGHEGTCPTSNRRTSKNKYKR

SEQ ID NO: 65157 - protein, 446 aa, Zea mays
  Coding DNA Sequence Number=SeqID_21782
  Gene Ontology: Cellular component=integral to membrane; Biological process=peroxisome organization and biogenesis
  Homolog annotation: Hit_ID=A2Y270; Match level="QueryCoverage=100%, HitCoverage=98%, E-value=1e-169, Identity=67%"; Hit description =Putative uncharacterized protein
  Pfam annotation: Domain name=Aa_trans; Domain location=32-433; Score =463.3; E_value=3.2e-136; Accession=PF01490.9; Description =Transmembrane amino acid transporter protein
MEEYVETLKARKQEEKLKTVSLDDWLPITSSRTAKWYYSAFHNVTAMVGAGVLGLPFAMSQLGWGLGTVAIVMSFVITLYTLWQLVEMHEMVPGKRFDRYHELGQHVFGERLGLWIILPLQIIVMVGTDIVYMVTGGQSLRKFHDLVCRQGGCGGDIRLTFWIMIFASPHFVLSQLPNFNSLSAVSGAAAVMSLAYSMIAFSTSVAKGGRAADYGLRATTAPGQAFGMLSALGTVSFAYAAHNVVLEIQATIPSTPEAPSKKPMWRGVVAAYAVVALCYFSVAFAGYYAFGSSVDPNVLITLDRPRWLIAAANLMVVVHVIGGYQVFAMPMFDMIETVLVKRHGFAPGFWLRFVSRSAYVAATMFVGLTFPFFDGLLGFFGGFGFAPTTYFIPCIMWLVVRKPKKYGLSWFINIICIVIGVLLTLIASIGGLRQIILDAKSYKLYS

SEQ ID NO: 65158 - protein, 31 aa, Zea mays
  Coding DNA Sequence Number=SeqID_21783
MASCTFWSQAKVGGSVEGSARGHEAVVKRQP

SEQ ID NO: 65159 - protein, 166 aa, Zea mays
  Coding DNA Sequence Number=SeqID_21784
  Gene Ontology: Mol. function=catalytic activity
  Homolog annotation: Hit_ID=A2Y3P0; Match level="QueryCoverage=65%, HitCoverage=38%, E-value=1e-10, Identity=37%"; Hit description =Putative uncharacterized protein
METNGAGNHSEAVGDGGHVAVAAGSDRGSHVYLEGIRGNERGERRGAAAWTRCRAVDPRCPSSSRGGLMVVVNVDDSRIVLGTAFDDDVITSSSSSSTEAQPATVHFVLQPNQESSVLGMSHAFDDYYIEDRGVILTQEVTQRRTDSNDQFVILATVGVAFVPACL

SEQ ID NO: 65160 - protein, 260 aa, Zea mays
  Coding DNA Sequence Number=SeqID_21785
MARFNSGGANTAPRAPVLPKEGEVRRAARHARDSVGDGADEDGPLISGRETERAQRKTDKQAPVSSFPEYEANALQVLCKGAGVISPLGVGTSRGSDTRRCLRCEVNTRHSPRRGAGVVDSLWPDSRRGAASCMAMFAPSPPPARRVAGQTRVFLFCHGGKPSSCSPLPGEPTTVVAVALRREEYHVIAAVKGHELETPEAEHRPPLKRLLEATHLELNEKVFVNTQRAPTWHANCRRFGLAGTVNRLVNLLLRVPAQMG

SEQ ID NO: 65161 - protein, 485 aa, Zea mays
  Coding DNA Sequence Number=SeqID_21786
  Gene Ontology: Mol. function=protein binding
  Homolog annotation: Hit_ID=A7PIE1; Match level="QueryCoverage=85%, HitCoverage=88%, E-value=1e-109, Identity=50%"; Hit description =Chromosome chr13 scaffold_17, whole genome shotgun sequence
  Pfam annotation: Domain name=DUF620; Domain location=130-406; Score =437.9; E_value=1.4e-128; Accession=PF04788.3; Description=Protein of unknown function (DUF620)
MRKVCANPDREVGLDTVLEVPVPDQLHHDPSSSSSGHGRRRRRTLKAWVRSRMDQRHRRHSSPPSQADVQLMLGVVGAPLVPQPVQARKAMVAGEDIKEEPLEVSKAKYIVEQYVAASGGERALSAATSMYAVGKVLMRTRSSSTTTKQGQKARRTGMVGVVHGGAEIAGGLVLWQKGPEVWCVEMVVAGGTKMSAGSDGRVAWRQTPWQQAHASRGPPRPLRRCVQGLNPRSTANLFSTATWVGEKSVDGDDCFVLRVDADPLALRARSGDDVEVVRHAVWGYFSQRTGLLSRLEDSHLLRVRATKGSPLAQTTTYWETSMDSSIGDYRAVDGINVAHAGRTVVSLSRFGGSTNDDSAGSESAGVLGRRTCTCMEENWSIEEVDFNVVGLSAECFLPPRDMVVVPCSPKPVDDEKGQCGRLDHSCKKDDAPAALDVRNKNGNGGAGGVHRPATARKALVTAATGLPWSGTAKVVAVETFDTTAE

SEQ ID NO: 65162 - protein, 79 aa, Zea mays
  Coding DNA Sequence Number=SeqID_21787
MMLMKYVKDNWEQTVFMIELHRKDGARPRARPARAKAKPRSTESKVGGSGHEVRGVVSEVRMGAWKSGWRSRDPPGSIA

SEQ ID NO: 65163 - protein, 98 aa, Zea mays
  Coding DNA Sequence Number=SeqID_21788
  Homolog annotation: Hit_ID=A2Y0X2; Match level="QueryCoverage=33%, HitCoverage=3%, E-value=2e-07, Identity=81%"; Hit description =Probable cellulose synthase A catalytic subunit 1 [UDP-forming]
MGMVASSHNRNEFVMIRHDGDAPGPAKPTKSANGGLQGQGWCQGPVRRGRHQQLYLPAPHLWEIFSPIIYASENIIASCHWAYKGVEEDSTLEDPYFL

SEQ ID NO: 65164 - protein, 164 aa, Zea mays
  Coding DNA Sequence Number=SeqID_21789
  Subcellular localization annotation: CTP_CleavageSite=37; ConfidenceScore=5.25e-01
MSGAPEDSSANSSPSGKSRGNSTIIHRTVRCTPDSVRCSKEERPQELTSFGKLQRLLRYNSPDMSGVHRTVRCNCGATTTSHQRSPATAINARQSAQKSGTRVVAHRTLYSTCPVRHRTSRRAQKTVLQRSNPNGFGDVAGAPDMSGVHQTVRCTIRQTAPPNG

SEQ ID NO: 65165 - protein, 64 aa, Zea mays
  Coding DNA Sequence Number=SeqID_21790
MTLSKGSKNDIKSFRETTNQAKDGGKKSFEVPSAWEKVKETRNQKPGVKKKTCKVKVDRVKKSY

SEQ ID NO: 65166 - protein, 690 aa, Zea mays
  Coding DNA Sequence Number=SeqID_21791
  Gene Ontology: Mol. function=catalytic activity; Biological process =conjugation with cellular fusion
  Homolog annotation: Hit_ID=Q9U459; Match level="QueryCoverage=86%, HitCoverage=84%, E-value=8e-15, Identity=21%"; Hit description =Erythrocyte membrane-associated giant protein antigen 332
MVTEQPSEDDGGVNFQDGGGSSAALLDKNAGEEIELVAGVRALQVPLTGNGSDASHESEMRKFNEVLTVREKNSEVDTQEVSKEMEHTDIAELQADIVDEAAFLDCSSIVNLVAGEETEVVNTEDGLGCEEDGDVDKVLHDSVDDTILIDCSSENVEMEKAGNVTREMPENQAALDEDVGKPNEVVIGDKPQDTVTDKVVQEGREVLITDEMQQGTAGMHDEIEDDQFESVFVQADQVVTADNLLEQVTDREITVEENTALIVGERQQSTVTMDEDVVEDHSDTDGDHSNEHIEAVTTVKVPELKLIEDIFVQSDHAVAADNLPEQVRDCGITMETTSLIVDEKQQIMVTVDGDLVMDGSETDNVHPDEQMEVVTAEEVLEDTGITVEDVEEKQKSTVTVDKDVVDDHFFKTDDVHADEQMEASTTDEVPELTEADYEVVEEKQQSTYTMNGGIEDDHFKTHVAHADEKKEVVATDVPEVTGTVGEIEEKTSVTMDGDVVFDHADGQKEVIVTEVPDEVTVTGDEGVERKAAVITEAIPDHGTAPSIAHTMNGCVKETHFGDGNEQKKVITADIISIPQDDCVRKENASSIDVAESLSSNKSSGCKNSSEKNTTEPMAVLKDKGLKATKKPVDLLALSLGKLKAKLKDRLNAEKKKEAKRLALARVDENVCRSIPRKGAGQQRNLNLQQH

SEQ ID NO: 65167 - protein, 429 aa, Zea mays
  Coding DNA Sequence Number=SeqID_21792
  Gene Ontology: Mol. function=small conjugating protein ligase activity; Cellular component=chromosome; Biological process =regulation of protein metabolic process
  Homolog annotation: Hit_ID=Q6I601; Match level="QueryCoverage=59%, HitCoverage=23%, E-value=4e-63, Identity=53%"; Hit description =Putative uncharacterized protein OJ1214_E03.18
  Pfam annotation: Domain name=UQ_con; Domain location=260-394; Score= -18.8; E_value=0.0008; Accession=PF00179.17; Description=Ubiquitin -conjugating enzyme
MAENDYLLSGGLEGIGSTGKKCEVARRRNGLDTNKPKKGGGPTGRELNIGQACFHSEPSNASNQFILAQLMQVQHFEIIGLDKLLDNSSVESMNEEHTIGDSLDEAEQEELNHEIALESTEDCTGSLCKATAFLFPKTAFDFLTNVAASLFGIHGSPSPSSVLVDPRYEIVKMAEMQPCAEETPKEEQIVKFVAQIDKPILSSEDAVSKRFDVVTDCLDHHFVKENGHESVMQLLKLSLTFFSNNNHWCERGIMCNDDYFLFLGYKRLAEEDGIHVRVYEERMDLLRACIVGAPGTPYHDNLFFFDIFFPPDYPHEPPVLSSAVVEKLAFGRKLGGGPKKKAVSRSVKAGLQFPVGRIRRYLKEEHRAATGGDAGKMLHDLTESEYELSLTNLVEKDAGEGEGGRAGAQAAPHAQDRGEGPERRTTSNS

SEQ ID NO: 65168 - protein, 229 aa, Zea mays
  Coding DNA Sequence Number=SeqID_21793
  Homolog annotation: Hit_ID=Q56ZH1; Match level="QueryCoverage=42%, HitCoverage=81%, E-value=9e-14, Identity=43%"; Hit description =Putative uncharacterized protein
MPLAVGRVLEVDAQLAVPIRSRRAASSKGRAIAGSFVSRVLAGKAASPRYWDDGNTNAVSPRGRARPQSQATPGPDGSGTLVRGSCRPSTLCSANCHGSMTVGSGPGVVGPGIISNPGFMRPPMCSRTRARNLILTRAVHASSYDKNPEEQVRPAFVPDDVIGGAGSPDKYWSPHPKTGVFGPAAVDTNQLGVAADAAAANAAAAGGTVLDQKVWFRPLEDVEKPPPVA

SEQ ID NO: 65169 - protein, 154 aa, Zea mays
  Coding DNA Sequence Number=SeqID_21794
  Gene Ontology: Mol. function=structural constituent of ribosome; Cellular component=ribonucleoprotein complex; Biological process =translation
  Homolog annotation: Hit_ID=Q6RJY1; Match level="QueryCoverage=98%, HitCoverage=98%, E-value=2e-71, Identity=82%"; Hit description=60S ribosomal protein L12
  Pfam annotation: Domain name=Ribosomal_L11; Domain location=64-132; Score=80.3; E_value=6.5e-21; Accession=PF00298.10; Description =Ribosomal protein L11, RNA binding domain
  Pfam annotation: Domain name=Ribosomal_L11_N; Domain location=4-59; Score=55.0; E_value=2.6e-13; Accession=PF03946.5; Description =Ribosomal protein L11, N-terminal domain
  Pfam module annotation: Pfam domain module=Ribosomal_L11::Ribosomal _L11_N; Domain location=64-132::4-59
MPPKLDPSQVGAASSLAPKIGPLGLSPKKIGEDIAKETARDWKGLRVTVKLTVQNRQAKVSVVPSAAALVIKALKEPERDRKKVKNIRHSGNVALDDVVEIARTMRPRSMAKEMAGTVKEILGTCVSVGCTVDGKDPKDLQQEIDDGEVEIPSA

SEQ ID NO: 65170 - protein, 226 aa, Zea mays
  Coding DNA Sequence Number=SeqID_21795
MALAHDSWSQFKPKPPVLVAIARLKGAMGAERVFPGGPKWRGALCSAPGEAGHDHGESRARGGGAEGPTPMEALLLRWRAAAWAPSTGGRGDEGENGEGISKGLQQWSAWPGREASAMGGVSLHCSTVGEKNSERLSWGGSLSAPGEGKGVALGGGGEDAMGGARRHGSLELGSLLAAARGRRSMGRRAVGGESSRPGGKKKGAPSREVQSCCTTGGGRRQGVRVG

SEQ ID NO: 65171 - protein, 48 aa, Zea mays
  Coding DNA Sequence Number=SeqID_21796
  Homolog annotation: Hit_ID=Q9LZ46; Match level="QueryCoverage=93%, HitCoverage=29%, E-value=4e-07, Identity=66%"; Hit description =Probable histone H2A.4
MEDSSAVVEKLAFGRKLGGEPKKKAVSRSVKAELQFLVGRIRRYLKEA

SEQ ID NO: 65172 - protein, 203 aa, Zea mays
  Coding DNA Sequence Number=SeqID_21797
  Gene Ontology: Mol. function=DNA binding; Cellular component =chromosome; Biological process=nucleosome assembly
  Homolog annotation: Hit_ID=A2Y5G8; Match level="QueryCoverage=74%, HitCoverage=90%, E-value=2e-27, Identity=45%"; Hit description =Probable histone H2A.4
  Pfam annotation: Domain name=Histone; Domain location=84-157; Score =58.1; E_value=3.1e-14; Accession=PF00125.15; Description=Core histone H2AH2BH3H4
MAPLSGPHCLLVSLCQVALQSEWRRRRCPSVRPLYADGGYQLRIRRLEDVHPRLSGDRGRQRGGGEVCVWAEAGRRAKEECGVANCQGRAPVPVGRIRWYLKEGQYGQRVGRGAPVFLASVLEYLAAEVMELAGAAARDSKRGRIVPRYLLLAIRKDEELGNLLVEVTITHDGVLSNINPALLPNKVVAAAGSSKSPTKAAAK

SEQ ID NO: 65173 - protein, 135 aa, Zea mays
  Coding DNA Sequence Number=SeqID_21798
MEYEQKCIETSTNIVKNNKRNRKMFGYMSSPRQPQAKAPKHMDTQTEESSLGLPRAYIRFVERVGLDGSNDLDDGSEGEEDQDNDDGNKGGGGEDGGDNGGKGDDGQGTSGEGSGGYDNDDGGKGGNAGGKAPPA

SEQ ID NO: 65174 - protein, 228 aa, Zea mays
  Coding DNA Sequence Number=SeqID_21799
MAPKNPWSSPSSGQSVAYGWCTRMKYPWVIGFGLLLPKPIPIYPMGGDFVPYLYPWVHFSSHTRTLIEEFPTGWRNPRLLCDEPEPEAAVSAWTEVESARKGASSAQEQVASQAEEVQQRWLELGQVVRYRDQPRSHAAEAVSRAGVLGGQLAEATEQPVEVSARAGTLAETLAAMAQARCWRPPSRWRSFRPCHRPRPGQIPPKVETTPMVLLLPLSMSEPAGTVCL

SEQ ID NO: 65175 - protein, 319 aa, Zea mays
  Coding DNA Sequence Number=SeqID_21800
  Gene Ontology: Mol. function=DNA binding; Cellular component =chromosome; Biological process=nucleosome assembly
  Homolog annotation: Hit_ID=A2Y5G8; Match level="QueryCoverage=34%, HitCoverage=72%, E-value=5e-26, Identity=55%"; Hit description =Probable histone H2A.4
  Pfam annotation: Domain name=Histone; Domain location=200-273; Score =58.1; E_value=3.1e-14; Accession=PF00125.15; Description=Core histone H2AH2BH3H4
MALPVDLAGLRPRSGDVEAPPKPRSSLSSIAEAEPEPLGRARRRSFGRGQGGVRALGSGEAEFVVFRGLARVRALGRAERIGVAQAALSFCQTGQWSGEVTAVTSALPGGARQDKGLLLSEGKASGELEMCPPLEGGLGRDGNPSGPLQLYADGGYQLRIRRLEDVHPRLSGDGGRQRGGGEVCVWAEAGRRAKEECGVANCQGRAPVPVGRIRWYLKEGQYGQRVGRGAPVFLASVLEYLAAEVMELAGAAARDSKRGRIVPRYLLLAIRKDEELGNLLVEVTITHDGVLSNINPALLPNKVVAAAGSSKSPTKAAAK

SEQ ID NO: 65176 - protein, 325 aa, Zea mays
  Coding DNA Sequence Number=SeqID_21801
  Gene Ontology: Mol. function=RNA-directed DNA polymerase activity; Biological process=RNA-dependent DNA replication
  Homolog annotation: Hit_ID=Q8W0Y2; Match level="QueryCoverage=9%, HitCoverage=1%, E-value=5e-09, Identity=96%"; Hit description =Putative gag-pol
MALLHSARYQQSLRRYHARGVRSRDLQVGDLVRILIVEGSSGTLGVDYTFGEEPGSSRRLGRPPRGLGQLSPEDISPARGLGNSIPASVPPVDDPARLWPTKSSFRANSTPVRADTATPGFGSSKSGRGVPLIKREKPRTARPTEPRDSYASGIRIPHSSPSHEATHAWYEQPHTIGGPAEQQKTDERLTVARSSSGDDDDFCSGGPNSSSDDLRADAAAMRPSPMPSLERQGRAEGRRVGGQSVGGTGYLVGGETSSGCRGGRRRRERLRSHSAQRARHAAAANATNGERPSPRSLREGAGRRPRRDRPQLGTLPSPALMMKIL

SEQ ID NO: 65177 - protein, 49 aa, Zea mays
  Coding DNA Sequence Number=SeqID_21802
MSKPDKTFPLLILPRLPSLLNPGKIYFRKFGLRPFYRGYGFRINGPRFF

SEQ ID NO: 65178 - protein, 49 aa, Zea mays
  Coding DNA Sequence Number=SeqID_21803
MAEEDSTTQVYVPVPAPTLFRGVGSLCDDVPLAELPYVGCDREKRYMRT

SEQ ID NO: 65179 - protein, 84 aa, Zea mays
  Coding DNA Sequence Number=SeqID_21804
MASEAKDVGILTMIIYFLSNCVIQERLPSQESYSGSQAGTQRYGHQARPDDQNCATARDCCGGRRRGAAACGRSGGACDRSRRR

SEQ ID NO: 65180 - protein, 55 aa, Zea mays
  Coding DNA Sequence Number=SeqID_21805
MEIGSFRAEWESRLVGKMCNLCRVLETGCPHCTQCSGGDAGNMEDFEEFQDYDEF

SEQ ID NO: 65181 - protein, 148 aa, Zea mays
  Coding DNA Sequence Number=SeqID_21806
  Subcellular localization annotation: CTP_CleavageSite=25; ConfidenceScore=5.23e-01
MGCVGLYNLVAGVAFSTAVRSPETRQMRSPCSLGSPGRARTGQDSRGPDELTDNLMLNCGFIAKGQEERTNLNVIKEVVALFPQSLNRLLSAELTSPIDGELSRLSWLLAELCRRTPKSGPAAGSRSVGSQVSTSTCLKRRSLAAVAL

SEQ ID NO: 65182 - protein, 253 aa, Zea mays
  Coding DNA Sequence Number=SeqID_21807
  Homolog annotation: Hit_ID=Q6J9V9; Match level="QueryCoverage=51%, HitCoverage=45%, E-value=7e-55, Identity=83%"; Hit description =Putative uncharacterized protein
MGDPYPHEYGYGGKSIPASVYGDRERGYFERILLSEGNGPRALLLIRVLKVAPCGVRQPPQSTWAPSPLLIRGSKAGPSEGFDSRPRACRVRDDPGYVRFMAEAWATLPRYPRTFPRPAGTICNGIPPEGGTEPSDPIKWVRVQQITCNLGRNRELRLARPQASASEEGLCLARPRASSLASASGGETTSPDLSLSLRRSIRLARPQPRTDYTTGDTSLLYPYLAASGYKGTRPVSHLDYSGLKYFSAGHVST

SEQ ID NO: 65183 - protein, 233 aa, Zea mays
  Coding DNA Sequence Number=SeqID_21808
  Homolog annotation: Hit_ID=A2YGC2; Match level="QueryCoverage=85%, HitCoverage=81%, E-value=3e-07, Identity=25%"; Hit description =Putative uncharacterized protein
MPHAPPQGIDAAGGYPDGYDNDVGDSLSHNTELSEDQEPEGWIARPITRDAARGCHFHNALDTLLCRAFDRHTWSIEYRCVVYQHRRRLYPDQWEATCLVRRSDDDLWGAEAFSEHYSITERDTTEATMQDAARHALSQYCSLFSGVANGLDLKYYPCRSTSKAGGVIVSPIGKGNPRLNSMVNLVVVLNTEMDQALDKLGKVRVEVAELCAERAMRHYLDGGSPAPIRIQHP

SEQ ID NO: 65184 - protein, 460 aa, Zea mays
  Coding DNA Sequence Number=SeqID_21809
  Gene Ontology: Biological process=intracellular signaling cascade
  Homolog annotation: Hit_ID=Q5VQ40; Match level="QueryCoverage=79%, HitCoverage=92%, E-value=1e-137, Identity=65%"; Hit description=Leaf senescence protein-like
  Pfam annotation: Domain name=DUF231; Domain location=227-379; Score= -0.2; E_value=1.1e-07; Accession=PF03005.6; Description=Arabidopsis proteins of unknown function
MKNFHEIKLPYSTRCAILAAVLLVTTCLMILAFVILPDREMLPPPLVSDDHGGGNLSCNIFKGEWVPDPGAPRYTTETCPVIHGHYDCMRYGRPDLGFVRWRWRPEGCELPRFDAARFLRATRGKSMAFVGDSLARNQMHSLVCLLARAEQPAPWTNASYVFRFERHGFTVSLFWSPFLVRAVETDPDGPTRSGAGLWSLHLDEPDAGWAAHATEFDYVVVSAGSWFFRPSMFHVHGRLVGCNGCLAPNVTDLTLRYSLRMAFRTALRAAVDAPGIGKRSRRTVVVRTLSPSHYENGDCARARPLRRGEWEMNAVEKDMYAIQAEEFGAARRVSNGARMLLLDATEAMALRPDAHPSKYRLWQPDRFNCIKTLNIYEDLRYLSYGTEEVQCHEEEAVATDVGVQGHEEEVEAIDARVQDHEEVQAMTRPSRLLPFHGGALGKATLSSLHQCLHSHNLRYL

SEQ ID NO: 65185 - protein, 105 aa, Zea mays
  Coding DNA Sequence Number=SeqID_21810
  Subcellular localization annotation: CTP_CleavageSite=33; ConfidenceScore=5.36e-01
MEGRSRLTAPGAFFRRRNSSTVQVLCRRPPRTVGKGVATLSTGNDFPMALSIDHTTGISLGISFRALIVGEGFTGVAPLWFCVGAVIQLGWSLRIVGEPLTIGFA

SEQ ID NO: 65186 - protein, 101 aa, Zea mays
  Coding DNA Sequence Number=SeqID_21811
  Subcellular localization annotation: CTP_CleavageSite=33; ConfidenceScore=5.36e-01
MEGRSRLTAPGAFFRRRNSSTVQVLCRRPPRTVGKGVATLSTGNDFPMALSIDHTTGISLGISFRALIVGEGFTGVAPLWFCVGAVIQLGWSLRIVGYSLI

SEQ ID NO: 65187 - protein, 115 aa, Zea mays
  Coding DNA Sequence Number=SeqID_21812
MKDGGLETAMLGGLEAVFGRTAALRDEQRALAASRAAFRPQVAGLGWHGGAVARLRSGAGARRRGGVGARWRGGTAARRRGSVAARRLGRAAAAARRFEWRERRKNESVCGRWWL

SEQ ID NO: 65188 - protein, 253 aa, Zea mays
  Coding DNA Sequence Number=SeqID_21813
MARAEDVEDFGPLNSAQPKAEANPVVAEAVVDPAPPLETGDDSLAAPASTVSGGGSSPVTVPMVEDPPKAATELAAEDPPKAATKPAAEDPMAAAGSSQDFGPAHATATANFVAASTVVAGNESDESTSKFSDFDDSGSSVEWTEESLDEDLDYFATLDVAVAEASPRVTDAEVLPGPSAGRRRRRAVAKRRVSEVDGGRLRVGRVGKRELLSSPVGASVGEGELRSLFEGEELRIMLFNYREMGIIPKVEPM

SEQ ID NO: 65189 - protein, 202 aa, Zea mays
  Coding DNA Sequence Number=SeqID_21814
MVLLNVTQWFVRDARETVGDFLQDRAAFRCVTPYFLAWIFMWTKRVEVRHVASVISGSANQVLPRRTLVILSTRRRRFPPDPRGRRSTLPPALSNDSDDSQGIAIELWTYIQSVEHAGLEGSDESEVSSDEENSSDSSEEGSGSDGDDKGDSSDDDSGGGGDGDDGNDGGKGGGGGSGDGRSDDMARAAAARPVAKRHWLKH

SEQ ID NO: 65190 - protein, 345 aa, Zea mays
  Coding DNA Sequence Number=SeqID_21815
MPSWQPERFWHPVHVISWPSEERWSLAEGQLSVESLLTSPCFRKGLRAAVVMEHAGRHHYLFVGASQMGCRSCSSSPGSGEAEAPPRLRSSLSSEVEVESEPRVRRGGDHRLRPRLSPSPGVGRGGVRRLPEPRPSQSPRVGRGGVRRLPEPRPSPSPRVGRGGVRRLPEPRPSPSPGVGRGGVRRLPEPRRGPSPGVGRGGASYGAQGRTWLLSASLCRVAQQSERHRRCCLLVRPAILALNAPAIRSVGVAIWPRLLLGEDWASGEPKMGPPSLRTKREDGQGQTRPFTYAPASPFRKEEGESAMLPSEGAEHGVSSELLTGLDASLWWDSITKSFLLVSKMF

SEQ ID NO: 65191 - protein, 122 aa, Zea mays
  Coding DNA Sequence Number=SeqID_21816
MTWAVGSGRGLVAGARRSGAGANRLADCDRLPGEGGGACCGGTAGKGYMEQWKKDDSSIRRSLDVSDNIIRHHYAGQHHQDPPSANGFVHSLVALSLQNAVQAAELHLGILAAQDNDDPCST

SEQ ID NO: 65192 - protein, 474 aa, Zea mays
  Coding DNA Sequence Number=SeqID_21817
  Homolog annotation: Hit_ID=Q6QP51; Match level="QueryCoverage=24%, HitCoverage=54%, E-value=2e-15, Identity=45%"; Hit description =Putative growth-regulating factor 1
  Subcellular localization annotation: CTP_CleavageSite=52; ConfidenceScore=5.40e-01
MVAIPGGHPPFKGDSPHLRPQPSQTESSPTRLQGLPPTTRGLGLTRHASWPRAEEAKPPRAERVTAQRLQALLHFCPDQRVKGRTAMQAACNCTKGAHPFDFDASNMEAQAHTSCNRRAGYYVRETAPPLAPVPRLLDCGTGAATRGNPAHGPTVPTEHIGHGSVSRGRRRNGRYSQKWRRDRERGYSERDPSPRRKRASSPLTDQRFKGWPLRRVRQPPQSTQAPRPLLVRGSKAGPSEGFDSRLRPLGPRAHCWSEVRRLAPWRGSTAVSGHSGSTPTTDQGFVGWPPKGSTAASEHAKRGMTLGTSDTWPRLGLSSRGTLGHFRDQQERFCNGIPSEGGIEPSDPIKRDWVQQITCRKLRLARPQSSGSTSTPGRRTPPRPTPGLGLNLDLGRRTPPRPTPGLGLNLDLGRRTPPRPNPRARTQPGLRTTDSASPDPRLGLSLDLGGVTASPNPGIGPTTSQGGHHYPTPS

SEQ ID NO: 65193 - protein, 65 aa, Zea mays
  Coding DNA Sequence Number=SeqID_21818
  Subcellular localization annotation: CTP_CleavageSite=47; ConfidenceScore=5.43e-01
MTTAALSPLRKQGDVSKDPTAPTAVLPQGSSAPPTATTSHEQGAKTSSTATKGPPGVETPTLFDP

SEQ ID NO: 65194 - protein, 135 aa, Zea mays
  Coding DNA Sequence Number=SeqID_21819
MADEALRDRNAAPECPADACTPVTLGFAGGGSPRPHEHTAASHVLFCGEMKGKRQLGLDSFIYAGKDKVQRTDFLQSGPNIEESCTSCHIEPRTVTSSDSPDNYYYMRTQDKVDSCPNYYHAEGNKLSTCPPILD

SEQ ID NO: 65195 - protein, 64 aa, Zea mays
  Coding DNA Sequence Number=SeqID_21820
MARQEAAPRRLSDQSESTAPAPLQGTCRVLSSHLGQRRVSLPNNIQLRSAKRSHFGKRFRKGIS

SEQ ID NO: 65196 - protein, 182 aa, Zea mays
  Coding DNA Sequence Number=SeqID_21821
MGGLSLGGSGIRTIPRSLPRLSMGNQQGLGDFPSPAVLVNPYYRHHSASNISLIPLCSSGATRSSASPDPSLGLERSHHYARPRPRSQPRPREKVSASPDLNLGLGRSHSLARPQPRPRKKSSPRPKRLRTDYATGNMTLSYPYLATSGYEGTRPAKNRQQDLGPHCQLRFYRAQALIRRPR

SEQ ID NO: 65197 - protein, 84 aa, Zea mays
  Coding DNA Sequence Number=SeqID_21822
  Subcellular localization annotation: CTP_CleavageSite=70; ConfidenceScore=5.84e-01
TTDPNDTTVVQTPTPPTPPKTPTPPTPPTPTPPSCLRRQRLRRRRRPRRARPVLRRGLPTPLPPPVPSTDAAATSRRLQPPRLQ

SEQ ID NO: 65198 - protein, 20 aa, Zea mays
  Coding DNA Sequence Number=SeqID_21823
MASLAVDPPGTFRIVVSIIL

SEQ ID NO: 65199 - protein, 910 aa, Zea mays
  Coding DNA Sequence Number=SeqID_21824
MVGDGVAQFGSCTFTPKTGKTTMPVVELVPCARNKWGSWNEFWFYVAEGTVEGHEGLPVSEMCSHYYSAYPPFEVAEEDADEGALRCAAGQSSGRDLVEEFVAYGVWPLAHGWALGEVCPRQMPFHGGRVVRSPAFALNLRNRDPAAFVRDAEDLAVRLVGRYVPRTEGQRSFDIRGSNERLNRVFELNQLPYDGYPGQDEADRRGKKPAVETGGDPALAAAPSSKKRKLGTAMGGLGVSDSFARELMRTCAAPGERMSSPELRESSARMLRVTGGCWPKNVPIPCAAEEDCFTSRMVHQWRVFPYGRNIGAVVWTVMDKDRQGAAQKRQATVRIHEARPKRQRGTAKAVASGGGPGEGQLAIAAPGAAIATAVMVPKARGEALGAEGEVSALALVADFASRTASGALTAAVSAEVERLRTQHADAVREKSASDSKCRKLADRVAALEREKADLRRQLAAERREANEAVAKGQAAQAEAKLARAEGNLAKERAEHLQERLTALESRAKEAEAAMHAEAERTRTQLMDTYRELGARTGDFEVPDREPGLRCLQWVQEELLALPAVAGGLMSYASLVTCEGAMNALSREGCRHFEAFEQVDEEFERDIYKVEDPVVKESAGALYDRMWGLYGREVVRERAETARAQAVRVFAESVCLVLGGARRVGGRLRGSKQCAARPGADPRGGCDWGRPGANPGDRSDRDGCPTSAVAGEDLPPKVAEGAPDAPAAAVPSAEGPAAVAAEPTAEAPAALGSSQVQDFGPAYATATTEFLAASTAEGGNEYGGSVSEFFDFTDSGSSVEWTEESSEEDLDYFAALDVDAAEASLHAADAPDMPGPSTGRRRRRAVAKRRVSAEEGARLRVSRAGRQELLSLPAAASTGERELRSLFAGEELRMMLFNYREMGLIPKVEPM

SEQ ID NO: 65200 - protein, 509 aa, Zea mays
  Coding DNA Sequence Number=SeqID_21825
  Gene Ontology: Mol. function=hydroperoxide dehydratase activity; Cellular component=chloroplast; Biological process=fatty acid biosynthetic process
  Homolog annotation: Hit_ID=A2X2H3; Match level="QueryCoverage=99%, HitCoverage=99%, E-value=0.0, Identity=72%"; Hit description =Putative uncharacterized protein
  Pfam annotation: Domain name=p450; Domain location=25-505; Score= -172.1; E_value=0.00051; Accession=PF00067.13; Description=Cytochrome P450
MASKRANAGDEQQKLSPSGLPVHKIPGSYGVPFFTPLRDRLDYFYFQGAEEYFRFRVAKHGGATVLRVNMPPGPFLSGDSRVVAVLDARSFRVLLDDSRVDKDGTLDGTYMPSLALFGGHRPLAFLDGADPRHAALKRVMIRLAAAGMQHVAPAFGAAFTATFDAVEAGMAGGASAVEFNKHNMRHMLDFTCASLFGGKLPSKAIGDGAAAKAFKWLVFQLHPLASKAIRPWPLEDLLLHTFRLPPFLVRRDYAELTAYFADVAAGVLDDAEKAEPGAVPRDELLHNLIFLAIFNAYGGYKIFLPHVVKWLARSGPELHARLADEVRAVVPPGSASAGDAITLSDVEKMPLVKSFVWETLRMNPPVEFQYGRARQDMVVESHDAAYEVKKGEMLFGYQPLATRDERVFRRGREFVPDRFAVCSDDERRRLLDHVVWSNGPETGAAAERNKQCPGKNAVVAVGRLMVAELFRRYDTFVASVHETPVEPVVTFTSLTRASSAAGHGSSVKP

SEQ ID NO: 65201 - protein, 132 aa, Zea mays
  Coding DNA Sequence Number=SeqID_21826
MAIVGTLEQGYPLLQYEVRFRSLLRRRPDAATWPIARDVSQRVEPDVRPLGHAISTFIAEKTRRLSALLTGNVPPRHLMCPVHSAGRRRPGHPTGGAPVQSDSGRYTHTASRAMVIMTCTLPRKLLLHANTT

SEQ ID NO: 65202 - protein, 185 aa, Zea mays
  Coding DNA Sequence Number=SeqID_21827
  Gene Ontology: Mol. function=protein serine/threonine kinase activity; Cellular component=ubiquitin ligase complex; Biological process=protein amino acid phosphorylation
  Homolog annotation: Hit_ID=A2X2H0; Match level="QueryCoverage=80%, HitCoverage=19%, E-value=2e-57, Identity=75%"; Hit description =Putative uncharacterized protein
  Pfam annotation: Domain name=Usp; Domain location=22-161; Score=22.2; E_value=0.0019; Accession=PF00582.17; Description=Universal stress protein family
MFSSPFSVTSSHSSEHEPVARDSSIIVAVDRDKNSQQAAKWAVDKLLTRGSMLQLVHAYYVVSYDHATVEANKDEGDAEITQLFISYRGYCARKGMHLKELILDGTDISKAIIDYATSNAITDIVVGASTKNTFIRRFRNPDVPTCLMKMAPDYCTVHVIHKAKAIQGLKRRLEEDSSYIVSIGK

SEQ ID NO: 65203 - protein, 181 aa, Zea mays
  Coding DNA Sequence Number=SeqID_21828
  Subcellular localization annotation: CTP_CleavageSite=15; ConfidenceScore=5.13e-01
MLSSSSSSSSAATASSNAPSSEKTISDPAAVVELQPDHTVEFGTSRIYSGRVHEMQRSGYFGNGVGQASGAEDVPEPEDSSADAERYGSIGEVCLGGDISPAFTIDLRGRDAAAFIREVESETVKIVGYDFARTPGNIFVNVEVMDKDRQEALQKKRKAPLRLVDPRRDAKMSRPSAKGLL

SEQ ID NO: 65204 - protein, 280 aa, Zea mays
  Coding DNA Sequence Number=SeqID_21829
MIHECGAAHTGQGGTRLEPDAHWGLWCNRSEVVVEVATLDVLSALTRPLQGDAGILACTSAVELCPQVLSRRGTSCWRWDDRGLGLVELECAMLSRRSTSSRHCFMAPGEAVELGGWHNNYLAADSAPGTALDSLDVCAGVCCHAECTAATLGAGSKSFLGNVQVMMTMAREAVWVYRPLSDWTGAPPVGWPGRRLPAEWTGHIKCRGGTLPVSRADRRRVFSAINVEIAWPRGLTSGSTRWLTSRAIGHVAASGLRLSKERKRTGQTPDEYLRRTPIRP

SEQ ID NO: 65205 - protein, 701 aa, Zea mays
  Coding DNA Sequence Number=SeqID_21830
MHAYRDKTESATHARVERAHPLFVDAYRDLGAQTAPFDKSGGKVGTHFLKWLQEELESLSSIVTGLMSYVSLVSCEGAVNALAHEGCRHFEAFNQSNEDFDVGVFQVKDDVLKRVAGAMTDEEVEDLVGLESSVARKDAEVEARVEEQSSLKKGGVENPAAVGTSAQVSVPGTAQANFGDNGNGKLLMCQSLIVLSSDEYDVDSWSSKGEELMSPFARMDDESSEDDLDYFMALDLSVVKSSPRVAPTVAESSSRVAPTASRGKRSIEVLKRSVEMIGEPSQGMGVPRRRRHMGMERSRPWEGMRSEEGTRRIILAPTTGQCFEEGDLRSLFDGEELKLMLFMLELANSRSSKLKQWESEKWFDANKCNILGAFVVFDLEYAGMGSSSKRDMFAFVPTFQFPGGWPDPKAAPLGDFCLDRIERFLDDFAPLGVGAGPHLSAPRPAHSIALFFSAKWVHPVSTAHRSPARSLADSRPPCQTRPLPPQPPRTVKPRPLPYDPPTSLKHLGEDPMSPSTRPYLSFALSQPSRSLSPQRRPLCCSVVPPSSPGLCRRLGHGELHRSLVHREPAVVFPPTNPSAWSTLNLSPEQVGVCHHRGFSLSGQPESPSTVPSCPEHRLWVSNLPPPFFCTSFVSSWVILARRSRLSSGRRVLMAYDRYSPSTSPNLGVGHSYPLTEAHASFNAPDCPLPMGIACRSGLWSA

SEQ ID NO: 65206 - protein, 143 aa, Zea mays
  Coding DNA Sequence Number=SeqID_21831
  Subcellular localization annotation: CTP_CleavageSite=22; ConfidenceScore=5.47e-01
MAILPPPSAAAQKCANGSSEVPAALLARAPVSMGNLAGATTNCLVSVPTPESQSRCDHNLLLRGALFRLGLHMFPSVVPIISRVPLRVRTVPQAIQFKNSVQPDVGTSYILALYHLRLRHIFTNNFNSLRLHLPNEGGCIPPS

SEQ ID NO: 65207 - protein, 196 aa, Zea mays
  Coding DNA Sequence Number=SeqID_21832
MGWRAVRVLSPNRGGGTILLMVALRALSTQFCNLCPSLVQLVKSVVQLGVEHGDQVDHAAQSRIALTNCVLVEGPTQQGVESVMEMTTTGGIMSDGSGDPSFRLLLLRKLHVLARTATVIVGAPLAEAQRRAASQTPPPAEARGKSPAAPTPGIGAPAPRASDSTVSLGDSTIPSPCDTVDTPQGERAIKGSSTYV

SEQ ID NO: 65208 - protein, 103 aa, Zea mays
  Coding DNA Sequence Number=SeqID_21833
  Subcellular localization annotation: CTP_CleavageSite=49; ConfidenceScore=5.37e-01
MAFGCSAPNSCARAVVLLLAHTATSPIRVLCPSSRSFLSHGRCSINCVSHETPVDFAVLAIIEPGTLINRVMRKTSQVDPKRGLLRKAMLMDKPEDGRQVLID

SEQ ID NO: 65209 - protein, 103 aa, Zea mays; identical to SEQ ID NO: 65208
  Coding DNA Sequence Number=SeqID_21834
  Subcellular localization annotation: CTP_CleavageSite=49; ConfidenceScore=5.37e-01

SEQ ID NO: 65210 - protein, 274 aa, Zea mays
  Coding DNA Sequence Number=SeqID_21835
  Gene Ontology: Mol. function=transferase activity; Biological process= flavonoid biosynthetic process
  Homolog annotation: Hit_ID=A2YXP2; Match level="QueryCoverage=87%, HitCoverage=51%, E-value=2e-66, Identity=52%"; Hit description =Putative uncharacterized protein
  Pfam annotation: Domain name=Transferase; Domain location=1-273; Score=-136.7; E_value=0.00026; Accession=PF02458.6; Description =Transferase family
MGVGLYTSTVHLVSILIGIQGGLALNNVHRWVTFLKFGGVVLGTALHHTASDASSAFHFFQTWSALCKYGDRATVELPCHDRTLLRARSPPTVHPDALSRFYPKLTFSDDPLGSGPLAIEVFAISKDQVASLKRLCGGTSTFCAIGALVWQCALVVRRLPPDAEARLTFPANVRRRVRPPLPSHYFGNALVRLGATGAVRDVASEALASVAGRIKDAVDRVDDELVRSAVDYYEMTEMDSPACEGAPCQRRTYRLLAGWACQCTTWISDGGSQR

SEQ ID NO: 65211 - protein, 64 aa, Zea mays
  Coding DNA Sequence Number=SeqID_21836
MAHGKLKFLAYRRMQPEEIFLASVASAGAVYTSSNIMHSDTSTQRLYSGGSRAVCTGVFQYRQC

SEQ ID NO: 65212 - protein, 290 aa, Zea mays
  Coding DNA Sequence Number=SeqID_21837
MYDEGYSPSSPWEWDDQGLPGLGEGLRRRLSWFRLTQSELVQSSPRVMKAGEHREVKEGECFVRFGHGGGLTPFRITIKMEDSLAIRTSYCSEVEGFPHLLRSCALHMGIRKKPEYVWKEYLENGMEKCSMQQRYPTWRKRLQALSGGDPIENDTTIVYMAGYLHTLDNQYDDLASHCTHLNSRVESLEQKVRELTREKASLQESLEIAEGEETNTREAYRTLKMDYDKKLKKLAPARKIRKKTKSQGCQTEQKEEAPPALPLTRIRNSSNTEEMSLASLDDLLKEFGAL

SEQ ID NO: 65213 - protein, 40 aa, Zea mays
  Coding DNA Sequence Number=SeqID_21838
MARLMESIPIGQDSIESASARVFMVVLELQLTRERIKLIH

SEQ ID NO: 65214 - protein, 50 aa, Zea mays
  Coding DNA Sequence Number=SeqID_21839
  Homolog annotation: Hit_ID=UPI00005A9633; Match level="QueryCoverage =70%, HitCoverage=7%, E-value=5e-07, Identity=71%"; Hit description =PREDICTED: similar to Copia protein (Gag-int-pol protein)
MAMMGSTSEKMYLCQIYASDGTSSIIDSRCINFMTAEKRMFSSYEKNDDP

SEQ ID NO: 65215 - protein, 33 aa, Zea mays
  Coding DNA Sequence Number=SeqID_21840
MASPLQSRPSCACPSDLPYILDHLTGAVSPPRT

SEQ ID NO: 65216 - protein, 368 aa, Zea mays
  Coding DNA Sequence Number=SeqID_21841
MPDARPRMPRVAASRAGAVARARAYKATRDFDRTTPHALVLTGALDHRHCPARGVPAATRSPATVDWPAEPLPTPSDPQNCNLADGEYILVPEQGVAQEVAPDPAPEPAIEDLPAPALEGKARYGGYKCGHCTTAVGDSEALYAKAVSPDLLTGNRWGWLMAEDTIEAIALHGLTTFCGFHPLELSTHPIGLFPAEKEDDPMWKNRVEHAKDIWAIYPGQTAHLTVRCMNALYRLQVMRGEAMSHLMALLEATKITLDNREELVVDLSTEMVEKDLQVEHMSNKIQELEELVGTRENTIEVLEDQLINTQQQLAEANQHLDMHHQKIQDMEANEDVDIEGGEEPASSLDTADSGRPPSPESSVASFAL

SEQ ID NO: 65217 - protein, 325 aa, Zea mays
  Coding DNA Sequence Number=SeqID_21842
MKILSEISTRVEDPVVNESAGAIYDRMWGPHGREVVRERAETARAQVTFGVCWMWAMCGFAEFVCCVLGGAWREVDDFGALNSALPDPEPIPAEAVSGAALEPPPETAEGAPDAPASATAVGDLPPETAEGAPDAPAAAAPSAEDPATVAAEATAEATAEAPATAGSSQVQGFGPTHATATTKFLAASTVDGGNKCDGSASEFSDFADSGSSVEWTEQSSEEDLDYFAALDVAAAEASPHAADTEDVPGPSTWRRRRRAVAKRRVSEAEGGRLHVSRAGRQELLSLPAAESTGEGELRSLFAGLYDEVVCPRTLGYACEGVMYLV

SEQ ID NO: 65218 - protein, 352 aa, Zea mays
  Coding DNA Sequence Number=SeqID_21843
MPTSSSSAAATPPADASSEETLSSLEVEELRAGDSVEFGVSQMSSVRVQDMQRLGYFGGGVARVPGTEEVPEPEGELVVFEAFFAAGLRLPAHRFVGEVLRRVFELNQLPYDGYPDQDDVDRRGKKPVVETGDVPAPAAAPSSKKRKLGSDEGQLAIVAPAAATTTAAVVPKAKGRALSTGGEMSALAAVRDEAGAVSRRLKEVKEALSQAADFADRIASGALTAVVSAEVERLRTQHADAVHEKSAADSKCRKLADKVAALEREKTDLRRQLAGERRETNKALAKAQAAQAEANLARAEGNLARERAEQLQERLTVLESRVERAKAASRAEAERTRKQLMDSYHELGARTR

SEQ ID NO: 65219 - protein, 169 aa, Zea mays
  Coding DNA Sequence Number=SeqID_21844
MALKLPTVLSLSPWSLSLSLLVGTLEQGYPLLKYEGATTMGECRTPAYMARTSGYGLGPPRSPGWDLDPSECVRSRSPLGRGLDDAMWPIARDVSQRAEPDIRPLGHAISAFIAEKTRRLSALLTDDVPSRHLMCPVHSTGRQRPDHPTGSVPVQSDSGQYARAAARVA

SEQ ID NO: 65220 - protein, 183 aa, Zea mays
  Coding DNA Sequence Number=SeqID_21845
MWDLRNSRTTLCIGSFVSITREPRNRPSAQVHNSLRGPRCLHGALRRKRWSKCWEMLAGANPSRRNRAAMPTWLAVNSTDDEQVTEDPGTQQVENSEQELIEGKLSDEVIHPPAMEMKKVLCAALVAAASATAVLASVASEAPSEAPAGAAGGAAGPSASGAAAAAVPAAGALVASFLAYYLH

SEQ ID NO: 65221 - protein, 481 aa, Zea mays
  Coding DNA Sequence Number=SeqID_21846
  Gene Ontology: Mol. function=P-P-bond-hydrolysis-driven protein transmembrane transporter activity; Cellular component=chloroplast envelope; Biological process=intracellular protein transport
  Homolog annotation: Hit_ID=A2X208; Match level="QueryCoverage=96%, HitCoverage=96%, E-value=1e-104, Identity=72%"; Hit description =Putative uncharacterized protein
  Pfam annotation: Domain name=Bac_surface_Ag; Domain location=223-481; Score=65.7; E_value=1.5e-16; Accession=PF01103.14; Description =Surface antigen
  Subcellular localization annotation: CTP_CleavageSite=68; ConfidenceScore=5.13e-01
MVRSCDVRFVSSGVKLPCESTSALAPSPSPSPAPALLSAALPFAHIGRAIDAAARRLGSCLPRVPVARADPAPSPPRRHGKDGGGPEERVLISEVAVRGKDGEPLELPELEAAAAAALRACRPNAALTVREVQEDVHRIVESGLFRSCMPVAVDTRDGIRLVFEVEPNQDFHGLVCEGANMLPSKFMEDAFRDRHGKHEEAKGGGIGFPEVWEMIHVRVSYAEILSGGILRLQVSEAEVNNISIRFLDRKTGEPTVGKTQTETILRQLTTKKGQHAGARDDKGNPVIRDFYNSQLTASGHDYDDTLLAKFESIYTDSGDHSSTMFVFNIEQGLPVLPEWLSFNRLTARLRQGYEIGPARLLLSASGGHMEGNFPPHEAFAIGGTNSVRGYEEGAVGSGRSYAVGSGEVSCRMFGPLEGVVFGDYGSDLGSGPKVPGDPAGARGKPGSGFGYGVGVRVDSPLGPLRLESGDQLVVPEDRPGA

SEQ ID NO: 65222 - protein, 302 aa, Zea mays
  Coding DNA Sequence Number=SeqID_21847
  Homolog annotation: Hit_ID=Q6QP51; Match level="QueryCoverage=16%, HitCoverage=26%, E-value=9e-10, Identity=64%"; Hit description =Putative growth-regulating factor 1
MKILEAERWLKGANSHGVEFFQQRGGKTADIPHPGAWKPSQAESSPTRSKVLPRGAGAGSHTSCKPAQSRRSQTAVRGAYNRPAVTSDSPLLPRPTGERGGQPCRRHATAPSERTSLTPNTPSMEAQAHASFNRRTECFVHATALPLAPPPRLLDCGTNAATRGDPAHDPAAPAWRDGQCGQKWAGSNDGGRRAGAAVTSRSERRFAFAIMTASKKAPSLPTDQRFEGWPPGRVRQPPQIAWALHPLLVRGSKAGPSEGFHGRLRLLGLRALLLIRGSKAGPEGFTAALDAERGMTMGTFDT

SEQ ID NO: 65223 - protein, 206 aa, Zea mays
  Coding DNA Sequence Number=SeqID_21848
  Subcellular localization annotation: CTP_CleavageSite=34; ConfidenceScore=5.52e-01
MGGGLLAAASALRSSLPLFGPPEQKSSSSPLLERAMARRSSVFCCSAGLPHRVGLFVPAEVEPEFRSNVCASESCFSRKVMSEVSVSRRRRSPSARSALPLTRTLTRPWGSVTDAVEKARRIASAEELPNVKTCSVRGITYPNVSYLSQKVMSEVSVSRRRRSPSARSALAAYVYSIVFRIHFRSSQKARKTFWQKRSFFEENFDA

SEQ ID NO: 65224 - protein, 284 aa, Zea mays
  Coding DNA Sequence Number=SeqID_21849
MNALSREGCRHYEREIYKVEDPVVKESAGALFDRMWGPHGREVAARAETVEDFGSLNSARPEAETNPVAAEAEVIPAPPPKTGEGSLVAPAATTSGGGSSPTAVPRVEDPPKTATEPAAEDPTAAGPSQVQDFGPAHATATANFVAASTVDAGNELDESASKFSDFGDSGSSVEWTEESSDEDLDYFAALDVAAAKASPRAADAEVVPGPSAGRRRRRAVAKRRVSEADSGRLRVGRASKQELLSSPAVASVGEGELRSLFEGEELRIMLFNYREMEIIPKVEP

SEQ ID NO: 65225 - protein, 82 aa, Zea mays
  Coding DNA Sequence Number=SeqID_21850
MDKILEEQRIQQVEAIEKIKKWERELEDKASNIALAEENLKEKDASLDRRETDLAGREKDLAFREEMLERQEKLLAEHELEA

SEQ ID NO: 65226 - protein, 323 aa, Zea mays
  Coding DNA Sequence Number=SeqID_21851
  Gene Ontology: Mol. function=nutrient reservoir activity; Biological process=RNA-dependent DNA replication
  Homolog annotation: Hit_ID=Q651V3; Match level="QueryCoverage=85%, HitCoverage=60%, E-value=5e-26, Identity=30%"; Hit description=NAM -like protein
MGTNWNQVMAQYGSYLSEDDATQFQNTAFAPTPEIPAQGSPAPPPVKKAPQRTKLANFTSEEDMRVCQAWLAVSCDPIVNTGQKRQGFWNRITEAYNSRRGSMPERSTKSLMSRWDSIKTQCSTFAGYMMAVLRQNPSGMTDADKTSLAATRINQNGWTSTWVTQIPPPNPIGTQSNTIDLDGGEDSAPSSFTSKRPLGRDSAKEKAKKQRSENTSSTDSEYLTRMGELSLERLSVYKSVASTEEKKLEFMKKQERQKLILERKKLNLEKMKMERQKVKEETEQEVLILSMDLTKCNPLLRQYYEAKQQEILARVTGSSSSSK

SEQ ID NO: 65227 - protein, 169 aa, Zea mays
  Coding DNA Sequence Number=SeqID_21852
MGLEYEEHKAKPKRGSRTSTGVPAQSQTSTETPSVCSKEEFKLRRTSLNKSQGNGPKGEGPRSSVRGSKPGRSVEEKKGVGVRSAHPHDVPKGAKTVADAGAVVTTAGGAAPLTVEEYDLDDAEILTKSPLMHVGGRDEENYDGGAVVSRVTHNLVKVLYAREQDLDVA

SEQ ID NO: 65228 - protein, 119 aa, Zea mays
  Coding DNA Sequence Number=SeqID_21853
MAHVLRRPSPLLRRPGGFRKHSGHELPTRLCWRRVVYTCRVEMELGFHLEADVILLLFVRLDLSRLHTSIPKKEFGGGPEEGLVWEAKLCVWTPWMVLLGTRTPVAGWWSVQAHGTEPG

SEQ ID NO: 65229 - protein, 241 aa, Zea mays
  Coding DNA Sequence Number=SeqID_21854
MDSNDPVMGFLHGCMLETQKESAMRLSDLHSQAIRAYPGLSSLSAWTIQRTQDRLYPGRLRSPLGRRSNAASWLIVRDIGQRAERDIRALSRAASAFIAEGTHRLSTLLTVDVPPRHLLRPVYSAGRRRQGHPADGAPIQSVAETVCPCCAVYCTHPLCEKLPPVRRDYADLRCQGARRLLQQKILVATSAMFLGPYVGAQYSCTCPPLAIKGEAYNVTTQAQSEGLDSQVSTAIQNTVPG

SEQ ID NO: 65230 - protein, 311 aa, Zea mays
  Coding DNA Sequence Number=SeqID_21855
MDKDGHLEDEVGREVLELESELLQQQQEERRNRQRQPAEEIGDEEHKLPGGKIAEGSSAGLDPPGERRRAPSEQAVHRVERLLGLVMIGADQHGHGNHGGRKLRSTNAERRGRLGGERAEQLGKMLASSLEVGPGATIGTLKQGYPLLQGEDDVPTVKSLVARQAVRRQTTSAALGSPRGQGEGRAPDTCSGSGPTTWKAPDPVHDGRTSKKDPRPFQVGSGQITTGSRDAGAGNTRTLPWKGSGAGMCPGLAPRSPHRQGPVAAAWHVVHDIRQQAESDVGPLKPPVSAFIAERTRRLPLGQRTMCPLGI

SEQ ID NO: 65231 - protein, 212 aa, Zea mays
  Coding DNA Sequence Number=SeqID_21856
  Gene Ontology: Mol. function=catalytic activity
  Homolog annotation: Hit_ID=Q6ZKL8; Match level="QueryCoverage=66%, HitCoverage=25%, E-value=3e-38, Identity=58%"; Hit description =Putative uncharacterized protein OJ1118_A06.15
MGIASEAEISAGQGGDLRPHDRCLVSHCVHVPLRGLGRDEQSSGDYGRGRDLPEVVDSWGEALGEAVWDWDVVSNKEVVDIVASVPSRVMTTNALVDYAVRSWRLKIPTSKSDDCAVVCLLLDHEKSTDSIQGSEPNMETTKPTRKEICTQDANAGVDKDIADAGVHVSNAKHIFEATQQHTTTLKEVDKIVPINEPTNSKKPRRCRSARCS

SEQ ID NO: 65232 - protein, 41 aa, Zea mays
  Coding DNA Sequence Number=SeqID_21857
MENHPGKTVLPQGFNGTLVGPHRTGNVEESYALVVDQMKAK

SEQ ID NO: 65233 - protein, 289 aa, Zea mays
  Coding DNA Sequence Number=SeqID_21858
MSADGRTDKFEPETPTYCPLHDARMNTKLSGRYSPGIEGRAGAFADARRSPATARNSGRRDGPPGTILDAGDHHTPMNGPDTSLDTNQRYRPSASEVRGRSAPALSRRTLRNGERRKGKVGTRLTEGTHAPGLACGGDCRAGPTCQTGSAAVARARHLLRRASLLNGSCLGPARQTRPFGHLYLHTIMMVLGSVATTSFVILLLFSLPSCLHLRATPFSTEGVGACTSSPYSPDTIPDTDSRSGYCTSTRTFHIMCAPSFSSSLDVPFVFPAFALFFLPNLLPHPRSQS

SEQ ID NO: 65234 - protein, 134 aa, Zea mays
  Coding DNA Sequence Number=SeqID_21859
  Homolog annotation: Hit_ID=A2YYB4; Match level="QueryCoverage=33%, HitCoverage=18%, E-value=6e-07, Identity=46%"; Hit description =Putative uncharacterized protein
MTVYEAITDRKWIYDIKGPLTVEVLTDYLQLWNMTSAWQLQPEVDDNMFSVLFLLASIQQRLLTKVSFWGLWEFWYLLLRKSGLHSLAPQPDVSSYLGCPSVTMSLRATDEERAQWEIAGAKGLCHLAAPLAEN

SEQ ID NO: 65235 - protein, 122 aa, Zea mays
  Coding DNA Sequence Number=SeqID_21860
  Subcellular localization annotation: CTP_CleavageSite=33; ConfidenceScore=5.43e-01
MRAPSFLPSSDISFVFPAFALFFHPNLLHPPTVAAASRPTLVDAGTGQVNHAPGLSPCVPLRRTWWRLPLLGYLSDEESSGILPMSPPDTPIFVVSFSSNEQHYGPRLRSKHHTALVVTPGL

SEQ ID NO: 65236 - protein, 188 aa, Zea mays
  Coding DNA Sequence Number=SeqID_21861
  Subcellular localization annotation: CTP_CleavageSite=43; ConfidenceScore=5.55e-01
MPCPCASPPTPCPCARCPSAPSAALPTRTSPSVPALLARRPARHSTAVVEPPHREKEEEDDEEEVQHHEEEDEQAHEEVQAHEEEEEVGIDAEADDDTTEAHVVRRRGTRKGHFVLPPSAPAQSEARVLIIPVGDSQWEDTPFDGRGHHRQVNQVLGNLCRQHNPGIVTDLKDAIVWNLRLKSMQIEY

SEQ ID NO: 65237 - protein, 110 aa, Zea mays
  Coding DNA Sequence Number=SeqID_21862
MNRLLSGVPASEPKQLQLECRTKPSAQKSGRPSATKHGPNRRFEIDLTEAIGMEVDIEMVVDDEDDEVQNENDLEILEGNVNDEIAPSDGVDYEMVDSDDDTYDPANPDT

SEQ ID NO: 65238 - protein, 287 aa, Zea mays
  Coding DNA Sequence Number=SeqID_21863
MTSNYKCTFSLEGDESTEILLNPVFEDLRKPKAPNSAACHQASERSHCAHYSFCKKLPRHAEDTQISGVRTRRVPQQQTFVAPNTHKFIQALKQYITQWSRVLRFGGPNHSKPSAGAIGHPVGEISSPTFGAPGGGCIRYAAEFRLPDAWCHSCALRTAAHIGVGVPDSIGGRSRRSALRGQGVVASPTKFHSLTKGYGTMARRRGSPPWHSTHWLGQAQASIVPTPVRGVGLGALALGEGCTDQRSASRAQSQTCGRRCASPPEETRKTYGTSSTAGVRARMPASL

SEQ ID NO: 65239 - protein, 62 aa, Zea mays
  Coding DNA Sequence Number=SeqID_21864
RYFGTGGYEIDGSGYDYGAGDIYPPQAPDLWVDLERSAFWIVRLWTSLGAPEVHPMGVAPDL

SEQ ID NO: 65240 - protein, 132 aa, Zea mays
  Coding DNA Sequence Number=SeqID_21865
  Subcellular localization annotation: CTP_CleavageSite=85; ConfidenceScore=5.07e-01
MGPLDPLSGGPEQLHDPRVKAPLVYKIGYGPQASRGPMPPHVRTIMARARTPSSMFQTPSQGRSGGATSPQVLKPALGPGRAYIRAFVHTIAGRNDNKSDQRSLHHDQEKSWFSEQAQQQPFVFPQFQPPMS

SEQ ID NO: 65241 - protein, 206 aa, Zea mays
  Coding DNA Sequence Number=SeqID_21866
  Subcellular localization annotation: CTP_CleavageSite=28; ConfidenceScore=5.48e-01
MQRRRLTRAKVTASMVMASSALVKATAVAQPSSPFRHRRRGVVAPLVLPVEELTEEAFPVSRRSMQFCLLPFPSIPSTPSPKGGCGKDRCAFGHARLAALPTYRHEGVFLLLWSSSTAPTLGASSSTCVPCGTLPEAQGAGTAVRSSSSPSLTARLAGVRKLAEVNLPTEEGVPNVVPDLDFPCATSKERAVDVGNMDKGRRKSTP

SEQ ID NO: 65242 - protein, 116 aa, Zea mays
  Coding DNA Sequence Number=SeqID_21867
MAKGRGWLGDRGGLDERRAGHDHGRSDLGAREAAALHLGGEHEVDLRHMELLPRGDQQAGQTRSGAGARETSATDDALQERTQLDGSAESLPPPRVTRRMARRPPNADGRPKGVEF

SEQ ID NO: 65243 - protein, 76 aa, Zea mays
  Coding DNA Sequence Number=SeqID_21868
MATMGPNPHGKVLDPWTHSLGLRARFKTSTDTNQTPGTDIPDSVEGGSGGIVCNQGVVVSPSKLHGLIGGHEAVTG

SEQ ID NO: 65244 - protein, 194 aa, Zea mays
  Coding DNA Sequence Number=SeqID_21869
EFVFFVSNLPDGLALPISSFFVLPLEELGLHPQHFTPCFILQAAIVAYLCRMSAAPPAPPATTGHATPTPPGGSYKTSYAMEMTAARLQHDPTDVEPLGSRFQILGHPSQSGGACRLTVRNQAKRLHGSRPPQKTSQQAGFMRADLTGLAYTKVVTPGSAHFRHLEGRFCMDPSEDWTRGESRRVSGGRQALAP

SEQ ID NO: 65245 - protein, 188 aa, Zea mays
  Coding DNA Sequence Number=SeqID_21870
  Homolog annotation: Hit_ID=Q6Z6B4; Match level="QueryCoverage=87%, HitCoverage=42%, E-value=3e-48, Identity=55%"; Hit description =Putative uncharacterized protein P0622F08.21
MDILEGSIAIRDDELIKALVDVSFDPRWSDGSFKNGYTSVLEARLAEKLPDSRISATSHIDSRLRYFKTKYSALEQMLNKSGFTWDPTKKMIQCEKQEYETHCKNNPDAKGLYGVSFHYYDELSMVYSMDMAIGEGVEDMTDAVKNLEEELVHVNVNDEKDGEDMTFVETPRRFIDSTSSSSKKRKKD

SEQ ID NO: 65246 - protein, 75 aa, Zea mays
  Coding DNA Sequence Number=SeqID_21871
MDYDIGNFSPLYLPTPTVSWLGTHIKKEPPMTPAACARGQGSSDHLRRRPAHRRDRRDLPDVTDHPAEALLPPRT

SEQ ID NO: 65247 - protein, 134 aa, Zea mays
  Coding DNA Sequence Number=SeqID_21872
  Subcellular localization annotation: CTP_CleavageSite=35; ConfidenceScore=5.27e-01
MARAGGAVWWWAGSGSGLVGARPWIPPSQREAPSRARAVGARGREQFALRTGSFDSISGLPVVILAGCDWKKAVAGAAHVQQRFLVLFFCARTPVWCCSSDYCPPWPGAWAPCCAVFLFSGWCRGRLPRLRQRL

SEQ ID NO: 65248 - protein, 337 aa, Zea mays
  Coding DNA Sequence Number=SeqID_21873
MNWEMVQRLTRSTCSGGVPNSGEHDCAIPVARVLGSSSCKLHGLPGELSEGLDRAEEGGKRVGHSGCPRAALAGRGEVAGAMGELREFGAGQGMQRGRQPGSGTSFIAVARAWSRAAAGARGFAHGRALSAPPSVSPRRTRGSLLLPWFNGGFEHLSGVHRPHHTPARDVRCHACLPLSSPHAPRVGTANCSLPNCSLPRPANCSSRPRTANCSLPRAPTALALDGASLCDGGIHGRAPTNPDPEPAHHQTAPPALAIDGAARCDGGIRGRAPTNPAPARLGGEASNPSPLLGFTDSPQFCSPIRRSSAHLKGCTPQARKLATEPHETPKHCECPFS

SEQ ID NO: 65249 - protein, 162 aa, Zea mays
  Coding DNA Sequence Number=SeqID_21874
  Gene Ontology: Mol. function=acyl carrier activity; Cellular component=chloroplast; Biological process=fatty acid biosynthetic process
  Homolog annotation: Hit_ID=Q9FQY1; Match level="QueryCoverage=64%, HitCoverage=23%, E-value=2e-29, Identity=56%"; Hit description=Acyl -ACP thioesterase
  Pfam annotation: Domain name=Acyl-ACP_TE; Domain location=3-162; Score=-54.5; E_value=1.3e-06; Accession=PF01643.8; Description=Acyl -ACP thioesterase
MEQQNHLLSAKNTVKVMQHQQAAGEPTRQQELLSQLVFNNMCSFQEARNGPHIDNRGDTVEVNTWVSANGKNGMRRDWHIRDSMTGHTTLKATSKWVMMNKLTRKLARIPDEVQTDIEPYFVGRSAIVDEDNSKLPKLPEGQSTCAAKYVRTGLTMGCCIHL

SEQ ID NO: 65250 - protein, 98 aa, Zea mays
  Coding DNA Sequence Number=SeqID_21875
MRPASLEPPLSAGRGLRLSSLHPLSLAPRFPRAIVRGDSAQQEARAGLEAGESDPGGRYCYRPAIGRREWGDALAMASSRARARGDSEWRLLIGPRVL

SEQ ID NO: 65251 - protein, 323 aa, Zea mays
  Coding DNA Sequence Number=SeqID_21876
MARLRHTARKSVIPFLPSRLAECPLRRPVAGQSSHLERLHHRLHEEQERRRQEQQGSSFSLQQEVESVRSCSPVLPLEAPPAPSLGAPASGVAAGGDPDDGGGDDCSRATTPTSLLTMSRKDGLLDPSLATLLALNQHTWSIEYRCVVYQHSRGVYPDHWEATCLVRCPENSLQGAEACSEHYSISERDSAEAAMQDAARHALSHYCSVFGGVADGLDLKYYPHRPSGSTGGVIVSPVGEGNPRLSSTVNLAAVLNTELDHALDELSRARAEIALLRAERAERRHLDGGSPAPVGTQHPYRSPRRGHQSYGNPDCKTKINLEP

SEQ ID NO: 65252 - protein, 145 aa, Zea mays
  Coding DNA Sequence Number=SeqID_21877
MRRKNGGYPPSRGLEGGKTRCMREREDMVYFQGGHPPFKGDYPYLRPQPSRAESSPTRSKALPCGAGAGSRMSCKPAQSRRRQTAARGTGKRGYPEKDPSPGRNQAPSLPTDQRFEGWPPEGFDSRLRSRGPYTHYWSEVRRPAP

SEQ ID NO: 65253 - protein, 101 aa, Zea mays
  Coding DNA Sequence Number=SeqID_21878
MGKHVPSLLMLLLSRGGVPLDSPTRWQDGRPSHSSNHVLQRTCKNYATSKAEYTNTQLDLPVTALVPTITGMGDHVSGRVSGKVCGQVHSGTRLTDLPYFS

SEQ ID NO: 65254 - protein, 344 aa, Zea mays
  Coding DNA Sequence Number=SeqID_21879
MGRNLRPGPGPLSGRASPVLELALLGKIIQRGSERNANTVLTRDGDCSVNPVSQGHCTEIWPAERLRWKSWSWFPVPAISGATGGIFGFTFRRVKSKTTQGSPWPLCAPIFMWHTRNLRWRRMMRMKGPFGALPRMSSGRDLVEEFIGYGVWPLAHGWALGEVCPREMPSLGGQRVRSPAFVLDLRGRDPAAFVREAEDGVVRIVGRYVPRTEAQRSWDIRGSNARLNRVFELNCLSYGGYPGDDAVDRRGKRPVVVAEEDPSQEAALATKKRKLGTAVGELWGLRQFCRGVDGDVRSPRGKDVFARAPGVFGADAGGYRGSMAQECSDPPRGWRRLLYVSHGL

SEQ ID NO: 65255 - protein, 361 aa, Zea mays
  Coding DNA Sequence Number=SeqID_21880
  Subcellular localization annotation: CTP_CleavageSite=63; ConfidenceScore=5.21e-01
MRLGVPFIAPRQLGAVESKSGRPFLPSVVGLAHRTLSGAPPDSPLLVLPTIVTGFMSFASLVTCDGAVNALSREGCRHYEVFDQADENFEREIFKVEDRVVKQSAGALFDRMWGPHGREAVRERSDRAIEQVKAVFCVVICVGTSATPAPTAAGEGPAPAPAPMGEDALRVVVEPAAEPAAEDPIATAGPSQVLGFGPAHATATDNAIFVAASTVVADDDSFGSVSKCFESDDSGSSIAWTEESSNEDLDYFAALDVAAAETSPRVLGAEDLPVASTGCRRRRAMAKRRVSELSQSGRRHCGEMESGRLRVDGTSKRELLSSPAGASVGEGELRNLFEGEELRIMLFNYREMSIILKVEPM

SEQ ID NO: 65256 - protein, 70 aa, Zea mays
  Coding DNA Sequence Number=SeqID_21881
MASTLATRSCEYIERNKKSRKIAMKSHITTKLEAKLGINMSLVLGTRRAISLDHEIKCCINRYPISEQYE

SEQ ID NO: 65257 - protein, 354 aa, Zea mays
  Coding DNA Sequence Number=SeqID_21882
MEAEKTDLRRQLAEERREANKAIADAQAAQAEAKVARTEGSLARQRAEELEARFNALRSRVDKTEASTRVEVERTHAQFVDAYRELGGATGAPDHCDRFHVLRLPRHLRGGRECFVPRGCRHYEVFDQADKNFEREIFKVEDPMLKQSAGALFDRMWGPHDREAVRERSDRAIDQMAHAEDVEDLGGLDGALLEATEVDPALPSDAGEGPSTTPAPTAAGEDPAPAPAPTCEDASKAVAELATEDPVTAAEPSQVLTFGLAQATTTDNTNFAVETSISVPANDEVPGSVSECFESDGESGSSFLWTEESSDEGLDYFVVLDVAAAETSPRVVGAEDLPGASTGYRRRRAVAKRR

SEQ ID NO: 65258 - protein, 86 aa, Zea mays
  Coding DNA Sequence Number=SeqID_21883
MAHAMSRTGPRDNGYDDDYDDDAGDSATSNGVVRYDGGRSPLRGYGYGGRSPLHASAAGGGGAKDKYFAIALPKLCVFCLTPFFVC

SEQ ID NO: 65259 - protein, 124 aa, Zea mays
  Coding DNA Sequence Number=SeqID_21884
MELGLYLKADVITFAFCKGTDHLAGLMKADLTGLMRADLTGLMRADLARVTYPHVLPSYKKEEKLDLSDLLPWIELTGMRQGLGRGSPSAAVRWSPTPGSAFFRRLEGSFPAGGELAEPFSVQY

SEQ ID NO: 65260 - protein, 78 aa, Zea mays
  Coding DNA Sequence Number=SeqID_21885
  Homolog annotation: Hit_ID=Q2R3H1; Match level="QueryCoverage=64%, HitCoverage=68%, E-value=2e-07, Identity=56%"; Hit description =Putative uncharacterized protein
MAHAMSRAGPRDNDYDNYDDDAGDSATSNGVARYDGGRSPLRGYGYGGRSPLHYAAAGGGGAKDKYFGIALPKFWMFL

SEQ ID NO: 65261 - protein, 25 aa, Zea mays
  Coding DNA Sequence Number=SeqID_21886
MASGVDEVRACLRRGTTDSGADDDD

SEQ ID NO: 65262 - protein, 378 aa, Zea mays
  Coding DNA Sequence Number=SeqID_21887
  Homolog annotation: Hit_ID=Q2R3H0; Match level="QueryCoverage=91%, HitCoverage=44%, E-value=1e-124, Identity=63%"; Hit description =Expressed protein
MARLIPSVVVYLVRSEWCGLSCSESHSINRKLEMLKDENVNLLEKLGLAEEKLRQSEARTTELEKQVANLGNGLSMEVKLMKRREEMLVRKEQEIRKALISKNGKSEELTTLQQQLQEEVVMKRCWLARYWGLAVQYGIYPDISMSKHEYWSSLAPLPFEYVTSAGQRAKDGSEAEGNGLEDVDKLVHDLTVTAGEGNVETMLAVDKGLQELAFLKVEDAVLFALAQHHRTNVAGAADPDIKSSGDEKFTEAFDLSKEEEEDVQFKQAWLIFFWRRAKTNNVEEDIAEERLHMWIDRHGQQPTMLEAVATLNFEEATTVIAGRENQSGDDLYTLGIVLAVEQGIHELRKLGIEQLLWELSRHEANLAKDSPSDVEDLT

SEQ ID NO: 65263 - protein, 92 aa, Zea mays
  Coding DNA Sequence Number=SeqID_21888
MAVAPERAPRWTPSRWPQLHDLDARWRRGGASLPMSRDSLQARLARPVFTSEVNGQGLTTRLLPRVLITQMLEMVNCIRYTYRNQLIAQTTG

SEQ ID NO: 65264 - protein, 160 aa, Zea mays
  Coding DNA Sequence Number=SeqID_21889
  Homolog annotation: Hit_ID=O48967; Match level="QueryCoverage=69%, HitCoverage=23%, E-value=6e-33, Identity=68%"; Hit description =Putative uncharacterized protein
  Subcellular localization annotation: CTP_CleavageSite=34; ConfidenceScore=5.34e-01
MKQWRDDVDRLLVMAHSGSTRLRPRTSRCQHEASASVRSPSVRGAQTNNLRAELNRRRAGEDARVSLERARERRQNIEGRNLDQDFAAVTPQTLVGAPFQAVVPLAGVGCAPHSWIIFVPRLGHPNSGRTCRKCTTERETRRNSCRCTSPPSQQQAETPP

SEQ ID NO: 65265 - protein, 57 aa, Zea mays; identical to SEQ ID NO: 44635
  Coding DNA Sequence Number=SeqID_21890

SEQ ID NO: 65266 - protein, 235 aa, Zea mays
  Coding DNA Sequence Number=SeqID_21891
  Subcellular localization annotation: CTP_CleavageSite=66; ConfidenceScore=5.77e-01
MALGSAHLHGCARTSLLPISPSSSRPPAPSVQLVPSSLRLAKPPMSRPAPCCRELQLGFNPARPCPCRTSFSDPGVVVSVDHTGCAVEAWSSEICIRFIGVAWKPFDALATLKSIPFIDTSGEVSNIVYKNCLALPRETQTILRVEVLKSRLGLGTGDVLPRLIKDYRECRPADRGPFNWPHASSWVSFASGRPIPERPTRNGSGEMARVACTLRGKRLDGGVSVLSVGVNLFKS

SEQ ID NO: 65267 - protein, 183 aa, Zea mays
  Coding DNA Sequence Number=SeqID_21892
MTKRKRREMEGGKGKIGGSQARSSSCLCFSRTPASALAPAVSEVAQAEERHTQSRDRRGPRSLVAPTWGRARMPRRGLQASVTNQRWGRAQGLGARRRVACVHCRVAWTRRGRRRSMCPRKKGAPWDGRGARQSEKKQTSEGDGGEVAVDELGEVEETARKGSLRCTDMMGAGASGPRLHGFC

SEQ ID NO: 65268 - protein, 224 aa, Zea mays
  Coding DNA Sequence Number=SeqID_21893
MKRQWSHQSVVLPLLVAVFLLLTFRCSLRHAQQQASSLHADDAGTSYAVHAMLVELAAVDPAASAVLRAAEALLQANLTRAPPERRDAVVRGLHDWLGKQRFEPQVMAELVDLIKCPMDLYAAGARGGDGDAPPPYASCAVVGNSGVLLEPLGTFLMKLFLPPLGSHGGRAKVLLSKALKCRPLGGIRRNKSFYGAGTPPAPRLNAYMDGCRCPSPTALSALLT

SEQ ID NO: 65269 - protein, 161 aa, Zea mays
  Coding DNA Sequence Number=SeqID_21894
MELSEEQEPEGWIARLITRDATRGCHFHDALDTLLRQAFDRHTWSIEYRCVVYQHRHGLYPDQWEATCLAFSEHYSITERDTAEAAMQDTAQRALSQYCSLFSGVADGLAPKYYTHRSTGSAGGVIVSPVGEGNPRLNSIVNLVTMLNTELDHALDELGKF

SEQ ID NO: 65270 - protein, 70 aa, Zea mays
  Coding DNA Sequence Number=SeqID_21895
MTVFSTSPFPVSRGSIALAPSSPAGFRYGHDKQPVVPERVAEDLPEQHLCSGGDAGNLEDFEEFQDYDEF

SEQ ID NO: 65271 - protein, 401 aa, Zea mays
  Coding DNA Sequence Number=SeqID_21896
MMTTSSVVGRSKPGCGLCPTLSFKDLHHPRCGRGQAEPGFYLLHWPACCLFLQHSGERALIGLAEGAKFDDAGPIGRKRHQLQRAWLAGSAGSIAASDAASCRLIRAWPSVHRTGDCCVVRTGGSSKTSYAAWAAFVFLDCLVLTPARRLRTEVAAVVGAEVVVARGGFSADETIGATRGQTSGSLALMACLRLSSGDVGEGLLRAAFALRSSLLLFSRPRRRSLSLLMERSPASHPEFVVPQALWCRGCSYPREWNRSSVCNGTLSMGNLRLLCDELEPEAAVSVWTEAESARKEASPAQERVASQAEEVQRRRLGLGQVEILPPVLPSEAGPDSAEGGNDVEGATAPPANDLFVGSRIAYPSESYFSRKVMSEDYVIDIVVKARKSFWQKSFRALGLVR

SEQ ID NO: 65272 - protein, 488 aa, Zea mays
  Coding DNA Sequence Number=SeqID_21897
  Homolog annotation: Hit_ID=Q6J9V9; Match level="QueryCoverage=20%, HitCoverage=34%, E-value=6e-21, Identity=60%"; Hit description =Putative uncharacterized protein
MAEGRQPPRGRAPPTVARRRRRGCSPSGGSEGGRTRCMRGVRRHGYHPGDRSLFKGGSPHSHPQASRAKSSPTCSGVLPLRHGGWVPHVMQADPKRKKPNRRTRSVQPPRGYKHSSILAETSGRKGGPPCRWRATAPQWHTPFGFVASGMEAQAHTSCNRRAGYYMQETAPPLVPMPRLLDCGTGAATRGNPARGPTVPFEHNDHGSVSRVRRRDGTGKGDISKGILLRKGSGPRAHLLIRGSKVGPSEGFDNRPEHSGIKIITDQGGSKAGPSEWFDSRPRARRVRDDSGYVRYMAEARAMLPRSRPRLPRDAILPRPSPASGRNSSPRRIHASPEGLLKRRVHPRLARSPSWAGFVVKQPWPNRLTNRPYRRRIQCEDRLTPYPDTRASVGKGEADNSQVQPRVQQEAPPRPTLGLGLGRRSPPRPTSGLGLNLDLERWSPPRPTPGLGLNLGLGRNRVLTRPRPRSREKSSPRPTLGSDQPHHRG

SEQ ID NO: 65273 - protein, 24 aa, Zea mays
  Coding DNA Sequence Number=SeqID_21898
MGENGPKDGLSVTTETKIRLKRSS

SEQ ID NO: 65274 - protein, 163 aa, Zea mays
  Coding DNA Sequence Number=SeqID_21899
  Gene Ontology: Mol. function=structural constituent of ribosome; Cellular component=ribonucleoprotein complex; Biological process =translation
  Homolog annotation: Hit_ID=P19951; Match level="QueryCoverage=93%, HitCoverage=92%, E-value=6e-60, Identity=83%"; Hit description=40S ribosomal protein S14
  Pfam annotation: Domain name=Ribosomal_S11; Domain location=29-159; Score=229.9; E_value=5.8e-66; Accession=PF00411.10; Description =Ribosomal protein S11
MSGRKKTREPKEENVTLGPAVREGEHVFGVAHIFASFNDTFIHVTDLSGRETLVRITGGMKVKADRDESSPYAAMLASQDVAQRCKVLSYCGKLHLLSELGITALHIKLRATGGNKTKTPGPGAQSALRALARSGMKIGRIEDVTPVPTDSTRRKGGRRGRRL

SEQ ID NO: 65275 - protein, 114 aa, Zea mays
  Coding DNA Sequence Number=SeqID_21900
MPSSTPSTVAEEAPTAPAPAIEVDAGGASSSIPPPTLEETEVIFGRRLRSDAEPEVAPIPLPQVLSRAHQALHETEATIQREWEALEAEHQLLEVCFVAEGPIRRNTFGRLAQS

SEQ ID NO: 65276 - protein, 42 aa, Zea mays
  Coding DNA Sequence Number=SeqID_21901
MSPIHLEVTWMTKPKNTESKLSRQFEAQQMVMKLEYLAVEEF

SEQ ID NO: 65277 - protein, 117 aa, Zea mays
  Coding DNA Sequence Number=SeqID_21902
MAGLWCSRHGSVARHGGQHMTAGTARRGYAAGHVRGITTKQHNAEENENEEQRRELNGDEGLAEEEGLADVDVTTWMHSAIQEAGACKYIDEVVLQAVVNFVVARVTSDTCVKRATI

SEQ ID NO: 65278 - protein, 198 aa, Zea mays
  Coding DNA Sequence Number=SeqID_21903
  Homolog annotation: Hit_ID=A7BMX4; Match level="QueryCoverage=44%, HitCoverage=76%, E-value=5e-08, Identity=47%"; Hit description =Putative uncharacterized protein
  Subcellular localization annotation: CTP_CleavageSite=61; ConfidenceScore=5.02e-01
MCFIKNLLAELFILWHYAPPILRTTATSVPAVPGAASDFRLCRFNSLRISLLITCTFPFLRNSYSGQPSDIFITTSKGDSQAHKTPQPPHWLCTEYVRNNRLPETVIRAIHPALYRFIPDIARLSNFFDVYECDRDLLYDRDTRLSRDEPQRLAPDHELGNAPHVGVTALKHMQLLGPLALIHSRVHCLTHHNIHHKA

SEQ ID NO: 65279 - protein, 98 aa, Zea mays
  Coding DNA Sequence Number=SeqID_21904
  Homolog annotation: Hit_ID=Q6UUN3; Match level="QueryCoverage=68%, HitCoverage=6%, E-value=3e-08, Identity=44%"; Hit description =Putative gag-pol polyprotein
  Pfam annotation: Domain name=Retrotrans_gag; Domain location=6-89; Score=-1.3; E_value=0.071; Accession=PF03732.8; Description =Retrotransposon gag protein
MAEEPKIARRIWIWATSRYGRAPPQIGGRGHHIPVGIMDRKLNEFMALTQGNHTVLQYAQAFNDLCQYAGYHADTDEKKRDIFRWGLSTKLRERLNTV

SEQ ID NO: 65280 - protein, 254 aa, Zea mays
  Coding DNA Sequence Number=SeqID_21905
MGKENIEHHHEDQTGREETCHCGRSSPRPPVQPRGPVQKEVLSSGMKHGGAQGRRCGRDDSDFSSKLHLSWNNLGGSATICPFPAEKEDDPMWRDQVDHAKDMWAIYPGAIARLTIRCMSALYRLHDVKGTIIDREDPVVDLSTELVEKDLQTKQMVQERNHTIEVLENQLQNTQQQLEEANEHLDMHHQKMHHDMEADEDVDIEGEDPELASSLDTAIAARSGGHLLQSLALPRMPYRCHARSRCDRKQPSSG

SEQ ID NO: 65281 - protein, 91 aa, Zea mays
  Coding DNA Sequence Number=SeqID_21906
MDMGNTERKEMVLCIRAHMVVTTRTWELEKSLLDGSTYRSGMIPMSCNGIEICDSMHRLPLWAFWDDNALPNHNPLSVPTIFVASYSDWLE

SEQ ID NO: 65282 - protein, 279 aa, Zea mays
  Coding DNA Sequence Number=SeqID_21907
MAARPGRSLSCGSRARAMPSGRRSCVPKGAQEEGRQCAPLRGATLRARSVADHKDLDARHVVHLLHELAAVAARHVGDGDDMQCGLPHGGSVFHEESLRVHRVAQREATELEVDASICATIGTQGEPRDRGVPFIAPRQQGAVEAPFGRPLLPAIRGRTGLSDVHQTVNSTRTGHDKESPDWLVSASRGIRLSGARHRTVRCACRPLASADMATSHCAAGLSARQIALSLSRRSGTLLRLLPKSQRVCLIQRSYAQHYPAATYLASAVDRATDICFLEL

SEQ ID NO: 65283 - protein, 171 aa, Zea mays
  Coding DNA Sequence Number=SeqID_21908
MAAAYAVQTAESQRSRLGNVRATVQPMYFGRSACHWSGQVYISFAVNAEQWLAPVFLVTAPICPSPSDLQKRPTLPNWEIDKCNPITREEFVLMLPSGIRFGANLDRLSSIARLAQRVSNAWRRLFAATPNARELVLDGLGLGNTAADDGHRTCRGTRIQTSAIDYSSPCS

SEQ ID NO: 65284 - protein, 162 aa, Zea mays
  Coding DNA Sequence Number=SeqID_21909
  Pfam annotation: Domain name=PT; Domain location=115-142; Score=1.8; E_value=0.53; Accession=PF04886.3; Description=PT repeat
  Pfam annotation: Domain name=PT; Domain location=81-110; Score=6.1; E_ value=0.16; Accession=PF04886.3; Description=PT repeat
  Pfam module annotation: Pfam domain module=PT::PT; Domain location =115-142::81-110
MGTAQEKPLHSFKELRKGLGAVVGYLKTGYPEKDQRPPKYGPLTGRSTCQAARREGPKDLLVTTHQADWPACQTNTTEEHSEAGLPINLPTEQPSEAGLPTILSTEQPSEVGLLTNLPAEQPSEAGVPTNQPAEQPCKQHLALRGESSGLSTWTVRAWTYRQ

SEQ ID NO: 65285 - protein, 227 aa, Zea mays
  Coding DNA Sequence Number=SeqID_21910
  Subcellular localization annotation: CTP_CleavageSite=58; ConfidenceScore=5.04e-01
MDALAVGGYKRSRGRERDPYALARSPARPTFSYESPVPSFYRRRARREAPPRSRLSPSSEVEAEFRALGRARRRPSSEAEAESEPWVGRGGVPSSSVEVEPEPWGQARRRPSSEAEAVSEPWGRARRSPSSSVEVEPEPWGQARRRPSSEAEAVSEPWGRARRSPSSSVEVEPEPWGRARRSFLWRPRLDLAAVSLTLSSGTAVGATQAALFSCQVGQWSGEVTAVT

SEQ ID NO: 65286 - protein, 207 aa, Zea mays
  Coding DNA Sequence Number=SeqID_21911
MAPPVDVVGSCPGLDDVEAPPRSRSSLSSESEVESEPLGWARRRPLAEARAESEPWGGAKRSSSSSGAEPECEPRGAEPESEPWGRAKRSSSSSGAEPESEPWGRAKRSSSSSRAEPESEPWGRAKRSSSSSGAEPESEPWGRAKRSSSSSGAEPESEPWGWAERSFLMALEAGPGCLSASLCRVAQQSERRRRRCPLVRSVSGAAK

SEQ ID NO: 65287 - protein, 475 aa, Zea mays
  Coding DNA Sequence Number=SeqID_21912
  Gene Ontology: Mol. function=signal transducer activity; Cellular component=nuclear speck; Biological process=mRNA processing
  Homolog annotation: Hit_ID=Q6BTJ4; Match level="QueryCoverage=55%, HitCoverage=27%, E-value=3e-15, Identity=34%"; Hit description =Similar to CA1621|CaIFF6 Candida albicans CaIFF6 unknown function
MTASKKGTLGHFRDQRERSCNGIPSEGGIEPSDPVERGLGLADHPQRLGGCSRKPGSGQTVDSVNIPARELGTRPCTRATASSHEGTTRPAEALREALRPRRSQTTPPRPQGLHPAGALARTHRNKTQPRKAGPLAKKCDKSLQASVNPPFEARGLLSGTIIRGTLKTPNSQLVTPISTKLQRPDGRQSRSDRSHFAAPLTDLTRGQRRLRRSDCCATRQSEADKQPGPASGAIRKLRSARPQGSDSGSAPEDDELRFARPQGSDSGSAPEDDELRFARPQGSDLGSAPEDDELRFARPQGSDSGSAPENDELRFARPQGSDSGSAPEDDELRSARPQGSDSSSAPEDDELRSARPQGSDSGSAPEDDELRFARPQGSDSGSAPEDDELRFARPQGSDSALASANGLRLAQPRGSDSTSASEDRLDLNLRGASTSPNLGHGSTTSTGGAIITLPQADSGYGEQDRRPIWLAPLDK

SEQ ID NO: 65288 - protein, 66 aa, Zea mays
  Coding DNA Sequence Number=SeqID_21913
MASEVRVHLIEILGTRAPPRHAPALRRRANLCPLPCYQLDEQATEDLGVQQVETAEQELVEGKLCS

SEQ ID NO: 65289 - protein, 212 aa, Zea mays
  Coding DNA Sequence Number=SeqID_21914
  Subcellular localization annotation: CTP_CleavageSite=61; ConfidenceScore=5.52e-01
MSRKPVQSGRSQTTVRGAYNRPAVTSDSPLLSRPTGERGGQPCRRHATAPSGRASPTPNTPSMEAQAHASCNRRAKCFVHATAPPLAPLPCLLDCGTNTATRGDPARDPATPAWRDGTGKGDTPKRILPREGTRLRAPLLIRGSKAGPSEWFDSRLRSRGPYTHYWSEVRRPAPRKGSTAASGYSGSAPTTDQGFEGWPPKGSQPPQTPSEG

SEQ ID NO: 65290 - protein, 256 aa, Zea mays
  Coding DNA Sequence Number=SeqID_21915
  Subcellular localization annotation: CTP_CleavageSite=68; ConfidenceScore=5.59e-01
MSSRSLMHRVFPPSKPPDGGYPPSFRLVVGGTQLRGSWNLSAIVRLQGFSSCSPAAPLHRRSPKMVTSSLMVGESEPGCSLCPSLILKDFHHQGWGGDCSVPGSRTRVASEPFSAPAFATAAGRGSSADEIARAAHGPTSNSTAFCPSLPHEFGHGRGPLGSSIRPEVSAAAVRPPGAEVVIVTAAGAGDDSPVGCLYRFTKRESPRVKVTSESGDPRTASPSEARSDLAEGVVDAEGAAAPFSRQDPSLQDRIIL

SEQ ID NO: 65291 - protein, 180 aa, Zea mays
  Coding DNA Sequence Number=SeqID_21916
  Subcellular localization annotation: CTP_CleavageSite=37; ConfidenceScore=5.29e-01
MSGAPEDSNSNSSPSGNSRGSSAIIHRTVRYTPDSVRCSKEERPQELASFGNSFQLLRYNSPDCPVNNGLSGVTAGQRLLLAPTATCGALNARQRAQRSDTPMLAHWTLYSTCPVRHRTSRRAQKSELQRSEPNGFGDVAGAPDCPVAVGARSSRCLAVIPGQSGVHRTSPVEFIAEQLK

SEQ ID NO: 65292 - protein, 143 aa, Zea mays
  Coding DNA Sequence Number=SeqID_21917
MGTLGHFRDQRERSCNGIPSEGGIEPSDPVDRGPSPADHPQSKADRQSGPASGTIGSSAPPDPGLGLGLSPGRRRTPLRPTQGSDLGSAPEDGELRSARPRARTRAQPRKTTNFAPPDPGLGLGLSPGRRRTPLRPTQASALL

SEQ ID NO: 65293 - protein, 167 aa, Zea mays
  Coding DNA Sequence Number=SeqID_21918
MTTSPWMGRGKPGYVLGPALSFKDVHHPCWGGERGESGLYLPRGSASHLLFQLLVVETILQLCGGGVLQPCRGRRTVAAQLGCNIPPSSSLSWRGWPRPRGDRPSRLLEPDSWRRPWRRWPECDDEVVLQSGDPRTASPSEARPDLAEGVVDAEGAAAPFNRQDPSL

SEQ ID NO: 65294 - protein, 211 aa, Zea mays
  Coding DNA Sequence Number=SeqID_21919
MATSSLMVGESEPGCGLCPFLSLKDFHHQGWGGESAELGSAPAWARAWSSAASGFGAPCGVGVCHGSRKRFFRRRGGRDRPRVDLQLLRPSARPCLTSFGTGGGLLTAASTLRSALPLFGPPEQKSSSSPLLEQAGGSDISMNRGGVGSRMGNLVGRSLAVSPVSGADAQEPLDLGAARGWVGLCCRRRRCRGCYGSLRREDPSLQDQIIL

SEQ ID NO: 65295 - protein, 148 aa, Zea mays
  Coding DNA Sequence Number=SeqID_21920
MDSENEKLRKALATLLRVVQKRSCDIVDVVKSAFQPFNSPLVDELNRALVEIDDLAKDLEDVAVQTQWEVENMANSQVKKHPQQEEAVEDLLIEDGSEDDLLIDKESPINYEDLVGYDNGRDYSTDDTYPYYDADKTSLAASRFVKGN

SEQ ID NO: 65296 - protein, 436 aa, Zea mays
  Coding DNA Sequence Number=SeqID_21921
  Homolog annotation: Hit_ID=A2XP54; Match level="QueryCoverage=63%, HitCoverage=41%, E-value=1e-110, Identity=69%"; Hit description =Putative uncharacterized protein
MILSRLHVRVTRRSPASAALRDAATRALASAGLFRGLHGGASSEHGREPAGPLTLYRKLVSQGKLTHDSYQENVASELDNLLSRLQRYEMEMEDYHDKLYFWENSREKERRRLLVEEAEDKQRGGVWIDERRGFLDKLVARRRRGSIEPGVGKWVSYLNREKKLDTLVGHRPVAPVAPKGLYLYGNVGSGKTMLMDMFYGATEGVIKHRRRFHFHERRDDDKSIHSSAFSWISSLPFDTKIKEWLIGEEKYKQQTQEKHILLAVADKFLVDRQANKTGASILCFDEIQDGMQRDIFLELLSKLDESCNEILVGTEKDYRRLIPTEGSTEAISCPTRDGNGYPLPKTRWVFALLGYGFRSISLPMGLLMGSNGNPTAGMGNPLGTQNPHGLWFGQTFILVMDLILRKLPTMLIWYPMLKDNATYLVPNEDIPSGPVL

SEQ ID NO: 65297 - protein, 40 aa, Zea mays
  Coding DNA Sequence Number=SeqID_21922
MACGNILGFNGKKELRNLLLGGQDYQGTFQELASPGWGTF

SEQ ID NO: 65298 - protein, 379 aa, Zea mays
  Coding DNA Sequence Number=SeqID_21923
  Gene Ontology: Mol. function=DNA binding
  Homolog annotation: Hit_ID=A2Y662; Match level="QueryCoverage=81%, HitCoverage=89%, E-value=1e-123, Identity=72%"; Hit description =Putative uncharacterized protein
MDGLWHLGDELRGQPKVVEDRQWSLMTSKLAEITRSRGERTNDLDYARMNAAPDAKQWGKAASYQHHDEGRMDHHVGLSLKMNDLKMNEAAAAAVMKLPFRGVPYNVNPMYPKGSNANANVNAFKMNVGVNKYSSSTNGKDSGGKSGGGSNNNSGGGGNGNGTANGSSAVDKRFKTLPTSEMLPKNEVLGGYIFVCNNDTMQEDLKRQLFGLPARYRDSVRAITPGLPLFLYNYTTHQLHGVFEAASFGGSNIDPTAWEDKKCKGESRFPAQVRIRVRKLCKPLEEDSFRPVLHHYDGPKFRLELSIAEPQDLDGFRQVHQPDRLGMDGEWLHLFNRCRSVTGQVLADLVQLLAGESKVLAALKSTRGPSRCSSNNAFV

SEQ ID NO: 65299 - protein, 246 aa, Zea mays
  Coding DNA Sequence Number=SeqID_21924
MELLSKSYLTKEKTLKGVLVIRESRRRHYTETPFSCKSPARSQLNHFNPKTWYLAEGFKEGNQVQGSKQARKILKTSRKVSNAPGFAFVDRIYLALEEKEKEKENQQQFWAGFSPDSPSPRRNVTDNLHRDPSNSIPLHDKVLDGASHGKLNSGELDWPEGAKTGASLRFTPDSTPEKYFPSLNFRIGALPYPVHEDSAENLRNNVFPATRGSLVQLDDLVSIVDTREYLNREEDGMNGPERCWPR

SEQ ID NO: 65300 - protein, 91 aa, Zea mays
  Coding DNA Sequence Number=SeqID_21925
MARPRRRAQHENSLITESEELAGEDPEQQLVAMRMVVLVLTMVMVGVHTVGIKCARPEVLRIWLRAGWPWTSPEMPSGEAEMRFLSKGVLG

SEQ ID NO: 65301 - protein, 199 aa, Zea mays
  Coding DNA Sequence Number=SeqID_21926
MQYKESSSLISCEKQTIRIEFLNLARPHRLGIQCSTDPDCRRAVAALVPTIASMGDPVSGRMRDKVRARLHSVAAAKKRAEGLTCGETVPVKWPKVKGRSRGSQRRSRDARERHERRNRAETHWIARSTRGGRKTEVRVRVDLGASGESPIGSEGLGKVHGLLAIYPNAVWSGRRLERAGLCRVLVAAVASECVASSVT

SEQ ID NO: 65302 - protein, 219 aa, Zea mays
  Coding DNA Sequence Number=SeqID_21927
  Subcellular localization annotation: CTP_CleavageSite=38; ConfidenceScore=5.05e-01
MAHAYAYKAPRDFDRTPPHALDLTGAQTRRRLPVHGVSAAARSPCHHRPANRTLPNPVRPSEKTEHTSVKLPERGIGVCFAGEASQRPPDSARLPASVDRHPPPTRTPACARGPNDSGHPRHRPIHRCDRQDLPEPTPPLTELLSPPEVAPDPAPEPAPEDLPATALEGKPRNPFEMNTSMLGRGSLEDMVAGVTWPSILPPGWTVEWDPASAEEEHEE

SEQ ID NO: 65303 - protein, 107 aa, Zea mays
  Coding DNA Sequence Number=SeqID_21928
MAHEIIKKSEKDTHDARAEARRAEETADREKCIGTTFELLHRLFFGVHRLFFGVRNMLAAVLVVVEADAKKPVNGLLKQQRLQVDCPRILNSDLAHSCSVALVFTTE

SEQ ID NO: 65304 - protein, 113 aa, Zea mays
  Coding DNA Sequence Number=SeqID_21929
  Subcellular localization annotation: CTP_CleavageSite=59; ConfidenceScore=5.05e-01
MARARAYKAPRDFDRTPPHALDLTGAQTRRRLLVHGVSTAARSPCHRRLANITLPNPVRPSEKTEHTSVKLPERGIGVCFAREASPRLPDSARPPASVDRPLRHPVKLTVPLV

SEQ ID NO: 65305 - protein, 156 aa, Zea mays
  Coding DNA Sequence Number=SeqID_21930
MTSHGSSNEGNALSHIDGLAREGFPRILWEVLQGAGYTTPPQYTVQQFEKHRVPRCRRWWKRTYRWKQLSNEIQELEELVGTRENTIEVLEDQLINTQQQLAEANEHLDMHHQEIQDMEANEDIDIEGGEEPTSSLDTAGSGRPPSPESSVASFAH

SEQ ID NO: 65306 - protein, 137 aa, Zea mays
  Coding DNA Sequence Number=SeqID_21931
MGTLEVALGAGKRSLTGPRARFVRFGRSEEGRTGGRCKEPRVRRALSSLEHARRTPLRAPRRAKAKLAPLHAPAPIKQPGTSTVPLRARSTSPEPETTGVCPMHGVPAATRALATVDRPPEPFPATLDPWKRLCMPR

SEQ ID NO: 65307 - protein, 379 aa, Zea mays
  Coding DNA Sequence Number=SeqID_21932
  Gene Ontology: Mol. function=oxidoreductase activity; Cellular component=cytoplasm; Biological process=flavonoid biosynthetic process
  Homolog annotation: Hit_ID=Q33BE8; Match level="QueryCoverage=84%, HitCoverage=95%, E-value=1e-123, Identity=67%"; Hit description=NADH- dependent oxidoreductase 2, putative, expressed
  Pfam annotation: Domain name=Aldo_ket_red; Domain location=25-318; Score=353.8; E_value=2.9e-103; Accession=PF00248.12; Description =Aldoketo reductase family
  Subcellular localization annotation: CTP_CleavageSite=40; ConfidenceScore=5.49e-01
MAAGGADQRGNNAATTTFVVPAVALSLGKPMPRVGFGTATATLGQAEGRAGVTEAILRALDAGYRHFDTAAVYNTEASLGDAVVEAVRAGTVASRDDLYVTSKLWITDAHPGRVLPALHRTLQNLQMSYVDLFLIHHPVSMRAPADDEAEGAGPAVVVKKDLVAMDMEGVWEEMEECHRRGLARAIGVSNFSCKKLEHLLSVAKIPPAVNQVEVNPYCRQEKVRNFCRANGIQLCGYSAMGASGTAWANNSVMDSPVLKQIAHARGKTVAQVCIRWVYEQGDCVIVKSFNQSRMRENLHIFDWELTDDDHRKISELPESRGNYDFLIHESGPYKTAQELWDGAILNPYHNTSGFGSFLNNNLAINNQVPAIIDLYIYGF

SEQ ID NO: 65308 - protein, 289 aa, Zea mays
  Coding DNA Sequence Number=SeqID_21933
MKLPKPSESVELHRRPRIPLVGLLPFTDECGPDDFTHPRNGGDTRFSSNFLSHEGFPSILREVLNSTGYPTPPLYIVQLYEEHRVPRCRVWLTLEAHPLQPGWRSLDSKTIGSRADDTTEAATMKTLTTFCGYHPLEMVMHPLGLFPAEKRDDPMWCNRVSHVKDKDLQVEQLSQRIATLEQQVEIWDNTIDVLENQLHDVQEELEEANDHLDMHHLEMEANEAESKGEEAPEELGPAPVLMRLPPRCPRRPYPVSLLLLRVDGASPTLSSMVEASRSDLWPQQPIRSS

SEQ ID NO: 65309 - protein, 88 aa, Zea mays
  Coding DNA Sequence Number=SeqID_21934
MAECSGGLAGGAELAGAKDGVRTVGAGVERKLNHLVKVKKLQSRSYGDAELKYHLVKDKGKNTISSTAVILKQDKEGAILLLRQQYSL

SEQ ID NO: 65310 - protein, 74 aa, Zea mays
  Coding DNA Sequence Number=SeqID_21935
MKKRPIELQRKQGELKKLQSEKGRNFLSLELYDPKADPALRGILDEFKVVNAAIDEAVDKLLNEAAGRVLKEDD

SEQ ID NO: 65311 - protein, 165 aa, Zea mays
  Coding DNA Sequence Number=SeqID_21936
  Homolog annotation: Hit_ID=Q7XBD4; Match level="QueryCoverage=66%, HitCoverage=11%, E-value=1e-17, Identity=40%"; Hit description =Cinful1 polyprotein
MMDKQTKKFSRLEKEKEADAKRIIDLEYALSAQVELHKSEVARLEKNLDEVTENFNVEKAKREISDAERIRIQKNIQELRQAKEECFSAAMQCSNKLKSTFAKVGVFLIEQNFICGDSEGVIKWIEGEVEYFDEILTKEEIYVPVLVPEGPCRYLKKLAVNTPRL

SEQ ID NO: 65312 - protein, 64 aa, Zea mays
  Coding DNA Sequence Number=SeqID_21937
MSHRGLVNPKLVHPTESFGKRVHSLASESPDKNAEPNDSVRSQLMKINFEIFLNIPNRFMQRKP

SEQ ID NO: 65313 - protein, 101 aa, Zea mays
  Coding DNA Sequence Number=SeqID_21938
MGRGKRGKGWPRRADGKRKRPLSPPSEDVRDSEYSEQWRSIERPGLGGSDDSEEASTEEVEDSSNFEEWSGGEGDHVQSLACERPGYRNSLQLLGKQMLLF

SEQ ID NO: 65314 - protein, 63 aa, Zea mays
  Coding DNA Sequence Number=SeqID_21939
MMLQVGWDVFKNKIGWWIHHGRDGFNIDKDVPLTGSTISKHFRKQSFDSCSKPYLDSLQSTYP

SEQ ID NO: 65315 - protein, 482 aa, Zea mays
  Coding DNA Sequence Number=SeqID_21940
  Subcellular localization annotation: CTP_CleavageSite=78; ConfidenceScore=5.12e-01
MDYSAPAGSRWKLAPGSLTSGYDHLYSERPACGSGHLSTNGSPATAATFAPVACRQGRPSQRVRRGPRPRPPMGVRTRPSKNASATSMAYDVLYDPSGGVGAVRPAMQWTPWMWRICARRERRPCGGRTTTPHLSAGGSIGGGTKAIKAKEMEPQHGSLPTPKSWGAQGMEPWLSPLSTFTRLVIILPPECWRKKREGASPPQTSRGEKSHRCSRQYRASSGPSQKTEKINFQNQCSDSRHPAHGPTKTLSAEVTGQSTVGTGVAVGVTMGGPAVIASTGAQGQRANRQSDFGPTCRLVSSPEVGPGAIVERTRRLSTLLTGDVPPQHLMRPIHSAGRRHQGHPTDGAPVQSIVKQCARAARRAVLTIPYTRTISFTPMLRRSQTSGRKKIAPAANISSSKYSICYVPGPTCRGSVPLYMPPLTIKGEACSVTRGGSFGPSLDVDSKRSSFHNNPTHSGVGYYAPAARTTLNSRVFMCSVIA

SEQ ID NO: 65316 - protein, 157 aa, Zea mays
  Coding DNA Sequence Number=SeqID_21941
  Homolog annotation: Hit_ID=O48967; Match level="QueryCoverage=22%, HitCoverage=7%, E-value=3e-08, Identity=77%"; Hit description =Putative uncharacterized protein
MYQLDRTSAREHRTPVRTTRTLDYGPGLPSKRDGSLGWGPDPSDMMVQIVEHHAETSTSFLVEEEVVSSTPQVPNRPSAGHCCCARCTTAYNCADIPDSVEGGSGSIVSSQGVAPSPSKLHGLTRGHEAVAGRRRPNARHGTFYLDQVEATVIPAPT

SEQ ID NO: 65317 - protein, 145 aa, Zea mays
  Coding DNA Sequence Number=SeqID_21942
  Homolog annotation: Hit_ID=A3BA71; Match level="QueryCoverage=92%, HitCoverage=32%, E-value=9e-22, Identity=46%"; Hit description =Putative uncharacterized protein
MYEMNAKIRQFQQMVSLELAEYNHCELPSTDERNFKIAQFGVVFVLMNIICVVKLCEHVKDKSKTVDSEGISEELSDKVSNIEAEVQLLEEEYKKDLLYHDKVRQELAEVQAKRALMEAVMEETKQLQELGEYPEHTELSVPMHF

SEQ ID NO: 65318 - protein, 273 aa, Zea mays
  Coding DNA Sequence Number=SeqID_21943
  Subcellular localization annotation: CTP_CleavageSite=59; ConfidenceScore=5.26e-01
MHEGSAKTWLPFKGVTLLLKATLPTCVLSRRGLSLLQHAPRSSPTTWGLGPTRHASWPRAEEAKPPHAVRATAQRLRAFLHFRPDQRVKGRTTMQAAYNRTKGAHPFDFNASSMEAQAHTSCNRRAGCYVQETVPPLAPLPCILDCGTSTTTRGNPAHDPTVPTRHIGHGDRERGYPERDPSPRRKRAPRPLLIRGSKAGPSEGFNSRLRALGLRAHYWSEVRRPAPQKGSTAASGHSGSAPTTDQGFVGWPSKGSTAASDAERGMALGTFDT

SEQ ID NO: 65319 - protein, 162 aa, Zea mays
  Coding DNA Sequence Number=SeqID_21944
  Homolog annotation: Hit_ID=Q654G8; Match level="QueryCoverage=99%, HitCoverage=23%, E-value=4e-53, Identity=65%"; Hit description =Putative uncharacterized protein P0412C04.14-1
YYNTIQLLEAIALHLDSVNGKSCIWEELVSCFLRLFSDNTADYEDCISCTNTHGGESLEASSKFSSVFFEQFTRESWKARCRWWARHHFSQNAYTSEAQSGDCKLLAAKAACAAHLFGPEFPYVKAVGVYIAKQEALDEISVLVRNKQNSVRLLQTLEKLTR

SEQ ID NO: 65320 - protein, 118 aa, Zea mays
  Coding DNA Sequence Number=SeqID_21945
  Homolog annotation: Hit_ID=A3BA70; Match level="QueryCoverage=89%, HitCoverage=15%, E-value=2e-32, Identity=66%"; Hit description =Putative uncharacterized protein
MSHSIICTEGLEQSLLPLKLKFATGASNDCFDKYMKYKSVPNTLYEDAEKCLRLALYSNPPVMAALLPLIQILLLGDKLKVALNELEKACLSLATALPFRLRGRLLEEYDQNQYYLDS

SEQ ID NO: 65321 - protein, 190 aa, Zea mays
  Coding DNA Sequence Number=SeqID_21946
  Subcellular localization annotation: CTP_CleavageSite=22; ConfidenceScore=5.01e-01
MSRSSCIHRALPPSEPLDGVRRCSLEGSASGSPPLTISPPESSRSRWCFRSCLLAAVRGAQPRGGWRSSAIARLQGFSSCSPAATSRQWSSRGMTTSLVVERSEPGCGLPPALSFKDVYHPRWGGGRAELGSCLPHGLATRFFLQHSGEKGVHRPCEGGKLQLRGVGIFGLKSGITVDQNNTKVGEAPKV

SEQ ID NO: 65322 - protein, 554 aa, Zea mays
  Coding DNA Sequence Number=SeqID_21947
MGPRDRQGAARKTPGDCEGFTKLGRKGSGERRRLRPPGGGKPPLPAKVGASAPGKAPEVTVGAGGPKLAKVVPSVSGVAEAAKAARTLPPPGKRVADFGTEINVEDYLGGSDEGPLALVVPGAAIATAAPAPKAGGETLGAGGEVSALALVRDEAGVATRRLRGATEALSRATEALSQVRRAMPSPPPPPFFLRNGLTCVLRVADFTSRTVSGALTAAFSAEVERLRTQHADAVREKSASDSKCRKLAEKVAALEKEKADLRRQLAGERREANEAIAKEQAAQAEARLARAEGNIAKELAGELQRRLTALESRAEGAEAAMRTEAERTRTQLMTAYRELGVRTGDFEVPEREAGLRCLEWVQEELQELPTVLAGLMAFTSLVTCEAAMNALSREGCRHFEALDQADEDFGRDIFEVEDPVVKESAGALYDRMWGSYGCEVVRARAEAARAQAERGERVDDFGALNSALPDPEATPAEAATGVAPGPTPETAEDAPGAPAPAAAGEDLPPKVAEGAPDAPAAAVPSAEDPAEVGAEAAAEASAEAPAAAGPSQVA

SEQ ID NO: 65323 - protein, 230 aa, Zea mays
  Coding DNA Sequence Number=SeqID_21948
MATEGLGEVVCECDEVVEAAVHGMAALVGATYAGDEVGDIAGRRSGDERGDDRLGFSGSKTRADLGNVEAMTRADLKNVEEGEEAEHKEETASVEAARSQPLKYVATSTARRSKEMTTRALMKWRPPHRLRTSVLPTATLCLAAPASATVAEASEARHPAVGARLEEQQPHGLVGVLGRPRWRTTRATERPYRRRQRLEIWRPVARKDWSEGFLGDLSETGNANQVRMRE

SEQ ID NO: 65324 - protein, 458 aa, Zea mays
  Coding DNA Sequence Number=SeqID_21949
  Gene Ontology: Cellular component=chloroplast thylakoid membrane
  Homolog annotation: Hit_ID=Q10A81; Match level="QueryCoverage=49%, HitCoverage=26%, E-value=6e-71, Identity=59%"; Hit description =Expressed protein
MSGGEQRTREITRGSHGDGMSRPAMTTAWAGLPDSGQEWFVLVDAGLIPAPVLIPSIPNPLPSVVRHMLLGGEDWLVLSMLLVASVVFHNKAQNGKLVVNYKLCVPRRVYLYFRFGFISEGVLDTEELAIVNSTFRKAQGSRLPGIIEETRRSGESTTSTLESETWAMESLETELFDNACASIQRSLGKPDKLSGRPVAASTPPKATANAPRVAVWSHFSFVLFHILHTFKNILVRGRAAVESEMEVLLKLRSEVEEQLQNVLSKKVEVSFEKSRIENLQKEFESDNSAVVQLQAWAEEEAKKAREHARALEEARNQWERQGIRVVVEGELKDDASAGVTWANAGKEHAVDESINRAEALLEKLQTMSGEMEVRSQGAVERVMQHVRSFIAILKQQAADARQWCTEFGACAASRANEVSAQVKGSISAFGATLGDKSKRAMEECKDGLERISHRFKTD

SEQ ID NO: 65325 - protein, 145 aa, Zea mays
  Coding DNA Sequence Number=SeqID_21950
MGKKRKREPTPPSEDFGDSEYSEEEFSSESEGSPAPIPLRESSDDSDDSQGLAVEVWTYIRVVERSGLAGSDESEYSSDEEDSTEEDGGGGGGGGGEGDDDDDDDDDDGGGGDDDGDGGDGGSRGGNGNSRGGSSSSRGGNKASG

SEQ ID NO: 65326 - protein, 58 aa, Zea mays
  Coding DNA Sequence Number=SeqID_21951
  Subcellular localization annotation: CTP_CleavageSite=37; ConfidenceScore=5.09e-01
MEWNSRAGTQAQPGRWGLGPGQRTGTPRRVACPVVLRAAAAACPLAHHSPVTPRLALR

SEQ ID NO: 65327 - protein, 213 aa, Zea mays
  Coding DNA Sequence Number=SeqID_21952
  Homolog annotation: Hit_ID=Q6J9V9; Match level="QueryCoverage=49%, HitCoverage=46%, E-value=1e-37, Identity=64%"; Hit description =Putative uncharacterized protein
MARDRERDIAKRILPSEGNGPRALLLIRGSKAGPSEGFDSRPRARRVRDDPGYIRYMVEARATLPRYPRTFPRPAGTICNGIPLEGGTEPSDPIEWVQRCSPRSGNYASHQGKTDNSKSRPPRVQPRAQQGAPPRPTLGLGLSLGLGRRTLPRPTLGLSLNLGLGRRSPPRPTLGLDLSLGLGGVAALPDLGPGSRHFSDGHVGTSTGLKALL

SEQ ID NO: 65328 - protein, 140 aa, Zea mays
  Coding DNA Sequence Number=SeqID_21953
MRIRLRMMKMKIKRMSHLKNRPMIKGEMKTMKTRKMSKKYRVKDRHTQESIKRFKEITPSTLFLVTFIRVVEDALRDPDWVLAMQEELNNFTRNEDGKPIKTPMGTIRYLDLDMGDRILCFPYACVQGSKPILRKFTLGP

SEQ ID NO: 65329 - protein, 59 aa, Zea mays
  Coding DNA Sequence Number=SeqID_21954
MVSNHHFFWESMQPEGGGLPEGGKSLFVQPYNYWGLVGFGLLNFEHHDFTKNEVQYQSG

SEQ ID NO: 65330 - protein, 205 aa, Zea mays
  Coding DNA Sequence Number=SeqID_21955
  Subcellular localization annotation: CTP_CleavageSite=62; ConfidenceScore=5.24e-01
MGKNRLNRFSNRLNRFLPGGSRSTGLLSRTLDRFQNRLSRDKNWLNRTKKRERIASPRITIEEEEDEERRSDAPGQRQSVPLQTGPEEEHCPKGPGAEDRRTIDPDPRDTRAGQTAPDHQTVEKGTPYACWYHSLTSGGGGWRAIFRHMEKKAASPWAKRAPHPHGHDLDHDHDHVVWEIRGQRKGARHRQQQQVPGPAKGPAEV

SEQ ID NO: 65331 - protein, 39 aa, Zea mays
  Coding DNA Sequence Number=SeqID_21956
MTKQKRLVLKKRHKQGSAPLSSNQKPHRSTKDESKACSS

SEQ ID NO: 65332 - protein, 117 aa, Zea mays
  Coding DNA Sequence Number=SeqID_21957
  Homolog annotation: Hit_ID=A5B939; Match level="QueryCoverage=37%, HitCoverage=28%, E-value=1e-07, Identity=63%"; Hit description =Putative uncharacterized protein
MALKRATPHPAIWGERHAPMSRKGAAAAAKTRGASPGGAAVGADLGGSSKYSNENFEGRRGERFHVNGTCTWPEVGSSGRKSTAHRAVSGAPPAALENPEDRIPSTPGRTHNRIRSP

SEQ ID NO: 65333 - protein, 262 aa, Zea mays
  Coding DNA Sequence Number=SeqID_21958
  Homolog annotation: Hit_ID=Q652R5; Match level="QueryCoverage=31%, HitCoverage=33%, E-value=3e-17, Identity=57%"; Hit description =Putative uncharacterized protein P0603C10.50
  Subcellular localization annotation: CTP_CleavageSite=15; ConfidenceScore=5.19e-01
RAPTRTLHRRSGSASGAAREGLPLVSFLAHLRPLRRSAPRGAPEARGYRPRRRRLPGAPRAPGLWPPARATTVHAPSRSADQQEPFRIRPVRVASPHPLPSRQFQALFDSLFKVLFIFPSRYLFAIGLSPVFSLGRSLPPDLGCIPKQPDSLTAPRGATGSGPDGALTLPGVPFQRTWARSVAEDASPDYNSGGEAARFSSWAAPGPNVRPRAVTLHREQLDVAHHVLRPAWFAGRRALRQKASGATCVQKLDGSRDSAIHT

SEQ ID NO: 65334 - protein, 95 aa, Zea mays
  Coding DNA Sequence Number=SeqID_21959
MANGPKTDFWPRPRKRARGRAQDPPVVTPRETWKFGSTREGKRNSPKSWEGVCPSGIVGGRELVQPKPGRNAAETIAFPASPPGLLGRAPHPLAA

SEQ ID NO: 65335 - protein, 213 aa, Zea mays
  Coding DNA Sequence Number=SeqID_21960
  Homolog annotation: Hit_ID=Q6Z8F1; Match level="QueryCoverage=68%, HitCoverage=93%, E-value=2e-11, Identity=37%"; Hit description =Putative uncharacterized protein P0459B01.16
  Subcellular localization annotation: CTP_CleavageSite=76; ConfidenceScore=5.09e-01
MANGPKTDFWPRPRKRARGRAQDPPVVTPRETWKFGSTREGKRNSPKSWEGVSSAEPRTPSRPSRGRVGTLPRPAPAGAVGCLAGREVLACCYPSHGKPCSIHVAFVELTPPGVRLVGLESARGVCLVPPSAYGPAAPRTPRWRFWSRMWLTLKAGDALASRAQESVRPNERRPARHDASARRPALARLRGRATWLILPVVICLSQRLSHACA

SEQ ID NO: 65336 - protein, 114 aa, Zea mays
  Coding DNA Sequence Number=SeqID_21961
  Homolog annotation: Hit_ID=A5B939; Match level="QueryCoverage=67%, HitCoverage=48%, E-value=5e-15, Identity=57%"; Hit description =Putative uncharacterized protein
GTWRQTATLGSPETPGGGLGKELSFLLNGPPTLESVQPEVGSSGRKSTAHRAVSGAPPAALENPEDRIPSTPGRTHNRIRSPSALNVKVKKFNQARVNGGSNYDSLKVAKCLVI

SEQ ID NO: 65337 - protein, 160 aa, Zea mays
  Coding DNA Sequence Number=SeqID_21962
  Subcellular localization annotation: CTP_CleavageSite=77; ConfidenceScore=5.24e-01
MANGPKTDFWPRPRKRARGRAHDPPVVTPRETWKFGSTRRTPRSPGRGYAPQVSSAEPRTPSRPSRGRSGTLPRPAPAGAVGCLAGPWFGRDAATTGYGWLPPARRPGRVAAPWDGPLLDAFSVSPALGGPSVAVLASRPAAPSAEGCFGWPDRSGYAGA

SEQ ID NO: 65338 - protein, 234 aa, Zea mays
  Coding DNA Sequence Number=SeqID_21963
  Homolog annotation: Hit_ID=Q0WWS3; Match level="QueryCoverage=17%, HitCoverage=50%, E-value=3e-16, Identity=95%"; Hit description =Putative uncharacterized protein
MKNVAKCDTWCELQNPANHRVFERKLRPKPSGGGHVCLGVMPKDTPNTPPRGEGRGVWPPAPQGEVGRSRGCRRTAPGAARGGRHQVVLGAASRRAAGHSALRTHRATELALGPRPQPKSGGKTPSKAKYRRETDSEQVPRGKDEKDFEKRVKECLKLPGGKRMGAGDAHRPYAERLLLVRRSARGVDRCRPRRRPKPGGPRRPRQPSSARTKPEMRKEADEREALTGRTAGRP

SEQ ID NO: 65339 - protein, 52 aa, Zea mays
  Coding DNA Sequence Number=SeqID_21964
MAQGRKPRFGHGPGNKLSPSVWKDTEGQGGTEGKREEARGDGRQGCSALRLG

SEQ ID NO: 65340 - protein, 71 aa, Zea mays
  Coding DNA Sequence Number=SeqID_21965
MAVRPCVWAENEGFAHGAGAENRGHGGTEGKRHGGARRRAAWLFGLASGPKMRGSPMAHGPKTEARARPRK

SEQ ID NO: 65341 - protein, 185 aa, Zea mays
  Coding DNA Sequence Number=SeqID_21966
  Homolog annotation: Hit_ID=Q0WWS3; Match level="QueryCoverage=15%, HitCoverage=36%, E-value=1e-08, Identity=86%"; Hit description =Putative uncharacterized protein
MKNVAKCDTWCELQNPANHRVFERKIAPEAFWRRARLPGRHAKRHSQHPPRGARERGVWPPAPQGEVGRKQGLSANRAGRSTWWATSSCSRCSVTARGRTFGPKDPSSDRACPRTATPGFELEHACRDPKDGELCLSGAKPEETLVEARSDTDDSWSPHEFYWVKPMIRGIGGATPSTYSQTLNR

SEQ ID NO: 65342 - protein, 260 aa, Zea mays
  Coding DNA Sequence Number=SeqID_21967
  Homolog annotation: Hit_ID=Q0WWS3; Match level="QueryCoverage=15%, HitCoverage=51%, E-value=8e-17, Identity=95%"; Hit description =Putative uncharacterized protein
MKNVAKCDTWCELQNPANHRVFERKLRPKPSGGGHVCLGVTPKDTPNTPPRGEGRGVWPPAPQGEVGRSRGCRRTAPGAARGGRHQVVLGAASRRAAGHSALRTHRATELALGPRPQPKSGGKLRPRLNTGERQIANKYREGKMKRTLKRESKSALKLPGGKRMGAGDAHRAVCGTAPAAVVGADGIRAPLAPPRGRCAATACELPIRPVFETRTKESDMRANSTGFELEHACRDPKDGELCLSGAKPEETLVEARSDTD

SEQ ID NO: 65343 - protein, 124 aa, Zea mays
  Coding DNA Sequence Number=SeqID_21968
  Subcellular localization annotation: CTP_CleavageSite=19; ConfidenceScore=5.11e-01
GRRWGPKARGLPGRNPPPGASPVVGRTFKPKSGGKLRPRLNTGERPIANKYREGKDEKDFEKRVKECLKLPGGKRMGAGDAHRPYAERLLLVRRSARGVDRCRPRRRPKPGGPRRPRQPSSART

SEQ ID NO: 65344 - protein, 237 aa, Zea mays
  Coding DNA Sequence Number=SeqID_21969
  Homolog annotation: Hit_ID=Q652R5; Match level="QueryCoverage=55%, HitCoverage=51%, E-value=6e-24, Identity=50%"; Hit description =Putative uncharacterized protein P0603C10.50
MSDSLVRVSRRVGWGARRPLRRSAPRGAPEARGYRPRRRRLPGAPRAPGLWPPARATTVHAPSRSADQQEPFHIRPVRVASPHPLPSRQFQALFDSLFKVLFIFPSRYLFAIGLSPVFSLGRSLPPDLGCIPKQPDSLTAPRGATGSGPDGALTLPGVPFQRTWARSVAEDASPDYNSGGEAARFSSWAAPGSLAVTRGILITNIPSVLREGEKYERDAKSKCQVSVSSTGVLFIYL

SEQ ID NO: 65345 - protein, 147 aa, Zea mays
  Coding DNA Sequence Number=SeqID_21970
  Subcellular localization annotation: CTP_CleavageSite=61; ConfidenceScore=5.08e-01
MANGPKTDFWPRPRKRARGRAQDPPVVTPRETWKFGSTRPPLPCGRLPAPVSHRSCGHPVPAALRSACVLLPVPREAVLDTRCLRRAHPPGVRLVGSRAPAAFASCRRRPMAGGTEDTSLALLVSDVAHAEGRRRVGVTRPRIGPPE

SEQ ID NO: 65346 - protein, 196 aa, Zea mays
  Coding DNA Sequence Number=SeqID_21971
  Homolog annotation: Hit_ID=Q0WWS3; Match level="QueryCoverage=20%, HitCoverage=51%, E-value=5e-17, Identity=95%"; Hit description =Putative uncharacterized protein
MKNVAKCDTWCELQNPANHRVFERKLRPKPSGGGHVCLGVTPKDTPNTPPRGEGRGVWPPAPQGEVGRSRGCRRTAPGAAREASSATDRAQVLWKGTPGRVRAPSGPDPVAPRGAVNESGCLGMQPKSGGFELEHACRDPKDGELCLSRAKPEETLVEARSDTDDSWSPHEFYRVKPMIRGIGGATPSTYSQTLNR

SEQ ID NO: 65347 - protein, 312 aa, Zea mays
  Coding DNA Sequence Number=SeqID_21972
  Homolog annotation: Hit_ID=Q652R5; Match level="QueryCoverage=26%, HitCoverage=33%, E-value=4e-17, Identity=57%"; Hit description =Putative uncharacterized protein P0603C10.50
  Subcellular localization annotation: CTP_CleavageSite=15; ConfidenceScore=5.19e-01
RAPTRTLHRRSGSASGAAREGLPLVSFLAHLRPLRRSAPRGAPEARGYRPRRRRLPGAPRAPGLWPPARATTVHAPSRSADQQEPFRIRPVRVASPHPLPSRQFQALFDSLFKVLFIFPSRYLFAIGLSPVFSLGRSLPPDLGCIPKQPDSLTAPRGATGSGPDGALTLPGVPFQRTWARSVAEDASPDYNSGGEAARFSSWAAPGPNVRPRAVTLHREQLDVAHHVLRPARQTCPPPEGFGRNLRSKTRWFAGFCNSHQACSNSNPSQKIRVGQRCGPREGLPLAVAAQRPEGRARGARIPSAPTTAAGGA

SEQ ID NO: 65348 - protein, 352 aa, Zea mays
  Coding DNA Sequence Number=SeqID_21973
  Homolog annotation: Hit_ID=A5BKB8; Match level="QueryCoverage=18%, HitCoverage=17%, E-value=1e-13, Identity=67%"; Hit description =Putative uncharacterized protein
MANGPKTDFWPRPRKRARGRAQDPPVVTPRETWKFGSTREGKRNSPKSWEGVSSAEPRTPSRPSRGRSAPYRAQLRLALLAAWPAVKCLRAATRPTGSRARYTLPSSSSPPGVRLVGSRAPAAFASCRRRPMAGGTEDTSLALLVSDVAHAEGRRRVGVTRPRIGPPERTTSSPARRLRAEAGAGPSARTCYLVDPASSHMLVSKIKPCMCNVTARGRTFGPKDPSSDRACPRTATPEASSATDRAQVLWKGTPGRVRAPSGPDPVAPRGAVNESGCLGMQPKSGGFELEHACRDPKDGELCLSGAKPEETLVEARSDTDDSWSPHEFYRVKPMIRGIGGATPSTYSQTLNR

SEQ ID NO: 65349 - protein, 77 aa, Zea mays
  Coding DNA Sequence Number=SeqID_21974
MANGPKTDFWPRPRKRARGRAQDPPVVTPRETWKFGCTRLLGRAPHPLRGPSRGRSAPYRAQLRLALLAAWPAVVRP

SEQ ID NO: 65350 - protein, 109 aa, Zea mays
  Coding DNA Sequence Number=SeqID_21975
MATGAAMGLFGPCVLGPKNEGVPPHWRQGAGKPEVSGHGPRKIKLSPKRVEKTPKGHSGTEGKRHGGTRRRAAWLFGLAFGLKTRRSPCRAGRKQRFGHGLENKLSPSA

SEQ ID NO: 65351 - protein, 77 aa, Zea mays
  Coding DNA Sequence Number=SeqID_21976
  Subcellular localization annotation: CTP_CleavageSite=16; ConfidenceScore=5.08e-01
MANGPKTDFWPRPRKRARGRAQDPPVVTPRETWKFGSTRLLGPSPAPPRGLPVGGRLPNRAQLGLALLFAWPAVVQP

SEQ ID NO: 65352 - protein, 169 aa, Zea mays
  Coding DNA Sequence Number=SeqID_21977
  Gene Ontology: Mol. function=structural constituent of ribosome; Cellular component=ribonucleoprotein complex; Biological process =translation
  Homolog annotation: Hit_ID=O22424; Match level="QueryCoverage=46%, HitCoverage=29%, E-value=1e-37, Identity=97%"; Hit description=40S ribosomal protein S4
  Pfam annotation: Domain name=KOW; Domain location=123-157; Score =23.4; E_value=0.00085; Accession=PF00467.20; Description=KOW motif
  Pfam annotation: Domain name=Ribosomal_S4e; Domain location=47-116; Score=31.3; E_value=3.5e-06; Accession=PF00900.11; Description =Ribosomal family S4e
  Pfam module annotation: Pfam domain module=KOW::Ribosomal_S4e; Domain location=123-157::47-116
  Subcellular localization annotation: CTP_CleavageSite=67; ConfidenceScore=5.13e-01
VWDFRLRKFVSEKRKLLSREASVFSRPNVSLLLTPSSKGTCRFWDAKKFRCCSLLSLKMSCATLKMSCEMLTVFLLFGQKGIPYLNTYDGRTIRYPDPLIKANDTIKIDLETNKIMDFIKFDVGNVVMVTGGRNTRRVGVIKNREKHKGSFETIMYFSLDLEYTYVCVV

SEQ ID NO: 65353 - protein, 195 aa, Zea mays
  Coding DNA Sequence Number=SeqID_21978
MPPPKNYAGVYLTPLDFHSNTIKTVITSFHPLLYIRPNIPSPVILAEKSLAVQVNTTTMKLVLGATGRGQKKSSVYFNSKLHPWNPGPGRRKITQYSNRFPVNLHPRSMCISMFGTKAPPSRSREQDEAELKATTPRSIQSRGQKGSEQVPKTGRSHVVRLHGLVPSAVHHAPNDQIIMPGNDGKASTSDVGGKA

SEQ ID NO: 65354 - protein, 95 aa, Zea mays
  Coding DNA Sequence Number=SeqID_21979
MDQGNEDAHLKEDIKRCIEVQTQDKKPEEISEEIQERTVSQRQVAHRTSVSDPTKASSGPPPKGDDEIKKMAEAIMDEVVNRLLNEAAEVVLRED

SEQ ID NO: 65355 - protein, 156 aa, Zea mays
  Coding DNA Sequence Number=SeqID_21980
MDGKHTLQDNTILQARVLTLEGSSSTLGIDNTFGEGLLRESGPSRRLGRSPRGLGQLSSKDVSPIRGLGWSIPASVPLTDDSARLRPTRFSFRANSASVHADTATPGLGSSESGRGVPLTKLEKPRTTRPTEPRDSYASGIRIPHSSPLHGATHAW

SEQ ID NO: 65356 - protein, 78 aa, Zea mays
  Coding DNA Sequence Number=SeqID_21981
  Homolog annotation: Hit_ID=Q6J9V9; Match level="QueryCoverage=83%, HitCoverage=23%, E-value=7e-09, Identity=56%"; Hit description =Putative uncharacterized protein
MTTSVKGPGKGDTPKRILPREGTRLRASLLIRGSKAGPPEGFDSLAWALHPLLVRGSKAGPSEGFHGRLRLLGLRAHY

SEQ ID NO: 65357 - protein, 125 aa, Zea mays
  Coding DNA Sequence Number=SeqID_21982
  Subcellular localization annotation: CTP_CleavageSite=48; ConfidenceScore=5.45e-01
MWKLLRSRGRVCLPWPRSSPSPWVGRGGDRRLRSGRSPSPGGRAERSSSSSGAEPKSEPWVGRCGVRRLPGLSPSPSPGSGEAELPMVPSTGPDYLSASLCRVAPQSERRRRRCLSVRPVSGAAK

SEQ ID NO: 65358 - protein, 112 aa, Zea mays
  Coding DNA Sequence Number=SeqID_21983
MEHMGDAVEVPITNKKILMAKRTIKDRGYINEALRIRKGYLGVPEPTSECRRVPQPRWVERETEREGGKARRPETGVREVGIPRPSCSSRAQVGRKERIQVYNRGFSRVLRV

SEQ ID NO: 65359 - protein, 70 aa, Zea mays
  Coding DNA Sequence Number=SeqID_21984
MALGDRVQERSRVFPPLAQGKNEEEVEVTEEKTPPPSESQAENCFYFDICGSEPDSPTNEGKPRCICHLP

SEQ ID NO: 65360 - protein, 119 aa, Zea mays
  Coding DNA Sequence Number=SeqID_21985
MSTGKRHLDQIELLSVRRLLLNHLLFSCGGGCETARRLYPLPTSHVTHLPRGHESHTPLPRKRGRATLRGLYKVPLASENPLQFMGRSSTGFLADRHRSKINQGPPRTDLSPTALAPFG

SEQ ID NO: 65361 - protein, 413 aa, Zea mays
  Coding DNA Sequence Number=SeqID_21986
  Gene Ontology: Mol. function=hydrolase activity, acting on ester bonds; Biological process=lipid metabolic process
  Homolog annotation: Hit_ID=A2X852; Match level="QueryCoverage=93%, HitCoverage=95%, E-value=1e-110, Identity=56%"; Hit description =Putative uncharacterized protein
  Pfam annotation: Domain name=Lipase_GDSL; Domain location=38-394; Score=84.3; E_value=3.8e-22; Accession=PF00657.13; Description=GDSL -like LipaseAcylhydrolase
MANRRTGPLSVLVATVCLLVLVATNAEASRHSRLVPAAFVFGDSTVDVGNNNCLNVTAAARANYPQYGIDFPGSKPTGRFSNGFNTADLLARGLGFTKSPPAYLSLSEKGIRSHMCKGISFASAGSGLLDSTGRVLFGEVIPMSVQLEHFSGVVDRMVKLSGQRKTAALLRKSIFFISTGSNDMFEYSASSRADDDDDEAFLGALVDAYKHYIMVRTTYCSLQAALVINRQILLRPARINSASALSQTCTQSLYEMGARKFSVISIPPLGCIPSQRLRRLKQLGTQGCFDPLNDLSLSSYPMLAGMLQQLSDQLPGMAYSLADAYAMVSFVFQNPRTEAWNFTDLEAACCGGGPFGAALACNETAPVCADRDEYLFWDANHPSQAVSAIAAQTIFAGNQTFVNPVNVRELAML

SEQ ID NO: 65362 - protein, 121 aa, Zea mays
  Coding DNA Sequence Number=SeqID_21987
MTSHGSSDDGNTLSHTDRLAREGFPRILWEVEQLSTDIQELEELVGTRENTIEVLEDQLINTQQQLAEANEHLDMHHQEIQNLEANEDVDIEGGDEPASSVDTAGSGRPPSPESSVASFAH

SEQ ID NO: 65363 - protein, 38 aa, Zea mays
  Coding DNA Sequence Number=SeqID_21988
MAPSSISLSREMPSVLAIWKGGMIYLFELLGVKKQKLK

SEQ ID NO: 65364 - protein, 342 aa, Zea mays
  Coding DNA Sequence Number=SeqID_21989
  Gene Ontology: Mol. function=N-acetyltransferase activity; Biological process=metabolic process
  Homolog annotation: Hit_ID=Q10R02; Match level="QueryCoverage=69%, HitCoverage=85%, E-value=4e-76, Identity=56%"; Hit description=GCN5 -related N-acetyltransferase, putative, expressed
MEEGNGDNEINERRKEPWDFRASFRHWVSLVQLHLHAIDFVTGKTTQSVQCRITLSPFPFFAQNLAELASSITSCLDRMLIVPQFHAQSFFSPRKDESVISTDGGNEETDTDSLHVARGLSHPGLSSSLSNKASVVPTPLLPSGQSDLRFNRLRPSIDESDCKYKRLFGCYVAREAVIDEEYWIAAWLRAEDQYENESGNRYVESFKRKFASKEFHALKKRCNTQHREKYICLVAVKNDDIRRTVLNSVVGTLDVCVRHPLYGEKFPEKLYLEVIHRSLENRLFTVEFISLISQNLGAENIYIHVHKDNLPAWRLYDQIGFKIVDQDDDCRSSDLCLLSFSS

SEQ ID NO: 65365 - protein, 102 aa, Zea mays
  Coding DNA Sequence Number=SeqID_21990
MSARDRETAEALVREDKGFHSVTHPSPSLRASLHLFGESSKQKDFVFDYSEQEKLFGKTDQARTVRALAADRPQHQDDPRTEPMQKSESALRTVRRKSTDRL

SEQ ID NO: 65366 - protein, 236 aa, Zea mays
  Coding DNA Sequence Number=SeqID_21991
  Homolog annotation: Hit_ID=Q10R09; Match level="QueryCoverage=81%, HitCoverage=63%, E-value=7e-25, Identity=42%"; Hit description =Expressed protein
MERWRDKDKGAAAPAPGRARRYGDQPSFSSTLLNAIYKSMDEPDDGVTSSSSTAAKKQNQDLRHSCYYYKASLAAGSYRGSSRAAAPRGPQAATTSSSSDQCSSYGGFSSSEAESSQHRRLRPIRTSLATTAVAVAAPALAPEKKKAGVSIRARLRDLRRKPASPGPGARLAGFLNAIFSGRRAPPSASSCFFSCLSKTPSTRGLSKLNARLHDSDGPGNRRRSLSLFLAMYFSFF

SEQ ID NO: 65367 - protein, 56 aa, Zea mays
  Coding DNA Sequence Number=SeqID_21992
  Subcellular localization annotation: CTP_CleavageSite=29; ConfidenceScore=5.06e-01
MASASRALLLSRALQAGASRRVPALLRPVAAAASLLQRCRPAKFGYMHPINITWRK

SEQ ID NO: 65368 - protein, 108 aa, Zea mays
  Coding DNA Sequence Number=SeqID_21993
MGDPSVSLPLSSLRLTYGCAYRRCYVGPTGQCYPAWNSSSTFREYHGRPDLAFTSAGGFNHHSAFLSRGADSTVHKDKLRFTMGRDWCPGYGIFVVALYSATVVRCWR

SEQ ID NO: 65369 - protein, 326 aa, Zea mays
  Coding DNA Sequence Number=SeqID_21994
  Gene Ontology: Mol. function=hydrolase activity; Cellular component =integral to membrane; Biological process=iron ion transport
  Homolog annotation: Hit_ID=Q2R2T5; Match level="QueryCoverage=83%, HitCoverage=89%, E-value=1e-105, Identity=63%"; Hit description =Ser/Thr protein phosphatase family protein, expressed
  Pfam annotation: Domain name=Metallophos; Domain location=43-245; Score=47.5; E_value=4.7e-11; Accession=PF00149.19; Description =Calcineurin-like phosphoesterase
MARVASLLLTVIVAAAASLLLLLAPSAAELARVEHPPKNDGSLAILAVGDWGRRGQFNQTLVAQQMGVVGEKLDIDFVISTGDNIYDDGIANTSDPLFKECFTNIYTAQSLQTPWYIVLGNHDYTGNALAQQDPAIREVDSRYLNLAKSFIVNSGIADFFLLDTSPFYLKYWNSSKYDWRDVAPRDTYIQNLLDDLDDALVQSEAPWKIVVGHHPISSGCEHGNTTELQELLRPILEACMHFMTSGGGSKAWAGKFKTTSDKIEFIYDGQGFMSMQLSSTEAHLVFYDVAGNVLHSYDSTKNEEEDDGWPAGQQAAVRGSIDRGNL

SEQ ID NO: 65370 - protein, 74 aa, Zea mays
  Coding DNA Sequence Number=SeqID_21995
  Homolog annotation: Hit_ID=A3C7F2; Match level="QueryCoverage=40%, HitCoverage=19%, E-value=5e-07, Identity=90%"; Hit description =Putative uncharacterized protein
MRSEARGGGSSAGTVVLDGASMEQTNSRAKDLDMKPNSSLNAAREKVLFSDINAYEVDLGTDDEKHCFCRESTC

SEQ ID NO: 65371 - protein, 113 aa, Zea mays
  Coding DNA Sequence Number=SeqID_21996
MDGSVVEGIWVIEGLKQGAEDDSLPNPECAVPELACRVPVPVVTAATYVHLTVAKTLEAITHKVKLTEVSSLTLLLPDVWNGVAPPWIGVEDNPTVDPSTSTFSNRFLASIED

SEQ ID NO: 65372 - protein, 42 aa, Zea mays
  Coding DNA Sequence Number=SeqID_21997
MGHDTKHATATTMQPVCIHTSSGTRDSIVQHPSDTYTCTLKI

SEQ ID NO: 65373 - protein, 111 aa, Zea mays
  Coding DNA Sequence Number=SeqID_21998
  Subcellular localization annotation: CTP_CleavageSite=32; ConfidenceScore=5.71e-01
MGPPFVDQTSTQTVLSQSQARGTPSPSSLPPRVAPNSEPGTPLLAQISPSCCPGPSVPSGRAYKYRCPAPLKHLNATWVADAIVDIGRLSASIETLFYAVVPVPTCGVGAS

SEQ ID NO: 65374 - protein, 82 aa, Zea mays
  Coding DNA Sequence Number=SeqID_21999
MATAADHGATWFLVSGEEFPGFRGIGGCDQQLDATPCVDPLKNDADHCTTATCALQCLSAKHKTKSAYCKHEGSKYECCCPP

SEQ ID NO: 65375 - protein, 66 aa, Zea mays
  Coding DNA Sequence Number=SeqID_22000
MEAEVNLKGHETPHTWIFLKPGHRFLLKLENLWKQMNGRSGNIMFRKGFYDEAGGVHTFKTRGETQ

SEQ ID NO: 65376 - protein, 201 aa, Zea mays
  Coding DNA Sequence Number=SeqID_22001
MMLKKGVSNSVGSLSATPKPKNHWIDEERLLARMVEVEPLIRSAEAPAVPQGMAHILMILALGIEDVVQCPLASTGCSLGMRYGWSGGVDLFTGPLLPTIAGLLVCIAPRCWWHGFCSPDEVLSPLISGDVEVRFPEQLLGGGRRFLQYGSDEGRVIRPPVEVLNHCRISDFGDMVSHGMKPLEGPERRLYRRPTSLLGPA

SEQ ID NO: 65377 - protein, 129 aa, Zea mays
  Coding DNA Sequence Number=SeqID_22002
  Subcellular localization annotation: CTP_CleavageSite=48; ConfidenceScore=5.34e-01
MSRSNFLLMARTTDAVPSAFSTVFSTYTTPLVVPVPAPELLQQLLVPRLVAPAHPNAVSELELHHRQRHGPGLRHPRHVRQRLAVVGATQKVERRPLEQAHRRWGWGKGWGRRRDCIGGREDARGLADF

SEQ ID NO: 65378 - protein, 61 aa, Zea mays
  Coding DNA Sequence Number=SeqID_22003
  Gene Ontology: Mol. function=protein serine/threonine kinase activity; Cellular component=chloroplast; Biological process=protein amino acid phosphorylation
  Homolog annotation: Hit_ID=A3AWG0; Match level="QueryCoverage=98%, HitCoverage=20%, E-value=6e-11, Identity=53%"; Hit description =Putative uncharacterized protein
  Subcellular localization annotation: CTP_CleavageSite=41; ConfidenceScore=5.30e-01
MGATRSLAFLLYSDFTAKLSNFGLTKNGPSAWMSHVTARVMVSYGYAAPEYVATVTVSISV

SEQ ID NO: 65379 - protein, 274 aa, Zea mays
  Coding DNA Sequence Number=SeqID_22004
MSSHSMYRVLPPFEPPDGECSRRFRLAVVGGTQLRGSWYLSAIVRLQGFSSGSPAASPRRWSQKTVTTSSMVGRSEPDCDLSPALSFKDLHHPCWGRERGEPGPAFAWAGVPPLPASGVETILQLCRGGVLQPCRGRRTVAAQLGCNIPSSVLAFVVGTGVRTCRCALEWLAPAGAVLVDAAVGADAVAAGESFSADKSVNATRGPTSGSLALMSGSRPLSGDANESLPAAAFVLGPSLLLQRSPASHQEFVAPQALQCGGLFVPAGVEPEFRL

SEQ ID NO: 65380 - protein, 389 aa, Zea mays
  Coding DNA Sequence Number=SeqID_22005
MVAIQRGHHPFKDNSPHLRPQPAWTESSPTCSKILPLRHGGWVPRVMQAGPGQKEPKPPRAERTTAQRLQALLHFCPDQRVKGRTAMQAACNRTKGAHPFDFDASSLEVQAHTSCGRKQQSSRQQAHGPSWDSERTLSHGVKTKRPCSVPRTARARTTAAPRTTRPIALTLRRDRRHLRQAKQATLHLRHNDRVKKGTGKEDTLKGILLREESGPRAPLLIRGSKAGPSEGFNSRLKALGLRAHYWSEVRRLAPRKGSTAASGHSGSAPTTDQGFVGWPPKGSTAALEHAERGMTLGSGAALANLAPAKPLTSSTYQPENLGLDYAPGLRPPWLQKTMDSASPDPKARTKPRLRKTMDSASPDPRAQTQPRPRKTDSTSTSEEPLPRPT

SEQ ID NO: 65381 - protein, 200 aa, Zea mays
  Coding DNA Sequence Number=SeqID_22006
MALRVLHDDGGSQPLTEARRRLSYEKENTKAASSPLLFSPLCVPSRADPSGLGHAATIYSSVQGPPGVKTLTADITRLVAIWTWFGSHWLSRPATGKALRLQVCSLSTSRTGAGHARASNATHPAVLSGSATIVRPKGESTQTQPPRAPHRRWTCDGVARCQHGELSTLARVEGCCTPETQGQPEPAEGGERVVQELYSA

SEQ ID NO: 65382 - protein, 257 aa, Zea mays
  Coding DNA Sequence Number=SeqID_22007
  Gene Ontology: Mol. function=protein transporter activity; Cellular component=microtubule organizing center; Biological process =microtubule cytoskeleton organization and biogenesis
  Homolog annotation: Hit_ID=A3BZC8; Match level="QueryCoverage=40%, HitCoverage=14%, E-value=4e-44, Identity=84%"; Hit description =Putative uncharacterized protein
  Pfam annotation: Domain name=Arm; Domain location=23-62; Score=20.3; E_value=0.007; Accession=PF00514.14; Description=Armadillobeta -catenin-like repeat
MPASGHTDAAVATDREHDVWKGKPQPSFDQTKPALMTLARIIHSNDEKVLTDACWALSYLSDGSNNKIQAIIEAASLAPSFSDDLLAKATLQVVQLLNNRASKSEITGTNIQMIGSLRLAYTLSVLPSSLPNKVVLNGYSIFHAESVEHKYPEQKFRSHADRWFERIYKLQLRGKGKPKSKSKDTGSWFDGGRKAMIQLAGELFWKMGEDLDSITKDYTTSLDAFITQLPMQQHVDLKFLLFRLDFIEYYGHVSSNK

SEQ ID NO: 65383 - protein, 194 aa, Zea mays
  Coding DNA Sequence Number=SeqID_22008
MDDVSDLKDTAKILTNTLKTLQATIEAKAITFLTVDRNPPQACSTVITTVADKRPHRRDPWRIASPIIVPETAPVPPRPALQRDCMAVVPSGGGVPWRDSEINDHRNALDFDSLGVANRIVPREDAPRVLTAVSTARSSSSRSPVRWNKWRCSSNLGRCRAKPEEKAEEELEFPLEVISNAGGVPIVIDETIEV

SEQ ID NO: 65384 - protein, 570 aa, Zea mays
  Coding DNA Sequence Number=SeqID_22009
MDKDRQGAAQKRQAVVRLHEARPKRQRGAAKAAAPGGGKPPLAAKSGVPASGKAPEAAAAAGGSKSAKAAPASSRVPEAAKAARELPPPDKRVADFATDISVDDYLVGSDEGQLVVVPPAAATTAAAIVPKAKGGALSAGGEMPALTAAADFADRAASGALTAVVSAEVERLRTQHADVVREKSAADSKCRKLADKVAALEGEKTNLRRQLAEERREANEALAKAQAAQAEANLARVEGSLARERAEQLEERLSALQSRVERAEAATRTEAERTRKQLMDSYHELGARTADFEVPDREPGLRCLEWVQEELRALPTIVEGFMSYASLVTCEGAMNALSREGCRHYEVFNQADEDFERDIYKVEEPIVKESTGALYDQMWGPHDREVVRKRAETARGQVQDFGPKHATTTTNFLAASTVDDGNKSDESASKFSDFGDSGSSVEWTEESSDEDLDYFAALDVAATEASPHAADAEDVPGPSTGRRRRRAVAKRRLCALAHSAMLAKALRTWSGVIVMLDWCACSRSLRGQFGVVVFAFVTLRPAVPSGNCCTDSLRGRLRFFALVVLVRLHH

SEQ ID NO: 65385 - protein, 149 aa, Zea mays
  Coding DNA Sequence Number=SeqID_22010
MGKNNKRKREPTPPSEEFGDSEYSEEEFSFESEGSPAPIPLRESSDDLDDSQGLAAEVWTYIRVVERSGLEGSDESEYSSDEEDSDGGGEDEDDDDDDDGGDGDGDGSGRGDGGGSRGDGGGSRGSNRGGSSRGSTRGGSGGGSNRASD

SEQ ID NO: 65386 - protein, 215 aa, Zea mays
  Coding DNA Sequence Number=SeqID_22011
MTSQSHPAQEQGLLPVEEAHDIRVATSELSDTMGLLREGAAAGPVGAACAIEGAASAQLGHRGEQSGAKVGAESAEPCSAAAAGPQGVTAPECLVHVAAQWWCQKNLQGQHIMAGTDTGLEQSSKKIKRSPGGASGILKGERGLLKDHMAQHDDSVCLTIKAKDTNFAATAKAKWDRAITTKELIKETTHVMEKAGRAFVEEKMEGPKSLVLEIV

SEQ ID NO: 65387 - protein, 105 aa, Zea mays
  Coding DNA Sequence Number=SeqID_22012
MEALPLRLVPVRPTAGPHRAHGGSLRGKEGRGRKKRLFCEKLCTKEARAVSRVLLLRTCSLDDHPEKQCSYEGGCLWRNLCSGKEEEEGVDADLQEFQNFDEFVD

SEQ ID NO: 65388 - protein, 170 aa, Zea mays
  Coding DNA Sequence Number=SeqID_22013
  Homolog annotation: Hit_ID=A2WSQ0; Match level="QueryCoverage=45%, HitCoverage=25%, E-value=3e-36, Identity=93%"; Hit description =Putative uncharacterized protein
MVPSEELVHLLYPMIADVADNLQIFSMVVYQSVARRIVLVSGYHVSQSFLGGLAVRLFLLLLVEARVTAYSDGQVKVYELLDSLELDKWQLQAEFQNITDPISRFGKPACTSASIAWNPRRGGSQQASFAIGFNSDSPHFNSCKQDFNTLKMNRFGSLKKLISAGFHLLS

SEQ ID NO: 65389 - protein, 160 aa, Zea mays
  Coding DNA Sequence Number=SeqID_22014
  Homolog annotation: Hit_ID=Q2QT44; Match level="QueryCoverage=61%, HitCoverage=11%, E-value=4e-08, Identity=37%"; Hit description =Retrotransposon protein, putative, unclassified
MELRPRRPEPRAPAIDNLSPELQPRRAHHGGAEMEMPRAQSRSEDARPREQRRGAGEWRREDKEQRMMAQDFTLKQDGSRKRNVQRRSGGHGNLYAILNVVQEHVIADMNQSLISPFIEEEIQRALERIGDLKASEPDGMSPFSTRSSGVWSGQRFCRTF

SEQ ID NO: 65390 - protein, 180 aa, Zea mays
  Coding DNA Sequence Number=SeqID_22015
MVAPSPPPLARRVAGQTRVFLFRPGEMSSSGLPPPGEPTTVVAIVLRGEEYHVVAVVGGHELETPKAEHRPGLKRLLKIVHLELNGKVLSTRSCPLPGAPTVGVLDPRGPSTDYKSSKLAFQACRGKALGISFYRYKEVIQLYIWGELRVVDIMGACRESSLPAIGVVSGEAVISPKAEA

SEQ ID NO: 65391 - protein, 123 aa, Zea mays
  Coding DNA Sequence Number=SeqID_22016
MAWWRWELGNHREDLVGDPTQVYEQYPRTVHAFIESHSRTLSFEQAEGINDDDTIHPVQATVPTTGVRLTTVSHCLSQDRPRAQQEVPPRPTPASGSKGIVAMPDPGLGLSLGLGRRSSPRPT

SEQ ID NO: 65392 - protein, 97 aa, Zea mays
  Coding DNA Sequence Number=SeqID_22017
MAHRTVRCAIGATGTEAVTDTATAVVVTADAGGTGGCGQTELRTGEVNAKVTGRSGEPDPEEAAAEAHPACPACSETSRAPYRINGPARLPGEPAAE

SEQ ID NO: 65393 - protein, 170 aa, Zea mays
  Coding DNA Sequence Number=SeqID_22018
MARVALKKAFLTSSRCIGKARESDRVGTVWMIPGLTTGLKHVARGASDEATLGIDEGNGATLVDGATCGVGGADSATRGAGGGDEAARGATGVDGALRGEGEVDRATCGMGDGMGKGRDREGARGVGDGNGAVCGVKEGSRREASTQSTLRRESRSRGGEESARESMTNL

SEQ ID NO: 65394 - protein, 1179 aa, Zea mays
  Coding DNA Sequence Number=SeqID_22019
  Gene Ontology: Mol. function=ATPase activity, coupled to transmembrane movement of substances; Cellular component=integral to membrane; Biological process=transport
  Homolog annotation: Hit_ID=Q8RVT7; Match level="QueryCoverage=99%, HitCoverage=93%, E-value=0.0, Identity=69%"; Hit description =Multidrug resistance protein 1 homolog
  Pfam annotation: Domain name=ABC_membrane; Domain location=1-240; Score=139.9; E_value=7.3e-39; Accession=PF00664.14; Description=ABC transporter transmembrane region
  Pfam annotation: Domain name=ABC_membrane; Domain location=615-890; Score=136.7; E_value=6.5e-38; Accession=PF00664.14; Description=ABC transporter transmembrane region
  Pfam annotation: Domain name=ABC_tran; Domain location=312-496; Score= 219.0; E_value=1.1e-62; Accession=PF00005.18; Description=ABC transporter
  Pfam annotation: Domain name=ABC_tran; Domain location=965-1150; Score=232.4; E_value=1e-66; Accession=PF00005.18; Description=ABC transporter
  Pfam annotation: Domain name=SMC_N; Domain location=954-1153; Score= -134.0; E_value=0.089; Accession=PF02463.10; Description=RecFRecNSMC N terminal domain
  Pfam module annotation: Pfam domain module=ABC_membrane::ABC _membrane::ABC_tran::ABC_tran::SMC_N; Domain location=1-240::615 -890::312-496::965-1150::954-1153
MELEVIMYYIYLGIGTAVSSFLQVSCWTVAGERQSTRLRSLYLEAVLRQDIAFFDVEMTTAEAASRMSADTVLIQDALGEKVGKYIQLLTTFVGGFIIGFIRGWMLALVMLACIPPSILSFATVSRLRAQISRKRQESYEDAGNIVEQTIGAIRTVVSFNGEKKAIAMYNNHIKKAYKATIMEGIITGLGVGSIFFVVFSSYSLAFWYGAKLIISKGYTGGQVINIVFAILVGSMAIGTASPSISAIAEGQSAAQRLFEIINRKPNIDINDTSGIVLEDIEGDVELKDVFFRYPARPEQLILDGLCLQVPSGTTMAIVGESGSGKSTVISMVERFYDPQAGEVLVDGVNIKSLQLQWLRGKISLVSQEPLLFMTSIKDNITYGKADATIEEIKRAAELANAATFIEKLPDAYETTVGQHGSQLSGGQKQRIAIARAILKNPKILLLDEATSALDVESERVVQEALNRIMVGRTTLIVAHRLSTIRSADCIAVVHQGKVVERGVHDKLIKDPDGAYSQLIRLQQAHATERHEVPDTDVSGSIYKSRSLPLEQSTGRDSPRNKGHHSFTKTTGLSKELNRQDFTDRQEDQEHGNSKAPKKAPIGRLFKLNKPEAPVLLLAAIVAFVHGLLFPSFSIMMSGGIRTFYYPPHQLRKDSRFWALTCLLFAVIALISIQLEYFLFGVAGGKLIQRVRSLSFQSIVHQEVAWFDEPSNSSGALGARLYIDALNIRRLVGDNLAILVQCIVTIAAGFSIAFASDWKLTLIVICVIPVMGSQNYIQVKFLKGFSEDAKVMYEDASQVVTEAIGSIQTVASFCAEKRVITSYIQKCQASMKHGIRSGMVGGLGFSLSNLIMYLTYALCFYVGALFVHEGKTTFKDVFRVYFALIFTAFGVSQTSATATDSTKAQESTISILTIIDRRSKINSTSDEGVIIEKVDGNIDFRHVSFKYPSRPDVQVLSNFTLAIPARKTVALVGESGSGKSTIISLLERFYDPDSGTISLDGTELKKLKLSWLRDQTGLVSQEPVLFNNTIRTNIAYGKQGEVREDEIVAAAKAANAHEFISSLPQGYSTIVGERGTQLSGGQKQRVAIARAILKDPKILLLDEATSALDAEGEHIVQDALDQVMVSRTTIVVAHRLSTIKGADMIVVMKDGEVAEKGKHEYLVGKGGVYASLVELHSKSA

SEQ ID NO: 65395 - protein, 103 aa, Zea mays
  Coding DNA Sequence Number=SeqID_22020
  Gene Ontology: Mol. function=ATPase activity, coupled to transmembrane movement of substances; Cellular component=integral to membrane; Biological process=transport
  Homolog annotation: Hit_ID=Q5N8L3; Match level="QueryCoverage=98%, HitCoverage=83%, E-value=3e-13, Identity=39%"; Hit description =Putative uncharacterized protein OJ1116_H09.11
MAGGARHGSEDDAETTTTNEGRRSSDHAAGATTNYSEHKQLVPFLDMLKYADRTDAALMAVGTVAAVANGMTEPLMTVVFAAVIECFGAGDDATILHRVSKII

SEQ ID NO: 65396 - protein, 23 aa, Zea mays
  Coding DNA Sequence Number=SeqID_22021
MVAMNSNEAIIYRDKNIVKADID

SEQ ID NO: 65397 - protein, 485 aa, Zea mays
  Coding DNA Sequence Number=SeqID_22022
  Gene Ontology: Mol. function=potassium channel activity; Cellular component=integral to membrane; Biological process=potassium ion transport
  Homolog annotation: Hit_ID=A2WU35; Match level="QueryCoverage=79%, HitCoverage=100%, E-value=1e-166, Identity=77%"; Hit description =Putative uncharacterized protein
  Pfam annotation: Domain name=Ion_trans_2; Domain location=208-290; Score=39.1; E_value=1.5e-08; Accession=PF07885.7; Description=Ion channel
  Pfam annotation: Domain name=Ion_trans_2; Domain location=332-407; Score=47.0; E_value=6.4e-11; Accession=PF07885.7; Description=Ion channel
  Pfam module annotation: Pfam domain module=Ion_trans_2::Ion_trans_2; Domain location=208-290::332-407
MQAHNTGKSGRGKVLGKNEERHRTPAFLQQSTGTGTDRHAESLTLPSQQAAAASGRAWRWRPGRSRLAAWAPVEDLAVRTRPENYKLQLSDPSSNMPSMDEPLLPLVQRDQKYISKKDRRSSCDVPSRCATSFSPSSYLKANFSTLNHLPPTDETTSTVPSPNMQRVHSSPSIFTSSKEAHCVDELGGQSHAAAAAQYTPSIARRAIVSVILYISIGVLVYMTNVEGFKGKSTFKLVDALYFTIISLCTIGYGDIVPCTTFTKVFTCLFLLVGVRFIDLMLNGLLTNVLDKQRTVLLSTMDDNKLNKVFDTYMIDARKKRSRGRMKVILALSVVAGTISICTIIVHEVEGLNWIDSFYLSVISVTTVGYGDKSFSTTAGRLTATVCLLVSTLAVAKAFLFLTDLRMDKRNRRTTKWILKKKMDNEPLVGDLENHPAVSKSDFVIYKLKEMGKIDEKDIKMISDQFDQIEFGKCERIPLADIIGKL

SEQ ID NO: 65398 - protein, 246 aa, Zea mays
  Coding DNA Sequence Number=SeqID_22023
  Homolog annotation: Hit_ID=A7PJV7; Match level="QueryCoverage=91%, HitCoverage=80%, E-value=4e-24, Identity=33%"; Hit description =Chromosome chr12 scaffold_18, whole genome shotgun sequence
  Subcellular localization annotation: CTP_CleavageSite=31; ConfidenceScore=5.11e-01
MSVSTFIVLITLPSMTPIVPKANSERVRLVRLTEAAENLKKRAATSVRMGKESEAVDLLVQKKKLTKALENIKERIEVLDMLSAKISEVISMKQNMLIEYALRPETSNGEDSDDKIRVFSSTVNVGTNGAGSSDSHPKSVEKESFELRNEAHAIASMADDAEQSALQMSDSFSFLNNSDPANYIKNHSAYDDLIEHINLQMKSLEYEIEQFINSQSVEEVGSEKQRSDKWQRLSDIQMLIKETREK

SEQ ID NO: 65399 - protein, 391 aa, Zea mays
  Coding DNA Sequence Number=SeqID_22024
  Pfam annotation: Domain name=SlyX; Domain location=201-268; Score= -8.1; E_value=0.056; Accession=PF04102.3; Description=SlyX
MNSPTPASGGDSRFSSDFLSRDGFPSILWEVLNSAGYPTPPMYTVQLYEEHRVPRCRVWLTLEAHPLQPGWRSLDSETIGLRTDDTIEAAAMKTLTTFCGYHPLEMVMHPLGLFPAEKKDDPMWCNRVSHVKDVWAMYPDLVGRVTVQCMSALYRLQALQSDAMTLLANTAQAAKLTLDSREDFVVDLSTELVEKDLQVERLSQRITTLEQQVEIRDNTIDVLENQLHDVQRELEEANDHLDMHHLEMEANEAGSEGEEAPEELGPAPGANGTTSAMPPSPMAARQRRGQNEQAPPPPPPAPTVQELMAQQNEILRQLLQRQPPPQHHGGGQHQRPPAMATYQEVSEHAPRPCSTKAEGFVWTPDWWVSRSFKSQFSPSFPGELPLDEGQR

SEQ ID NO: 65400 - protein, 653 aa, Zea mays
  Coding DNA Sequence Number=SeqID_22025
  Gene Ontology: Mol. function=signal transducer activity; Cellular component=membrane; Biological process=signal transduction
  Homolog annotation: Hit_ID=Q5NAW5; Match level="QueryCoverage=89%, HitCoverage=86%, E-value=1e-169, Identity=56%"; Hit description =Putative uncharacterized protein P0702F03.35
MDFHNIDDYFHENSPAQGGEGAAEASAEAILERVYRDTAFGSEKLLNLDMLVMEIARRASDIEPLMWDPRSISSESVGKAFEFDVLHGIVDSEVSELEKLAASIQTDIGNAETKALGGEPGSRVTDELCARKESLKQMQDVISDIRTQLATFENAIQPSHGKQGNSEGMGYENGHISGHTAMQAEDQRNVLQMLQQSIASKLDLENKLRDSQSVVEDLKMKLHHAEQESCFLEESIKELYERTLSAENASQLLLGTSKELVAKFNTTQSYLSASIRREDDLKSKLDENLMKLSGNKSTRETVLGDSDNNANQEPVQMRVLSRPEFQNLWNKVQQLEELLRDSGSQLQQSSLSRGADEEEQDTAQSGISAFGNVIADFKLAISNAESRAQNAETRCTQLTRTNVQLNGELNTLKSQGSDRAGLLETKLKESDTQLEHARASVDAIVEQQGMLRSSMSDMELVIEDMKEKYLKAETRAESAESKCALLTDTNLELSEELSFLRGRVERLENSLHEANQLKVSSAKDIASKTKTIMDLVAKLSLERERLHVQVVTLAKKNGALAQKCKENVSERTLLCKNVTTGEGVLRPVQVKEEVEADEVVIPDECTVRSIEPTTMTMVNWKYISAAVLALLAAAVVFQLLRANLMMTTAVNDC

SEQ ID NO: 65401 - protein, 184 aa, Zea mays
  Coding DNA Sequence Number=SeqID_22026
  Homolog annotation: Hit_ID=A7PCW0; Match level="QueryCoverage=78%, HitCoverage=88%, E-value=3e-41, Identity=49%"; Hit description =Chromosome chr17 scaffold_12, whole genome shotgun sequence
  Pfam annotation: Domain name=SOUL; Domain location=33-171; Score =156.2; E_value=8.8e-44; Accession=PF04832.3; Description=SOUL heme -binding protein
MAKQQNPIPIPMPLSLSLPLVLVALLLPAARGAAETPQYTTVHAESDFEVRLYGDTVWMSAPTPDIPSFHVATKLGFHRLFQYLMGANLNSSRIRMTTPVLTSHCVAARSFSGRARDKNVVEEAEKLAMSLSRSPWANSTDYSSKSAYSVAQYSSPFRIIGRVNEVWFDVNCRSTSTAAGVESY

SEQ ID NO: 65402 - protein, 90 aa, Zea mays
  Coding DNA Sequence Number=SeqID_22027
  Homolog annotation: Hit_ID=A2WMI8; Match level="QueryCoverage=56%, HitCoverage=48%, E-value=3e-11, Identity=60%"; Hit description =Putative uncharacterized protein
MATPSLPTQIVEFNYKAIEDKLKRLALEVSHHENNIRFLKSQLNTVEEACVDLGRTSLVILQKHAAKPLCPLFKAMFKLYLWSLAYIGHM

SEQ ID NO: 65403 - protein, 564 aa, Zea mays
  Coding DNA Sequence Number=SeqID_22028
  Gene Ontology: Mol. function=N-acetyltransferase activity; Cellular component=plasma membrane; Biological process=cellulose and pectin -containing cell wall modification during multidimensional cell growth
  Homolog annotation: Hit_ID=A5A6Q2; Match level="QueryCoverage=90%, HitCoverage=91%, E-value=0.0, Identity=82%"; Hit description =Abscisic acid insensitive 8 homologue
  Subcellular localization annotation: CTP_CleavageSite=77; ConfidenceScore=5.27e-01
MAGYRGGSSVSASTGGGGSAVAAAFSTRLLLLLTLLPLALAAFAFALQWRGGMRDPAGAAWPADAQRFPGMENSPLSSSHGGAGSYFAVSSSSSSPGADCAEILGRSAASSNGISLYRGWSFDSESAITPKICITGSTSASLHQILPWLYYHKVIGVSHFFLFVEGEAAKPAVTSVLESIRGVKIIYRTKELKEKQEKSYCLIILILLKLLLQPFYNFSRIWNETWLAGFFYKPCNYELFVKQSLNMEMAIIMARDAGMDWIIHLDTDELIHPAGAREYSLRRLLLDVPDNVDMVIFPNYESSIERDDIKDPFTEVSMFKKNYDHLPKDTYFGLYKEATRGNPNYFLTYGNGKSAARVQEHLRPNGAHRWHNYMKSPNEIKLEEAAILHYTYTKFSDLTSRRDRCGCKPTKEDVKRCFILEFDRLAFIIASTATEEEMRNWYKEHVVWTDRDTNLKLLRKSVLTRIYAPMAIIRGLKESGVFTNAVTSAKAQSKTKSSNMGLGNKDPIQPNGTAGQSTLEGSHGKLQATVRKILEMVDTQEEAAMPPMSPPGFLELTESVTAFS

SEQ ID NO: 65404 - protein, 86 aa, Zea mays
  Coding DNA Sequence Number=SeqID_22029
MVGRGHRTVRCAPDSVRCANGSQAPTVGYATEGKRSTPDCPVRQATEGKDYLPGMHSTAPSCLGAIKGTPRRMEEYTKHSLSIPKH

SEQ ID NO: 65405 - protein, 718 aa, Zea mays
  Coding DNA Sequence Number=SeqID_22030
  Homolog annotation: Hit_ID=A7P771; Match level="QueryCoverage=99%, HitCoverage=98%, E-value=1e-158, Identity=47%"; Hit description =Chromosome chr9 scaffold_7, whole genome shotgun sequence
MDQSRRAVESYWRSRMVDGVTADDDKVAPVYKLEEICELLRASDASIVKEVADFVLKRLDKQEPPRQAEETELDFGDAVVDTFILVLLDTLPAQWYLTLSTFALQALRLIKYAVGKSGTDFKREMQRHSAAMRQLVHYKGHPDPLRGDALNKAVRETANEAIAAIFSTEDPKPAVATESLGKRIQGFGNTNYEPSRDDKKSFLSELSEVVGIGSASIKQGLSNFAAAHAMMTNDNGSTYRSPNLRRSLTTESERYGRYDPSEIQRESRASSDASKNAPSGPWGPTSSSTPTDETSSSQPGIKTREERLLETIVTASGVRLQPTRDALQIFFAEASKLDAVALSRALESKLNSPLWQVRMKAICVLEAIVRKQDTDPYSIIASYFTENTASVVKCSELPQVSLREKASKVLNMLIGEQPTGTAATKAAMPTPVQMPDLIDTGDQDDLATSSGHASIEQNSGNSAYVSSVDDLLGGEPISDTSVTADSNGSDPFADVSFHEAETKETNDLFSGLTVEEKSSTTMHDSSSDKNELPDIFGSSPDSFNQGSVTDQGTVNDLIAGLNLNGTGHAQSAVKAEPNSNSGSQFFDTKNESGHVPSAATLNDILGQNSLYQQQQTPLQYSFPQHMMLNQSFPGQQLNYGAMGILLAQQQQLLQSFGNFNAGLGNSSFNSMNGGNTSVLPDIFNSSNQPQNHVAVMSSSKKDDNKAFDFVSENLKAKI

SEQ ID NO: 65406 - protein, 193 aa, Zea mays
  Coding DNA Sequence Number=SeqID_22031
  Homolog annotation: Hit_ID=Q6QP51; Match level="QueryCoverage=31%, HitCoverage=31%, E-value=4e-12, Identity=60%"; Hit description =Putative growth-regulating factor 1
  Subcellular localization annotation: CTP_CleavageSite=2; ConfidenceScore=5.46e-01
MQAGSEQKKPNRRARRVQPPSGYKRLSTFAQTNGRKGGQPCRRHATAPSGRTSPISNTPGIEAQARASCNRRVECFVHATAPPLAPPPRLLDCGTNTATRGDPAHDPAAPAWRDGGASGRRSERRFAFAIMTASKKAPSLPTDQRFEGWPLGRVRQPPQIAWALHPLLVRGSKAGPSEGFNDRLRLLGLRAHY

SEQ ID NO: 65407 - protein, 612 aa, Zea mays
  Coding DNA Sequence Number=SeqID_22032
  Gene Ontology: Mol. function=transcription regulator activity; Cellular component=nucleus; Biological process=regulation of transcription
  Homolog annotation: Hit_ID=A6NAB4; Match level="QueryCoverage=98%, HitCoverage=97%, E-value=1e-129, Identity=44%"; Hit description=Myc2 bHLH protein
  Pfam annotation: Domain name=HLH; Domain location=454-503; Score =49.0; E_value=1.7e-11; Accession=PF00010.17; Description=Helix-loop -helix DNA-binding domain
MELEDDGALGGTAGTWTEEDRGLGAAVLGADAFAYLTKGGGAISEGLVSASLPDDLQNKLQELVESESPGTGWNYAIFWQLSRTKSGDLVLGWGDGCCREPRVGEVGAAASAGSDDTKQRMRKRVLQRLHIAFGVADEEDYAHGIDQVTDTEMFFLASMYFAFPRCAGGPGQAFAAGIPLWVPNSERKVFPANYCYRGFLANAAGFRTIVLVPFESGVLELGSMQHIAESSDTIQTIRSVFAGTRGNKAAVQRHEGNGPAPPERSPSLAKIFGKDLNLGRPSVGVPKVDERIWEQRSAGGGTSLLPSVQKGLQNFTWSQARGLNSHQQKFGNGVLIVSNEAGHRNNGAVDSPSTAQFQLQKVPQLQKLQLQKLPVVQKTPQLGNQQPMQTQVPRQIDFSAGSSSKPGVLVTRAAVLDGESAEVDGLCKEEGAPPVIEDRRPRKRGRKPANGREEPLNHVEAERQRREKLNQRFYALRAVVPNISKMDKASLLGDAITYITDLQKKLKEMETERERLLESGMVDPRERAPRPEVDIQVVQDEVLVRVMSPMENHPVKKVFQAFEEAEVRLGESKVTGNNNNGTVVHSFIIKCPGTEQQTREKVIAAMSRAMSS

SEQ ID NO: 65408 - protein, 236 aa, Zea mays
  Coding DNA Sequence Number=SeqID_22033
  Homolog annotation: Hit_ID=Q6J9V9; Match level="QueryCoverage=41%, HitCoverage=34%, E-value=3e-46, Identity=88%"; Hit description =Putative uncharacterized protein
  Subcellular localization annotation: CTP_CleavageSite=60; ConfidenceScore=5.38e-01
MEARSHMSCNRRAGHYVRGNCTATCVNAASSRLQNQRSDSRASDTSGRRSGRRFTSVKMTASKKVAPSGVRQPPQSTRAPSPLLIRGSKAGPSEGFDSRPRACRVRDDPGYVRYMVEARATLPRYPRTFPRPMGTICNGIPPEGGTKPSDPIEWVRVQQITCSLGRDRKLRLARPQASASGEGPRLARPRASATASASGGVTSSPDLNLGLRRSLCLARPWPQTDYSTGDASLPYS

SEQ ID NO: 65409 - protein, 105 aa, Zea mays
  Coding DNA Sequence Number=SeqID_22034
MGARSDPKHRQLACQVGGEWSRPPSLIMSRPCPEKNLLSGNPADGETDAEISDDITRQKSGTQHNPYRETRSWRREKLRRNVSSGNEGIPDDAIVDGLKNRPSRR

SEQ ID NO: 65410 - protein, 333 aa, Zea mays
  Coding DNA Sequence Number=SeqID_22035
  Gene Ontology: Mol. function=sequence-specific DNA binding; Cellular component=nucleus; Biological process=regulation of transcription, DNA-dependent
  Homolog annotation: Hit_ID=A2X7J3; Match level="QueryCoverage=46%, HitCoverage=10%, E-value=2e-20, Identity=40%"; Hit description =Putative uncharacterized protein
  Subcellular localization annotation: CTP_CleavageSite=55; ConfidenceScore=5.32e-01
MAMLQESLPFRQSRLHEQPSFTSKQKQQRVGSGLTPVRRKRRVDGTSLKLLKRTVQAIGSAEQILGQPIVDEEVPMISRKLLMAYIRVRAVLGARYYRVPWKSLSDLPAPPHTCLRRMTLLLKTNGKIRGAVMCLCNLLGERIIRLYEVKPKRVQFQKADSVILKNHADIQMQKVKTWKSSANLKKKSLRITEIRLLKEAYGNHWLLRNPIRVEVKTEAKYTSKVAGRHELGPSITPLGLRYFATCACVDYWAVVLPLINSLKGSPIIASHGKMKQTTNEVYTRVSLLPEDEDTEKRAQARVWEDEDANRRDGEDGAAMRPLARTRTCSARCS

SEQ ID NO: 65411 - protein, 570 aa, Zea mays
  Coding DNA Sequence Number=SeqID_22036
  Gene Ontology: Mol. function=cysteine-type peptidase activity; Biological process=proteolysis
  Homolog annotation: Hit_ID=A2X4U2; Match level="QueryCoverage=76%, HitCoverage=51%, E-value=3e-44, Identity=29%"; Hit description =Putative uncharacterized protein
  Pfam annotation: Domain name=Peptidase_C48; Domain location=75-280; Score=49.8; E_value=9.6e-12; Accession=PF02902.10; Description=Ulp1 protease family, C-terminal catalytic domain
MARSNGEERAGPRRWRSCPSGLASGWFGGGCRRTGDLALIDWIKEIPCEPRVEVMLIDDAFVERKWMECLFQPDAYLGDEVIDCYINLIKAQEHLKCRSGGRVHIENVFQFNFLKRDGDVETKIDELYPSKDMAQISSAERRVLLYLDHDMVFIPINIREKHWYLAVINARNMEIQVLDSLGTSFGRKDLIDTIKGLQRQIDMVSQRKELKDHRWPDLRVASWPLREIEMEYAKQTDSSSCGLFLLNYIEYWTGDELSDNFTQDDMSHFRKKLAAILLSLDINKRKGCPLYKYYKEVDVGCSSDVQILDSPTNPKKRKLLFVSEESEVLMEDDDGPITQADLERWFVHDWDKRTPIKVPTDECTNEFLLNGLSTKDMPVTKVDLIDVLCDYIMTIQDDTTLDFNPFKIEISVKDLQNVLRVNLDMTLKCFDMVVRLLAIKESHMSKDEMTKDKKHYMDMRFWVLMPWKFNGCYALFIIDHGKKHVTFIDFTPTQDWCKHMPYKRFAEAIIMASKKYKIAYNKKRSGWADDIFKWEHTIRSGLPMDLKGYFSQYHVLNSLNFFYDNHLYII

SEQ ID NO: 65412 - protein, 261 aa, Zea mays
  Coding DNA Sequence Number=SeqID_22037
MEARMMAEREAERVARLADQQRMAEMFQYMQSLGAAQATGDLPYDAPGVPLGGSDASSDWTSRSMASPLLAASARRAPSLLDRAHAATIPSARRAPSPLPLLLGPRSATTIGSGRASAEPLYDAGGLMSPKSPVRSLPISFTSPLLRVAASGGFHREINEEEAATRATRSYHRASSGECPGSLRRSYLSRVGPPSGSSADRRIRDPHLRLRGGVAILLHRRRMWRLLLLRLGREKKNMWESSDPKWRAGDVDGTMRVWAEM

SEQ ID NO: 65413 - protein, 68 aa, Zea mays
  Coding DNA Sequence Number=SeqID_22038
MKSIGERGSPWRRHIECLWLWIWKKELDIRRKENSWDCLLFTGFEFYRMTVKVELRPKPLNGFLGVTR

SEQ ID NO: 65414 - protein, 674 aa, Zea mays
  Coding DNA Sequence Number=SeqID_22039
  Gene Ontology: Mol. function=nucleotide binding; Cellular component =cytoplasm; Biological process=response to virus
  Homolog annotation: Hit_ID=Q10NS9; Match level="QueryCoverage=99%, HitCoverage=98%, E-value=0.0, Identity=78%"; Hit description=Dynamin family protein, putative, expressed
  Pfam annotation: Domain name=Dynamin_M; Domain location=263-548; Score=-53.8; E_value=9.7e-08; Accession=PF01031.11; Description =Dynamin central region
  Pfam annotation: Domain name=Dynamin_N; Domain location=67-243; Score= 242.6; E_value=8.8e-70; Accession=PF00350.14; Description=Dynamin family
  Pfam annotation: Domain name=GED; Domain location=568-664; Score= -4.4; E_value=0.0067; Accession=PF02212.9; Description=Dynamin GTPase effector domain
  Pfam annotation: Domain name=MMR_HSR1; Domain location=65-244; Score=- 7.5; E_value=0.0052; Accession=PF01926.14; Description=GTPase of unknown function
  Pfam annotation: Domain name=Miro; Domain location=66-164; Score= -1.8; E_value=0.015; Accession=PF08477.4; Description=Miro-like protein
  Pfam module annotation: Pfam domain module=Dynamin_M::Dynamin _N::GED::MMR_HSR1::Miro; Domain location=263-548::67-243::568-664::65- 244::66-164
MPKKGHMGTPKQAYATDGGKGDVAAGSTVTASAIASSYDDQIRPLLDAVDRLRHLKVTQEGIQLPTIVVVGDQSSGKSSVLESLAGISLPRGQGICTRVPLVMRLQDDPSADSPKLQLEYSNGRVVTTTEADVADAINAATAEIAGSGKGISDAPITLVVRKRGVPDLTLVDLPGITRVPVHGQPEDIYDQVAKIIKEYIAPKESIILNVLSATVDFPTCESIRMSQQVDRSGERTLAVVTKVDKNPEGLLEKVTMDDVNIGLGYVCVRNRIGDETYDQARVEEERLFKYHPLLSKIDKDMVGIPVLANRLMQIQSTIIAKCLPDIVKQINDRLSRSSAELDQMPQDLNNVADAVRVFFHIVKQVCNSLEKLLVRGDFAEYPDAREFHGTARIADMLSGYAKELPAQCPINRNEPFLMEEVRILEETKGINLPNFLPRTAFLVLLKKKVQIIDVIPQELANKVWDYVEDLVMKVLLKHSENFPQMQSPCRRAVQTLMDKARLRSAHHVKELIAMELVADYTANPDYMKTWTEIMEGYEMFMEAVEDKSKPTRITLKGFGEVDVSHLRVYADFAGKAFDLRARLTAYWKSIVLRQVDGLALHVLLSVKLLVEKDLEEELGNELLSNKLAGVEKMLAPSPGTGTKRERLKKSIVLLRQSKEVVANIMDRISAAGDI

SEQ ID NO: 65415 - protein, 38 aa, Zea mays
  Coding DNA Sequence Number=SeqID_22040
RYSGTGGYEIDGFDYDYGIGENEAVEGDFQEFQDYDEF

SEQ ID NO: 65416 - protein, 213 aa, Zea mays
  Coding DNA Sequence Number=SeqID_22041
MAQRVTRSTLAGGRVESDDCGLASPAKQTPIPRSGSFTEVCSVFSEGRTGLGKAWLAGLRWQGDRAAADTPCTGKRRARSCSWSSAEMPMTSPSSIVSSPSSGAKLVGGACGTPPELQRRVIEGESIHFPDMTYGLPGLRSTHDLSSLGLSALAAYMTYNTTSRAIQDLQGQHGAGTTMMASGLFATHVARHKEHDQRHSVIEAIWTNTALPG

SEQ ID NO: 65417 - protein, 289 aa, Zea mays
  Coding DNA Sequence Number=SeqID_22042
MTSHGSSNDGNALSHTDGLAREGFPRILWEVLQGAGYTTPPQYAVQQFEKHRVPRCRVRMTLEPHPLQPGWRSLDSESFGYWAEDTIEAIALHGLTTFCEFHPLELSTHPIGLFPTEKEDDPMWKDRVEHAKDIWALYPGQTAHLMVRCMNALYRLQVMRGEAMSHLMALLEATKITLDNREELVVDLSQEMVENDLQVEQLSDEIQELEELVGTRENTIEVLEDQLINTQQQLAEANEHLDMHHQEIQDVEANEDVDIQGGEEPASSVDTAGSGRPPSPESSVASFAH

SEQ ID NO: 65418 - protein, 200 aa, Zea mays
  Coding DNA Sequence Number=SeqID_22043
MGVAPDLQMDFLRIIHSKVFLLLEKIGMKLFALCFGGQHYVIKILLQRSAYILSLAAEFAIRPYLARYLLRALHGCDRFEKYTDNSWASPPMGVGKGRLDDSQGIAAEVWTYIRAVERSGLEGSDESEFSSDEEDSDGGEDEDDDDDDGDDDDGGDGDGSNSGGKGSTRGGSSTGSTRGGSSKGSTKGGGGKGSGSRASG

SEQ ID NO: 65419 - protein, 102 aa, Zea mays
  Coding DNA Sequence Number=SeqID_22044
MGKPVPSLLMLLLSRGRVPLNSPTRWLCIKPGLAFQSSGRQVLWCRLGCWIWGYLLSSSLLRHEDVLSVSKITVYRNAMNMYVMTMQDFKNIEPQKLSQELT

SEQ ID NO: 65420 - protein, 175 aa, Zea mays
  Coding DNA Sequence Number=SeqID_22045
  Homolog annotation: Hit_ID=A3AA79; Match level="QueryCoverage=35%, HitCoverage=42%, E-value=7e-23, Identity=78%"; Hit description =Putative uncharacterized protein
MKINSDQTDSKALPRVTWWFPLDDTSRFWSTAAVSARDGANDNKRLPTTPPPLWESLEETWMGCPESCASRSSTSWITSPSPLLPKLFNDRWRADATAFYAPEGSKSWKDVFAVQDRCDRYGLIIREGKDYYLIYQGEIQRYLDNQKFAMTSFLTKKNCQAQLCAKHKDIDLLPT

SEQ ID NO: 65421 - protein, 388 aa, Zea mays
  Coding DNA Sequence Number=SeqID_22046
  Gene Ontology: Mol. function=transporter activity; Cellular component= membrane; Biological process=sodium ion transport
  Homolog annotation: Hit_ID=Q6ZFH7; Match level="QueryCoverage=90%, HitCoverage=65%, E-value=1e-140, Identity=69%"; Hit description =Putative sodium-dicarboxylate cotransporter
  Pfam annotation: Domain name=Na_sulph_symp; Domain location=40-388; Score=-228.5; E_value=8.4e-05; Accession=PF00939.10; Description =Sodium:sulfate symporter transmembrane region
MDPRRACWESSTEDVTRPLLPVHDDRPAGRCSCSGLGSLLTTNKYLAVASGPLACAVICALGDFGGHPAARNMLGVLAWVFLWWITDAVPLGVASMAPLFLFPAFGVSSADAVAKAYMDDVISLVLGSFILALAIEHYGIHRRLALNITSLFCGDPVKPHLLLLGICGTTVFISMWIHNTPCTVMMIQVATGILQRFPRDQQLEGGADARELQRFSKALVLGIMYASTIGGMATLTGTGANIILVGMWSTYFPEQRPITFSSWMCFGLPMTLVLFAALWVTLCLRYCTKNTGRVLSAYLDRNDLRRELSLMGPMAFAEKMVLAVFGALIVLWMTRSLTDDIPGWAVLFDGRVGDGTVTVSTQKPAPSVLGPFLSDDSPRGPHGTAFYT

SEQ ID NO: 65422 - protein, 580 aa, Zea mays
  Coding DNA Sequence Number=SeqID_22047
  Gene Ontology: Cellular component=integral to membrane
  Homolog annotation: Hit_ID=Q657I0; Match level="QueryCoverage=27%, HitCoverage=16%, E-value=1e-43, Identity=62%"; Hit description =Transmembrane domain, a coiled coil-4 domain, of eukaryotic origin (91.3 kD)-like protein
MPDFFYTAGYCMLYSLVSSENATVAELATTLQADLYQLQAAASFACRLGWAVKLLDTDSVLRDSSTLALSNNILSDEVESSRTSVASEKSGHESLSSDSDGHKNSGMAYVGFIVDANVTSYLMMGSLSPDLKSHAVTLYEAGKLGDSCKADLCNDLASLEGKRFEGAVSVGRLASDRAGGARAAWGHGIGQRGGGERIPGMRLPSTERRRGARMAERRFPLLVLELSVNLVMSLPHLSLRRTDRHATRAPWTAAPAPPSIALVNPVMEGPSSPPRARRLPGSSPPSSPLGARRFPGSSSPPVNKTKGNTTASYHLFPRLPFLLLPCTATPNSKSEEEDSGTAALVEEEAVKQAEGFEAVEARAKNVDKFDLSYLDNQVFFWSVRDIFNRDLLNKKGDLALIDFIKEIPCEPRVEVVLIDDAFVERKSMECLFQPNAYLGDEDDMSHFRKKMAAILLSSELNKRRGCLLYKNDKEVDSGSPSDVEILENPTDSKKRKLLHVLDDSEVVYEDEEGPITQADLQKWFVDDWDKRTPVKVSNDVCTNDFLMVGLSTKDMPVTKADSIDVLCDYIMTIEDDTTLE

SEQ ID NO: 65423 - protein, 169 aa, Zea mays
  Coding DNA Sequence Number=SeqID_22048
  Subcellular localization annotation: CTP_CleavageSite=51; ConfidenceScore=5.64e-01
MEPFLPGTRQLHASAAVMPRARPPPSSPPTKPASSAREPPGRSACSPQCWRAMKAARGRRWESHTSTPPSIPPTTKLAAYQTRQLRARSAAVMPREGDGGIAAGQIRLLARERKEGRSGGNAGRAATSAPPPIPPPTNPVLEPAPLQARPIPYSATGFTALPSAPAIKS

SEQ ID NO: 65424 - protein, 277 aa, Zea mays
  Coding DNA Sequence Number=SeqID_22049
MSTEKRHLDQIILLVLWLLLNHLFFSCGGAACAAPTAEPLDRVRLTAAKSGLRRHRKLRSARPQGSDSGSALKDGELRSARSQGSDSGSAPEDDELRSARPQVSDSGLAPEDGELRSARPQGSDLGSAPEDGELRSARPPGLGLGLSPGRRRTLLRPTPGLGLGLSPEGRRTPLRPTPGLGLRLSPEGRRTLLRPPPGLGLRLSPEGRRTPLRPTLGLELNPGLSRRSPPRPTRGLRLDLDLGRQTRPRPRRSLHLAQPRARTDHVNRKRHHYPTPS

SEQ ID NO: 65425 - protein, 88 aa, Zea mays
  Coding DNA Sequence Number=SeqID_22050
MTGKKTTASSNGDTPKKAKVVVEDEEEAGLEDEEEATVTLSVEKDALECDICCLPFQSEVFMASQITMHCKNRHSGCAKCCIRTDESH

SEQ ID NO: 65426 - protein, 603 aa, Zea mays
  Coding DNA Sequence Number=SeqID_22051
MYVAETVGHHEDEEKEGQKEDEEQHVKFEEVMMDPRWVERVGEREGGRGEAAGAERERGGSPAAFVFVPRPGQGDVGFPPKPRLSLPSVAVAEPEPRARVRALGSGGAEFAVFRVLSRVRALGSGGAEFAVFRAALSFCQTGQWSGGVTAVTSALPEARVRIELYADGGYQLRIRRLEATGVPVARRVGLGSRLACRKSEKRVHLARLHAACMAARPFRPLVWAKMGGRLNATPWELVPLSHRSASRIFITQPGRTPSPAVTRDGDLQLDGGGKRAGLRPLPLPQPQGFSSPRPGRGECRVGVGPCVGGGPLLHSVMGGEAGIARGVRQLQRAWSSAASGFGATCGVGVCHGSRKRFFRRRGGRDRPRADLQLLRPSARPCLTSFGTGGGLLAAASTLRSALPLFGPPEQKSPSSPLLDTRSRLFDYLNRFTKHELPRVKVTGEAGDSDISMNRGGVGSRMGTWGNRLSRLLGPDSRRTPWTAAPPEAGSGFAEDIVDAEGATAPFGVKTRACRIRSSCSVCFLRPPRPEENTLAALAKLRLFSSCFEHLDFVGNRDVCVSKSCFSRKGRVRYPYPRGVGIPRLGRPCRLRVLSPVHEALSPT

SEQ ID NO: 65427 - protein, 217 aa, Zea mays
  Coding DNA Sequence Number=SeqID_22052
  Homolog annotation: Hit_ID=A2X604; Match level="QueryCoverage=97%, HitCoverage=94%, E-value=2e-39, Identity=48%"; Hit description =Putative uncharacterized protein
  Pfam annotation: Domain name=DUF827; Domain location=17-166; Score= -107.5; E_value=0.02; Accession=PF05701.2; Description=Plant protein of unknown function (DUF827)
  Subcellular localization annotation: CTP_CleavageSite=67; ConfidenceScore=5.03e-01
MVMEAVTAASRAEVDTSRPFQSVREAVKVFGERRHAGRSGSSNGSSASSSVKLGASDPAPASPASVMLEYLKKLEDDLAEAKGEVVELRQRQAQMEVAVSSLSEQFSKGLAVYSSLSKGKEVAAAVGEGDSICGGHGRVRSHRWDESRAEEWVASLEYLPRLSEALAIKMVEDDLGHRKERKVKNKAGSRAKKHKSGIALRLIGGMFCSKKARSSRW

SEQ ID NO: 65428 - protein, 507 aa, Zea mays
  Coding DNA Sequence Number=SeqID_22053
MAVAFNRHCWVMRRGTSSRGTGPAVEETQHWCEWRWSFLHVLDACRIAVHPFDHQFLRRWGSACNRGTITCLACGSSPSSCFGSARMTCGSQPPCRGGRTLEDVSGDFARDAKGCKRGGMPIKREKRSPMQWPCLCPPLMPCALPPFDPPDGVPQLRLALAVIGGARPRGDRYLSAIVRLQGFSSCSPAAFPHQWAVWWGEANRAAASTPPSASRIFVILAEVEGDLSRGSTSRMGRQAVSSFSIQGRRHSPALRRGELWQRGTGRPQAPSAPACLARWLSWLCHGLRCCLLPLDLGLGVYCAARTRGPSKTLHAAWAAFVFLDCLVLTPARRLCAEVEGCPWLLSPVLRWWQPEEVVPADETVGASCGRTLDSLALMAYPRPSSGDAGESLVTAASALRSSLLLFSRPKRGSLSLLSERLTVSRLEFVVSRAPSMEVVHTRRNGTGVPFRDPRLLCDEPKPEAAVLAQTNAESARKETSLAWEMAASQAEEGVAAAAGSWPKHLLA

SEQ ID NO: 65429 - protein, 1063 aa, Zea mays
  Coding DNA Sequence Number=SeqID_22054
  Gene Ontology: Mol. function=protein transporter activity; Cellular component=Golgi membrane; Biological process=vesicle fusion with Golgi apparatus
  Homolog annotation: Hit_ID=A2Z9Y2; Match level="QueryCoverage=87%, HitCoverage=78%, E-value=0.0, Identity=32%"; Hit description =Putative uncharacterized protein
  Pfam annotation: Domain name=Filament; Domain location=492-768; Score= -193.0; E_value=0.067; Accession=PF00038.12; Description=Intermediate filament protein
  Pfam annotation: Domain name=Myosin_tail_1; Domain location=221-997; Score=-528.7; E_value=0.094; Accession=PF01576.10; Description =Myosin tail
  Pfam module annotation: Pfam domain module=Filament::Myosin_tail_1; Domain location=492-768::221-997
MDNKSDGSNSLITRNAHFSSRNDLGGFHQDEVGIRDSSFSPSQRNDSDGGLYIERQDTANSFIDYICVGRADLINRSNDSSFSSQTSGQNMLQESIDESSLSGFNHLSSGASGSSKDLLDAAEETIEELLIEAQMWESHYQKLKIDLEKLQKESDEKSKNQTEILLELSASQAEQESLRQEIEELKLSLKVATERQTVGGISKSGDAIDVQFELKDEVHFLRESNENLTMQLKKSQDANIELVSILQELEETIEAQRTTISNFTQMSNMIDQDIPTNALSAQEDAEWERKMSLKEDEIIALREKLDRVLSIENPGGVGSDAIYLELEKENDFLKVKMQDLENDCSELTEENLELIHKLKEVSGVEEQDSCLSDIEVMLNATGLSGTSKSRAKYLERKCADLEQKMLNFQSESRELEEKLKKSHEDLKGQTLELSELRENLSRFRAMELERGEINFSRGYQLRSEELGDIETELKLLKSTVQLKEKEIEGLQHSKLEMETFIDSVLGPKIHELEIYKVELELHISRLEDEKIELLESISGMEVELTNLTSEYESCIVQMDDSRTMIIDLKDKVERNQMELEAQKVELKKKQLEFQKIFLEAQDDSEALRRLNAKLQAKKDISLKEQSFLLELDNIFHEHKDHEEKINRAHFLLNKIDKEKAIEIENLEREVISLTAQLSSTHGEQASSMVDTIREASILRADKAKLQANLHDVNEQLRHYESLLEDIHKESKRKIKSLTDSLNVSKQNEEMLKIDAEAVRRLMEAAKSNEENLRITSNELELKYKSSDYEKQQIMEENYGLKIQVRKIAGVQDELLEVQSSLDEAQFEKERLEGILRLISEECDELKVQNAMLTDKVSMMQDTSNNIIEEKQTKTSMQTKMSTINEGNNDLATDNRGCCLVNEEPDLQVKVQSLESGLAEVLEKNSMYMTQVKRKHVVKTARGIQILEVTIARIEQAQQEPQFFLLCKELVGDFCGGNMCGAQEQWLMAEVKVMRARADEPGAVWWFGPQNHPALRMVGFAEFGPQILAVAVLEGTGGGTRHDHGGCVKANQLRVKDVAVGSRT

SEQ ID NO: 65430 - protein, 172 aa, Zea mays
  Coding DNA Sequence Number=SeqID_22055
  Homolog annotation: Hit_ID=A7PVR6; Match level="QueryCoverage=15%, HitCoverage=10%, E-value=4e-08, Identity=100%"; Hit description =Chromosome chr8 scaffold_34, whole genome shotgun sequence
  Subcellular localization annotation: CTP_CleavageSite=42; ConfidenceScore=5.17e-01
MDFDMAYRQHNYVQLSEGWKNSATVSSRKGRRAPAGTFAGSPQTMRWSLELEKSKPVILTGDLNCAHQEIDIHDPAVPYHAASSVILSMLVTPCIRSIISKKLGPFEQIESLRRFKLEEEIIDAEYTLTCDRIVSLKDKDSGSHQVTPPPHDNFADKCLNSSGGATNNNPMS

SEQ ID NO: 65431 - protein, 75 aa, Zea mays
  Coding DNA Sequence Number=SeqID_22056
MAVKSLELRLARARVAPGSPELGTKGEGATANSMMGKRPRIHGQRGENGGEKTLGRAGVTPRIIDVVGSEEMGKA

SEQ ID NO: 65432 - protein, 105 aa, Zea mays
  Coding DNA Sequence Number=SeqID_22057
MVIELGRKKYIDIGKLALPRAMDKTLNKLGSFVECLALDIGTATGPHGSFLCRVPPSEELGHSAKALSSSQCLFFVVYQLALGKDVTECPIESTRQRDRCRRLVH

SEQ ID NO: 65433 - protein, 71 aa, Zea mays
  Coding DNA Sequence Number=SeqID_22058
MADDVGEAKVPCIIILATPTPGLHILELATAHRVVPCGRADYVAGVVDDSQDMCPRRGGCAHGAVLTKVGG

SEQ ID NO: 65434 - protein, 246 aa, Zea mays
  Coding DNA Sequence Number=SeqID_22059
  Homolog annotation: Hit_ID=A2XXT0; Match level="QueryCoverage=68%, HitCoverage=6%, E-value=7e-17, Identity=37%"; Hit description =Putative uncharacterized protein
MARVACTLCGKRLDGGVSVLSVGVNPVWNIFEEVFSDFIVSSIIPESSEIFDSDVSDINPTSCNGIMKFTDELFAKNFIELSSEIQSYLNQLKLIPFLAQFIRSSLLYRFNDPVAIKAIRSLSETDLEIFHLMNEIESPVCQTITEVDHLWGASALKFREELKLDFSKSDTHNTENAEITEKRRALFRENIPVDSKLCAKTSLLYCYKRSTRAFVFSLEQLQRDNFADSFEVISRIIVSTEVWILF

SEQ ID NO: 65435 - protein, 54 aa, Zea mays
  Coding DNA Sequence Number=SeqID_22060
MESARCVLPSHGAHTAGEAASGWAGRIGEGLWVERGAMEIIILMIWSIRKQRNN

SEQ ID NO: 65436 - protein, 255 aa, Zea mays
  Coding DNA Sequence Number=SeqID_22061
GVRCATSRVPDFCALWRAFNASAELLSPGAPDTVRCTPDSPMAHAEGVEDLDGLDGALPEAAEVDPAPPSDASEGPSSTPSLTATGEDPALAPTPTCEDASRVVVEPATEDPTAVAEPSQVSTFRPAQATTTDNTGFAAETSVVVPADDSVPGSMSKCFESDGESGSSFPWTEESSDEGLDYFVALDVAAAETSPRVEGAEDLPGMSTGCRRRGRRRRMGMERGRLRVDGVGRRELLSSPNGAGIGEGDLRELFE

SEQ ID NO: 65437 - protein, 209 aa, Zea mays
  Coding DNA Sequence Number=SeqID_22062
MTVPLTPTRSREDQAKTSLFFGKTGDEFLLVLRSQVFAYDDRLLGRCRIKGNCLRSVVALQLCLFMLVVGWAGSLRDFTLRRIDHVNDVKGDCSLRALGATPKDRGSSILPTGKVPLPTKPYRGLSKGLSKLWLIPMQSKAWRKMMSAWLPLSTRTLCRSQPATLQLITMASMWGALRRSTSLASKVSGTCDHFVCTTGPVMATWLMLR

SEQ ID NO: 65438 - protein, 601 aa, Zea mays
  Coding DNA Sequence Number=SeqID_22063
MATARGRGLPHQTQTGTRGRDLVLRQVPNQEGLHNSPPAGKDPSRPRSQSRLPPGGHRQLFLRYAGMNYLHTGRAAWVAGSEWLASRGNHLCNGQPHQRRQPPLRRAASPAVATTSACTPWRRGPHLRPTTGVRTRPSKPWSWEHGGRRCLRSGQDCVAEVRLLHKAGGHPFPPNAGGRGGHQPMWEAKPRLSSLLTTTRLMNILEAKHWWKSVAPARPRTSSRGKTRPISPLASRSVTGRASPNAHQGSHPMIRGQASHVIQAGPKREEGKPPHKERTTAPWLCASSSSPQPTVKKANRRTRSSQPPRGYAPLHLRRNQWSRRRTAAQGVRNHPGLCAPSSSSQPAVKKANRHTRSVQPPRGCAPSRLRYSQRSNLWHGGPGPHVMHPARWFLRTEKSHRHLRQYHASSGPPQKTEKLIFQNQCSDSRHPTHGPTKPLSTEVKGQSAAGAGVAVGVTKGGPAAITPMGTQKQRINRQPNFGPTCRLVSSPEAGPVATVGTLNQGRSPDAAAWHLARDISQRVEPDVRPLGHAVSAFIAERTRRLSTLLTGDVPPQYLMLLVHSAGRRRHGHLADGAVGAKVKTLPFASGLRHLAAPSNAR

SEQ ID NO: 65439 - protein, 131 aa, Zea mays
  Coding DNA Sequence Number=SeqID_22064
MELPLDAQSSGRRLDVDERVEQCRAVVGVFHVLARFVLVLQMQHLRGSQPLSAGHCCCARCTAAYNCADIPDSVEGGSGSIVSSQGVAASPSKLHGLTGGHEIVEGRRRLIARHGTFYLDQVEATVIPAPT

SEQ ID NO: 65440 - protein, 211 aa, Zea mays
  Coding DNA Sequence Number=SeqID_22065
MSQQLRQASQQLSQQLKHAADFADHVASGALTAEFAAEVESLRVQHADVVREKSAAESKSRRLSEKAAQAEAKLARAEGSLARQLAEELEARFDALCSRVDKTEASVRAEVERTHVQFVDVYQELGGAGGAPNDRTGLMSFASLVTCEGAVNALSREGCRNFEVFDQSDENFKREIFKVEDPVLKQSAGRSLTGCGARTAEKRSGSSPTGQ

SEQ ID NO: 65441 - protein, 213 aa, Zea mays
  Coding DNA Sequence Number=SeqID_22066
MQVELAAEVQQPLQRVEGAARKAAPSPPWRCGGLGVLGRDGKRGRFVEVLGEERGGEVGIGTRDRDVVDDGLCRAILRAAVGRPDEEDVRGVKGEEGGGDPDGDGAGEQHGEEVAERDEEEADVAHEPGALDLDEASSGPGRRGLLGEQVVSMAGDGWCYADAEEEVEVSTSGSSVRSAFVVTSDEKEVVEMDASRSDVVSALVAMASWSVSC

SEQ ID NO: 65442 - protein, 216 aa, Zea mays
  Coding DNA Sequence Number=SeqID_22067
  Gene Ontology: Mol. function=xylose isomerase activity; Biological process=carbohydrate metabolic process
  Homolog annotation: Hit_ID=A2YPR7; Match level="QueryCoverage=39%, HitCoverage=17%, E-value=5e-21, Identity=66%"; Hit description =Xylose isomerase
MEGMEFGNLFYSTEPKPNKGHLAWADAFVITADSISMLSEACSTGLILKNVASLFMNKDSLKVEADTRLGELIKSVSEAAHGGCQVSSKGQKCRPCGRAAWARGEVQVAAVRACKEPGRQQPCEMFMLDMLVVLLIRRRESTNVEDMFLAHIFGMDTLARGLHNVVKLIEMIFSAKRYQSFDSEIGALIEDGKGDFEMLKKKVLECSALFHPASRN

SEQ ID NO: 65443 - protein, 1111 aa, Zea mays
  Coding DNA Sequence Number=SeqID_22068
  Gene Ontology: Mol. function=nucleotide binding; Cellular component =intrinsic to membrane; Biological process=defense response
  Homolog annotation: Hit_ID=Q9SED7; Match level="QueryCoverage=96%, HitCoverage=97%, E-value=1e-177, Identity=36%"; Hit description=Vrga1
  Pfam annotation: Domain name=LRR_1; Domain location=1003-1024; Score =4.3; E_value=49; Accession=PF00560.24; Description=Leucine Rich Repeat
  Pfam annotation: Domain name=LRR_1; Domain location=1026-1050; Score =3.0; E_value=86; Accession=PF00560.24; Description=Leucine Rich Repeat
  Pfam annotation: Domain name=LRR_1; Domain location=1052-1074; Score =8.4; E_value=8.6; Accession=PF00560.24; Description=Leucine Rich Repeat
  Pfam annotation: Domain name=LRR_1; Domain location=577-598; Score =11.0; E_value=2.7; Accession=PF00560.24; Description=Leucine Rich Repeat
  Pfam annotation: Domain name=LRR_1; Domain location=645-665; Score =6.8; E_value=17; Accession=PF00560.24; Description=Leucine Rich Repeat
  Pfam annotation: Domain name=LRR_1; Domain location=857-878; Score =5.8; E_value=26; Accession=PF00560.24; Description=Leucine Rich Repeat
  Pfam annotation: Domain name=LRR_1; Domain location=952-972; Score =0.5; E_value=2.5e+02; Accession=PF00560.24; Description=Leucine Rich Repeat
  Pfam annotation: Domain name=LRR_1; Domain location=977-998; Score =6.9; E_value=16; Accession=PF00560.24; Description=Leucine Rich Repeat
  Pfam annotation: Domain name=NB-ARC; Domain location=157-467; Score =150.3; E_value=5.4e-42; Accession=PF00931.13; Description=NB-ARC domain
  Pfam module annotation: Pfam domain module=LRR_1::LRR_1::LRR_1::LRR _1::LRR_1::LRR_1::LRR_1::LRR_1::NB-ARC; Domain location=1003 -1024::1026-1050::1052-1074::577-598::645-665::857-878::952-972::977 -998::157-467
MAETLAGWLVCPIIKIVMDKAKSCASDRIKSLGDGVPKALKRMEHLLYQLRAVGAAVQRRGSPNGCGDPDFREWLQQLMDAVYEALDVVDDFDDSMPPPESPVARVSKRIFGTDERVNRLNDVVDKLEAISKASPTLILTAEANASASREQSGHLPPLGRITASLRHHKDVVVGRDWELQNMVSWLVGAGGDAQVVSVPIAAIIGHGGMGKTTLAQVLLEDPNVVSTFEIKIWIQPFPTDNELELAKKILLGADVGVDAFDGLTNFDLLLKKIKEKVSLRKFLLVIDDVWNKENMGQHEYREMWSKVLAPLSHGERGSRIVVTTRQKMVANLLSASMEVRLDDLPANDIWSLFKRYAFGGEDIDGQPCALQDIGRKIAQKLKGSPMLAKAVGQMLEGNPSVSHWRKVLEMDIFDNVSKTLELCYQNLPGHLQPCFAICSLFPKNWRFKRDKLVKIWMALGFVQAADGKLEDLGSDYFDQLVARSFFHRQKVGRRSYYYIHDLMHDLAKKVSRFDCVRVEDAKKEIPKTVRHLSVCSDTVAQLKSRPELKRLHTLLILKSPSSSLDQLPGDLFTELKSLRVLGLEDCNIIRLPERIGNLKYIRYLALCKSITKLPQALTRLYRLQTLSSPKGSGLEVPEDIVNLTRLRHLDMDTSKITGIGKLVHLQGSVKFHVKNEKGHTLGDLNGMNGLRKELHIKNLDLVADKQEACQAGLNKKENVKVLELEWNSTGKIVPSSEADVLDGLEPNQYVKKLTVRRYHGDRSPNWLNTSLKVSVFYVKYLHLVNCRKWEVLPPLGQLPCLKALRLKEMCAVKKISFRDFYGTKSTAFPSLEELEFDDMPQWVEWTQEEKNIDVLPKLRRLKLLNCPKLVRLPQLPLSVRKVSVKNTGFVSQLKLSPCSSSPSNACKFKLDTCSATILTNGLMHQQHKESIATLALRNCQDAKFEELEKLTSLKSLQICHSSINDGQLGTCLRGSRVLTCLELSNCNNITCLPQMEGSDCLTKMHELRIQQCSEFSSLRSLPSFAALESVLIENCSKITAGSFPTDFSSNTSLRKLGIMNCVELESLPSGFPSSLQVLHLIGCKASLTKQLQLKDGPEWDKVASIPIKQIR

SEQ ID NO: 65444 - protein, 84 aa, Zea mays
  Coding DNA Sequence Number=SeqID_22069
MGAGLVGRLLLPILSSLPDALLMVDKFGLDALNENVEGAFTISRLHQLIYEPYLYVSPEDGKKDAGLTYGHSSDKDATVLSMLM

SEQ ID NO: 65445 - protein, 273 aa, Zea mays
  Coding DNA Sequence Number=SeqID_22070
  Homolog annotation: Hit_ID=Q10ER7; Match level="QueryCoverage=16%, HitCoverage=13%, E-value=6e-16, Identity=86%"; Hit description =Expressed protein
  Pfam annotation: Domain name=DUF1517; Domain location=22-230; Score= -159.5; E_value=0.005; Accession=PF07466.2; Description=Protein of unknown function (DUF1517)
  Subcellular localization annotation: CTP_CleavageSite=52; ConfidenceScore=5.03e-01
MAVLDSLEALKRPALALLLAGVLLAAASAGGPHAAALAASGGRVGGSAFSSRSSSPRSYGYSAPAPRGGYTAAPFYSPSPFVSVGPALGIGFGGSGFLVTLMGFAAFLYLAWTRTRRRRTVPPRGATEGRPAMARRWGCRWGSTGLGRRQRVRPCRWTWAGWAKAGEEDPDASTTDDADARCSSGEAGKGAAVGMSAGLLGSGRRPWVRPHRWTRPRLGSGTVQRNQRQRGYLIGRAGGRGGREGGWRQRGRHREGRRARWDCGREAGGKIRM

SEQ ID NO: 65446 - protein, 710 aa, Zea mays
  Coding DNA Sequence Number=SeqID_22071
  Gene Ontology: Mol. function=nucleotide binding; Cellular component =intrinsic to membrane; Biological process=defense response
  Homolog annotation: Hit_ID=A2Y4N9; Match level="QueryCoverage=89%, HitCoverage=99%, E-value=0.0, Identity=60%"; Hit description =Putative uncharacterized protein
  Pfam annotation: Domain name=NACHT; Domain location=184-348; Score= -35.3; E_value=0.034; Accession=PF05729.3; Description=NACHT domain
  Pfam annotation: Domain name=NB-ARC; Domain location=140-454; Score =201.6; E_value=2e-57; Accession=PF00931.13; Description=NB-ARC domain
  Pfam module annotation: Pfam domain module=NACHT::NB-ARC; Domain location=184-348::140-454
  Subcellular localization annotation: CTP_CleavageSite=16; ConfidenceScore=5.00e-01
MPAPAPWPVSQDVAALADRASAFSRAVVGPRNDLGALAAALLRIQPVARELERWRWLTPGDPEVPDLHAWLFELRDAVADAESILDELHRRRQIGPPLSACVYATFRGPGRKLRRLTERLNRARDDSERLRPGSAAAIYGVRSPNRVTGSVFAERKVLGRGEECNSIISRLVDDCEETCRPVSPVIAVVGHGGIGKTTVAQCVYNDARVEARFDLRAWVCVWDRSDEAELTREILQSIGCADDKPCDDGLASLDSLQEKFENLVARKRFLLVLDDVWIDEGKTEKENRSIWNRVLVPLRSATTGSKVLLTTRMKLVAEVLNAGYLVSLDGLRSSDCWLLLKEVALGGETMDFPPELQEVAGTLVAMVKGSPLAAKAIGQMARSTRSTRKWRTLVNTEISNDIIISSIQLSYKHLPGHLQRCFAYCSIFPSTWRFSRSQLVNMWIALGFIQSSAEGKGLEELGQKYFDDLLSRSFFGTANKDQQTYYFLDDLMHILAQHFSAHDCMKINEGIPVVIPPTVRHLSVSTDYLPQLKSKYRLGRLQTLLVLRSSSLSSGHFPRKLLAKFKNLRVLDLSGSDIVELPESINQLVHLHYLAICSITNKLPKTIYMLKHLEVCDIPIFLFHDDHPRGVGKSVTVKRLKTCCGKQARITPVWWIKNLVVHIHQNFKLFCVGLFDSPRYSILVFTVNWCKQDCCNREKIDYDTITEKRC

SEQ ID NO: 65447 - protein, 213 aa, Zea mays
  Coding DNA Sequence Number=SeqID_22072
MDEGTTLGGLESEDDAKPSHELLAVLSSLWRRGYLAHRLRIRFPKDEGVRRPKQPYQPRRLTGSAGRGSGHGLTTLGTVSAVSTMLPRPRGSDLRPPGGRLGTLAAEGPRPRPHTRGEDKPSEPKSRRSVRKWPSSLHRQIPTQVLADGQAPTSAQRHHAGARTRQSKNTNAALATCDVLDGPPVRTAQQPPVRWGGQPRSALAVGGGTGSSA

SEQ ID NO: 65448 - protein, 133 aa, Zea mays
  Coding DNA Sequence Number=SeqID_22073
MSSSLPPPGGLTAAVVAVALRRKEYHVVAAVEGHELETPETEQRPRLKRFLETTHLELKGKLFVNTQQAPTWHANCRRFDPGGSLDRRVKLSLRVPAQMGGLENRRRHGRTRGAIITCLPGRPDGTPVLFPVA

SEQ ID NO: 65449 - protein, 317 aa, Zea mays
  Coding DNA Sequence Number=SeqID_22074
  Gene Ontology: Biological process=protein transport
  Homolog annotation: Hit_ID=Q5Z4M6; Match level="QueryCoverage=30%, HitCoverage=18%, E-value=3e-09, Identity=42%"; Hit description =Trigger factor-like
  Subcellular localization annotation: CTP_CleavageSite=78; ConfidenceScore=5.63e-01
MATNPSNGAGADVPAAPVAVRLSVAAQAAAIQPSSPRFFFSSLAGTNPASPHRRIAIAVDLSDAVSPRPRDGGCWFPVNSTAVELREATAGAETRSVSPRRRSLDPVKFSVEVPTSIIHECYQSTLQEYTKRVKPVGEEPAGVHAQVDGRGEGDEGSRVLGAPDVRHPDLHRRLAAPALALDRGGHDEAAVVPQGPLAQVAAASRAAPRRASPAERLLGGQVDGYLASLVPGDGEFGEGDGGVSTPAKKEGEVITQSVGRSIAGAASQALKSLQRLSRTLGRWLMEHPPPRMALLMGAVPRSITNGPQSTASVERDH

SEQ ID NO: 65450 - protein, 590 aa, Zea mays
  Coding DNA Sequence Number=SeqID_22075
  Gene Ontology: Mol. function=pyruvate kinase activity; Cellular component=chloroplast; Biological process=glycolysis
  Homolog annotation: Hit_ID=Q8S7N6; Match level="QueryCoverage=85%, HitCoverage=88%, E-value=0.0, Identity=89%"; Hit description =Pyruvate kinase
  Pfam annotation: Domain name=PK; Domain location=79-421; Score=460.4; E_value=2.3e-135; Accession=PF00224.12; Description=Pyruvate kinase, barrel domain
  Pfam annotation: Domain name=PK_C; Domain location=446-550; Score =25.7; E_value=2.1e-07; Accession=PF02887.7; Description=Pyruvate kinase, alphabeta domain
  Pfam module annotation: Pfam domain module=PK::PK_C; Domain location =79-421::446-550
  Subcellular localization annotation: CTP_CleavageSite=58; ConfidenceScore=5.29e-01
MAAAAEIGGFTAAALRPLAHPAPAAAPRRAVAAQSLRTTATETLTADLAASTANGAVHAQMYSEASSEIPSQAAIANSRRKTKIVCTIGPSTNTREMIWKLAETGMNVARLNMSHGDHQSHQKVINLVKEYNAQNTDGNVIAIMLDTKGPEVRSGDVPEPIMLSEGQEFNFTIKRGVSTEDTVSVNYDDFINDVEAGDILLVDGGMMSLAVKSKTADTVKCEVVDGGELKSRRHLNVRGKSATLPSITEKDWEDIKFGVENGVDFYAVSFVKDAKVIHELKDYLKGVNADIHVIPKIESADSIPNLQSIIAASDGAMVARGDLGAELPIEDVPLLQAEIVQTCRNMEKPVIVATNMLESMIDHPTPTRAEVSDIAIAVREGADAIMLSGETAHGKYPLKAVKVMHTVALRTESSIYNPTTSPSVIASAQGLQNEEFSPSQLSKMFGSHATMMANTLRTPIIVFTQTGSMAVLLSHYRPSSTIFAFTNEERVKLRLALYQGVIPIHMEFSDDAEETFSRAISSLLKAQYVKKGDYVTLVQSGVTSIWREESTHNIQVRRAQATTCLARRPKSELFSAETGGRGHCCGVMNS

SEQ ID NO: 65451 - protein, 465 aa, Zea mays
  Coding DNA Sequence Number=SeqID_22076
  Homolog annotation: Hit_ID=Q6J9V9; Match level="QueryCoverage=20%, HitCoverage=33%, E-value=5e-14, Identity=50%"; Hit description =Putative uncharacterized protein
  Pfam annotation: Domain name=Extensin_2; Domain location=32-449; Score=-141.4; E_value=0.093; Accession=PF04554.4; Description =Extensin-like region
MSRLLDCGTSAATRGNPACGPTVLVEHIDHGRAEAAFRSSAGSCPLLEQQGSPPPWREDDAPVFQSSNDSHNDRPANHPSRRINSSAGQATQALFHLRHDDRVKKAAQSTRASGSLLIRGSKAGPSEGFDKPPRSTRAPRQLLIRGSNAGPSEGFDSRPRARRARDDSGYVRYMAEARATLPRYFLERASGPLADPYRTGHGRPFGSPVSNSLETPCSAPSEGNMALSPPPCGKATKGQTDGRNSGQGFVYSGDTISPRPSPASGGNSSPRRIHASPEGLLKQRVQPRLARGPARAGFAVKQPWPDRLANRPYRRSIQCEDRLTPYPDARSSVGRAEAQQEAPPRPTLGLGLGRWSPPRPTLGLAPDLGLGRWYPPCPTLGLGLNLGPGGWSLPRPTPGLGLNLDLRRNRVLTPPQPRLQEESPPRPTLGSDRPCHRGYIIALPLASSGYGEQDQRPIWLAPVNK

SEQ ID NO: 65452 - protein, 391 aa, Zea mays
  Coding DNA Sequence Number=SeqID_22077
  Gene Ontology: Cellular component=integral to membrane
  Homolog annotation: Hit_ID=Q6YS19; Match level="QueryCoverage=68%, HitCoverage=93%, E-value=3e-75, Identity=59%"; Hit description =Senescence-associated protein-like
  Pfam annotation: Domain name=Tetraspannin; Domain location=7-182; Score=-17.0; E_value=0.00097; Accession=PF00335.11; Description =Tetraspanin family
MAACRGFFECLLRLLNFILTVAGLAMVGYGIYLLVEWMKISEDGIGGASTAEVLVSGRPLLGAVILGDSFLDNLPKACSSRGNKIITISAAQKTFRPRHLAFYNDRVTVLHACFLLLVNKYAFLVILLILAEAAAAAFIFFDHGWKDVIPVDKTHNFDVMYDFLKENWEIARWVALGVVVFEAVLLLLALAVRAMNKPAEYDSDDEIIAIGRSPTIRQPLIHTQNVPATGVPVPTLDQRASRNDAWSQRMREKYGLDTSQFTYNPSDPSRLRLRPGSGEDAIPPEVEVEAEPWGQARRRPPSEVEVEAEPWGRARRRPSSEAEVGAEPWGRARRRLPPEAEAQGRARRSFLLRLRLDSAAVSLTLAGGTAVGEGRAALFSCQVRSVSGRAK

SEQ ID NO: 65453 - protein, 222 aa, Zea mays
  Coding DNA Sequence Number=SeqID_22078
  Homolog annotation: Hit_ID=Q6QP51; Match level="QueryCoverage=33%, HitCoverage=34%, E-value=6e-31, Identity=88%"; Hit description =Putative growth-regulating factor 1
MTAPRITRPVALTPQQGKRHPWQAKRASFHLRHDDHVKKVAPEHSGSEPITDQGFEGWPLGRVRQPPQSTRALRPLLIRGSKVGPSEGFDSRPRARRVRDDSGYVRYMAEVRATLPSAARPAPTAVPTTRDSASASALGGIASSPDPGLGLRRRLKHFSDGHVITYAGLKHFSDSHVGMFLHIYYTLGNIVSHVFEDLRKMKAPNKQVDANGSGPCHKQGAN

SEQ ID NO: 65454 - protein, 429 aa, Zea mays
  Coding DNA Sequence Number=SeqID_22079
MLDASKSKGCVSVVRLHATCMAERNLTEVGTLQPSLGFKDFHQAARLHSLTDASRIFIILAGEASRGLPSRGLATRFFLRHLGVQTILQLCGGGVLQPCGGKANCCCLARVQHSVLHPGDYGRLHRGVAQHVVRREGSTRVLRRSRSRSCGENGSEDLPVRFGAADARWCGVGGQVAAVVGAEVVAAREGFSADEIVGATCGRTSGSSALAACPRPSCGDVGEGPPAAAFALMPSLQLSCRPRRRSLTLLQWSAASHPEFVVLQALRCGGCSYPWEWNQSSVCNGTLSACVCSLWLSRPEHLAWTEAESAREEASLAWEHVASLAEEVQQRRLELGQVEILPPVPSSEAGPDSAEGGDDAEGAAAPFVDDLFVGSRIVYPSESYFSRKVMSEKVMSEDPAIEAVEKRERSTGRKTFSEENFDAEGVPPF

SEQ ID NO: 65455 - protein, 69 aa, Zea mays
  Coding DNA Sequence Number=SeqID_22080
MPRHGQTSKSGLPFFQWVPWGGFWEIGFKRGLGFFSPLIQGKNEEEIEVEEARTSPPPPEEPQVIGVMC

SEQ ID NO: 65456 - protein, 109 aa, Zea mays
  Coding DNA Sequence Number=SeqID_22081
  Subcellular localization annotation: CTP_CleavageSite=70; ConfidenceScore=5.59e-01
MQRPVAPAQYPLQYLRHLTLRSPLFFSTSFNSRSVRQQSRLALPQSRHEWKGRAPSLHIVYPLAHRCSCAFSSVSSTPALQNALVPAIGSQSIGLAVSLLQQVTLDFST

SEQ ID NO: 65457 - protein, 117 aa, Zea mays
  Coding DNA Sequence Number=SeqID_22082
MEHGEPGSRPWGHGRQSPPEGQSWGARPALRKKRRAKHGDAGRTAGWRRRSRHRGRKSTGGKAPRKQLATKAARKSAPATDREKSYYCRPGTVARRENPLSPRRRKQPTSSEQQSEE

SEQ ID NO: 65458 - protein, 127 aa, Zea mays
  Coding DNA Sequence Number=SeqID_22083
  Subcellular localization annotation: CTP_CleavageSite=41; ConfidenceScore=5.55e-01
MSSQTPAPGFSTTRPLVADTTWASPTPSTDSTLAFTIAAIQAALATSQERERAASRALEQECALAATLTAQMATAQRLVIGPPPVAQETPPPTQRLPMPLDSTLTISPLSTPRRPDYTTSGPSCPSL

SEQ ID NO: 65459 - protein, 107 aa, Zea mays
  Coding DNA Sequence Number=SeqID_22084
  Gene Ontology: Mol. function=oxidoreductase activity, acting on paired donors, with incorporation or reduction of molecular oxygen, 2-oxoglutarate as one donor, and incorporation of one atom each of oxygen into both ...
  Gene Ontology: Mol. function=donors; Biological process=protein metabolic process
  Homolog annotation: Hit_ID=Q5GAV6; Match level="QueryCoverage=80%, HitCoverage=21%, E-value=7e-22, Identity=65%"; Hit description =Putative uncharacterized protein
MQEVQHQGVVRHRLAEITERVRQALHLTAVLPHVEIPMGELVELGVEVQGASVPVPEELFLEGEPRLTARVRLVADDVLELDGDSSVEPALVQFGSIQAVGFLHHKR

SEQ ID NO: 65460 - protein, 67 aa, Zea mays
  Coding DNA Sequence Number=SeqID_22085
  Subcellular localization annotation: CTP_CleavageSite=35; ConfidenceScore=5.03e-01
MTQTTHVAPNQGQTSLPKLIASCARRITQAFKQVQAAEVRNTLLPIEAEYLSISGVHGLQMSYGRWI

SEQ ID NO: 65461 - protein, 218 aa, Zea mays
  Coding DNA Sequence Number=SeqID_22086
  Subcellular localization annotation: CTP_CleavageSite=52; ConfidenceScore=5.36e-01
MPHLTQGALKPYFMEVSFNMVFKVQYSKLHDQTSSSPTTPTTQGLGCCPPRRVTTFGGCTALRLADSLLHRLGGCTTVCPTNLLLHKLEGWAIARLADSLLHRLEGCTTVCLVDSLLQRLRGCTAVCLTDLLLCRLGGWAITLLVDSIFHWLRGYTVVRPADSLLHWFEGCTTVRLADSLLHRLRGWAITRLANLPLYQLGGCTDVRPADSLLHRLGG

SEQ ID NO: 65462 - protein, 35 aa, Zea mays
  Coding DNA Sequence Number=SeqID_22087
MAGGKELAGAKEGRLASEGFELGIKVNTLDLWLKV

SEQ ID NO: 65463 - protein, 57 aa, Zea mays
  Coding DNA Sequence Number=SeqID_22088
MVRITTFIPTHAVLVVTVPGYGPKAAYRVAQDSSILMGNGSHAIVYDISMMNLMFTS

SEQ ID NO: 65464 - protein, 70 aa, Zea mays
  Coding DNA Sequence Number=SeqID_22089
MTMHRRMMYSLDLCSFRALATFPFCLLGLMALTAISGDRSLNLNAEHIVLVGDRKLSLIANSQIRIDRLR

SEQ ID NO: 65465 - protein, 73 aa, Zea mays
  Coding DNA Sequence Number=SeqID_22090
  Pfam annotation: Domain name=DVL; Domain location=22-40; Score=39.5; E_value=1.2e-08; Accession=PF08137.3; Description=DVL family
MEQQRKKQHQQQQRGKLQRVLRQQKARLYIIRRCVVMLLCWTSNMVDYIDFFMICAQPQKGGSREKYWCQCAI

SEQ ID NO: 65466 - protein, 56 aa, Zea mays
  Coding DNA Sequence Number=SeqID_22091
MAPPTDVAPSTSPEHVPSTRARVRRDYDPFPSFDESKIKRWRPSDAVLRVPQDRRP

SEQ ID NO: 65467 - protein, 425 aa, Zea mays
  Coding DNA Sequence Number=SeqID_22092
  Gene Ontology: Mol. function=ubiquitin thiolesterase activity; Cellular component=nucleus; Biological process=ubiquitin-dependent protein catabolic process
  Homolog annotation: Hit_ID=A3CJ40; Match level="QueryCoverage=63%, HitCoverage=24%, E-value=1e-100, Identity=65%"; Hit description =Putative uncharacterized protein
  Pfam annotation: Domain name=MATH; Domain location=41-217; Score =50.0; E_value=8.1e-12; Accession=PF00917.17; Description=MATH domain
MVRRPQGSGFYTPKRDDNNPEFVTSVEITVKIPPASLAPRVGDYSGKTVRVRGTQGVSRGADNGQYPLRVALADEEEDSGNVTPPDNGSRRMQARGTGLWALHGGDQTAGTWVAERLTPRSHRYILVYPQGCDVSNHLSLFLCVANHEELLPGWGHFAQFTIAVGNLDPKKVKYSDTLHKFWKKEHDWGWKKFMELSKIQDGFLVDDVLEIIAQVQVIREKADRPFRCLDRPYRRELLRVYMTNIEQIYRRFVEERRRKLIRLIEDKMRWSSFRAFWLAIDPTTKHRMSREKSDIILKMVVKNFFVEKDVTSTLVMDALYTGLKALEACSNGKKGMVTSIDLEELSASMVHVDMDMFVLAGDFITLIERAALEPLSCQSLSPKGDKCSQTRAKYLTYLLCLPDSLDYVAHIWNWFTWYIEHPLQM

SEQ ID NO: 65468 - protein, 210 aa, Zea mays
  Coding DNA Sequence Number=SeqID_22093
  Subcellular localization annotation: CTP_CleavageSite=69; ConfidenceScore=5.34e-01
MEPGGGTAVGAVESLLTSSCFHKGAKSRRRHRPSFGFKDFHQPARLYPPRRRSPKTVTTSPWVGRSKPGCDLGPTLSFKDVHHPRWGGGRAEPELYLPRGLVGYPLLRCSRERALTGPVGGSDFDNAGLVDGGRRQPQRVELVGLAPGAPSCRRAAAAPCAREDRPRCRALLGRRSCSGEVLPLHRYGALRAEVGAPLVREDLSGDLPEG

SEQ ID NO: 65469 - protein, 211 aa, Zea mays
  Coding DNA Sequence Number=SeqID_22094
MVTSSLMVGESEPGCDLCPSLSLKDFHHQGWGGDCTVPGSRTRVASEPLAAPASATAAGRGSSAGEIARAGHGSTSNSTAFCPSLPHEFGHGRGPPGSSIRPEVSAAAVRPPGAEVVVVAAAGAGDGAPFVGLLLLRRPSPIEWGYSPVDYLNRFTKHESPRVKVTSESGDPRTASPSEARSDLAEGVVDAEGATAPVRRQDPSLQDQSVL

SEQ ID NO: 65470 - protein, 577 aa, Zea mays
  Coding DNA Sequence Number=SeqID_22095
  Gene Ontology: Mol. function=cytokinin dehydrogenase activity; Cellular component=extracellular region; Biological process =cytokinin metabolic process
  Homolog annotation: Hit_ID=A2WVL5; Match level="QueryCoverage=100%, HitCoverage=100%, E-value=0.0, Identity=65%"; Hit description =Putative uncharacterized protein
  Pfam annotation: Domain name=Cytokin-bind; Domain location=285-565; Score=627.8; E_value=9.5e-186; Accession=PF09265.1; Description =Cytokinin dehydrogenase 1, FAD and cyt
  Pfam annotation: Domain name=FAD_binding_4; Domain location=65-215; Score=67.6; E_value=4.2e-17; Accession=PF01565.14; Description=FAD binding domain
  Pfam module annotation: Pfam domain module=Cytokin-bind::FAD_binding _4; Domain location=285-565::65-215
MTRCLMFTLLFLVSSLISTVGLPVEPPAELLQLGGGDVGGGRLSVDASDIAEASRDFGGVARAEPMAVFHPRAAGDVAGLVGAAFRSARGFRVSARGHGHSISGQAQAAGGVVVDMSRGRGPGAAVARALPVHSAALGGHYVDVWGGELWVDVLNWTLSHGGLAPRSWTDYLYLSVGGTLSNAGISGQAFHHGPQISNVYELDVVTGKGEVVTCSETENPGPVLRRPGRAGPVRHHHAGAHRPGACSQEGPPAARASHGQSDTYVRVIRSWDLSQDFVPLLINRPVRWIRALYSNFSEFTADQERLISLGSGGGRRFDYVEGFVVAAEGLINNWRSSFFSPQNPVKLTSLKHHSSVLYCLEVTKNYDDETAGSVDQDVDTLLGELNFLPGTVFTTDLPYVDFLDRVHKAELKLRAKGMWEVPHPWLNLFVPASRIADFDRGVFRGVLGGRTAGAGGPVLIYPMNKHKWDPRSSAVTPDEEVFYLVAFLRSALPGAPESLEALARQNQRILDFCAGAGIGAKQYLPGHKARHEWAEHFGAARWDRFARLKAEFDPRAILAAGQGIFRPPGSPALAADS

SEQ ID NO: 65471 - protein, 138 aa, Zea mays
  Coding DNA Sequence Number=SeqID_22096
MESVKKDEQEERTWRMNRSSARSRSAMAARWRAVLSGAASIQKGAFGLFPLRGRSQKRKRAEVVAALRTVESPMPVTGRGLARTGQRREPVSAERRGAVVELSVRLQTWTGGRVGRMRLALQIGDVDGWMDGEAGMSE

SEQ ID NO: 65472 - protein, 560 aa, Zea mays
  Coding DNA Sequence Number=SeqID_22097
  Gene Ontology: Mol. function=carbohydrate binding; Cellular component= peptidoglycan-based cell wall; Biological process=polysaccharide catabolic process
  Homolog annotation: Hit_ID=Q6L4X3; Match level="QueryCoverage=84%, HitCoverage=65%, E-value=6e-71, Identity=38%"; Hit description =Putative uncharacterized protein OSJNBb0108E17.7
MRAREVVKATLEKEGQLLGFQGIHPLTSLHPTPLEKTPPVLKGARSFLRVIVGDAKINAPLPKAVPVAISDDNNGVIPATATYTINTKPVLVSPTPSKLEPVLCEEHVSSSIQQTNKAILMPSRSPLVDNEANPTPPKSPVPQADTVAKATPAPPKSPMLQIDTIAKATAAPTKSSTSQLDKVANIQAAPKSPAPQPDEVASHHNSVSGQILSTSISKPREDTVSKRAAVVTVPGTPTPMSRPTSAPLLQVPKSTMLPTPSVQVSPMLSRSWTMSAQVPPMLSRSRTVSERPNNEPSPTAPMYVTQTYRNAILGKGHLDTTPASLEQSTSVSPNTAASQPWSAYAMATSVMAPPFERNGQLPGNTDVNRNTWKHDFPNQQMTNCDAHLHHLKDISYQQLSSIGTEQHRLGGLQCREFLQREIPAATFVSRQQYGSVGEEFPHIDIINDLLDEDQNSAHMTVSPLHEYHTFGLPFSSGGNVADSEIPSVSSSVRFDMTDPYYGEGYRRAYNTQNALHRLDGYPNERLDSTAPPKRWAYSHPNPAVNLAYNSNVFPQQMGDY

SEQ ID NO: 65473 - protein, 282 aa, Zea mays
  Coding DNA Sequence Number=SeqID_22098
  Subcellular localization annotation: CTP_CleavageSite=51; ConfidenceScore=5.04e-01
ATNGKEDWKRGAALGFPKTPLSTVHTPLDPAHRSPVSRAASTWKHPPPHVPAAASSHPRMQQRSSGLIHWPSTLKHRLCGHAALLHLLGPPLPDSPRQDARRTGCPPPGRPSQRSPPAETPPALSCRPRGSARSKAAGVNAVRKFGMSPLSELVWSPDEGLSIKIAASSLSTRKASLRWNADTLSILISSPQRSGSGPGEKNGDTINDNLEVSEKMPSQLRIRSDSSVRVTVDSPNSTNVDALQFTSMRSQEQDSSLDPWRAGTEAAVERAGLEPLLPLSST

SEQ ID NO: 65474 - protein, 65 aa, Zea mays
  Coding DNA Sequence Number=SeqID_22099
MADALLPLLLEARLVFYGCFVTMCVSGATVDELKAWWSAAMKGEWKLPSKEELGVKLREKELLRS

SEQ ID NO: 65475 - protein, 152 aa, Zea mays
  Coding DNA Sequence Number=SeqID_22100
  Subcellular localization annotation: CTP_CleavageSite=29; ConfidenceScore=5.18e-01
MAPKGHRHCRPHIKAFTKHPLPTHSRTVKSSHGRRSQCRNHKEQHKVHRRTMKLCRRRGKIESESPDPHVTVVSVCVRHGKLWLGREPRRQRIRSPHRPLTTEEGRHDKAANDKVATIGKRKSSNEEDISGLKGPVCDLVALESDKQGKNRE

SEQ ID NO: 65476 - protein, 96 aa, Zea mays
  Coding DNA Sequence Number=SeqID_22101
MWNGVSLLRGTDSKTPAKSSLMIARAKDAEKRNRQLHVDLTIAQARVAALESREVIDVEALKQAKDEHVQKLMEAYLVTHNQRRARFIQPSSTHES

SEQ ID NO: 65477 - protein, 53 aa, Zea mays
  Coding DNA Sequence Number=SeqID_22102
MGLGVCDSLCQGGNEIDGFGYDYGTGCQHCNHCSGEDEAVEGDFQEFQDYDEF

SEQ ID NO: 65478 - protein, 125 aa, Zea mays
  Coding DNA Sequence Number=SeqID_22103
MGETSSIPPPSGGLTAVVVVVAWRRKEYHVVAAIEGHELETPETEKRPGLERLLETTQLELDGKLFVNTQQAPTWRANCRRFDPGSLDRRGAENRRRHGSTRGAIITCLPGRARWDAGLVPRSLS

SEQ ID NO: 65479 - protein, 394 aa, Zea mays
  Coding DNA Sequence Number=SeqID_22104
MAVMLKLLTRAREQSEARQMLEDVLSIKMLRFDELTKEHEELKCYHVDLVQSKSSFELELVGTKNQKLKEENERLKIRLTQLKGKCTAQPSQDDRDYMVKKLETGTTVACTKSLEENVKDLRIVKRKEQKKKINTSAKSLNHTSMQGNKELSLCGEIKAYNMKESQRMKFLSYGRLHIHHFHTMAIYMLEIIRVSASCKPQGLLFTQRKKSKSKGEVILLSKSLKLNLVTRISYLCFKGGGSLSLFEILKGAKGSTQTNKKNKLGFKRKEQKKETGVCPGLAHRTVRCTRCTSGATAICAQRSTLTDEQCSTVLRQKSEQQENSTAYPAPTVVPPARVRLTAAESSLRRHRKLCLARPQGSAPASTSEDGLRLARPQGSDSTSTPEDGLRLARP

SEQ ID NO: 65480 - protein, 588 aa, Zea mays
  Coding DNA Sequence Number=SeqID_22105
  Gene Ontology: Mol. function=binding; Cellular component=nucleus
  Homolog annotation: Hit_ID=Q6YXW5; Match level="QueryCoverage=98%, HitCoverage=57%, E-value=1e-162, Identity=55%"; Hit description =Cyclin-like protein
MGCNRPSCSALVGDAGPVLDMMSVMLENISHTPLIAIATTSAVYRTAQIIASIPNLSYKNKVFPEALFHQLLLAMVHPDHETRVGAHRIFSVVLVPSSVSPFPNLKSLDQCRKHDVQRTLSRVVSVFSSSAALFDKLRRDRNSFREYLHEGSMNRILHGIDDEIATPNDLPGSQSLRQSLRLSSVSHKHSYTSLKEGQSPLTESINEMETIVLRLSSQQATLLLSSIWRQALSPKNAPQNYEAIAHTYSLLLLFLGSKTPIFEVLAPSFQIAFSLMSHSLGGTDSLPPSRRRSLFTLATSMIVFASRAFNVAPLLPICKLMLNDGTAVKDYTEDPSTSYGSPEDNQNALKSLSVVELTNSCSRESMILTIMNSIRDLPDVIFDPFFLELENIRSQLLRDFSPDDVCPSSAHFLESPGKIAPPCSDDDTDYDYQEVHGNFEQAELIDLRNDNNTYLEASATTLAAIAIPVPTTNLLSIDELLETVVNDVSSQTGGQCLVSMAGDIPFQEMTSHCEAFSMGKHHKMSLLMSFKQNKQAAMVVVPDNQSTNPFLLQSISAGEAQVAGDVQQPFLRLPPSSPYDNFLKAAGC

SEQ ID NO: 65481 - protein, 235 aa, Zea mays
  Coding DNA Sequence Number=SeqID_22106
MGARGVPSLLVYRGEPDGTPAEPWGRARRRPSSEVEVEFEPWGRARQRPSSEVEAGAEPWGRARRSFLWRLRLDSAAVSLTLAGGTTVGAGQATLFSCQDKVSDDPCIECSCDTVGWRCDLAKVASLRSLPELGLGRVEACADGDYQPSLGVLGPGCMVRFRVLGLVIRVDACAPFDKGRLVAQRIAPAGLRNVLGYLGSVARASAMYQTYLESSLALRVLGRLSNPSGGQPSNP

SEQ ID NO: 65482 - protein, 272 aa, Zea mays
  Coding DNA Sequence Number=SeqID_22107
MQPGYLMKILEAERWLKGANLREVALLQQQQDESNVGTPHPGAQKGPPPMTRGLGPTHHASWPGTEAARPPRAERVTAQRLQALLHLRLNQRVKGRTAMQAACNCTTGMHPFDFDASSMEAQAHTSCNRRTGYYVRKTAPPLAPVPRLLDCGTGVVTGGNPVHDPTVPTKHIGHRSVSRGRRRDGRYGQKWAGSNGGSKRAEAAVKPSTGSCPLLEQQGSHLPRREDDAPVIRPSNGSRNGCPTNHPSRRINFAAGQATPLAGEAGDASPPP

SEQ ID NO: 65483 - protein, 253 aa, Zea mays
  Coding DNA Sequence Number=SeqID_22108
MVGKSKPGCGLCPALSFKDLHHPCWGGGRVEPELYLPYRPAGHLFLQHSGEKALTGLAEGADFDNAGPIGRKRRQLQHAWFAGSAGSGAASGASSHRWAECGYLPAVRAAVAPRAPGDRPRRRTLLGRRSCSWVVLPSLRHNASARRSVLARPGGLEWGSASGQVAAVVGTVVVAAGEGFSADETVSAIRRPTSGSLDLIACPRPSSEDAGEGLVAAASALRSLLLLFSRLERRSLSLLTERAAASHLEFVVP

SEQ ID NO: 65484 - protein, 114 aa, Zea mays
  Coding DNA Sequence Number=SeqID_22109
  Subcellular localization annotation: CTP_CleavageSite=74; ConfidenceScore=5.19e-01
MAGFARATAPASPSPAAALLTGERLVVFLFAARVALAAPVHLAAALAVLVAAALAVELAVDGSGSAPLRRFRTRCAGDSVMRKARCFVRHTSWRHYSAQRHAFSVNSTVKAPTS

SEQ ID NO: 65485 - protein, 83 aa, Zea mays
  Coding DNA Sequence Number=SeqID_22110
  Subcellular localization annotation: CTP_CleavageSite=49; ConfidenceScore=5.51e-01
MDSTTPPLRLKHAQPSTAQLLAAEFPPQPRNVGASRQRCHSRRDLAFVRGSHCSTSSSSLLASLRFSQNLVCVRVGNLDEVCV

SEQ ID NO: 65486 - protein, 173 aa, Zea mays
  Coding DNA Sequence Number=SeqID_22111
MARDLPAFCTEEMDRELFQRGVPIGAGITTAGHGRGAAATGHAAAPADPGRAAAGLARSVSTAAPADPGRATVGLARSVSAAAPADPGRAAAELARSVSAAVPADPGRGIAAAELGRGASAADPAYTGRGVATAGLGRGASSAAPRVLSEASPPRSLVAAPVGDRYPLGPLKE

SEQ ID NO: 65487 - protein, 155 aa, Zea mays
  Coding DNA Sequence Number=SeqID_22112
MGKSNKRKREPTPPSKDFGDSEYSEEEFSSESEGSPAPVSPPASSDDSDDSQGIAAEVWTYIRAVERSGLEGSDESEFSSDEEDSNDGEDEDDDDDDGDDDDGGDGDGDGSGSGGGSSGKGSTRGGSSTGSTRGGSSKGSTRGGGGKGSSSKASG

SEQ ID NO: 65488 - protein, 188 aa, Zea mays
  Coding DNA Sequence Number=SeqID_22113
  Homolog annotation: Hit_ID=A3BKC3; Match level="QueryCoverage=24%, HitCoverage=29%, E-value=3e-18, Identity=93%"; Hit description =Putative uncharacterized protein
  Pfam annotation: Domain name=DUF584; Domain location=37-188; Score =86.4; E_value=8.8e-23; Accession=PF04520.4; Description=Protein of unknown function, DUF584
MAKARRPPFAAAERFLGFPRGGPSPGAVAPAPAALDDLPDLAEADVWYSAADPGSPYPAASRHAAAEGRSAGQRGPRRGVQGGLSRAFGDGSGSGSGRQAAASAPVEVAAWPARFSVPDAEPTLLFEMEMGDDDDDKGEGDAGWVPPHVYLARRQARASVVEGAGRTLKGRDMSRVRDAVWSRTGFDG

SEQ ID NO: 65489 - protein, 37 aa, Zea mays
  Coding DNA Sequence Number=SeqID_22114
HCGTGGYEIDGFGYDYGAGEDEAVEGDFQEFQDYNEF

SEQ ID NO: 65490 - protein, 66 aa, Zea mays
  Coding DNA Sequence Number=SeqID_22115
MEDVEKRLAEKFQQALDSSATTLKELLKTKLVNHVQAETEPGEPENPEKVSVDGEEAGEEGNEQQD

SEQ ID NO: 65491 - protein, 263 aa, Zea mays
  Coding DNA Sequence Number=SeqID_22116
MGRGKPGCDLGPAPSVEGVRHPRWGGERGEPKLYFPRGPEGHPFFQLLVVANILQLCGGDVLQPCQGRRTVAAQLGCNIPPSSSLSRRGRQRGPAGALWSGPLFGFNSWFASLEREREREPSGGRVRPGTMAAAAEYLDFFVSNKDVCASESCFSRKVMSEVSVSRRRRSPSARSALPLTRTLTRPWGSVTDSVEKARRIASAEELPNVKTCSVRRITYPNVSYLSQKVMSEVSVSRRRRSPSARSALAAYVYSVVFRIHLSK

SEQ ID NO: 65492 - protein, 159 aa, Zea mays
  Coding DNA Sequence Number=SeqID_22117
MARTRKTARKSTRPFGVPSHQLAPRHEGSSSGSNEPIGDLEAKVEQLWTELHHRNRVRAHDSQRIAELSADVRRLQDEFAERDLAVDWAVNSQSVAWDRKAKARARVTELSVALDSLQVYCNTLHEEVHVLYARLHSDVPFDTAVMGAEPSGTTNEGTE

SEQ ID NO: 65493 - protein, 80 aa, Zea mays
  Coding DNA Sequence Number=SeqID_22118
RADAADEWGQGVSEPGRADQPGLEAETQGRGKRERQLDLDRRGGLAGSAMAFTLAQGHQRAQTTVGQANGGAGLLRRAIA

SEQ ID NO: 65494 - protein, 129 aa, Zea mays
  Coding DNA Sequence Number=SeqID_22119
GTRDSEELTAGFDDDAQTLRRSTTAERNDVQRHRDSGRRLTLVRVQGKQRGSSTRDLQPEQRMQRRSRGRRHEKDLGTCCPWGFPVQADAGAPAPVERMGVVGQRDKEQGVHGQSAEAWGKPTLATERE

SEQ ID NO: 65495 - protein, 52 aa, Zea mays
  Coding DNA Sequence Number=SeqID_22120
MARVACTLRGKRLDGGVSVLSVKKRQTFVASVRRWYRRKNTRSKAAGGKDPP

SEQ ID NO: 65496 - protein, 45 aa, Zea mays
  Coding DNA Sequence Number=SeqID_22121
MAMMGSTLEKMYLCQVRKQYTSDVFALRWCLKKNLNNEATGRPPI

SEQ ID NO: 65497 - protein, 297 aa, Zea mays
  Coding DNA Sequence Number=SeqID_22122
  Gene Ontology: Cellular component=integral to membrane; Biological process=response to nematode
  Homolog annotation: Hit_ID=A2WL37; Match level="QueryCoverage=54%, HitCoverage=45%, E-value=2e-74, Identity=87%"; Hit description =Putative uncharacterized protein
  Pfam annotation: Domain name=TPT; Domain location=1-111; Score=96.3; E_value=9.5e-26; Accession=PF03151.7; Description=Triose-phosphate Transporter family
  Subcellular localization annotation: CTP_CleavageSite=49; ConfidenceScore=5.10e-01
LLYQSCPYQALTLFLVGPFLDGFLTNQNVFAFDYTTQVLFFIVLSCLISVSVNFSTFLVIGKTSPVTYQVLGHLKTCLVLAFGYVLLHDPFSWRNILGILIAVIGMVLYSYFCTRETQQKPAEASPQAILQAKEGESNPLILDSLSAAENGGSATDDEPLKVPMWSSNAACAAPTAVPLDRMRLTAAKSGLRRHRKLRFARPQGSDSGSAPEDDELRFARPQGSDSGSAPEDDELRFARPQGSDSGSAPEDDELCFARPQGSDSGSAPEDDELRFARPQGSDSGSAPEDDELRFARP

SEQ ID NO: 65498 - protein, 110 aa, Zea mays
  Coding DNA Sequence Number=SeqID_22123
MEAQAHASCNRRVGCYVRATAPPLAPLPRLLDCGTSTATRGNPAYDPTVPARRDGQYCQKWAGSNGGGRRAEATVTSSAKLTSHPGTGPGKGIPRKGSFSVKETGPEPPY

SEQ ID NO: 65499 - protein, 393 aa, Zea mays
  Coding DNA Sequence Number=SeqID_22124
MGNTRNPSTLSLEERNFVEVASRMFIILAGAEAGLSQSSTSRAGSWVSLSFSIQGRGRSLALREGRTSTTRGWSTAGVVSFSMLGSPAWLPVPPPAARAVVAPHAREDRPRRRALLGRRSCSRVVLPLHRYGASARRSVPRSSERIRVGICRWADGSYRRCRGGGGSRSPRRRRDHRHHPRSGPPALCTCPRPSSVGVGEGKVAAASALRPSLLQFGHPERGSLSLLLERATASHPSAFCCSAGPPNYSPVGYLNRFTKRESPRAKVTSELEQRQSWLRKEDLVGRSLAGSFAGGTNAGVELPRPRAGLMSSGDSWPRPRGGRPSRLLEPDSWRRPWRRWPGRGADVVLQSGDPPTASPSEARSDLAEGVVDAEGAAAPFNCQDPSLQDQIIL

SEQ ID NO: 65500 - protein, 85 aa, Zea mays
  Coding DNA Sequence Number=SeqID_22125
MAPPSPSSAPAKKLFAIPRGEPEDTDDAAAALGLVTAALEMSPWVKAALEVRARAQALPRRLHPWPEIDEAHRHCDETGQKRRAN

SEQ ID NO: 65501 - protein, 218 aa, Zea mays
  Coding DNA Sequence Number=SeqID_22126
  Homolog annotation: Hit_ID=A2ZPN9; Match level="QueryCoverage=57%, HitCoverage=58%, E-value=1e-12, Identity=40%"; Hit description =Putative uncharacterized protein
MASSPPPGPPSWSVTLSLKHRGGLEIRAAAENVLPGWGRGGERLSLLLRLRRRLLLSVTSQCGGRRAASTEPGTPPRGSRVVRLLRSAWARLPRATSIWRRKKQAPARVVPRDRRGQSPTPARPGFWAVAWTPTSAATLRFVAVVVAIAAVLAVALAIDAAFRVTDDLGNRRGGWDSKPIARWATFLELMEHPPLPWNYNYKWLPGAPKRGLEWIFSK

SEQ ID NO: 65502 - protein, 110 aa, Zea mays
  Coding DNA Sequence Number=SeqID_22127
  Subcellular localization annotation: CTP_CleavageSite=48; ConfidenceScore=5.09e-01
MNKNTRDTRFIPRFGHTTKVPYFLVEAPTKSRVSFNPNPPFADHKDCRSEVRGVRDQLNCPSGPVQPVLTSEFRRENPSSTARRQVQLVYVQRGSQLKLRKLNSAEVQLS

SEQ ID NO: 65503 - protein, 138 aa, Zea mays
  Coding DNA Sequence Number=SeqID_22128
MNKNTRDTRFIPRFGHTTKVPYFLVEAPTKSRVSFNPNPPFADHKGQAHTLIFAQTSGGAVEPPLTAPGDLFASLTGRLQIRGQRGQRPAELPLRTSSTGLDHSAQLQLKKLNSAEVKFSWKAQLQLKKFSCFSARTL

SEQ ID NO: 65504 - protein, 363 aa, Zea mays
  Coding DNA Sequence Number=SeqID_22129
  Gene Ontology: Mol. function=hydrolase activity; Cellular component =vacuole; Biological process=lipid catabolic process
  Homolog annotation: Hit_ID=A2Z237; Match level="QueryCoverage=98%, HitCoverage=44%, E-value=1e-159, Identity=74%"; Hit description =Putative uncharacterized protein
  Pfam annotation: Domain name=Patatin; Domain location=19-199; Score =231.7; E_value=1.7e-66; Accession=PF01734.13; Description=Patatin -like phospholipase
MEKGKHIQPPTYGNLVTILSIDGGGIRGIIPAVVLTFLESELQKLDGEEARLADYFDVIAGTSTGGLVTSMLVAPNNTNRPLFAAKDIQAFYMNHAPKIFPQQRKKLGITRLHETLTDVVIPTFDIKRLQPIIFSSYEVKNEKYNTMDALLSDICISTSAAPTYLPAHYFKTEDCHGNTKEFHLIDGGVAANNPALVAIGEVTKQIFKENPDFFPIKPMDYGRFLVISLGTGSAKFEANYNAQTAKSWGLLGWLLGSGSTPLVDIFTQASADMVDIHISAVFKALHSEQNYLRIQDDTLQGTLSSVDVATKENMEKLARVGDMLLKKPVSQANLETGHMVPACHRAEMTNEEALKRLALPLHL

SEQ ID NO: 65505 - protein, 222 aa, Zea mays
  Coding DNA Sequence Number=SeqID_22130
  Gene Ontology: Mol. function=xylose isomerase activity; Cellular component=cytoplasm; Biological process=carbohydrate metabolic process
  Homolog annotation: Hit_ID=Q8H3Q7; Match level="QueryCoverage=29%, HitCoverage=13%, E-value=3e-23, Identity=75%"; Hit description =Xylose isomerase
MSWNLHHCAWDIQMLIKENHQEPSRYYGLRRGQGMKIIRPRGEELLAYWWREDHWLKAMFLHMRSIIKVEEELVGVPMKGGLDEVCNYFFCYALSLLERIIPEVKVYAYSAAQVKKALEVTHYLGGENYVFWGGREGYQSLLNTDMNRELDHLLTFFKLMLTTRRRLDSTLASEYLLPIKEPLLELERPPIFSAQDWLRKSGVHWSYFVEAASFCAVIHSNL

SEQ ID NO: 65506 - protein, 190 aa, Zea mays
  Coding DNA Sequence Number=SeqID_22131
  Homolog annotation: Hit_ID=Q6J9V9; Match level="QueryCoverage=36%, HitCoverage=26%, E-value=3e-07, Identity=46%"; Hit description =Putative uncharacterized protein
  Subcellular localization annotation: CTP_CleavageSite=90; ConfidenceScore=5.14e-01
MDRVFSNTLQGPPLRRWGWVPRVMQGGSEQKKPNRRARCVQPPSGYKRLSTFAQTNGRKGGQPCRRHATAPSGRTSPTPNTPSMEGPGPRVMQPGPGKRDTPKRILPREGTRLRAPLLIRGSKAGPPEGFDSRLRSRGPYTHYWSEVRRPAPRKGSTAASGYLGSAPITDQGFEGWPPKGLQPPQTPSEG

SEQ ID NO: 65507 - protein, 279 aa, Zea mays
  Coding DNA Sequence Number=SeqID_22132
  Subcellular localization annotation: CTP_CleavageSite=51; ConfidenceScore=5.31e-01
MSSRSLMHRVFPPSKPPDGGDPPSFRLIVGGTQLHGSWHLSAIVRLQGFSSCSPAAPPRRRSPQTVTTSPWVGRSKPGCDLGPTLSFKDVHHPCWDGGRAEPEHYLPRGFVGHPLLRRSRERALVGPAGGSDFDNAGPVDGRRRQPQRVGLVGLAPGAPSHRKAAAAPCAREDRPRCRALLGQRSCSGAVLPLHRYGASAGRSVPCSSGRIRVGICRRADGPCRRCRGGGGSRSPRHRRDHRHHPRSGPPALCTCPRPSSVGVGEGKVAAAFGLRPSPL

SEQ ID NO: 65508 - protein, 135 aa, Zea mays
  Coding DNA Sequence Number=SeqID_22133
MTEGKNGLPDLCSTAPSCLGAIKGTPRRMEENTKHPLSIIDHSHFILAHLFDILEFLTFGDGDASLEDAGGAAVVRGLPVLIRRDPTSLLPDVQRLALGGRGYLGPNRGCLGPSRGCLGMIRDCLGRFMPKGEKV

SEQ ID NO: 65509 - protein, 153 aa, Zea mays
  Coding DNA Sequence Number=SeqID_22134
  Homolog annotation: Hit_ID=A3AQ03; Match level="QueryCoverage=45%, HitCoverage=42%, E-value=1e-07, Identity=45%"; Hit description =Putative uncharacterized protein
MSGAPGDSNSELITFGKFQRRLRYNSPDCPVYTGHVRYSKEERPQELASLGNSIRLLRYNSPDMSGTNDDSYQKLKEENERLKKSLTQLKGKCIAQPSQDNRDHMVKKLETGTTVACTTSLEENVKDLRIAKRKKQKMKFNTSSKSLNHASIK

SEQ ID NO: 65510 - protein, 373 aa, Zea mays
  Coding DNA Sequence Number=SeqID_22135
  Gene Ontology: Cellular component=integral to membrane; Biological process=electron transport
  Homolog annotation: Hit_ID=A2XP97; Match level="QueryCoverage=36%, HitCoverage=46%, E-value=9e-64, Identity=88%"; Hit description =Putative uncharacterized protein
MEQEFLQALQAFYYDQKAIMSNEEFDNLKEELMWEGSSVVMLNEDEQKLLEASLAYTSGNPIMSDAEFDELKLRLKTDGSVIVKEGPRCSLRTHKVYSDLNVDYLKMFLLNVPATTVALGLFFFIDELTGFEINVFQAAAHHLPRCCPWEPIPSLPGAAPTLLSPPGLHPWTSALSTAHEAADRRFFGSRATGLSALQPSLSRTQPKPTMASACIRGPILPLARPLLRVAAPVAGHPKAANPPPLPLGTLFASAAPRRRPSSIPREQPPPALLVHFTLLPPSGLHPRTSVLSTAHEAADRRFFGGCAVGPSAAQPSLAHTAEAGHGERVHPQSAAPGAPPPSRRRPYAGSTGALHGLLTPSFVVQWWTDEQRL

SEQ ID NO: 65511 - protein, 166 aa, Zea mays
  Coding DNA Sequence Number=SeqID_22136
MPRDNGMRAARHTRHGWALEFLVGGGILPWIRSSPWPASPERQFMEVSPPSNSRSPLHRFASALVVNRSLESFEGAMISRRTPSVTAVARFAVAVVLCAAKTGGDFLLGSANISTSISTKRTWGSYSVGRGPAHADELAVWDCSGAAALSAQWGRQGMALDFEIYG

SEQ ID NO: 65512 - protein, 306 aa, Zea mays
  Coding DNA Sequence Number=SeqID_22137
MGFVDDSKGDELLSFTHEQRGFCTFFTSVDHLLGTRRKEFLQSVFLSKACCRYQKWSECPSSTQASPPRLEVGVHCTISNIFSREDTGKISGTIWTEEVVLHSTTAASRSGEAMQRKMAQPFEAKHQGNQLPVPLVPIIGKGVLEEEVMVSHTWGIAAAGSNTSCFTRTEADPVSFINMVTPPTIEVHRHSCIIHSVPSLPSATHGSMRRMTFFSLISPVLRLQLRHFEYMRDTMVKLPHELETARINELLGNIQAVVTPEMNQTTIIEEFDKGHQLEEVKTVNEQVVVPPVKNLSKQKSQQIQED

SEQ ID NO: 65513 - protein, 62 aa, Zea mays
  Coding DNA Sequence Number=SeqID_22138
MALSYFTGTWYSGSIVAGIFWLKFYRLKELVCSFLEPELVWCKQLLKFNRFHVMAFILLYLL

SEQ ID NO: 65514 - protein, 204 aa, Zea mays
  Coding DNA Sequence Number=SeqID_22139
  Subcellular localization annotation: CTP_CleavageSite=81; ConfidenceScore=5.41e-01
MSTARAPRNRFLCNHNRPSFSPPTRANSERHRLRLVTRDRWTAAARRPQLSSMIGSTKPLAAPLHPPCPSGRRLAPPPPPSCAPDSSPALTPAVERPGQSQSDGAPPPPRPDVVASFLALRASPQLNRWSRSRALRSNRRPRLESALSSSSAASVTKTSRPEDAAVAVEDGEDNDRFGVVQILMLEEKEGAPNQMELITLATSL

SEQ ID NO: 65515 - protein, 100 aa, Zea mays
  Coding DNA Sequence Number=SeqID_22140
RLSEGGVEVDGTILSVAKELGLKSEPSLASRTPVLADDVLQLDGESLEDPGEDDTVHPEPGEARRGAVSENMVVECVALQGTLIGGGLERRTTKKELDLG

SEQ ID NO: 65516 - protein, 85 aa, Zea mays
  Coding DNA Sequence Number=SeqID_22141
  Gene Ontology: Cellular component=integral to membrane; Biological process=electron transport
  Homolog annotation: Hit_ID=Q7F1E4; Match level="QueryCoverage=83%, HitCoverage=21%, E-value=4e-28, Identity=81%"; Hit description =Putative uncharacterized protein OJ1191_A10.128
MAELLKVYLFHSQVQEQDDEVVDRNILPYCSIDRKQKKTLGEMEQEFLQALQAFYYDQKAIMSNEEFDNLKEELMWEGSSVVIAK

SEQ ID NO: 65517 - protein, 316 aa, Zea mays
  Coding DNA Sequence Number=SeqID_22142
  Gene Ontology: Mol. function=oxidoreductase activity; Cellular component=cytoplasm; Biological process=response to gibberellin stimulus
  Homolog annotation: Hit_ID=Q0PWF8; Match level="QueryCoverage=100%, HitCoverage=100%, E-value=1e-146, Identity=73%"; Hit description =Gibberellin 20-oxidase
  Pfam annotation: Domain name=2OG-FeII_Oxy; Domain location=145-251; Score=82.2; E_value=1.7e-21; Accession=PF03171.11; Description=2OG -Fe(II) oxygenase superfamily
MVLAAHDPPPLVFDAARLSGLSDIPQQFIWPADESPTPDSAEELAVPLIDLSGDAAEVVRQVRRACDLHGFFQVVGHGIDAALTAEAHRCMDAFFTLPLPDKQRAQRRQGDSCGYASSFTGRFASKLPWKETLSFRYTDDDDGDKSKDVVASYFVDKLGEGYRHHGEVYGRYCSEMSRLSLELMEDDVGGLQVFDAATLAWRSIRPRPGAFVVNIGDTFMALSNGRYRSCLHRAVVNSRVARRSLAFFLCPEMDKVVRPPKELVDDANPRAYPDFTWRTLLDFTMRHYRSDMRTLEAFSNWLSTSSNGGQHLLEKK

SEQ ID NO: 65518 - protein, 148 aa, Zea mays
  Coding DNA Sequence Number=SeqID_22143
MGKNNKRKREPTPPSEDFGDSEYSEEEFSSESEGSPAPVSPPASSDDSDDSQGIAAEVWTYIRAVERSGLEGSDESEYSSDEEDSDGGDEGEGDDDGDDDGDGSGSGGGGGDGSRGSTKGDSSKGGTKGGSSKGSTKGGGGGRGRASG

SEQ ID NO: 65519 - protein, 173 aa, Zea mays
  Coding DNA Sequence Number=SeqID_22144
  Gene Ontology: Mol. function=protein binding; Cellular component =integral to membrane; Biological process=vesicle-mediated transport
  Homolog annotation: Hit_ID=A2WMI2; Match level="QueryCoverage=41%, HitCoverage=36%, E-value=2e-29, Identity=88%"; Hit description =Putative uncharacterized protein
MSSSPQEPYSPRCHCTSYPSRLATNAKKGKHNDAPVEATDAGKPDQSAPACPERTPFSFKDPVPDTKPASTGVEKTKGSLPLDGEVSWRVKGNQIETAARPYAFIKFDTFIHKTKKLYLDTRTQRNLAKLNDELYEVHQIMTLNVQEVLGVGEKLDYKISIIFCQRLVMSIAV

SEQ ID NO: 65520 - protein, 102 aa, Zea mays
  Coding DNA Sequence Number=SeqID_22145
MDLWVVAPRFPVTPCTPRLLGSAAPWIRKESLEEAPRPRLWICVSSEFLAFCGPPPPRNQCATPPACHHRESTSSTVQPAPLLQQGVKGSHSANKKTKFWIQ

SEQ ID NO: 65521 - protein, 653 aa, Zea mays
  Coding DNA Sequence Number=SeqID_22146
  Gene Ontology: Mol. function=protein binding; Cellular component =integral to membrane; Biological process=protein processing
  Homolog annotation: Hit_ID=Q6Z743; Match level="QueryCoverage=96%, HitCoverage=96%, E-value=0.0, Identity=70%"; Hit description =Putative nicastrin
  Pfam annotation: Domain name=Nicastrin; Domain location=226-435; Score=359.8; E_value=4.5e-105; Accession=PF05450.6; Description =Nicastrin
  Pfam annotation: Domain name=Peptidase_M28; Domain location=226-424; Score=-59.0; E_value=0.058; Accession=PF04389.8; Description =Peptidase family M28
  Pfam module annotation: Pfam domain module=Nicastrin::Peptidase_M28; Domain location=226-435::226-424
MSAGSTASLLAAVICLALAVLAPVVPGDGATLESVPDLVKAMYLNVESFPCVRLLNLSGEIGCSNPGSEKVIAPIVRLRKGSDQLVQPSTILLSLDQMSDFFLRVSNDPELHQKVAGVLVESNGVNNDLQELSPDRKFPQDDFAPYSNHSHDWNPAGSGIMWNKYNFPVFLLSEESTNTLQKISEKNEKTGNGYKANVAEFDLVMQGSVWTSLPPLNNGSTEHPKPLILAIASQDSASFFRDRSLGSDSPISGLIALLTAVDALSHIHGLSKLKKQLVFAVFNGEAWGYLGSRKFLQELDEGAASVNGISSLKIDQVLEIGSVGKAILEEYPSFYVHAEGNPSASKEILDALQSASKSLGSDNVKVKQAASSNPGVPPSSLMSFIRKNMSTSGVVLEDFDSHFSNRFYHSYLDNSVNINSSSIAAAAALVARSMYILASDDSVVDLITLNTIKVNVSLVEELIGCLLTCNPGLSCGLVKRFISPSNPCPSHYVGVFLDDPSGTQLPSYADDTSRFVWNFLADRTNSAGNKSSCTGKCGDEGEVCVGAEVEGGGRCVVSTTSTSLPRYVPAYSTRVKFEDNAWHVLPANSSDPMGAADPVWTESFWNTIGLRVYAVQDPAYDWLILLAGLGITAASYCAVHFGRAYISKVAKLD

SEQ ID NO: 65522 - protein, 301 aa, Zea mays
  Coding DNA Sequence Number=SeqID_22147
  Gene Ontology: Mol. function=carboxyl- or carbamoyltransferase activity; Cellular component=ornithine carbamoyltransferase complex; Biological process=amino acid metabolic process
  Homolog annotation: Hit_ID=Q8SA97; Match level="QueryCoverage=35%, HitCoverage=20%, E-value=7e-18, Identity=50%"; Hit description =Ornithine carbamoyltransferase
  Subcellular localization annotation: CTP_CleavageSite=46; ConfidenceScore=5.01e-01
MALLVDVVGPRPRLGDVEAPPRSRSSLSSVVVVKSEPLGRARRRPSAEARAESEPWGRAKRCSSSSGAEPKSEPWVGRSGVSRLPGLSPSPSPGSGGAEFAVFRGLAQGLSPSPSPGSGGAEFPMVPEVGPDCLSASFCQVALQPVRRRRRYPSVRPVSGAANDLVRVASWRRQGLGQAGNMFVTGRGASGKTEILREPGLREQPPSLCIGREDDQGQTRLLYIRPCIAFPQGGGGKAPCCPRWAPKMVSPVSCWRVIRADVRAPFARGRLEAQRRAQKYLRVICRTRSPVDGVRGLDASL

SEQ ID NO: 65523 - protein, 95 aa, Zea mays
  Coding DNA Sequence Number=SeqID_22148
MAVLIMNKNLVLPAVIMLVVVMVLSMVLGSAAARPLLGEDDRLPGEAAAAVGDSIVRLIRQLYRQQLSGPGAQVPRVRWGYTSRVKSDSLARTEF

SEQ ID NO: 65524 - protein, 77 aa, Zea mays
  Coding DNA Sequence Number=SeqID_22149
MEEAMLKLNEESSSRPKRHRRYINRDCWGSPANVSVSPLSTEVQNLKFSVYKPAQSLPTVYFKAPVIKFQLRPAEWC

SEQ ID NO: 65525 - protein, 63 aa, Zea mays
  Coding DNA Sequence Number=SeqID_22150
MEKCCPVSLRASHCFKILIAGVSVSEVEAFVQAVQEDQQRLSSMMGLINRSAMGVWFTAWFLM

SEQ ID NO: 65526 - protein, 213 aa, Zea mays
  Coding DNA Sequence Number=SeqID_22151
  Gene Ontology: Mol. function=metalloendopeptidase activity; Cellular component=mitochondrial respiratory chain; Biological process =proteolysis
  Homolog annotation: Hit_ID=Q9ZU25; Match level="QueryCoverage=36%, HitCoverage=15%, E-value=2e-28, Identity=80%"; Hit description =Probable mitochondrial-processing peptidase subunit alpha-1, mitochondrial precursor
  Pfam annotation: Domain name=Peptidase_M16; Domain location=5-108; Score=51.5; E_value=3e-12; Accession=PF00675.11; Description =Insulinase (Peptidase family M16)
MGPKSSEDSYCGVSHLLERMAFKSTVNRTHLQLVCEVEAIGGNVSALASREQMSYTYDALKNYTPEMVEVLIDNVRNPAFLDWEVKEQRVRTPESEEFPLRRSLSRPKERGGIRAASRRCRAAGPFHGVSGELSEVQKKCTLYSLSCPLALAGGDKISQALKSICWRSKAIQVEGDSAIIHRTVRCTPDSVRCAKGGRPQELASFGKRQRLAR

SEQ ID NO: 65527 - protein, 37 aa, Zea mays
  Coding DNA Sequence Number=SeqID_22152
MAPYSIKRSYYLEKSYTYQKFCDSRSVDLKPDWEIQE

SEQ ID NO: 65528 - protein, 149 aa, Zea mays
  Coding DNA Sequence Number=SeqID_22153
MDLATAVQYRSNFLLSTTAYASGSLPPHHYLRVDAWELVHGAATRWQATCALSSYSGCTTMASFSLSQPGPTATTPETKLGFEATPTAWSIANAWSIGSRERYAKEAAAVGIKGRPSSNPYLAGSVVLVSTDTTSPLRVVLPMVALFRI

SEQ ID NO: 65529 - protein, 48 aa, Zea mays
  Coding DNA Sequence Number=SeqID_22154
MACRRRALRRVIWCAAALGIQDEQATVETEVQQVEIAEQELVEGKLCP

SEQ ID NO: 65530 - protein, 537 aa, Zea mays
  Coding DNA Sequence Number=SeqID_22155
  Homolog annotation: Hit_ID=Q75H12; Match level="QueryCoverage=91%, HitCoverage=85%, E-value=1e-178, Identity=65%"; Hit description =Putative uncharacterized protein OSJNBa0027H16.30
  Pfam annotation: Domain name=DUF247; Domain location=30-512; Score =162.7; E_value=9.6e-46; Accession=PF03140.6; Description=Plant protein of unknown function
MATSCPTLPFDEARWIVRIRRIFDEEIEVSEDQPICVFDVPKPLLITKPEAYVPQLLALGPYHHCREEICDMERYKLSAAKRAQSHLPDMDFQKLVDVFTKLEHLVRAHYHRHLNLSNEALGWMMAIDVSFLLEFLETLKNRNGNQQRALQRIPSRMSHLVDPSRRTSSHSMLLRDVVMLENQVPLFLLLKAIEARCSTAAAQLPPPQSVLSSMLAGLFQEVSTFRGIGRPCTDVDRHVHLLDFLYSNMVPRCTEESHGAEEGGDASCHDHGKSALNSAMDLLVSRGSKIVSVMADFVLRVLLKFVASLPCLSVLGDPIEQLTQHAAAPGVPDKDASPLLEEIAVPSVAELAYTGVRFCPTVGGLSTVDFCPATATLHLPVIGVDVNSEVVLRNLVAYEAAAGLGPLVLARYVELMNGIVDTAEDARVLRECGVVLNHLKSDGEVAELWNGMTRSVRLTKVPALDRVIDDLNRHYGSCWKVRVRTFVKARVFGSCRELLACVALLLLFLFVGLQSICVLHGCVPVSYGMPSRRFGAS

SEQ ID NO: 65531 - protein, 567 aa, Zea mays
  Coding DNA Sequence Number=SeqID_22156
  Gene Ontology: Mol. function=iron-sulfur cluster binding; Cellular component=mitochondrion; Biological process=iron-sulfur cluster assembly
  Homolog annotation: Hit_ID=A7PKR9; Match level="QueryCoverage=9%, HitCoverage=11%, E-value=3e-20, Identity=86%"; Hit description =Chromosome chr7 scaffold_20, whole genome shotgun sequence
  Pfam annotation: Domain name=DUF1084; Domain location=28-274; Score= -62.6; E_value=2.1e-06; Accession=PF06454.2; Description=Protein of unknown function (DUF1084)
  Pfam annotation: Domain name=NifU_N; Domain location=471-555; Score =25.6; E_value=6.4e-09; Accession=PF01592.7; Description=NifU-like N terminal domain
  Pfam module annotation: Pfam domain module=DUF1084::NifU_N; Domain location=28-274::471-555
MEYDVSDCKQILLPFYFMGHFTLYVLNMDTRSIYIMDSMPIPSWFKGDHPSMHYIHNIHYIANNMNAAMELANPTWKDDIYMWRRLVPTWVPRTLNWDLSGFLVINFMHDWNGIRLPCICTHCSLSPLPAYEPAFDWENERSLIFGQRVPESIPAISNSGFKITVKSVCVKMIAAGAEHTAAVTEDGDLYGWGWGRYGNLGLGDRNDRLLPEKVSSVEMCFNAFDEEADLDVLDHPVLNLFYYLLVEILPSSLVLYILRRIPAKLRLSQYHPTQKDPEKLRREREELERVQREERARLQAEAKAAEDVRKRAKAAAADEAAAEAKRQRELEREAARKALQEMEKTIDINEGSHFLKDLEMLGSVTGEQIPNLVGETSPGFQMGSNTTKKARVVRENDEDDEDDDFTDEPVADVEEGEIARQVRCTCSIRMSVFSVYHLCLSWLLFLLADERPLELLAKAYAINSFDIDPQNPSDVVFTLEWEPIGVLPCGEKKDNFYYQASEWVKGKQVEEVVAIKNTEIAKHLSLPPVKLHCSMLAEDAIKAAVKDYEAKKGKKMAKAEEQDTPCP

SEQ ID NO: 65532 - protein, 490 aa, Zea mays
  Coding DNA Sequence Number=SeqID_22157
  Gene Ontology: Mol. function=cysteine-type peptidase activity; Biological process=proteolysis
  Homolog annotation: Hit_ID=Q109R5; Match level="QueryCoverage=80%, HitCoverage=42%, E-value=6e-46, Identity=30%"; Hit description=Ulp1 protease family, C-terminal catalytic domain containing protein
MDIVAEEGNADVGNTAEPSYEVVSRSGCSAQLSTNDTNEHELDIESEDSKVSVGNAAKQSHDVVGVDIDCIFNHVKVSTEADLGTQPDVIHLTSLDVPNESSQISSDADMVEQNKQDALDTLIRISQHKKPKKLNVARVVSEDVQLIEYIKTLPGKQVVVDIDSAWLNRNDMECLFHGDIQVSGEALSAYIHCIRDEEHLLHREGGKVFLENTFISSLLKRDGDPKVLLNCVHSNEYRKFSLVPGSSECKKNEVHVLDSMGQQITDRRDLYTTLKGIERQIKLAAEHKELYQGKWSNLDVASWPVIEKITTQMQTDGVSCGLWMINYMEYWTGSSLSDNVTQDDITMFRFKLPAILWDSRLNTKKRHQNLDHNVDEDGESSSDVQIIDTPLTSTNTQELMFVLCTYIMGIDNDKYLKKHWIQSTKPYPISLSLQKLKDILDVNKPMDTDCFNMAVRMIACNDALFLLEDKYHYMDLQFCVYLYLRFSRKQ

SEQ ID NO: 65533 - protein, 153 aa, Zea mays
  Coding DNA Sequence Number=SeqID_22158
MGKGTKRKREPTPPSDEFSDSEYSEEEFSSESEGSPAPVSPPASSDDSDDSQGIAAEVWTYIRAVERSGLEGSDESEYSSDEEDSDGGDEGEGDDDDDDDDDDGDGDGSGSGRGGGDGSRDSTKGGSSKGSTKGGSSKGSTKGGGGGRGRASG

SEQ ID NO: 65534 - protein, 80 aa, Zea mays
  Coding DNA Sequence Number=SeqID_22159
MNVCELTLAVSHPPQVKNRRLDSYDVTLSKGLMDHDTKLDLQLLARDADLKRRLSDLDAKWDTRISTMSEARETRVSRLK

SEQ ID NO: 65535 - protein, 78 aa, Zea mays
  Coding DNA Sequence Number=SeqID_22160
MQKAHSIRIILRNGPLVDKASLVPANKVRNMRLKCTGKDFGNDFDGTILEADWAEVGLSIAKRSEEIAKSRRGDVPGG

SEQ ID NO: 65536 - protein, 83 aa, Zea mays
  Coding DNA Sequence Number=SeqID_22161
  Subcellular localization annotation: CTP_CleavageSite=65; ConfidenceScore=5.26e-01
MSGAPEDFNTNSPPSGISGGNSAIIHRTVRCTPDMSGAPRKGGLRDSPASGFHFSCSAKIHRTVRCNLGGNGYFAPTVTCRRI

SEQ ID NO: 65537 - protein, 221 aa, Zea mays
  Coding DNA Sequence Number=SeqID_22162
MWTEEVIYSRIPSVGPDLLKKAPNPCTHSPDLRVRPETPKRRPGHPTGGVPVQSIVKQYARAARCAVSIITYTLPGKLPLHANTTQITDVRCKKIATTTNISCPKYYIRCVLGPTCRPGLSTLQMSHMIPLIAILQVRDRVGDAVTWTGSGISTNPEVREVQFAGTFLSRLSTGGMQRHYLQTANGNHAFRGSGLAVGVWLRLIIGSQSRAALALANYSLV

SEQ ID NO: 65538 - protein, 108 aa, Zea mays
  Coding DNA Sequence Number=SeqID_22163
MSSSSSSAAATPSAGALSEETLSNVAAEELRASDKVEFGVSQMSSVRVQDMQQLGYFGGGVARVPGTEEVPEPEGELVVFEAFFAAGLRLPAHRFVEEVLRRFNVQVH

SEQ ID NO: 65539 - protein, 241 aa, Zea mays
  Coding DNA Sequence Number=SeqID_22164
MDKDRQEAAQKRRAVIRLPEARPKRAQGTAKAAAPSGSQPTLAAKSAGPGSSKVPDVVKAAGAGGAKSASAGAAKAQELPSPGKRIADFSTDISVDDYLTGSGEGQLVVPPAVATTVSATVPGAKGSALSAGGEISALTTVKDKAGTVSRRLREASQRLSQAADFADRVASGALTAVVSAKVERLRAQHADAVREKSAADSKCRKLAEKVAALEGERTDLRCQLTEERREANQALAKAQSA

SEQ ID NO: 65540 - protein, 68 aa, Zea mays
  Coding DNA Sequence Number=SeqID_22165
MGSTVDGRRRPWETRASAGSIHGRGLGEQQEDPVRRDRARVTSTNKLKACGTFNFSLAVSVIKPTFWI

SEQ ID NO: 65541 - protein, 341 aa, Zea mays
  Coding DNA Sequence Number=SeqID_22166
  Homolog annotation: Hit_ID=A2XFR6; Match level="QueryCoverage=41%, HitCoverage=40%, E-value=2e-08, Identity=31%"; Hit description =Putative uncharacterized protein
MGSRHSTCSAKMARIRCTARKSVIPFLPSRLAERPLRRTVSDQSSHLERLHHRLHEEQEHRRQEQEQDQEQQDSSPSRQREVESERPPSPAPQPEMPPAPPQGIPAAGGDPDGDDDDTGGSSSHGTERSEEPKSEGWIARPITRDAARGCHFHDALDTLLRRAFDRHTWSIEYRCVVYEYRRGLYLGPVGGYLLEAFSENYFITERDTAKATMQDAARRALSQYCLLFSGVADGLDLKYYPRRSTGSAGGVIVSQVSEDNPRLSSMVNLAAVLNTELDHALDELSKVRVEVVELRAECAARHYLDGGSPAPVGIQHPYRSPPRGRFDYGTPDYRTRIDLDP

SEQ ID NO: 65542 - protein, 201 aa, Zea mays
  Coding DNA Sequence Number=SeqID_22167
MTVRNVILERFAGFKEESISEFQPLLFDPKDRVKGSHSANKKIKFWIQRKEQRGNRRHLWSGGTGQCPVHQRTPTPTCHLRENPEPARYNSPDCPVYTGQCPVLQRDAALELASLGILRRLLRYNSPDMSGVHRTVRCNRGATAISAPTATCDAFNARAARADVRHAQTGAPDIQQYMSGVHQTSRRAQKSEAPTVRIQRH

SEQ ID NO: 65543 - protein, 92 aa, Zea mays
  Coding DNA Sequence Number=SeqID_22168
MPCIKYLFEGHNFVLLSLRRTFVPSCIKEPKGIEIKYQHWHPSSVISQPQQLTRCHRRRQQQLAPSLGPWTPPKEAKLSSGWQETKRERLST

SEQ ID NO: 65544 - protein, 106 aa, Zea mays
  Coding DNA Sequence Number=SeqID_22169
MTDDEGIPQCGLAQLRGPRAIRPIVTGPAWPPRVTGLICKGIPVITVCNPALWEYSGDNLGPYGEVLGKQPESPKVSQVHQHIQNNSPSPLKYHKFIINILIMFID

SEQ ID NO: 65545 - protein, 109 aa, Zea mays
  Coding DNA Sequence Number=SeqID_22170
MESHRRRGHERARGPGRQEGLREVRGNMVNTSVGMATTQEPRKIAAYGGMAWRQRDLAPASNRTHPRAGKGKIEVGEGWLPRKWTPVPLNGGRDTTRPWVNGGDAPAAR

SEQ ID NO: 65546 - protein, 61 aa, Zea mays
  Coding DNA Sequence Number=SeqID_22171
MAAGIYRLDERRPRVRWCENEVNASNPKVIGISVEVIAGELRIDMVTKTKDDTDLKGEKTI

SEQ ID NO: 65547 - protein, 155 aa, Zea mays
  Coding DNA Sequence Number=SeqID_22172
MDPVPPPYYSPSSSQESDPSWKWRKAYLQGHRRRSIQAPVCQRQHPYIRPTIPRRRMGAVLADYTSSDEDAREDAVKGGGHVAASATEEEGKVAASTTEDEGKVAASKTGGCKVAASLTGEENTLCKNVAASANEEKGAGKVTTGEQQKDAPSFT

SEQ ID NO: 65548 - protein, 621 aa, Zea mays
  Coding DNA Sequence Number=SeqID_22173
  Gene Ontology: Mol. function=catalytic activity; Cellular component =chloroplast; Biological process=cellular metabolic process
  Homolog annotation: Hit_ID=Q60E66; Match level="QueryCoverage=73%, HitCoverage=94%, E-value=0.0, Identity=87%"; Hit description =Putative UDP-sulfoquinovose synthase
  Pfam annotation: Domain name=Epimerase; Domain location=231-521; Score=142.2; E_value=1.5e-39; Accession=PF01370.12; Description=NAD dependent epimerasedehydratase family
LRHVPQVPQADKKAAPGGSVPEEQGRPAPSSSPFAARHFSAGHDMAEFKSFVVYFFDKICARIPRGQEKFLCIVDLKGWEILVFLQVNKVHTKKAAAPKIAKQESSDDDTSDETFESDEEPAKKPVAKPLAAVAKNGSKTVKQESSSDEDSSEDESDDDSDDTFSSSPNYCRNIGQLQNSKSSNLSLKSCSRRQKKSYVTCASAAVQGQTQTPLTGSQQAYEHSSSKPKKVMVIGGDGYCGWATALHLSNKGYEVAIVDNLVRRAFDNQLGLDSLTPITSIQNRVRRWKSLTAKTIQLFIGDICDFEFLSEAFKSFEPDAAVHFGEQRSAPYSMIDRSRAVYTQHNNVIGTLNVLFAIKEYSEECHLVKLGTMGEYGTPNIDIEEGFITITHNGRTDTLPYPKQASSFYHLSKVHDSHNIAFTCKAWGIRATDLNQGVVYGVRTDETAMHEELSNRFDYDGVFGTALNRFCVQAAVGHPLTVYGKGGQTRGYLDIRDTVQCVELAIANPAKPGEFRVFNQFTEQFSVNELAKLVTAAGAKLGLEVETKSIPNPRVEAEEHYYNAKHTKLIELGLVPHLLSDSLLDSLLNFAIQYKDRVDTAQIMPSVSWKKMGAKPRTVSV

SEQ ID NO: 65549 - protein, 366 aa, Zea mays
  Coding DNA Sequence Number=SeqID_22174
MEPKLSSVGVRDLRRVVMPTPVLVVLLDARHDLHRVIIPTPVRTPIASIAVPPARGRCACRSDGGPHGKGAGQSRPLAFPDSPSKQAPAPDLQLMCRFPVSETPRVCNCRRWTMKRWIKEMEEVAAMATNSRSIMPSRAIHKGKPLSVSLASRRSPPLSSRTPGSVIDLAEGRERTGKETVGCQREIGRDAGSTASTLARVVARCSRCSLGSSPSCARRVLGVVGVGGKLECCQFLDGAGAAAVPQTIVDRILCDNVVGKISSLAFAILASSCSIGWRKGWCTWLREWCSPVGLRREGTAPPPCRPEEEEVTLVVRIVMNERDHIYAYRFDASPWTVRSLACSCDRVEVWAVPGSLDEDLTNHKTY

SEQ ID NO: 65550 - protein, 42 aa, Zea mays
  Coding DNA Sequence Number=SeqID_22175
MAGGIKLAGAKGRWLAGEEIWSQEIWSVSLPKPEANPRFCRV

SEQ ID NO: 65551 - protein, 74 aa, Zea mays
  Coding DNA Sequence Number=SeqID_22176
MAGDMDIFDPTERYIGGIIQHLPSYAGKFDPRAYIDWELKPCYDFIMLRCLGGEPSWSGENNKAIKAVAPEIIS

SEQ ID NO: 65552 - protein, 70 aa, Zea mays
  Coding DNA Sequence Number=SeqID_22177
MNVGSTFSRLTKKVLENHVGRNIFTYVDDIVMAIPSELTVDNGKQFNNQDFREFCNSIGMKTVFASVYHL

SEQ ID NO: 65553 - protein, 187 aa, Zea mays
  Coding DNA Sequence Number=SeqID_22178
  Subcellular localization annotation: CTP_CleavageSite=66; ConfidenceScore=5.23e-01
MVRSAHTTPSPHPLMDTEPDPPPPPPFGEWSSYSTIFADLAASSSSWSRSRRPPAQVAPPLRPGPSAAQAASPVRPGQPAQVRANLQRQTLIYDPLACYSPAFWVRLTHLEYDQLESGTSKSLPGGHVGPWNVVLRYTKIVDDKGLPVQVTIKRHHGSFTDKECKRIRKELKRMCTLRHKNLVKLHE

SEQ ID NO: 65554 - protein, 284 aa, Zea mays
  Coding DNA Sequence Number=SeqID_22179
  Homolog annotation: Hit_ID=Q8SA86; Match level="QueryCoverage=39%, HitCoverage=12%, E-value=3e-09, Identity=31%"; Hit description =Putative retrotransposon protein
MGRIAHGPLIALRETKPCGLCGLGHPILEVVDGLRLRLSSEGGAWAFAWTTSAARPAEPAGVAFGLWNVDVEFDERGGGVFAFAPTFALRGASSTKSAGVEDCHEIVKTLPSLEMIPQGFFEIDLAHIKQTARRRRRYVTMSSSSSSAAIASPATPLSEETLSDLAVVELQPDHTVEFRTSRIFLVHMLEMQRLGYFGNDVGRAVWVEEVSEPEGELIVFEAFFAAGLHLPTNWFVVEVLRKFEVQVHQLTLNAVVALVKYVWAVSSYSGQSSVEVFTKNYCLH

SEQ ID NO: 65555 - protein, 239 aa, Zea mays
  Coding DNA Sequence Number=SeqID_22180
MVGHWVRLPPAGCQHRGQLVRSPVFAVDLRNRDTVAFVHEVEAEAVKIVGKYTPKIETLRSWDICGSNARLNRVFELNHLTYGGYPEGDSANIADRRGKQTRPLADEGPSREKAPAPGETMSSPELQETSARMLKRKKRWAHVRLADPRREVKMARSSTKSVALGAGMPPPTVPASARRLPSPPRIAEAAVARAEGVSMELSVDDYLVGGVAMFDAQMGLPPAGEFFLNGAHVSDLNVM

SEQ ID NO: 65556 - protein, 172 aa, Zea mays
  Coding DNA Sequence Number=SeqID_22181
MGLKGDTGASEDPWARFCADGEIASTAAATGRGRLGHTTTEIQADAARAEANLALKRAADKELELKILRNCYEKTEASTRVGVERAHTLFVEAYRVLGAQTAPFDRSREEVGLRFLGWLQEELESLLSIMTGLMSYASLVTCEGAANALSREGCKHFEVFDRASEDFDRRIF

SEQ ID NO: 65557 - protein, 245 aa, Zea mays
  Coding DNA Sequence Number=SeqID_22182
  Gene Ontology: Mol. function=UDP-3-O-[3-hydroxymyristoyl] N -acetylglucosamine deacetylase activity; Cellular component =cytoplasm; Biological process=lipid A biosynthetic process
  Homolog annotation: Hit_ID=Q10PS1; Match level="QueryCoverage=90%, HitCoverage=59%, E-value=1e-74, Identity=70%"; Hit description=UDP-3- 0-acyl N-acetylglucosamine deacetylase family protein, expressed
  Pfam annotation: Domain name=LpxC; Domain location=22-245; Score= -32.2; E_value=9.3e-11; Accession=PF03331.4; Description=UDP-3-O-acyl N-acetylglycosamine deacetylase
  Subcellular localization annotation: CTP_CleavageSite=29; ConfidenceScore=5.68e-01
MPSSAARALTSVSRAAFSWKPTGRPQQTLAAAVSRSGVGLHSGARVTATLFPTQAGEGRYFLVEGDEEARVAAEVGNAEPLSQLCTTLRRGEGAHTRVRTVEHLLSAMEALGVDNCRIEVSGGDEFPIFNVGRCRVIVVFSIYVKVIKQCQIPLLDGSAQEWVEAVQGVGLCAAEDANGEKLDKLAPEIQEPVYLRKHDCFIAAFPSPQIHITCGIDFPKILASPLVRMAQEKMIQQEKMKHQKD

SEQ ID NO: 65558 - protein, 134 aa, Zea mays
  Coding DNA Sequence Number=SeqID_22183
MIKECTEGSEMGTAAHSALGLGGARARGRRRRRLASETVALGLGDGDGDGGALGDGHGGGLGARARRRSGSGTGTAALGLGDGGARGRGRAPSSETVALGLGLGDGVAGAHGSETGTGTAAQQPGGVVSAPGEN

SEQ ID NO: 65559 - protein, 700 aa, Zea mays
  Coding DNA Sequence Number=SeqID_22184
  Gene Ontology: Mol. function=two-component response regulator activity; Cellular component=nucleus; Biological process=two -component signal transduction system (phosphorelay)
  Homolog annotation: Hit_ID=Q948L2; Match level="QueryCoverage=100%, HitCoverage=100%, E-value=0.0, Identity=79%"; Hit description =Response regulator 10
  Pfam annotation: Domain name=Myb_DNA-binding; Domain location=218 -268; Score=48.3; E_value=2.7e-11; Accession=PF00249.22; Description =Myb-like DNA-binding domain
  Pfam annotation: Domain name=Response_reg; Domain location=15-144; Score=63.3; E_value=8.5e-16; Accession=PF00072.15; Description =Response regulator receiver domain
  Pfam module annotation: Pfam domain module=Myb_DNA-binding::Response _reg; Domain location=218-268::15-144
MAAAEARGADFPVGMKVLVVDDDPTCLVVLKRMLLECRYDVTTCPQATRALTMLRENRRGFDVIISDVHMPDMDGFRLLELVGLEMDLPYVNMWCWNTSEIIADEIAVMSADSRTDIVMKGIKHGACDYLIKPVRMEELKNIWQHVVRKKFNGNKDHEHSGSLDDTDRNRPTNNDNEYASSANDGGDGSWKSQKKKREKEDDETDLESGDPSTSKKPRVVWSVELHQQFVNAVNHLGIDKAVPKKILELMNVPGLTRENVASHLQKFRLYLKRIAQHHAGIPHPFVASASSAKVAPLGGLEFQALAASGQIPPQALAALQDELLGRPTSSLALPGRDQSSLRLAAIKGNKPHGEREIAFGQPIYKCQNNTYGAFSQSSPAVGGLPSFAAWPNNKLGMTDSSNTLGNVGNSQNSNMLLHELQQQPDTLLSGTLHNIDVKPSGVVMPSQSLNVFPASEGISHNQNPLVIPSQSPSFLASVPPSMKHESLLGSPSPSTSLLGGLDMVNQASTSQPLISSHGANLPGLMNRSSNAMPSPGISNFQSGNIPYVVTQNAMGVSSRPPGVLKTECTESLTHSYGYIGGSTSVDSSLLSSQAKNPQYGLLQSQNDVSSSWLSSQDFDSFGNSLGQGHPGSTSSSFQSSALGKLPDQGRGRNHGFVGKGTCIPSRFAVDEVGSPTNLSHNIVNSGDIVNPDIFGFSGQM

SEQ ID NO: 65560 - protein, 224 aa, Zea mays
  Coding DNA Sequence Number=SeqID_22185
MEPIHSPPVLNQTHPKITRKISSQGVLQGICAAQLMDPHAPLHIQQQTAKPKQSQARPGALARARVAASDWQRPQTERRAGPRRVADGDGCQLRTTISTGGSNGGEAADPPSATANGWTNPFRRGRSRKPRGETAELQRAAGACTFGRLFSISRHFIVVAKFSHARENVALRVQSSTRASQCHLNAVRGYPQGKGGATTTWRPATPSHSHWVVAMDPNPNVSSQ

SEQ ID NO: 65561 - protein, 523 aa, Zea mays
  Coding DNA Sequence Number=SeqID_22186
  Gene Ontology: Mol. function=transporter activity; Cellular component= integral to membrane; Biological process=transport
  Homolog annotation: Hit_ID=Q6ZAJ7; Match level="QueryCoverage=77%, HitCoverage=83%, E-value=1e-139, Identity=62%"; Hit description =Transporter-like protein
  Pfam annotation: Domain name=MFS_1; Domain location=59-417; Score =121.7; E_value=2.2e-33; Accession=PF07690.7; Description=Major Facilitator Superfamily
  Pfam annotation: Domain name=Sugar_tr; Domain location=54-488; Score=- 138.9; E_value=0.0015; Accession=PF00083.15; Description=Sugar (and other) transporter
  Pfam module annotation: Pfam domain module=MFS_1::Sugar_tr; Domain location=59-417::54-488
LKAALGRDQKPVPMLPIDMAAHQVQPLFVIDFFVLQLGEMGSSAVQVQRRRRQLTLVLVTTAALLERADEALLPAVYKEVGESLGVSPTALGSLTLCRALVQTLCYPLATCAAARYDRARVVAVGAFLWAVATLLVGASGTYLQMALARGFNGVGLAVVVPAVYSLVADYSDDGTRGAAFGWVTMAQSMGHVAGNSLGVLLAATSFLGVPGWRLAFYALALVSASIAALTWLLGADPRPVSVKATAAATLAQLVREAKDVVKVPTFQIIVAQGVAGSVPWSALSFAAMWLELVGFTHWQTTVITSLNSLANALGSLFAGFVGDPVALRFPNTGRIALAQVCTASSIPLAAVMLLALPDNPSAGAAYAAMFFVFGFVSPWCPASTNNPIFAEIVPEKARTTVYAMDRCFESVFASFAPPLVGILAERVFGYQPASSGTSVEADRENAAALGKAVFAEIAVPVAVCCLTYTALYWTYPADRRHAQMAALQAAAGDQDCDCEATSVAHAAGAEGLNQALLAGTRTE

SEQ ID NO: 65562 - protein, 51 aa, Zea mays
  Coding DNA Sequence Number=SeqID_22187
MARRRSQKNKKTKENKELTKEHEELKCSHVDLVQRYETISIEQDNALHCIA

SEQ ID NO: 65563 - protein, 116 aa, Zea mays
  Coding DNA Sequence Number=SeqID_22188
MPRGSIGAPPERGAEAYTVSKVQHKPIKSLRKGSNKKSKRQPKAAMVWRTGLSGVPPDSVQCTREINSKLVTFGNLGSHSAIIHRTVRCSTGLSGVPSGATVASATVEFNSRLTAL

SEQ ID NO: 65564 - protein, 795 aa, Zea mays
  Coding DNA Sequence Number=SeqID_22189
  Gene Ontology: Mol. function=protein phosphatase type 2A regulator activity; Cellular component=protein phosphatase type 2A complex; Biological process=signal transduction
  Homolog annotation: Hit_ID=Q6ER76; Match level="QueryCoverage=77%, HitCoverage=99%, E-value=1e-122, Identity=40%"; Hit description =Rab11 binding protein-like
  Pfam annotation: Domain name=WD40; Domain location=412-450; Score =37.7; E_value=4.1e-08; Accession=PF00400.23; Description=WD domain, G-beta repeat
  Pfam annotation: Domain name=WD40; Domain location=500-537; Score =45.8; E_value=1.5e-10; Accession=PF00400.23; Description=WD domain, G-beta repeat
  Pfam annotation: Domain name=WD40; Domain location=541-579; Score =10.3; E_value=1.7; Accession=PF00400.23; Description=WD domain, G -beta repeat
  Pfam annotation: Domain name=WD40; Domain location=622-662; Score =10.3; E_value=1.7; Accession=PF00400.23; Description=WD domain, G -beta repeat
  Pfam module annotation: Pfam domain module=WD40::WD40::WD40::WD40; Domain location=412-450::500-537::541-579::622-662
GRRAGPPWPESGPEKATPRGQLEDRVGGQPTPAQHNKSACQLRDGDKTPALETKTTRDDGRTDGDRSKRGGRGPEQRTRPILQQERPILPIPQARPPPIPAVLSPPNTLPPKASDPGRNRDGACRREEVGGGAGGFGRALRRVLSRRVYGCRVVALVVSIVRMFGAESNPLKMPSSEPDSDDVFFDAFEDVRSAGEPSCSEDCSTSDEVSVVKFEYEIWANEPMSVQERRQRFLKGMGFDDFVSSRTDSFQCHGEITAVESSTGMEVRTASCHSSVDSSVCDNESEFDGACCIRDMDSRKRDIVKGGHSSITDMLKEVGSDKVMSLLEFQSLPGLSRAVQNLVRRGCGKSPAKETKSAKKMDAKSLWKKFMIKRSFGSVCKYDVHVKNCTNSIPTRTRVQHRKKNFLEFSAVYMDQEIRAHKGSIRVMKFSPSGWYLASGGEDCVVRIWQIIQVEASPKLYRGEDPYEKVEKVQVFKTSIEKGQNQALAVIPNKVFRISETPLHEFRGHTSDILDLAWSKSDYLLTSSKDKTVRLWKPGCDGCLAVFKHKDYVTCVQFNPIDEKYFISGSVDGESIQLEKELFVQGKKKSAACRINSLKLCAIGSNRVIITSGDSKIRVANGDTIQKFEGPWKSKALSLPSLTSDERYLISAGKDSNVYIWDLANSRDDAKPVHSCELFFSKDVTTAVPWPGVRQQDGHASAKPACVAEKSASAPILRQSAPGPWPFVDGGGSSSKGSATWPEEKLLSAAKPVESSPRLDDCLSMLSAAWSTVIVTAGRDGVIRSFPNYGLPVRL

SEQ ID NO: 65565 - protein, 134 aa, Zea mays
  Coding DNA Sequence Number=SeqID_22190
MTLGKQRRSPRSDCCATRQSEAGNSQVQPQAQQEALPRPTPGLGLNLGLGRRTPPRPTPGLSLNLGLGRRTPPRPTPGLGLNLGLGRRTLPRSTPRLGLSLGLGGWFPPRPTPGLGLNLDLRRNRVLALPRPRP

SEQ ID NO: 65566 - protein, 314 aa, Zea mays
  Coding DNA Sequence Number=SeqID_22191
  Gene Ontology: Mol. function=mannosyl-oligosaccharide 1,2-alpha -mannosidase activity; Cellular component=membrane; Biological process=metabolic process
  Homolog annotation: Hit_ID=A2XX97; Match level="QueryCoverage=51%, HitCoverage=41%, E-value=2e-58, Identity=57%"; Hit description =Putative uncharacterized protein
  Pfam annotation: Domain name=Glyco_hydro_47; Domain location=41-290; Score=-174.3; E_value=2.8e-06; Accession=PF01532.11; Description =Glycosyl hydrolase family 47
MAFPAAVYIAGSVCAAFVANVDGHSDKTVTFNGRMLSLEREEQQISQGQDLKTVTALRGALHLVDLAGSERVVRSAVTGDRVKEAQHISISFIHSTLHQSKGKIYHLKYSPPKNEALQGLRKGLTTEKKRSVFVQVVPPLIVICCRQMWDTSMEGLLSLTKKTTPSNYYYICEKNGGSLCDKMDELACFAPGMLALGASGYGPEQSEQIMNMAKELAGTCYNFYQTTPTKLVGENYFFHAGQVNTGEKDNMMQSFFLAETLKYLYLLFSPPSVISFEECVFNTEAHPLRIAPVNGNKGIGTSVRPFGRKQGNPE

SEQ ID NO: 65567 - protein, 271 aa, Zea mays
  Coding DNA Sequence Number=SeqID_22192
  Gene Ontology: Mol. function=oxidoreductase activity; Cellular component=endoplasmic reticulum; Biological process=electron transport
  Homolog annotation: Hit_ID=A2X547; Match level="QueryCoverage=72%, HitCoverage=36%, E-value=3e-60, Identity=61%"; Hit description =Putative uncharacterized protein
MRATASFPAHVALLRLLPVAVGSSVEVVEVLLKTQDLAYLDRPRMACGKHTVYNYSGMLWSHYGPYRRQLRELWVTELLSARQLRLTERVRVEEVRAMLRDLHPATSTSTTAVVLKERLLMVTLNVISRMVLGKKYVGEDGARPSAATTSEEFRWMIEEIFFLNGALHVGDMVTWLGWLDAHGYVGRMKRLAAKFDRLIEHVLREHGERRRREGDAFVPGDMVDLLLYLCLIITYFAVTIVLTPPVVRALSPLEDCNLCSVASHGHVPSIV

SEQ ID NO: 65568 - protein, 1134 aa, Zea mays
  Coding DNA Sequence Number=SeqID_22193
  Gene Ontology: Mol. function=helicase activity; Cellular component =nucleus; Biological process=viral genome replication
  Homolog annotation: Hit_ID=Q1EPC6; Match level="QueryCoverage=45%, HitCoverage=31%, E-value=0.0, Identity=72%"; Hit description=DNA helicase homolog, putative
  Pfam annotation: Domain name=DUF889; Domain location=216-452; Score =436.3; E_value=4.2e-128; Accession=PF05970.5; Description=Eukaryotic protein of unknown function (DUF889)
  Pfam annotation: Domain name=Peptidase_C48; Domain location=552-759; Score=50.0; E_value=8.3e-12; Accession=PF02902.10; Description=Ulp1 protease family, C-terminal catalytic domain
  Pfam module annotation: Pfam domain module=DUF889::Peptidase_C48; Domain location=216-452::552-759
MSEDYHRITQSKTHLQQMVLIDIRNMLQSMGKDIKTFPLPAIIDRYDDSQGIDREIYEEESIEATTEDVALHETLNEEQKSAYEKILSVVDTSNGGMFFVDGPGGTGKTYLYKALLAVLRSQGKIAVATATSGVAASIMPGGRTAHSRFKIPLTIDDGAICTFTKQSGTSKLLQKASLIIWDEASMAKRQSIEALDNSMRDIMGRPGLPFGGKTIVFGGDFRQVLPVVRKGSRAQIVAASLRSSYLWESMCHLKLVRNMRAKSDPWFAEYLLRVGGGTEEVNNDGDVRLPDEVCVPYTGDDHDLDRLIDDIYPSLNENMSNTSYITSRAILTTRNDWVDMINMRMIDRFQREQMMYHSFDTAMDDPNNYYPSEFLNTLSPNGLPPHVLKLKIGCPIMLLRNIDPANGLCNGTRLVVRGFQKNSIDAEIVLGQHAGMRVFLPPIPLCPSDDEMFPFHFKRKQFPVRLSFAMTVNKSQGQTIPNVAVYLHEPVFSHGQLYVALSRATTRLNVKGDLALIDWIKEIPCEPRVEVVLIDDAFVERKWMECLFQPDAYLGDEVIDCYINLIKAQEHLKCRSGGRVHIENAFQFNFLKRDGDVETKTDELYPSKDMAQISSAERRVLLYLDHDMVFIPINIREMHWYLAVINARNMEIQVLDSLGTSSGRNDLIATIKGLQRQIDMVSQRKELTDHRWPDLRVASWPLKEIEMEYAKQTDSSSCGLFLLNYIEYWTGDELSDNFTQDDMSHFRKKLAAILLSSDINKRKGCPLYKYDKEVDAGCSSDVQILDSPTNPKKRKLPCVSEENKVLMEDGDGPITQADLERWFVHDWDKRTPIKIPTDECTNEFLLSGLSTKDMPVTKADLIDVLCDCIMTIQDDTTLEMTWVRSFNPFKIEISVKDLQNVLRVNLDMTLKCFDMAVRLLAIKESHMSKDEMIKDKKHYMDMRFWRMVGFGKLAKYHQDPTAEELAKTLDCWPSLNYYITGCKYVLMPWKLNGCYALFIIDHGKKHVTFMDFTPTEDWCKHMPYKRFAEAIIMASKKYKIAYNKKRSGWAHDIFKWEHTIRSGLPLDLKGVNTSYFVLQAMVMWGSGRRMEFNRDTKILRRNFVIDLLSYEENSCRYAIPPNIQQRLISIAKKD

SEQ ID NO: 65569 - protein, 136 aa, Zea mays
  Coding DNA Sequence Number=SeqID_22194
MDLDPAAEEEERQLEDHNEAMDARQALMGVGVTHLDPIELEDFVGSRIGTATDSTSPPASTTASVGGGSRKRSKVWNNFDELTNLVNGKRVRLQADTVVAVWTAAAAIHREKNTVEAAAAAGLQPQQAAANKPIKC

SEQ ID NO: 65570 - protein, 118 aa, Zea mays
  Coding DNA Sequence Number=SeqID_22195
  Gene Ontology: Mol. function=heat shock protein binding; Biological process=protein folding
  Homolog annotation: Hit_ID=Q7F1J8; Match level="QueryCoverage=72%, HitCoverage=29%, E-value=2e-16, Identity=49%"; Hit description=DnaJ protein family-like
MLKRSRGALQAILIICSFPDEQIDARKLQEIMQAAQKDREEKLAETLKNRLHINVQGNKAEFIQHAEAKQRCTSGYSYHLFFSRDKGHSIKSQVTAGTGNIELIIVYLGVLSENLGSM

SEQ ID NO: 65571 - protein, 202 aa, Zea mays
  Coding DNA Sequence Number=SeqID_22196
MEPAVLNRERVALDKKNRMPKLFDDYSDEDFYGVQRKYSIVARVEVKFPIEPRYRDRQHYILSDINGAKIEAIANRYEIVKYFNSLLHEKHVYKMHNVWFGLNPGAFNFRHLNGTMELYFTHQTVVEPYAVPVQMPPFPKHIFLNLDDIAELPNRTLVDIMAIVVHLDTIHRTMWGTFRKIVIMDASNSKGFGGAKRSSVCC

SEQ ID NO: 65572 - protein, 233 aa, Zea mays
  Coding DNA Sequence Number=SeqID_22197
  Gene Ontology: Mol. function=phosphoprotein phosphatase activity
  Homolog annotation: Hit_ID=Q0JMY6; Match level="QueryCoverage=21%, HitCoverage=15%, E-value=1e-14, Identity=83%"; Hit description =Serine/threonine protein phosphatase
MRKSVARRLMRNRCHKLFAALESLKKKGNKGAAMPPPEPLPQLWIQRLPVAARGGRQVQLSEAEIWQLCVEGKRVLLSQPNLLRIHAPVKICGKPDHFASACLERTLFGFKDPVPDAEPASTGVEVAVAPFWNREKYMLSLLPHAEKDIKVEPKQNKGNALNELIQLPFSSSDSWHMHYIAAHYVPLVPMSVGSLGLIASQNGIHFKKYAEKLLDSGAVYRYFCSNEEFEQMK

SEQ ID NO: 65573 - protein, 227 aa, Zea mays
  Coding DNA Sequence Number=SeqID_22198
MVTTSSWVGRSKPGCDLGPTLSFKDAHHPRWGGCRAEPALYLPRGFVGHPLPRHSRERALSGPADGPDFDKAGLVDGRRRHLQRVGFVGLAPGGPFYRRAAVAPYSSVGYLNRFTKHESPRVKVTSERPLGRSSTSRGQGSGWRPWKMVGRGPWGNQPSRLLGPDSRGSPWERLPGRGDDVVVRSGEPRTASPSEARSGLAEGVVDAEGVAAPFQRQDPSLQDQIVL

SEQ ID NO: 65574 - protein, 77 aa, Zea mays
  Coding DNA Sequence Number=SeqID_22199
MEAKSHQQPIKEYNGSSSLISCEKQTIRIEFLSLQVTALVPTITGMGDHVSGRVRGKVHCQVQSGIRTLILIPISVS

SEQ ID NO: 65575 - protein, 76 aa, Zea mays
  Coding DNA Sequence Number=SeqID_22200
MASRRCGQARRLHEHLAEVRPWLDGGAREVGVELFNKNLRTRDVDPNDTDFRLRRIRILKSDFYSVLMALFGILRD

SEQ ID NO: 65576 - protein, 167 aa, Zea mays
  Coding DNA Sequence Number=SeqID_22201
MPTTRADHNEYNIQGMTGDDGVVRWSTAASRVNGGRARAGAETARWANAPGSFGWRAERDAMASREMAERARRRENRAEEDRAPWEREEERLGDEQRELRANPRARPWEEQAEGSSQEEHRQEEIRAGRAGTSWRNRRPTKHRERERRRGREKQGGVRLPGLEEASG

SEQ ID NO: 65577 - protein, 435 aa, Zea mays
  Coding DNA Sequence Number=SeqID_22202
MQVACNCTTETHPFNFDASSVEAQAHTSCNRHAGYYVRKTAPPLTPMSRLLDCGTGAATRGNPAHGPTVPTKRIGHRSVSRGRKRDGRYGQKWAGSNGGSRRAEEAVKSSAGSRPLLEQQGSPLPRREDDAPVFRPSNGSRNSCPVNHPSRRINFAAGQATPLAGTGKGDTPKGILLREGNGPRALLLIRAASDHSGSAPTTDQGFEGCPPEGFDSRLRTRRARDDSGGSGAALANPAPAKPLTASTYQPENSEPDHAPGLRSDRMREQPDRPRHHERRIHASPEGLLKQRAHPRLARGPARENSAACPAPTAVPPTKVRLTAAESSLRRHRKLRLGLGRWSPPRPTLGLGLNLDLGRRSPPRPTPGLGLNLDPGRRSPPRPTPGLSLNLDLGRRSPPRPTLGLGLGLDLGGVTASPDLGLGLTTPQGGTSLPYP

SEQ ID NO: 65578 - protein, 239 aa, Zea mays
  Coding DNA Sequence Number=SeqID_22203
MVTTGSMVGRSKPGCGFCPALSFKDFHHPCWGGERGEAGPAFAWAGVPLLPPASGGGNHPPALWRRHPPAMRGKANCCCPARVQHSVLCPGDYGRPHRRVSQHVVRREGGTRVLGRSRSRFHGEDGSEDLPVRFGVASAHWCGVGGQVDAAVGAEVVAAGEGFSADEIVGAICAPCLRLFGFDSLSLPLEWGRGRGPCRSSVCPEESLGLVDLATQGFFCSVKETLGRSAMSRSRRQRC

SEQ ID NO: 65579 - protein, 128 aa, Zea mays
  Coding DNA Sequence Number=SeqID_22204
MEDLSVQDDLTYVEYPIKILDTLTRVTRNKWPHIVRRILVLLRALRARLLARGPGPSGGHSNNFARRWQKLAVDSGSLAVHLRISEHDFPTDEQATKDPEVQLVETAEQELVEGKLVDDYLTRKGQGQ

SEQ ID NO: 65580 - protein, 107 aa, Zea mays
  Coding DNA Sequence Number=SeqID_22205
MPTTRANHNKHDIWGTAGDDGVVVNRKLTAASMGNGGRAGDGAETARWANAPRSFGWRAERDAMARREMAERRGHGRSELREAPRKSVGRKRSELGELGQAGGIAGQ

SEQ ID NO: 65581 - protein, 249 aa, Zea mays
  Coding DNA Sequence Number=SeqID_22206
MGRHETEQGGGNHGFVLSCAQGGCACSRGLQAFAREREREPARQPVLPRDHLFRTRALDLPFIDPEPKVGRGGDSFEVKVEAEPWGRARRRPSSEVEVEAEPWGRARRRPSSEVEVEVEPWGRARRRPSSEVEVEVEPWGRARRRPPSEAEAGAEPRGRARRTFLWRLRLDSAAVSLTLAGGTTVGVGQATLFSCQASVACADGDYQPSLGVLGVPLIMVPDSTYPTRKQNLQNYTSNTGARKGDHFGN

SEQ ID NO: 65582 - protein, 53 aa, Zea mays
  Coding DNA Sequence Number=SeqID_22207
MELPAATVAPSARSALTGVLPVQPELRHRHPEASLRLRRCLDTPAFPLKVSTK

SEQ ID NO: 65583 - protein, 454 aa, Zea mays
  Coding DNA Sequence Number=SeqID_22208
  Gene Ontology: Mol. function=histone-lysine N-methyltransferase activity; Cellular component=nucleus; Biological process=chromatin modification
  Homolog annotation: Hit_ID=A3BJE1; Match level="QueryCoverage=47%, HitCoverage=40%, E-value=1e-57, Identity=50%"; Hit description =Putative uncharacterized protein
  Pfam annotation: Domain name=RRM_1; Domain location=146-217; Score =38.1; E_value=3.1e-08; Accession=PF00076.13; Description=RNA recognition motif. (a.k.a. RRM, RBD,
  Pfam annotation: Domain name=YDG_SRA; Domain location=11-166; Score =112.4; E_value=1.4e-30; Accession=PF02182.8; Description=YDGSRA domain
  Pfam module annotation: Pfam domain module=RRM_1::YDG_SRA; Domain location=146-217::11-166
MLSAGHWLHREVRLVDDIPGVLVGDAFYYRTEICVVGLHTAPQAGIGYIPRRLLDVGQSIAMSIISSGGYLDDEDTDDVLVYTGSDARQRNRVNNSADQTLERGNLALHNSYRYGVEVCVIQCRDVDQGPHRKVYVYDGLYRVKSVFLDGVPPHWDEDKVREIFGEFGEIDSIQLARNMFTAARKDFGFIGFTARQSALDCIKMVNKDGVGEGSGKVPIKASLQRPRHAFKKYSRQGSSSLLGVRRGFVDKSSSAPSYKYGRTHLETRISEEYAEGRYTSKYPKHRYAMHGTMERDAYRRIKYGHSYQERAHRTCPDCKLCGQNYNYPNGEEFSAISGCQEAYYQTDRDLIPSTSQVASHCEGSCCKVRSLTLDVRVWEPSVINLFQLLVYMFVNSIWEETLPDDNSSNSMSIALQNPINPYGKAKKRVEDIILDFTKLKKQSDLAVMILRYFT

SEQ ID NO: 65584 - protein, 89 aa, Zea mays
  Coding DNA Sequence Number=SeqID_22209
MGLSSEAATWKYGMESKTTEEMESAATATAGDGNSDDCAAMSSVAMATASRDGSVVVAVCPRRQWRRQEMESATTATARGGEQELAEGK

SEQ ID NO: 65585 - protein, 1049 aa, Zea mays
  Coding DNA Sequence Number=SeqID_22210
  Gene Ontology: Mol. function=hydrolase activity; Cellular component =nucleus; Biological process=metabolic process
  Homolog annotation: Hit_ID=Q2QZN2; Match level="QueryCoverage=88%, HitCoverage=87%, E-value=0.0, Identity=46%"; Hit description =Pentatricopeptide, putative
  Pfam annotation: Domain name=PPR; Domain location=202-236; Score =34.1; E_value=5.1e-07; Accession=PF01535.11; Description=PPR repeat
  Pfam annotation: Domain name=PPR; Domain location=303-337; Score =29.1; E_value=1.6e-05; Accession=PF01535.11; Description=PPR repeat
  Pfam annotation: Domain name=PPR; Domain location=404-438; Score =21.2; E_value=0.0039; Accession=PF01535.11; Description=PPR repeat
  Pfam annotation: Domain name=PPR; Domain location=506-540; Score =17.5; E_value=0.05; Accession=PF01535.11; Description=PPR repeat
  Pfam annotation: Domain name=PPR; Domain location=608-642; Score =27.9; E_value=3.7e-05; Accession=PF01535.11; Description=PPR repeat
  Pfam annotation: Domain name=PPR; Domain location=709-743; Score =37.0; E_value=6.6e-08; Accession=PF01535.11; Description=PPR repeat
  Pfam annotation: Domain name=PPR; Domain location=744-778; Score=4.1; E_value=2.5; Accession=PF01535.11; Description=PPR repeat
  Pfam annotation: Domain name=PPR; Domain location=780-814; Score=5.0; E_value=2; Accession=PF01535.11; Description=PPR repeat
  Pfam annotation: Domain name=PPR; Domain location=98-132; Score=16.4; E_value=0.089; Accession=PF01535.11; Description=PPR repeat
  Pfam module annotation: Pfam domain module=PPR::PPR::PPR::PPR::PPR::PP R::PPR::PPR::PPR; Domain location=202-236::303-337::404-438::506 -540::608-642::709-743::744-778::780-814::98-132
MVMESKGCVGAMMFTKDPSHGDDEVEGPKTNGAFSHSGFSHLADHPLLARSVHALSIRRALPLSAFHCNTLIAFYFRQGSSPAGALHLFGEMPHRTSSSWYTAVSGCARCGLESTAFTLLRVMRERDVPLSGFALASLVTACEHRGWQEGAACGAAIHALTHRAGLMGNVYIGTALLHLYGSRGLVLNAQRLFWEMPQRNVVSWTAIMVALSSNGCMEEALVAYRRMRKEGVMCNANALATVVSLCGALEDEVAGLQVTAHVVVSGLLTHVSVANSLITMFGNLRRVQDAERLFDRMEERDRISWNAMISMYSHEEVYSKCFIVLSDMRHGEVKPDVTTLCSLVSVCASSDLVALGSGIHSLCVSSGLHCSVPLINALVNMYSTAGKLDEAESLFRNMSRRDVISWNTMISSYVQSNSCVEALETLGQLLQTDEGPPNSMTFSSALGACSSPEALMNGRTIHAMILQRSLQNVLLIGNSLLTMYSKCNSMEDTERVFESMPCYDVVSCNVLTGGYAALEDVANAMRVFSWMRGTGIKPNYITMINLQGTCKSLGDLHSYGMPLHAYVTQTGLLSDEYITNSLITMYATCGDLESSTGIFSRINNKSVISWNAIIAANVRHGRGEEAIKLFMDSQHAGNKLDRFCLAECLSSSANLASLEEGMQLHGLSVKNGLDCDSHVVNATMDMYGKCGKMDCMLKTLPDPAHRPTQCWNTLISGYARYGYFKEAEDTFKHMVSVGQKPDYVTFVALLSACSHAGLIDKGMDYYNSMAPTFGVSPGIKHCVCIVDLLGRLGKFAEAEKFIDEMPVLPNDLIWRSLLSSSRTHKNLDIGRKAAKNLLELDPFDDSAYVLLSNLYATNARWVDVDKLRSHMKTIKLNKRPACSWLKLKNEVSTFGIGDRSHMHAEKIYVKLDEILLKLREVGYVADTSSALHDTDEEQKEHNLWNHSEKLALAYGLLVVPEGSTIRIFKNLRVCADCHLVFKLASTGAAAPHPTVREVVANYYSPNRHRRWLPSSVRGRGVAAARQIVLRSYDHDEAHCVAAVAGARQW

SEQ ID NO: 65586 - protein, 54 aa, Zea mays
  Coding DNA Sequence Number=SeqID_22211
MNRPRSGSGQKKGKRGGGGGGGLGAALRKQVARLCIIREVVVVVVDVLVLVLAH

SEQ ID NO: 65587 - protein, 310 aa, Zea mays
  Coding DNA Sequence Number=SeqID_22212
  Subcellular localization annotation: CTP_CleavageSite=45; ConfidenceScore=5.65e-01
PARPPLPSLAHSQPSALASHHAHTLGVLPSFAVSARPFRRCRWLLAAPVASVSFALSPATRDALRFAPSPFGSPSPRSSVHCHSSVAVDPCPHRAPDIVRVFLRLPSRPTSRALGAPVCLASGDGAAVSPGSTAPGYPAKICRSDPLPHPRPTAGPGLSGRLAPQAAADTPNPPTTSSSCFLSVLLKIFLSNNLPPGQTASSSARGARALTLVAGAVGLFPLPQQEVESGRQPSRAPSARDPSAPPQGIPAARGDPDEDDNDTGGSSRHSTELSEEQELEGWIARPITHDVARGCHFHDALNTLLRRAFD

SEQ ID NO: 65588 - protein, 231 aa, Zea mays
  Coding DNA Sequence Number=SeqID_22213
MPPAPPQGIPATGGDPDGDGDDDDAGGSSSHGMERSEEPEPEGWIARPITRVTTRGCHFHGALDTLLRRAFDRHTWSIEYCCVVYQHRCGLYPDQWEATCLVRRPDDDLRGAEAFSKHYSITERDTAEYYHCRSTGSAGGVIVSPVGEGNPRLSSMVNLAALLNTELDHALVELGKVRAEVAELCVECTTRHYLDGGSLAPVRIQHPYRSPPRGRFDYGTLDCRTRIDLDS

SEQ ID NO: 65589 - protein, 124 aa, Zea mays
  Coding DNA Sequence Number=SeqID_22214
  Subcellular localization annotation: CTP_CleavageSite=31; ConfidenceScore=5.01e-01
MASGGATARGQGFDNGWPVLGDVQGLARSVLARMARSGSGVAVAAWLLAWARHRVESLLGPGAGGSALVARRVGLGVASRLELGGYSGWRGWSSSVRRGARRCAVKQKEREVGWGPRLREKRRD

SEQ ID NO: 65590 - protein, 249 aa, Zea mays
  Coding DNA Sequence Number=SeqID_22215
MVPEQTKDVATAGDGKGSRGVRRIWVGLGEPEMKDVWLGVSGQIRARVRSSASQLWTAQDVNARTERCERLWETTREQPPERGETRGKLLGPDANEATASGVVLVGSDEDRRSSSPRSSALVCPAILSSAPFSSLVLLSLVVGRVAVNLEQLVVGSSPTAMEKSPRSIPIESGPARADTRKDVAEAADGSRRTGIVDTSNIDYCTSRLRPRHRLCRTHDPAIRIILSDPVLSAIKSNVNLFVSDNIGFG

SEQ ID NO: 65591 - protein, 224 aa, Zea mays
  Coding DNA Sequence Number=SeqID_22216
MPPRTRKTARKSTRPIGVPRHQLAPRHEDSSNGSNDPIGDLEAQVEQFRSELRHRNEVWVEDGQRINELRTDIRHLQDQLAERDLALDWAVNSCSLAWAKEAKARAHVDQLSTAVDNLQVYCNALHEKVHVLYSQLHPNVPADPIGMGAGPSGAAGEALGGELDLFRPPPSMNLADEWSPTLDSEATKSDKKLEYSCEALPSSGGEIMWLSSLLVIKLPRMNSN

SEQ ID NO: 65592 - protein, 49 aa, Zea mays
  Coding DNA Sequence Number=SeqID_22217
MAMMGSTSEKMYLCQRTWTSIHRKMTGGITRLASMELSIISLSATSDQN

SEQ ID NO: 65593 - protein, 165 aa, Zea mays
  Coding DNA Sequence Number=SeqID_22218
MPWGHIACQKGGQAACPFRNKCAAQSPYVMLRPLAYVTDNKPCGSIRPSTEWGAEALRIEPGHASIPDPCLGHDTSSPGSLLWVVRSSLGGVRTLSNGYRLLNSGGPGCAYRGPVLSGPDGIVSKNATLTAHEILLGLFSARLRVAAQASCLHTVARGTPNPGYR

SEQ ID NO: 65594 - protein, 99 aa, Zea mays
  Coding DNA Sequence Number=SeqID_22219
MAHALRRPSLLSRRSGGLRKDSGRGAFQRDSAGVWLTVRDQAKRLHCSRPFHGTSSCSLESAPRLLDQTAFRKGGPKLQALLLNSDVVMSGQMGTVRVG

SEQ ID NO: 65595 - protein, 113 aa, Zea mays
  Coding DNA Sequence Number=SeqID_22220
MRVGSVYAARSAEGGLPLREECGKGEESVEADLQEFQDVEEFEDQASDLPQSAAYVATSPTSGVVDYGGLCGIGRTNDIVNTKVKALTSPLKGPMLGGTFMFKSRLVFDLMRG

SEQ ID NO: 65596 - protein, 151 aa, Zea mays
  Coding DNA Sequence Number=SeqID_22221
MSGYFPPAYSSLVYCSIQMWNVMIRRATVHHVHVHYRNQLLCRVSETHGKGYFTLGKGFAECDTRQRTLGELYIGNSLFAEYFLSGTRQRLCRVPFGTRQRKVTITAPSDGDGSFAECLLEHSTKRPILPSVCSTGPRQRLVQWTPRQSLC

SEQ ID NO: 65597 - protein, 196 aa, Zea mays
  Coding DNA Sequence Number=SeqID_22222
MENDEEASIVITTQGDDNGRSEARGRPDRRGPPIGDPRRGKGGGARRLMVGRGYQGHCLPLPVLGGGTMARAGGFVRGEGNMGGGGWPENPGTTVQCRRRPSLADAQRRRENGEREKKVQPTVLPRVELDRGGALVGGGGPWARTLGWTRRGALGRVRLGGHTSTASSEWRWFCARQTAGEGNGARCGGTARIIPT

SEQ ID NO: 65598 - protein, 52 aa, Zea mays
  Coding DNA Sequence Number=SeqID_22223
MAHEIMKKSEKDIHDTRAAAKQAVEAVERERHIAALSSPPEPFDPLADPAMK

SEQ ID NO: 65599 - protein, 50 aa, Zea mays
  Coding DNA Sequence Number=SeqID_22224
MASYGAGEVTNEAPMMQIRGDFGPYSFTRVVQCSGGLAGGAEFAGAKCWV

SEQ ID NO: 65600 - protein, 208 aa, Zea mays
  Coding DNA Sequence Number=SeqID_22225
MGRRETEHEGGKKQAKGKPAAFVLPCAQVGRKERVQSGPEFGRGGDCSEVEVESEPWGRARRSPSSSGAEAESEPWGRARRSPSSSGAEAESEPWGRARRSSSSFEAETVSEPWGRARRSPSSSVEVEPKPWGRARRSPSSSVEAILALNAPAIRSVGVAIWPRLLLCEDWASGEPKLCADGGYQLRLGVLGREGVVEFLGIYGLFME

SEQ ID NO: 65601 - protein, 180 aa, Zea mays
  Coding DNA Sequence Number=SeqID_22226
MTSPTTINGGDTHFSSDYLSYEGFPSIFWEVLCSAGYPTLPLYTVQLYKEHRVPRCRVWLTLEAHPLQLGWRSLDSKTIGCRADDTTEAAAMKTLTTFCGYHPLEMVMHPLGLFPAEKRDDPMWCNRMSHVKDVWAMHPDQVGRITVQCMSALYRLQALRIDAVAHLTSLAQTTKLTLDI

SEQ ID NO: 65602 - protein, 121 aa, Zea mays
  Coding DNA Sequence Number=SeqID_22227
  Subcellular localization annotation: CTP_CleavageSite=37; ConfidenceScore=5.25e-01
MSGAPEDSNSNSSPSGKSRGNSTIIHRTVRCTPDSVRCSKEERPQELAGFEKLQQLLRYNSPDMSALTDPMVQTKWSHVPLTFGARYVDLLSAPYTYALEKGLFHFGKIELPLSLGMAPNA

SEQ ID NO: 65603 - protein, 362 aa, Zea mays
  Coding DNA Sequence Number=SeqID_22228
  Gene Ontology: Mol. function=zinc ion binding; Cellular component =intracellular
  Homolog annotation: Hit_ID=A3AQG4; Match level="QueryCoverage=74%, HitCoverage=53%, E-value=4e-89, Identity=62%"; Hit description =Putative uncharacterized protein
  Pfam annotation: Domain name=DUF1644; Domain location=28-240; Score =100.8; E_value=4.3e-27; Accession=PF07800.3; Description=Protein of unknown function (DUF1644)
MEVLILIIKSVSFLALGGNSTEGDASVNTSCSHDKGCRSYICDTSYRHSNCLDRFKKMKVNDEDSPSQPSSSMPRGTGNQNVVQRSRFGLTRESPRLHIDISVPDETSDHQDASHRPAAIVGEQEENIYNEGPDLTLETHEVGINGSSVSSDVSSLNQLLCPLCRGAVSGWKIIKEARQYLDGKSRACSREACMFSGNYREIRRHARRVHPTTRPADVDPSRRRAWHHLEHQRDYADIVSAIRSAMPGAVVLGDYAIEGGEIFSHDRETSEPSGSLLTTFFLFHMLSSSPIRSGDEPRGTSRGLRRQRRRYLWGENLLGLQYDDDDDDDDNEGEEDEVDAVDEVQRPRSRRRFIRSRSEERA

SEQ ID NO: 65604 - protein, 170 aa, Zea mays
  Coding DNA Sequence Number=SeqID_22229
MGATGILCDSTHDAVTKECVAPVSNKTFAEWYLTENVPSATPGVSWTVSASKWFTFPYWARGCPRLLLPCCIAFCLTGHWELAAAELLSLGNDSPNGLVPHSGNMHDFLLELALLGCSGWLLGQEDWLPSCSNTGTDFLLAGCSDDTTAAEETASGTTAAGSDAGAGDLA

SEQ ID NO: 65605 - protein, 112 aa, Zea mays
  Coding DNA Sequence Number=SeqID_22230
  Subcellular localization annotation: CTP_CleavageSite=62; ConfidenceScore=5.15e-01
MAHRSYPGPPETFSPSFSPLCPWIHGPFPAIEFAMAPSSSLPNSGDPGATVARACLNSADLTAAERSSAARSHLFSLDNEQSEVPECVIGDHPEQQPGEGKCPLTHYVLHTL

SEQ ID NO: 65606 - protein, 95 aa, Zea mays
  Coding DNA Sequence Number=SeqID_22231
MTKVRACRRWSNEFTGGYNNLQTKVLKDIPSSSRYTFPNVLNVCSLYLDNEQSEVPECVVGDLPEQQPGGLGLFPEYLFECSGGDAGNMDDFEEF

SEQ ID NO: 65607 - protein, 294 aa, Zea mays
  Coding DNA Sequence Number=SeqID_22232
  Subcellular localization annotation: CTP_CleavageSite=66; ConfidenceScore=5.04e-01
MAHRSYPGPPKTFSLPFSPLCPWIHGPFAAIEFIVAPSSSLPNSGDPGATVARACLNSGDLTVVERSSAARSHLFSLGLIPSVQFRLNGPDRGIPLRVRTPDALARLSAPPASAHPSRSDFSPSDLDRMAQTRSDPLGPPSDPFGPPSDPSPSDLDRTVRTPSDPCSRLFPLWRRARSIFKLFELRFKRRVFTISEENMSHEKKVVAETKLTKEENLFEEKKTVDPYIAGFVESMAKQTQRKLLKRYWKAYLKMLVTAIAMMWKVGTKILRIGPGGQVIQSSENQPSNRVILRT

SEQ ID NO: 65608 - protein, 324 aa, Zea mays
  Coding DNA Sequence Number=SeqID_22233
MACIRCTARKSVIPFLPSRLAERPLCRTVPGQSSHLERLHRRLHEEQEHQRQEPEQEQQDSSPSPQQEVESERPSPLTQSQRCPLHHLKASRLLEETLTETETMPTLVAVRATAWSFRRSRSQMDGSLDPSLVTLLAVYQHRRRLYPDQWEATCLVCRSDDDLRADGLDLKYYPRRSTDSAGGVIVSPVGEGNPRLNSMVNLVAMLNTELDHALDELGKVRAEVAELRAKCAARHYLDGGFPAPVGIQHPYRSLPRGRFDYESGLICVWFQQMSENRHRGARRAQPEQQAPQEEAAPQQQLPLPPPMTIEQMFLMQTQAVQAIG

SEQ ID NO: 65609 - protein, 209 aa, Zea mays
  Coding DNA Sequence Number=SeqID_22234
MPPCWQNESRGREKPQVASSLGVDLGPQLGVGRLGSGELLAIGTKCRQCLGLAGQECTYVNRARVWTPKSGCDKTSGEVAEIVPYAKNKWGNRWDFWFYVTLEDIEGGMAAFSWLGSGCSKTTPDALLNNRMVLSPAFAIEPRGRDAAAFIREVEAKAVIIVGKYSAKIELLRSWDIRGSNVRLNCVFELNGLRYRPYPEEGSADAGDD

SEQ ID NO: 65610 - protein, 147 aa, Zea mays
  Coding DNA Sequence Number=SeqID_22235
MARLRKRLIGHLVLFVSPFPGCIKFIYINKENDTWANSISMGQIRLAPAYGAPDCPVPRLECPTNKPLSGKRNTLRLKIAGLFGVSPDYQKAQPTARMLVGVINTPQPPPFNAAKLSTLHTQYKSKGFIPKTHSKLPILSKSHNLGK

SEQ ID NO: 65611 - protein, 84 aa, Zea mays
  Coding DNA Sequence Number=SeqID_22236
  Homolog annotation: Hit_ID=Q7XBD4; Match level="QueryCoverage=100%, HitCoverage=7%, E-value=1e-08, Identity=41%"; Hit description =Cinful1 polyprotein
MAHEIIKKSEKDTHDAREAAKADEKTAELERRIAELSPPPEPFESLADPEAKKEDEITKMVEAIMDEDVTRLLNEAAEAVLKEE

SEQ ID NO: 65612 - protein, 254 aa, Zea mays
  Coding DNA Sequence Number=SeqID_22237
  Subcellular localization annotation: CTP_CleavageSite=18; ConfidenceScore=5.31e-01
MKLWKETSRSSKITTSSRCGLAATPSRLPVKAALSTFLFRTLIYCKNYMDVSDMARLRHTARKSVIPFLPSRLAERPLRRPVAGQSSHLERLHHRLREEQERRRQEQQSSSFSLHQEIESVRSCSPVLPLEPPPAPPLGAPASGVAAGGDPDDGDGDDSSSHDTDFSANPEPEGWVARPITRDAARGCHFHDALDTLLRRAFDRHTWSVEYRCVVYQHSRGVYPDRWEATCLVRCPENSLQGCRGLFRALFLFS

SEQ ID NO: 65613 - protein, 590 aa, Zea mays
  Coding DNA Sequence Number=SeqID_22238
MSSPELRESSARMLKVTGGWWPKNVPIPRAAGEDFFTSCMVRDWRVFPYGRNIDAVVSAVMDKDRQGAAQKRQAVVKLPEARPKRPWGTAKAAAPGGSQPTLAAKSAVPGSSRVPEAVKAASAGGTKPALAGAAKARELPPPGKHVADFAIEISVDDYLIGSGEGQLVVVPPAVATAASAVVPRERGSALSAGGEIPALTAVKDEAGAVSRRLKEALSQAADFADRVASGALTVVVSAEVERLRAQHADAVREKSAADSKCRKLADKVAALEGERADLRRQLVEERREANEALVKAQSAQAEANLAQVEGSLARQRAEEWEERFNALQTRVERAEASTRSEAERTRKQLMDSYHELGARTADFEVPDQEPGLRCLEWLQEELLALPAIVEGFMSYASLVTCEGAMNALSREGCRHYEVFDQSDEDFEREIYKVEDPMVKESTGALFDRMWGPHGREVVRERSDTARGQAAHNDKVEDFGALNSAQPDSESNSVAAVSEVTPAPPPETVEGAPDAPAAIAAGGGSSPTAASRAEDPVKMAAESAAEDPATAGSLQVQDFGPTHATATANFLAARPWMMGMNWMNLRLSFLI

SEQ ID NO: 65614 - protein, 101 aa, Zea mays
  Coding DNA Sequence Number=SeqID_22239
MEAKSHHQPINLRSTCKNYATSKAEYTNTQLDLPVTALVPTITGMGDHVSGRVRGYVCGQVQSGIRTLILIPISSRRPRIPMDPCPQTNHQYDMKVGTTNS

SEQ ID NO: 65615 - protein, 57 aa, Zea mays
  Coding DNA Sequence Number=SeqID_22240
RARGYERPRELQRLVILDQRYFGTGDNEIDGSDYDYGIGEDEAVEGDFQEFQDYDEF

SEQ ID NO: 65616 - protein, 20 aa, Zea mays
  Coding DNA Sequence Number=SeqID_22241
MSSARSMVAVELPAAFVAPI

SEQ ID NO: 65617 - protein, 103 aa, Zea mays
  Coding DNA Sequence Number=SeqID_22242
MLVDYTTVLDGPSLLQQSGCPEVVQGASLAEVQGKAASRTPPPTEARGKSPAAPSLGVGAPAPHAGDDAVSPGDWTDLAPYDAVDAPPGEKAKRGSQTYVQCT

SEQ ID NO: 65618 - protein, 235 aa, Zea mays
  Coding DNA Sequence Number=SeqID_22243
MTKEASFRGHNTAQSLQDSSKAPLGHQLQGAEAAGASEEDMRISPEKSIAYSVVKIRATLQEHVISPFRSKKRLPKQKLGRISRSRSYILLRAILLTYQNMWAINLQLLLLRQAIHKLPGLSFHRHHHCNLLIPEASSQKGASTPNNNIYEAQKSFLMECRANINKATKMVPKRAQRKFFAQKSFLRECRAKIDEATKVVPKGAQSRGSYGFGGKDSSAEVGKQISSKPQSKFRS

SEQ ID NO: 65619 - protein, 97 aa, Zea mays
  Coding DNA Sequence Number=SeqID_22244
  Homolog annotation: Hit_ID=A2XNB8; Match level="QueryCoverage=52%, HitCoverage=14%, E-value=4e-10, Identity=56%"; Hit description =Putative uncharacterized protein
MDMRFTFVGAGLPGSFHDMAVLLRSCMGEANYPHPPAGRYYLVDAGYSIREDRRWFRGQIDILHACKLVKLDAECSAKGHTTWTLTWTWTEPPPDAQ

SEQ ID NO: 65620 - protein, 225 aa, Zea mays
  Coding DNA Sequence Number=SeqID_22245
MATSPSDSSASFVSHSSSREPTPEWDPIPAYEKHAPLHWDADGWDFEVASESDGDLTDGDDLQLLVDGELDSDTSTDWRTTENRQMWSPSTTMTTRCLDIGWASSPRTMKMTRTTAATVTTAAVTRTAMVVATMTAMMMAGQSNAMRCPPQQASSAAAWSFQHWQYLQNHTGLGLDSRTGDIETDDSYWGTQKGDPSPQGSRGNHHPFLMSFTLYLVEPHTTGAI

SEQ ID NO: 65621 - protein, 339 aa, Zea mays
  Coding DNA Sequence Number=SeqID_22246
GSSDTVTVNSSDVQAPVRVTATRQQRGSDNERRKGLGQGNQLHDEVVVLMSGKAATVPESRHRGRKDAGAVCRTQSSRDIMAMNFGEQCKMQRNDANKESRLDSSGVMTVSGRRCCDEQARGSSDTVTVNSSDVQAPVRVTATRQRRGSDNERRRGLGQGNQLHDEVVVLMCGKAATVPESRHRGRKDAGAVSRTQSSRDIMATNSGERCKMQRNDSNKESRLDSSGVMTVSGRGCCDEQARCEALRRSRARSSRGVCEERELLACSMAIEADKRPPLMEEKMPTVIAVGKRKRTDTVFHVAETTAAWARMWAYATARCCVRQLHRRREYNSIAWEQSV

SEQ ID NO: 65622 - protein, 143 aa, Zea mays
  Coding DNA Sequence Number=SeqID_22247
MKSARTCDLIVVLGSKVMWYPNNSAAHFAILADASGFLNNSPRPLSEPELCVVHVGKCFCEIGQVIHFVSAGDDDVVHVGENIVVDMALEDPLGEAREGGSSILESLRHSYEAVCAEGFDEACACLVLLFHVNLVVPGEAIKE

SEQ ID NO: 65623 - protein, 188 aa, Zea mays
  Coding DNA Sequence Number=SeqID_22248
  Gene Ontology: Mol. function=endonuclease activity; Cellular component=intracellular; Biological process=DNA repair
  Homolog annotation: Hit_ID=Q5VQJ9; Match level="QueryCoverage=38%, HitCoverage=14%, E-value=5e-34, Identity=94%"; Hit description =Putative DNA-(Apurinic or apyrimidinic site) lyase
MQRSIKSFDEVFLLPLILKHFICRNMIVSELISKFCLGDSISSIVGSGVKPLSIKYGLGIPDHDTEGRVVTVEFDNFYLLTAYVPNSGDGLKRLTYRVTEWDPSLGNYMKELEKSKPVILTVLRGPCAAVYGKLRRSRRLDAVQSGCIVLSIVKQGDLMVVANADDSRVVLGTATDDGAITPSSSSST

SEQ ID NO: 65624 - protein, 105 aa, Zea mays
  Coding DNA Sequence Number=SeqID_22249
  Subcellular localization annotation: CTP_CleavageSite=44; ConfidenceScore=5.63e-01
MLVLYLALPRACALFAQRATPIGASAHCNSRTPVSPSCGPRFRRAAAVNPSPRRAPVVVQGSRNLLSRTIVEPPPRRPATDGCPPVPQRRCYAHDRVRHVPPEPP

SEQ ID NO: 65625 - protein, 134 aa, Zea mays
  Coding DNA Sequence Number=SeqID_22250
MSRAFDDYNIKDCGVISASKKRVKNVGTHVLNVKNVDPRRTHKFDDHVAPSNLTVRTWVPSNLWEKIRRPPSNLKTHVLNVKFDGTHVLNVKFDGTHVLNVKFDGAVEVTSLSSSKNRRRLYSSVNPRSYDGLK

SEQ ID NO: 65626 - protein, 131 aa, Zea mays
  Coding DNA Sequence Number=SeqID_22251
MLSTGLHKTASRQRAEKSWLLLKGKGVDHRGCSMRAMDMDLTEAEVGPGRDAELGRLGARRKELLLVAPAPGELSHGGRVQSCCSAGGGRNVLAADAVKEMETGKGNVAAMGENGKISECKGGKLIFIEES

SEQ ID NO: 65627 - protein, 209 aa, Zea mays
  Coding DNA Sequence Number=SeqID_22252
MRKRLHNLHLFKKRRHYTETLFSCKSPARSQLNLFNPKTWYLAEGFKEGNQVQGRIFLQFITNFQSSTEKEKGKRLNRTGPVLAQSAQPKGKGVPAPAHWQLCTGALAFLSNSERVLSLFNRATDNLQKRPPVSVSSQWEVPDGVHARPSSGERLYRPNGAMTGAPERRTSNRTYPEYFPQPNCTNGNLLSSVRMNRTGGGQMSVFPVI

SEQ ID NO: 65628 - protein, 125 aa, Zea mays
  Coding DNA Sequence Number=SeqID_22253
MQSLQQKINADSVEVEGEEAPKGGLQRKINADSAEVEGEEAPKGGLQRKVSADTPKNKREGRCFGYEDKASGKNRKKKFSCFVVYEKKGSFIILYILKWNEKSAEFKEKDIPHDATSTNNFFELL

SEQ ID NO: 65629 - protein, 73 aa, Zea mays
  Coding DNA Sequence Number=SeqID_22254
MELRGLWWSWRAGQKLEMTRESACPADDTGGFNSRSVLDEGWKLPVALPPLVQRDWRRHRAKGSVFAFAPTVP

SEQ ID NO: 65630 - protein, 142 aa, Zea mays
  Coding DNA Sequence Number=SeqID_22255
MASMTVAGSREARRRSGVDKAEELGQQRYTGRAQHQGQAPAGREEHGERRPWKGGAGELAGDPTPGARLGELRMMEKRPTVRELNSRERRAVKLKQRRWCAMVEEGATRRHGWAEDDHIRGDGRVGIGAIEGDTPWRSTTQK

SEQ ID NO: 65631 - protein, 84 aa, Zea mays
  Coding DNA Sequence Number=SeqID_22256
  Homolog annotation: Hit_ID=Q8SA86; Match level="QueryCoverage=94%, HitCoverage=8%, E-value=5e-09, Identity=42%"; Hit description =Putative retrotransposon protein
MARVRSTARLSREGDETKMTEAATILEMMRRTGLVVQGGVITEGTSTAEAEQAMTEVESDNESEDGDSILSPTKPSHVELKIRL

SEQ ID NO: 65632 - protein, 72 aa, Zea mays
  Coding DNA Sequence Number=SeqID_22257
MSMSWPNKPYKCIISHMLAKQKNILRVGMLRIRLLDKDGGRWEEEAQQDDDTQQEVEKQATVDVAQQDDDDA

SEQ ID NO: 65633 - protein, 599 aa, Zea mays
  Coding DNA Sequence Number=SeqID_22258
  Pfam annotation: Domain name=IQ; Domain location=122-142; Score=26.2; E_value=0.00012; Accession=PF00612.18; Description=IQ calmodulin -binding motif
  Pfam annotation: Domain name=IQ; Domain location=80-100; Score=23.7; E_value=0.0007; Accession=PF00612.18; Description=IQ calmodulin -binding motif
  Pfam module annotation: Pfam domain module=IQ::IQ; Domain location =122-142::80-100
  Subcellular localization annotation: CTP_CleavageSite=32; ConfidenceScore=5.25e-01
MDRRSMTPGISSRLSSPPPAAHPSPPPAAAPSAAAMPSHPPSPIPDAFTRLKESFGRFAEQWDQFVVMFHRYKEKTEKELQAAVRLQTAARGFLARRQVQSLRGEKHLVVASRATPWPSSHEQAVVHLQAAVRGFLVRRAVRKLHLLISSSLHQLAACAPNHQVSSILFEPPAEVEIWVCSPPARPKRVVSFIREPALVLDRPNIRTGWFLLHLSSNVKAAVQLFPWDPGGQEDIAAVQIYILVPQLFCIFVLNNKDKPRCKRLNLKSCQVSLWQLEDELVLKGGGDVMGIIGSDHSCGAAPMCAKSERPQGALAAARARKARALAATRSSARKEGVTKESAHKEGMEKESARKEGMAKEIISSSKRSAGQRGGHRGLTTSRRGLRDRRRVARPGERDTSEGVAAVAARAGTQTGGGAREEELGVCSSPVPRDGSGQTCRRRRSAWGELGLQEQQGEEVDGYWLRETVGKKGACASAHRGKRSSGARRPWGIPRARWTRGAPASWEAPWTSRSKGARSLSWAPALGENGGQVVLPRGKPLVPGPATGSRKGAPRKLESSLHGWGAEMNGVVGVPCALGKKTPRKRRLGEERKGVAAEKE

SEQ ID NO: 65634 - protein, 580 aa, Zea mays
  Coding DNA Sequence Number=SeqID_22259
  Gene Ontology: Mol. function=protein binding; Cellular component =nucleus; Biological process=regulation of transcription, DNA -dependent
  Homolog annotation: Hit_ID=Q339D4; Match level="QueryCoverage=86%, HitCoverage=92%, E-value=0.0, Identity=77%"; Hit description=Chitin -inducible gibberellin-responsive protein 2, putative, expressed
  Pfam annotation: Domain name=GRAS; Domain location=181-487; Score =451.5; E_value=1.1e-132; Accession=PF03514.5; Description=GRAS family transcription factor
MYWGRPAHKQIGYLLKWIQIVIFSWIRILVQIVLTAILQNLPSPLPNANAKRCCHMRFQAPVGENGRIHMAENSLGHHYSSSDIGSQRINNSNPQVFEAQYCTLESSSANGVYPAQSSTSSHSISPLSGSPLSQHDSHSDHTYSSPPSASCLTEVADLLIKQKELENSIVGPGLDISSDCSRSLLQAHVPVRPDNWRQLLGINGGDLMQVVIACGKAVAENDVFATELLISELGHLVSVSGDPMQRLGAYMLEGIVARLSSSGSMLYKSLKCKEPTSSELMSYMHLLYEICPFYKFGYMSANGAIAEAIKGENFVHIIDFQIAQGSQWVTLLQALAARPGGPPYIRITGIDDSNSAYARGGGLDIVGRTLCDVANSCGLPFEFNAVPAASHEVELQHLAIRHGEIIAVNFAYQLHHVPDESVSTENHRDRIIRMIKSINPRVVTLVEQESNTNTAPFFPRYMETLNYYTAMFESIDVALPRDDRRRMSAEQHCVARDIVNLIACEGAERVERHELFGKWKSRFAMAGFRPYPLSSVVNNTINTLLHTYNSYYRLEERDGSIALWPPSDVSKAPLCLSDVL

SEQ ID NO: 65635 - protein, 117 aa, Zea mays
  Coding DNA Sequence Number=SeqID_22260
MAGKLHTAHCLAHTHLTAAALDAVRLLPRPTALIWSDPRSRWPRTTCIRGADTHGSCHVATAAAARADMGLVFQSKGKRHIQFQNMRAKSPSCKTRTCEVWKLTQEIFIVLPDMNNN

SEQ ID NO: 65636 - protein, 59 aa, Zea mays
  Coding DNA Sequence Number=SeqID_22261
MAHEIMRKTELPPPLEPFDPLADLETKKAIEIINMAESIVDEVVTKLLNEVAEKVLKED

SEQ ID NO: 65637 - protein, 72 aa, Zea mays
  Coding DNA Sequence Number=SeqID_22262
  Subcellular localization annotation: CTP_CleavageSite=54; ConfidenceScore=5.06e-01
MTKALGYYSFESMTPKTPSLLLYSYLMPFFWFTNRGRERTMAFGSGLTDGRGKLGEEAWGLMTNPTMSSIQQ

SEQ ID NO: 65638 - protein, 173 aa, Zea mays
  Coding DNA Sequence Number=SeqID_22263
LTSSALGVTRTLCTLLPHLELAHPSRSSSDHAHSLSVALGCSSLSYRLIQAAVVIDPLQPHLRCDLHPACSRFPLCSNVGARGEAVLLSLAVQLPRELLCWPLLLGFQLAMSISLLPLAHSALAFQQPATPALSLLAFVQNRAAPVLSSAAVLPPTAAASPGPQRRAVRWDSP

SEQ ID NO: 65639 - protein, 272 aa, Zea mays
  Coding DNA Sequence Number=SeqID_22264
  Subcellular localization annotation: CTP_CleavageSite=79; ConfidenceScore=5.07e-01
MRKKHGSMPKLHTCSGLDSHNEQKHWHSKCHYKRNSGSTSAGTNNPTRWGGLRSNRRLKGGSPPPALTATTTTPALGCRTAAARASGRVLLQSCPRPRRRSRGEDNYKEPEARSTDGGGDPVSDGDFSSRLHLGTDDMGRQPSGRSSLRSSRTSGAPTSAWRRHTGAKAGPPQNTNAALATRDILGGPPVHTARQPPSGRRGHREPSRRARHAGADDARRRPAPRCRSPTRPQGQRVPSPSNAAGEGDPRTRAGGRAPAQPDLHPSEDDEHP

SEQ ID NO: 65640 - protein, 151 aa, Zea mays
  Coding DNA Sequence Number=SeqID_22265
  Subcellular localization annotation: CTP_CleavageSite=44; ConfidenceScore=5.43e-01
MAPRILCDDGGSQPPYGSKRTSARTQPLRQLSLRRAPALLRRPRHHTSWVPKSLRLPRRHGLFQQRGCPEVVQRASLAEVQGKAASQTPPPTEARGRSSAAPAPGVGALAPCAGDDAVSPGDWTDLAPCDVVDSTPGEKAKRESQTYVQCT

SEQ ID NO: 65641 - protein, 57 aa, Zea mays
  Coding DNA Sequence Number=SeqID_22266
MAGGIELAGAKERGLAGERYGARKSGLSPCPNPRQIQGFVVSRARVPMPSSGTRQRG

SEQ ID NO: 65642 - protein, 85 aa, Zea mays
  Coding DNA Sequence Number=SeqID_22267
MAPKRASSKAAPSVDKAAKAALLPEKKGKAPADTTHQEAYEDDTLSKRQRNNQPTPEGSLRTCSSGGQPQEPPPGFAPPKGEDAI

SEQ ID NO: 65643 - protein, 248 aa, Zea mays
  Coding DNA Sequence Number=SeqID_22268
MAHAEDVEDLGGLDGALPEAAEVELVPPFDAGEGPSVTAAGEDPAPAPALTGEDALKVVAEPAVEPAAEDPTATAGPSQVLRFGPAHATATDNAIFVAASTVAADDDSFGSVSKCFESDDSGSSIAWTEESSDEDLDYFVALDVVAAEHSPRAKDSEGLPGASTGYRRRRAVAKRRVSGLSQSGRRHRSEMESGRLRVDGTGKRELLSSPIGVSVGEGELRNLFEGEELRMMLFNYREMGIIPKVEPM

SEQ ID NO: 65644 - protein, 157 aa, Zea mays
  Coding DNA Sequence Number=SeqID_22269
MEAKRADLRCQLAEERREANKAVADAQAAQAEAKVARVEGSLARQRAEELEARLNTLCNRVDKAEASMHAEEELGVLPTIVTGFMSFTSLVTCEGAVNALSREGCKHYEVFDQADENFECEIFKVEDPMLKQSAGRSSIGCGARTAERRSGSDPTGQ

SEQ ID NO: 65645 - protein, 144 aa, Zea mays
  Coding DNA Sequence Number=SeqID_22270
MVPLAGPDCLSVSLCQVAPQSEWRRRCCPSVRPLYADGGYQLRIRSLEGSASGVIVSLVGEGNPRLSSMVNLVAVLNTELDHALDELGKDRAEVAELRAECAARHYLDGGSPAPVGIQHPYRSPPRGRFDYGTPNCRTRIDLDP

SEQ ID NO: 65646 - protein, 276 aa, Zea mays
  Coding DNA Sequence Number=SeqID_22271
MGTCATLGGRMSSPELRESSARMLEVTGGRWPKNVPIPRAADEDFFTSRMARDLKVFPYGQNIAAVLSAVMEKDRQDATQKRRAVVRIADPMRQAKKARGSAKAAAPGSCKPVPVVKLAAPGHSKASASAKAAASGASKPPPGRPVKGRRLPSPARTDGAATRVADFDTNISVADYFVGSDGGQLVVVPPPVATTSPTTVVEAKGATRDLWATFCAIGKILSAAVAKDVAGSMSQQLRQGSQQLSQQLKQAANFADHVASGALTADFAAEVESLWA

SEQ ID NO: 65647 - protein, 141 aa, Zea mays
  Coding DNA Sequence Number=SeqID_22272
  Subcellular localization annotation: CTP_CleavageSite=36; ConfidenceScore=5.18e-01
MPYRSIALPCPFHGCALVSGELEGGKPLRLRKAPTRANLLRSSPSPRPQARSSLKRQARHHRGAAKPSGATPPPSTLGSQGRHQPPECSIAAATIRREERVSDGLENMSSNNVKKVVDGAVRASKVINCDNMAKLLVSDEL

SEQ ID NO: 65648 - protein, 277 aa, Zea mays
  Coding DNA Sequence Number=SeqID_22273
MAARPFRPLVWAKVESHFPRAAGEDLGACWRRLSPQRLGTQVGRVAFKRRVTPLEGDHVFVLPYASCLSTFQAPGWGIPAVFPPHRWRNATPWELVPFSHRSASRIFISQPGCTPRRRSPKTVTTSPWLGTSKLGCDLGPTLSFKDVHHPRWGGGRAEPELYLPRGFVGHPLLRRSRERALAGPAGGSDFDNAGLVDGGRRQPQRVELVGLAPGAPSCRKAAAAPCAREDRPRCRALLGRRSCSGAVLPLHRWRRLEKSPSLTGSPPPSVLRASGSL

SEQ ID NO: 65649 - protein, 302 aa, Zea mays
  Coding DNA Sequence Number=SeqID_22274
  Homolog annotation: Hit_ID=Q6J9V9; Match level="QueryCoverage=40%, HitCoverage=34%, E-value=1e-12, Identity=45%"; Hit description =Putative uncharacterized protein
MEAQAHASCNRRAECFVHATAPPLAPPPRLLDCGTNTATRGDPAHDPVAPAWRDGQCGQKWAGSNDGGRRTGAAVTSRSGRRFAFAIMTASVKGSGKGETPKRILPREGTRLRASLLIRGSKAGPSEGFDSRLRSRGPYTHYWSEVRRPAPRKGSTTASGYSAPRPLLIRGSKAGPRRVHSRLRHRARDDHGYVRYITKARAALPSSPETPCSAPIEGNMALSPLLLAERRCRGVYKKVESIPDRPLALCRGSGAALANPAPAEPLTASTYQPKNLRPDRTPGLRPARMRERPDQPKHYARH

SEQ ID NO: 65650 - protein, 93 aa, Zea mays
  Coding DNA Sequence Number=SeqID_22275
  Gene Ontology: Mol. function=structural constituent of ribosome; Cellular component=ribonucleoprotein complex; Biological process =translation
  Homolog annotation: Hit_ID=O22424; Match level="QueryCoverage=87%, HitCoverage=31%, E-value=6e-35, Identity=87%"; Hit description=40S ribosomal protein S4
  Pfam annotation: Domain name=Ribosomal_S4e; Domain location=4-47; Score=17.4; E_value=0.00046; Accession=PF00900.11; Description =Ribosomal family S4e
MDSASIETNMKGIPYLNTYDGRTIRYPDPLIKANDTIKIDLETNKIMDFIKFDVGNMVTGGRNTRRVGVIKHREKHKGSFETIHVLLGAFCYV

SEQ ID NO: 65651 - protein, 217 aa, Zea mays
  Coding DNA Sequence Number=SeqID_22276
  Subcellular localization annotation: CTP_CleavageSite=60; ConfidenceScore=5.66e-01
MHSDLAYICITFGIQGSTRSSREERGSTGSTTPTRSTTSQSNQNSTTLTDTPVRERRLTRSKLGKRTHDWVLTAGSKHEGEKRGSRALGHGTDTGETLSRGQGDGNLAMEDEKSARGLRTSWTSRAGSQDPSWASGRNRELGTRPWGQGSSAVRGVCAGKNDELGACALREFTNGSRRGRGRDSPCCRAESCCATPESELEGERTAGNLRGHDDQGN

SEQ ID NO: 65652 - protein, 78 aa, Zea mays
  Coding DNA Sequence Number=SeqID_22277
MDEDVIVKAVDCSNQSEVHMLMHATKVHYQCPKRVKYPIYDQTVYLNDYHKKMLKDQYGSRGGNGSSSKCFFTICFTP

SEQ ID NO: 65653 - protein, 294 aa, Zea mays
  Coding DNA Sequence Number=SeqID_22278
  Gene Ontology: Mol. function=DNA-directed RNA polymerase activity; Cellular component=DNA-directed RNA polymerase III complex; Biological process=transcription from RNA polymerase III promoter
  Homolog annotation: Hit_ID=A7PDY9; Match level="QueryCoverage=62%, HitCoverage=87%, E-value=5e-42, Identity=47%"; Hit description =Chromosome chr11 scaffold_13, whole genome shotgun sequence
  Pfam annotation: Domain name=RNA_pol_Rpc4; Domain location=168-282; Score=127.2; E_value=4.8e-35; Accession=PF05132.5; Description=RNA polymerase III RPC4
MDDKNKVKKEIDGPLGPPPRKVGISLAIRHIVSLYAILTTVVLFLNLFVSTNFPFENWLMYKLIVHFSVGIARSGTQVAFGQGNSYYARNFPMPKKDSSAGGASKLPKEYAEPWDYSHDYPVTLPLRKPYSGNPEILDEEEFGESSASRTQDDELSAAEQLGLMDMSSESQFLFFQLPSSLPLPRQPQSGADPNEVRDEKREDMRPSSHNGSKLKEVPEGYMGKMLVYKSGKVKMKIGDTLFDVSFGSNCMFSQEVAAINIREKHCCTVGEISKRAIITPDINYMLGSVDKMEE

SEQ ID NO: 65654 - protein, 420 aa, Zea mays
  Coding DNA Sequence Number=SeqID_22279
MTSHGSSGEGNAQSHTDGLAREGFPRILWEVLQGAGYTTPPQYAVQLFEKHRVPRCRVRMTLEPHPLQPGWRSLDSKSFGYMAEDTMEAIALHGLTTFCGFHPLELSTHPIGLFPAEKEDDPMWKDRVEHAKDIWAIYPGQNAHLTVRCMNALYRLQVMRGEAMSHLMALLQATKITLDNREELVVDLSTEMVEKDLQVEQLSNEIQELEELVGTRENTIEVLEDQLINTQQQLAEANQHLDMHHQEIQDMEANEDVDIEGGEEPAASLDTAGSGRPPSPESSVASVSRHLSIMVVVIIRVTAAATYQEFLSTQPPLFTRAEDPLDADAFNDLCQYAGYHADTDEKRDKFRRGLSTKLCDRLNIVRANNYNELVNMAISQEDCITARQAEKKRKTPVVGPSAQPQRFRIVSDTQSRGPQQ

SEQ ID NO: 65655 - protein, 367 aa, Zea mays
  Coding DNA Sequence Number=SeqID_22280
  Homolog annotation: Hit_ID=Q6J9V9; Match level="QueryCoverage=38%, HitCoverage=40%, E-value=6e-25, Identity=52%"; Hit description =Putative uncharacterized protein
  Subcellular localization annotation: CTP_CleavageSite=44; ConfidenceScore=5.36e-01
MAAAGGRKQQSNRLQAHVPSWDSERALSHGVKTTHPCSVPRTARACTTAAPRTTRPVALTPRQGGRHLWQAKRATLHLRHDDRVKKGTGKGDTPKGILLREGSGPRALLLIRGSKAGPSEGFDSRLRALGLRAHYRSEVRRLAPQKGSTTASGHPGSVPTTDQGFEGWPPEGFDSRLRTRRARDDSGYVRYMAEARATLPRYLGHFRDQQERFCNGIPSEGGIEPSDPIKRDRVRQITCSHFAPPLADLTGKQRRLRCSACYATRQGLGLNLDLGRRSPPRPTPGLGLSLDLGGASASPDLGLRPTTPQGGTPRGRNADRCSTGLSGVPSGATVASTTVEFNGRLTKLQCADYARRSQSRRRWHTGQ

SEQ ID NO: 65656 - protein, 380 aa, Zea mays
  Coding DNA Sequence Number=SeqID_22281
  Homolog annotation: Hit_ID=Q7XFZ8; Match level="QueryCoverage=75%, HitCoverage=28%, E-value=2e-09, Identity=25%"; Hit description =Retrotransposon protein, putative, unclassified
MATGRLGQAEGEGTTRAQCEGAHGTNRAGERVNGEGMGRTVVGGERAGGLVTGEGREKLTGGVGLPAGAAHGRGARLTGGAGRDHKEYKRDLQRVCARELEASQREKKVARREEAVSQREALTTKYQAKLSALDQTLEAQRAQQVKAVERLQKWQQELEGKASDAALVEENIKAKEQSLDRRETDLARRETDLAFREEMLTLRGELLAEHELKAEEKERKLEEQIHQFNAAQAAPGPQAMEATRKALEDLQAEHRVGVQHIAEWAGEASTTLVPIGMSPIAVSELPVSISDALPMLDSAADRLPRLDQILGARLEAEGSKLCRTVVEYVLTCFRSHDPAISLAPMIDGPVSATEDAARESVQDVVEMVAARFQRDPADAE

SEQ ID NO: 65657 - protein, 105 aa, Zea mays
  Coding DNA Sequence Number=SeqID_22282
MRKWARPSPLLLMLLSCRSNIPLDRPTWWQGGRPSHTINYILHGTCKNGTTSKAEYTNTQLDLTGYKESSSLISCEKQTIRIEFLNLARSLLGDEHVLSVGKITI

SEQ ID NO: 65658 - protein, 89 aa, Zea mays
  Coding DNA Sequence Number=SeqID_22283
MAGGNELAGAKERWLAGEETLGDTRVSQPSPLKGISSRDSGQSPFEVKRRIRKAGGGVGGDYIPASLGRQSGKLDLKNSSVSQVASSSE

SEQ ID NO: 65659 - protein, 130 aa, Zea mays
  Coding DNA Sequence Number=SeqID_22284
  Homolog annotation: Hit_ID=Q38214; Match level="QueryCoverage=43%, HitCoverage=52%, E-value=5e-26, Identity=98%"; Hit description =Putative uncharacterized protein
MLFVLGRAGCLNDGGIDQGALSHHDACFGQPAIDGLEQLAGQLMLLQQVAEIHDGGANLLHAGQENLFSGLTALTAEFTVGEDCNLADGEYVLIPEQGPVQEKDQEQASEAAIEDLPATPAIEGKPRFYA

SEQ ID NO: 65660 - protein, 105 aa, Zea mays
  Coding DNA Sequence Number=SeqID_22285
MRKWAGPSPLLLMLLSCRSNIPLDRPTWWQGGRPSHTINYILHGTCKNGTTSKAEYTNTQLDLTGYKESSSLISCEKQTIRIEFLNLARSLLGDEHVLSVGKITI

SEQ ID NO: 65661 - protein, 208 aa, Zea mays
  Coding DNA Sequence Number=SeqID_22286
MGRRETEREGGKKQEGDRRKRGNPRPSCLSRAQVGSSPGLGEVEAPPRSRSSLSSEAEVESEPLGRARRRPSAEVRAESEPWGRARQSSSSSGAEPESEPWGRARRSSSSSGAEPESEPWGRAMRSSSSSGAEPKSEPWGRAMRSSSSSGAEPESKPWGWAMRSFLWCLRPDLAAVSLTLSSGTAVGAAQAALSSCQDGCMLAVEGCE

SEQ ID NO: 65662 - protein, 236 aa, Zea mays
  Coding DNA Sequence Number=SeqID_22287
  Homolog annotation: Hit_ID=Q6BTJ4; Match level="QueryCoverage=74%, HitCoverage=22%, E-value=2e-07, Identity=32%"; Hit description =Similar to CA1621|CaIFF6 Candida albicans CaIFF6 unknown function
MKAKSHHQPNQGGLTALAYNAPLTPAAAVQWPHLYPPYLEWETQSQVAAACAAPTAVPLDRVRLTAAKSGLRHHRKLRIAQPQGLDSGSAPEDDELRIARPQGSDLGSAPEDDELRIARPQGSDSGSAPEDDELRLARPQGSDSGSAPEDDELCLARPQGSDSALTSADGLRLARPRGSDSTSASEDRLDLDLGGASTSPNPGLELTTSQEAPSLPYPKLTQATGNKAGVPSGSPR

SEQ ID NO: 65663 - protein, 222 aa, Zea mays
  Coding DNA Sequence Number=SeqID_22288
MAEHGDLAPILRGTLAMSASLKTPELLNSVTSCREIAPSMAENLHGGASSGRRSQIRWRKMVMRFIKIVPKILNRAVCIEYRFKKAQELGQINTATCSTRPGNARARPGAQPRACRAAPRQPHAHARARGYKDNTDLSLKLLKTADQAPPHRRRRIDAAGLQPAAIARRPSYTVEHASLTSPTACALGQPYSGHHCRRSAPRRDRQDLADLTQPSIGPLPPP

SEQ ID NO: 65664 - protein, 125 aa, Zea mays
  Coding DNA Sequence Number=SeqID_22289
MAAASVVSWAWKPRVSESNERHPGCKGWGSKTSHTLQRGTPCLRNNYTVYCGAFENKSPTLAPTSGELTSTVETMASFNKQAIAPSVTKLVLPIKGGSSSEPANKKAEEGSTEKSAACWGARPLR

SEQ ID NO: 65665 - protein, 502 aa, Zea mays
  Coding DNA Sequence Number=SeqID_22290
MKSMLMSSHFQEGIGSGYKDAWRILRDEPHPKSSSSGLDLWEQQDGLRTIILPYYLDRNNCTSPLSGCCIGIPSSNASRSLERELLLLVPSHEWGYASMGVVVRCYLKTFEQGQKETSTCSTCPGIAKARPGARPRAHRAAPSQTRARARAYKANRGFNRTPPLALNLTGVPDHWRLLCARRASGHPRPDHRRPANRAIPRPVRPSREPQHVLVKLPESGIELYLAGDTGSASPDFARSPANIDRAPQPEHTPPTSPTACARGPTDSGHHRRRAVPRRDRKDFPELTPPFAGPPSPPPMASAILFGVGGALHSTTARRDDIGGVLPSLVTPRSKPHRAPPRAPRLRPRTHMYAMPPPRGGSEPLKRVLVRVCTHRRNRGQPSRGLALLAPLDVTQASSETASIPFSSASILHVLPPPSLIVSPSSPRASMNPTACSSMEYGLTSIGSVGHTYSRNPSLTAPDPPSSTPIYNLCSSVSHMLDLKVFDEMEKGPVAGVYFSTLR

SEQ ID NO: 65666 - protein, 99 aa, Zea mays
  Coding DNA Sequence Number=SeqID_22291
MKDILAIKADQIQCPSCPYDPVLCWCMGATSLGSYVGGTQGNTLPCMLNMCRDTLPHIQLFIGLGFGQISLPALSSSHSPLWGRGDPGVLLVLTFPTAT

SEQ ID NO: 65667 - protein, 146 aa, Zea mays
  Coding DNA Sequence Number=SeqID_22292
MEEHGRPKEGSQRHGSVWERGACTRRVRPWRRAARKGSPWPRKLVCAWGRRAGSVGVEGVVEASGCSLEAPARWEREPSRAEEAGVGWDVEGEREMAVGSLCARGKKNALPGPLAQDLVASHWPGAGSGRLVLSAGEEDREMVAAD

SEQ ID NO: 65668 - protein, 213 aa, Zea mays
  Coding DNA Sequence Number=SeqID_22293
MHRGKVELLLWMLLKSVGPSGLELVRSCVDPLRQAFLPRPTKEWPCETSSPEPFARSSNLLVDPGDICPPRLSHSETRSEEKNRNFNLFRRAEAKKVKVLTHRSKLHSLEKTAAAPAIEKMEIEYVKATPSASEIIAAATAKATVRPVEEIEAKTEDHLKLQSPPTTTWLSKLAIAPAATPRKGRRMASILDAVMKSTKMPTPISTKASEDKI

SEQ ID NO: 65669 - protein, 75 aa, Zea mays
  Coding DNA Sequence Number=SeqID_22294
  Subcellular localization annotation: CTP_CleavageSite=36; ConfidenceScore=5.33e-01
MKFRASLRGSPSWLMSNSARAAAGAIAFFGCTSKVVARAPGDEGGRLSSPEVGTNFGNLFSNAVNPEQGNTIVKD

SEQ ID NO: 65670 - protein, 398 aa, Zea mays
  Coding DNA Sequence Number=SeqID_22295
  Pfam annotation: Domain name=zf-CCHC; Domain location=329-346; Score =19.4; E_value=0.0018; Accession=PF00098.14; Description=Zinc knuckle
  Pfam annotation: Domain name=zf-CCHC; Domain location=67-80; Score =4.3; E_value=0.34; Accession=PF00098.14; Description=Zinc knuckle
  Pfam module annotation: Pfam domain module=zf-CCHC::zf-CCHC; Domain location=329-346::67-80
MEDLSTMTPTIVIGKIAAFEMSIKMGRQVEPTSSRPYAFACDERKGKKKDPTPSSSSEEEEKKQRKRGCYACGEKGHCRDSYSNMVEPTKGRSKGMALTSVKTCDDSLSEDEPPRTRSHRSSSHSSWSTRKCFMARGKMSIPSSSDDSGSDDEGLLEKFETFANLNFELSTKIEQLESNAPSSATDDGLIKKNEKLKAKLASSQEAIENLLEKMEILSIHNDELTTKLENNGSTPGASLVETTEIIKKDASTSCFDLIDDANPFNQVLVKNVVIETCSDEIAMENEQLKQEVAHLGKALYDKKGKAKQIQTPQDNTTEGVNKLVDGKTVICRICHKEGHKSFQCKAKSGDKQKLKQKPTSKISNTYINKVDKKTTTPYFIKKKKNGKVIVLITCSQML

SEQ ID NO: 65671 - protein, 64 aa, Zea mays
  Coding DNA Sequence Number=SeqID_22296
MTKVMPAEDVQNSKNGNCNLADGEYVLIPEQGAVHEQDREQAPETAIEDLPAAPAIEGKPQFYA

SEQ ID NO: 65672 - protein, 32 aa, Zea mays
  Coding DNA Sequence Number=SeqID_22297
MAQETRQQHPRCQRRVEHHQIDADGLSSSTTA

SEQ ID NO: 65673 - protein, 84 aa, Zea mays
  Coding DNA Sequence Number=SeqID_22298
MVEPPTTRGGPSPEQSPSRVPGHKTLIPTELRKARIKECIMKGLTSGYVAVRFASVDEEDDQWGLGDSDIRVHECQASGPTIVH

SEQ ID NO: 65674 - protein, 127 aa, Zea mays
  Coding DNA Sequence Number=SeqID_22299
MALALGKVPDMGTPLTDSLSSAVRQTLGKVLETGEIKLEKRWLCSAKDISVWVHRTVRWCTGQCPVRQAGVCQLTPLGKKLTAYGYKSPDCPGERLQVVEIPCKREKSKVKKNTVVFKLIIGSLERS

SEQ ID NO: 65675 - protein, 100 aa, Zea mays
  Coding DNA Sequence Number=SeqID_22300
  Subcellular localization annotation: CTP_CleavageSite=22; ConfidenceScore=5.21e-01
MQAVCNCTTGTHPFDFNTSSVEAQAHTSCNRRAGYCVRKTPPPLAPVPRLLDCRTGAVTRGNPAHSPTVPTKRIGHGDRERGYSERDPSLAKEAGPEPSY

SEQ ID NO: 65676 - protein, 227 aa, Zea mays
  Coding DNA Sequence Number=SeqID_22301
MTVAVVVKILPPNSGRYRIWVRGCRHLGWSADAKTYTRISPPRRVPPGRQNLDPLRRRRCSAPSWIVRTPGADRPDVRRGGAAPAPCRRPLGPVVRTVCASAGSTDRWFVLVFGDQIGATTLFGDYARTKCLDLKSGSQMTGSKDHIDISPDNILRPAIESLSVDEQQLYEEMMSRMREDARRQIAKAEEGATEKFLSYFTVDRHEKIAKHGEIEIASLLPCLKSQM

SEQ ID NO: 65677 - protein, 438 aa, Zea mays
  Coding DNA Sequence Number=SeqID_22302
  Gene Ontology: Mol. function=RNA-directed DNA polymerase activity; Cellular component=integral to membrane; Biological process=RNA -dependent DNA replication
  Homolog annotation: Hit_ID=Q7FS87; Match level="QueryCoverage=96%, HitCoverage=39%, E-value=1e-139, Identity=55%"; Hit description =Putative glycerol 3-phosphate permease
  Pfam annotation: Domain name=MFS_1; Domain location=29-377; Score =125.0; E_value=2.2e-34; Accession=PF07690.7; Description=Major Facilitator Superfamily
  Pfam annotation: Domain name=Sugar_tr; Domain location=44-426; Score=- 160.1; E_value=0.0099; Accession=PF00083.15; Description=Sugar (and other) transporter
  Pfam module annotation: Pfam domain module=MFS_1::Sugar_tr; Domain location=29-377::44-426
MASKKPPGLRLFGGAGSLRTYQTLVLVLTFFAYACFHMTRKITSIVKSALDPQTKMGFSHWGRLHLHTSEAPALNTGWLPFNTADGSALLGEIDVAFLAAYSIGMFFAGHIGDRIDLRIFLTIGMVGTAVFTALFGAGYWLNVHSFYYFLVVQMVSGLFQSVGWPSVVAVVGNWFGKSKRGLIMGVWNAHTSIGNIAGSLLAAFLLEFGWGWSFAVPSLVMALVGLVVYVSLPVSPEVMEIDIAGSGELNCIGGVYLSDAMAGSLSTIFDVGGVLGGVLAGHISDRLNARAITAASFMYCAIPALFLYRAYGSTSMAWNVCLMFVTGMFVNGPYALITTAVSADLGTHSSLNGNSRALATVTAIIDGTGSIGAAIGPLLTGYISSKSWSAVFTMLMAAALLAGLLLTKLVCAELQGKTPTSASKDVADAQGTYYSDEV

SEQ ID NO: 65678 - protein, 173 aa, Zea mays
  Coding DNA Sequence Number=SeqID_22303
MALGKGHLRTSTADGRQPLPMAEKPALGKADSLSSVKYLALCKESVCRVPSEDARHSMLNTSLSSARPRSLGKDIFAEWQLTDTGHRCVLDSSPSVHRRLSVKTMFAESQIFDTGQRILLCRVLAFGPRQRLTAVSCRRPLTALCRAPSLPSVCRSAKQYFPSVSLCRVSRTR

SEQ ID NO: 65679 - protein, 116 aa, Zea mays
  Coding DNA Sequence Number=SeqID_22304
  Homolog annotation: Hit_ID=Q9SXG0; Match level="QueryCoverage=62%, HitCoverage=58%, E-value=2e-13, Identity=57%"; Hit description=F1F0 -ATPase inhibitor protein
NPEEIPWDEAGAEYVVESIGVFTYKDKTIAHLKKVEQEKLEKLARKGPSLGEQPSSTTGSAASDVKADAGPTESTSASVSTDKNRNYAVLAGVVAALGDLGWYLLSKPKKSEVVVD

SEQ ID NO: 65680 - protein, 32 aa, Zea mays
  Coding DNA Sequence Number=SeqID_22305
MAQGHISLSATRSGSGGGCTRCPAGRTQLSSA

SEQ ID NO: 65681 - protein, 333 aa, Zea mays
  Coding DNA Sequence Number=SeqID_22306
  Gene Ontology: Mol. function=nucleic acid binding; Cellular component= cytoplasm; Biological process=stem cell maintenance
  Homolog annotation: Hit_ID=A3BJL5; Match level="QueryCoverage=23%, HitCoverage=7%, E-value=4e-20, Identity=57%"; Hit description =Putative uncharacterized protein
  Pfam annotation: Domain name=Piwi; Domain location=66-317; Score= -93.2; E_value=0.002; Accession=PF02171.8; Description=Piwi domain
MSDSQAQITVRRRKRAILLGLGPTFSSEDGMMKVGSCSRTILDSGFVQCTLSGVGQTIRLSPSSIKHLCHLSLCRVLFDRLGEEVLCELVGVDGGVEGVARGGAGGGGGCGEERGVEIRVGLVHIRVEALLGIRGSESHGCVAVLDDEAVMRKQLHEAREQLVRQRLLPPKTGPRWLTIMALSVHKVTVKSSSMGWKTLSKTQAADLLQAWTALYNEKPKITFVVVQKRHHTRLFPSKPKDRQYADKSGNIRAGTVVDNNICHPTEFDFFLCGHAGAKVSTPTWVCRASASAHIRPWSHPAPHLADSPTALPRSIPPSIHRQPRILASLTSSA

SEQ ID NO: 65682 - protein, 783 aa, Zea mays
  Coding DNA Sequence Number=SeqID_22307
  Gene Ontology: Mol. function=identical protein binding; Cellular component=extracellular region; Biological process=negative regulation of catalytic activity
  Homolog annotation: Hit_ID=A2YMZ7; Match level="QueryCoverage=99%, HitCoverage=99%, E-value=0.0, Identity=58%"; Hit description =Putative uncharacterized protein
  Pfam annotation: Domain name=PA; Domain location=381-471; Score=9.2; E_value=0.038; Accession=PF02225.13; Description=PA domain
  Pfam annotation: Domain name=Peptidase_S8; Domain location=132-603; Score=71.0; E_value=3.8e-18; Accession=PF00082.13; Description =Subtilase family
  Pfam annotation: Domain name=Subtilisin_N; Domain location=43-125; Score=56.9; E_value=6.9e-14; Accession=PF05922.7; Description =Subtilisin N-terminal Region
  Pfam module annotation: Pfam domain module=PA::Peptidase _S8::Subtilisin_N; Domain location=381-471::132-603::43-125
MATTITRLLHHLALFLLIVEFADAVLIPKTKNHAALKPQASSTTYIVHANDLAKPPHFRSLEEWYRSMVITHASSTRAASSSSILYTYDTVMHGFAVQLTGDEARLMSSAPGVIGVYEDRVLYPQTTRSPGFMGLEPGNGAWKQADFGDGVIIGFVDTGIWPESASFDDSGLGPVRSSWRGKCVDAHDFNASLCNNKLVGAKAFITPAADAVEERKSRGVSSPRDKEGHGTHVASTAAGAEVRNASLYMFSRGTARGMAPKARIAMYKACGVGGYCRNADIVAAVDAAVKDGVDIISMSVGGARPTAFHDDVVAIALFGAERKGVFVVLSAGNNGPQATTVINSAPWMTTVGAATVDRQYPAQLTLGNGVVLAGQSLYTMHAKGTHMIQLVSTDVFNRWHSWTPDTVMGKIMVCMHEASDVDGIILQNAGGAGIVDVDPQEWSRDGSVAYAFTLPGLTLSYTAGEKLRAYMASVPYPVASFSFACETVIGRNNRAPVVAGFSSRGPNLVALELLKPDVVAPGVNILAAWSGDASVSGYSDDGRRADYNIISGTSMSCPHVAGIAALIKKKHPSWTPAMVRSALMTTARTVDNRGGYILDNGHSVIVGRRIDNFRVATPLVAGAGHVQPDLALDPGLVYDAGEHDYVHFLCALNYTAEQMRRFVPDFVNCTGTLAGGPASLNYPSFVVAFENCTDVRTLTRTLTKVSEEAETYSVTVVAPEHVKVTVTPTTLEFKEQMETRSYSVEFRNEAGGNPEAGGWDFGQISWENGKHKVRSPVAFHWKN

SEQ ID NO: 65683 - protein, 137 aa, Zea mays
  Coding DNA Sequence Number=SeqID_22308
  Gene Ontology: Cellular component=endoplasmic reticulum; Biological process=vesicle-mediated transport
  Homolog annotation: Hit_ID=A3BJ85; Match level="QueryCoverage=100%, HitCoverage=100%, E-value=8e-50, Identity=69%"; Hit description =Putative uncharacterized protein
MAHPMYGSGPLRSRNAASSDEIQLRIDPVHGDLDEEIDGLHSRVRMLKGGPWLSAIFELENILVGVAQEINSEAKFQNDFLHELQMTLAKAQAGVKNNMRRLNKSIIQQGSNHVLYVVLFALFCFFIVYLLSKFSRR

SEQ ID NO: 65684 - protein, 35 aa, Zea mays
  Coding DNA Sequence Number=SeqID_22309
MTASDPTPNMEIRLTGVLSNGANHAHPRDLGLNAD

SEQ ID NO: 65685 - protein, 315 aa, Zea mays
  Coding DNA Sequence Number=SeqID_22310
  Homolog annotation: Hit_ID=A2YMZ0; Match level="QueryCoverage=100%, HitCoverage=57%, E-value=2e-57, Identity=40%"; Hit description =Putative uncharacterized protein
MATELDVSKSRRFDIAMSRRTRRSTSLVACFQDQYTPSLAQHRHQELKAFLQCQDEELKALQRCEDAEHKTLCLNEDEELKIPQVPMQYEDDKQETPEQYEDGQEKESQQYPDQEQEIPDSYEGKMLEQYQDEDDELPSQYQDHELVTQKLPEEDEGTASERFQDEERKELHQHQEADEQTSQSEDEEEPKSQQERHDVEQKAPKQFQVLKKVAAPPRPVENVPRFSLQELIRQKQQLPTGEAMATSKVGGRGESVLADHMVSGAGAAAAEGTALAMVIKRPEGGKKPMGMIRRCVKALNQMIKAKHGSKKNLHF

SEQ ID NO: 65686 - protein, 81 aa, Zea mays
  Coding DNA Sequence Number=SeqID_22311
MARITENSEIPFKLEASVCSVQVPVFQRCRAGQAAFLWSHLLWAPGFVGLRDGNGDLILDFPRRIPPLEDEDGNETSLVGI

SEQ ID NO: 65687 - protein, 424 aa, Zea mays
  Coding DNA Sequence Number=SeqID_22312
  Gene Ontology: Mol. function=protein serine/threonine kinase activity; Cellular component=cytoplasm; Biological process =xenobiotic metabolic process
  Homolog annotation: Hit_ID=P33679; Match level="QueryCoverage=53%, HitCoverage=100%, E-value=1e-128, Identity=94%"; Hit description =Zeamatin precursor
  Pfam annotation: Domain name=Thaumatin; Domain location=28-227; Score= 502.9; E_value=3.8e-148; Accession=PF00314.8; Description=Thaumatin family
MAGSVAIVGIFVALLAVAGEAAVFTVVNQCPFTVWAASVPVGGGRQLNRGESWRITAPAGTTAARIWARTGCKFDASGRGSCRTGDCGGVLQCTGYGRAPNTLAEYALKQFNNLDFFDISLIDGFNVPMSFLPDGGSGCSRGPRCAVDVNARCPAELRQDGVCNNACPVFKKDEYCCVGSAANDCHPTNYSRYFKGQCPDAYSYPKDDATSTFTCPAGTNYKVVFCPLLRGLSMFTEGFDATTFACRFGNCFMVPKFQLKTNTKIKKSSRRKEQRKPKCSLVWRTGQSDEPPDSVRCTREDRPQTLQLRVSQAQLRYNSPDCPVHHRTVRCTTGLSGAPPDYPVRQRSNDYLHATVDSDSDQCRTVHAAEVRAEDQRGTGLSGVASDCPVPHEDKASNGRPAPSPNGRMTWRRTGHCPVAHRTV

SEQ ID NO: 65688 - protein, 135 aa, Zea mays
  Coding DNA Sequence Number=SeqID_22313
MEPGGGTAVGAVEFLLTSSCFRKGAESRRRHRVCGAPSLPIWRSEPDGTPVLFPVARVSSGLGDVEAPPKPRSSLSSVAEVESEPLVRARRRPPAEAGAEFAPRSGEAEFVVFLGPEPESEPLGRAERSSPSSGA

SEQ ID NO: 65689 - protein, 156 aa, Zea mays
  Coding DNA Sequence Number=SeqID_22314
  Gene Ontology: Mol. function=helicase activity; Cellular component =ornithine carbamoyltransferase complex; Biological process=amino acid metabolic process
  Homolog annotation: Hit_ID=Q1EPC6; Match level="QueryCoverage=51%, HitCoverage=5%, E-value=2e-18, Identity=53%"; Hit description=DNA helicase homolog, putative
  Pfam annotation: Domain name=DUF889; Domain location=37-156; Score= -128.8; E_value=0.0097; Accession=PF05970.5; Description=Eukaryotic protein of unknown function (DUF889)
MAPPVDVAGLRPRLGDVEAPPKPRSSLSSVAEVESEPLVRARRRLPAEAGAESEPWGRAKRSSSSSGGRARVRALEYLLCVGGGTEEVNNNDDVRLPDEVCVPYIGDDRDLDKLIDDIYPNLNENMSNTSYITSRVILTTQNNWVDMINMRMINRF

SEQ ID NO: 65690 - protein, 151 aa, Zea mays
  Coding DNA Sequence Number=SeqID_22315
  Gene Ontology: Mol. function=hydrolase activity, acting on ester bonds; Cellular component=nucleus; Biological process=regulation of transcription, DNA-dependent
  Homolog annotation: Hit_ID=Q8LNU5; Match level="QueryCoverage=58%, HitCoverage=11%, E-value=3e-30, Identity=72%"; Hit description =Nucleolar complex protein 2 homolog
MTVVGKHLSIVQVNERPPSQETDDEQMIAFNVHRVRASAIFLAAFPSLLRKYVKALLHTWARGRGAMPLVSFMFLRDLCIQIGSDCLDTCLKVYFLISFRYGTHLSKKLVTFFFSWQVDKKTDVKILRKNFVIDLLNYENNPCLCIIPANI

SEQ ID NO: 65691 - protein, 130 aa, Zea mays
  Coding DNA Sequence Number=SeqID_22316
  Subcellular localization annotation: CTP_CleavageSite=27; ConfidenceScore=5.30e-01
MEVAHGMTGSSSAVMVAATSPYSFSISGSTVETIKTVPTRRGPVAQERLSKAADLVRHCVETCADSPCRFKDGDADGREGAGGGGRGTSHGAPRRRHHPTRASSGGGCSVQGGPRTEALMETMMSMAEKV

SEQ ID NO: 65692 - protein, 362 aa, Zea mays
  Coding DNA Sequence Number=SeqID_22317
  Gene Ontology: Mol. function=succinate-CoA ligase (ADP-forming) activity; Cellular component=mitochondrion; Biological process =tricarboxylic acid cycle
  Homolog annotation: Hit_ID=Q6ZL94; Match level="QueryCoverage=79%, HitCoverage=87%, E-value=1e-127, Identity=77%"; Hit description =Probable succinyl-CoA ligase [GDP-forming] subunit alpha, mitochondrial precursor
  Pfam annotation: Domain name=CoA_binding; Domain location=38-134; Score=190.8; E_value=3.4e-54; Accession=PF02629.10; Description=CoA binding domain
  Pfam annotation: Domain name=Ligase_CoA; Domain location=144-305; Score=103.3; E_value=7.2e-28; Accession=PF00549.10; Description=CoA -ligase
  Pfam module annotation: Pfam domain module=CoA_binding::Ligase_CoA; Domain location=38-134::144-305
  Subcellular localization annotation: CTP_CleavageSite=28; ConfidenceScore=5.07e-01
MAASSRRASQLLGSAASRLLLGRGFAAAAAAAPSPAVFVDKSTRVICQGITGKNGTFHTEQAIEYGTNMVGGVTPKKGGTEHLGLPVFNSVAEAKAETKANASVIYVPPPFAAAAIMEAMEAELDLVVCITEGIPQHDMVKVKAALNRQSKTRLIGPNCPGIIKPAVFQTTAVGLGQSTCVGIGGDPFNGTNFVDCLEKFVDDPQTEGIVLIGEIGGTAEEDAATFIQNVGLKKTTCPTNKCYRNDDICDRLGESKTQKPVVAFIAGLTAPPGRRMGHAGAIVAGGKGTAQDKIKALREAGVTVVESPAKIGSTMFEIFKQRGMVYFSVCLYYIISATLPTQLWKIALLVSCLIGFSRLRVG

SEQ ID NO: 65693 - protein, 218 aa, Zea mays
  Coding DNA Sequence Number=SeqID_22318
MAESRLDTGPIVPVAILSSAGLAGEEAASHLSLLVQLAEARLGRDKDFSRGRGQPRSGSCRDLARDALGRGGLMDMCFSLKGVLGRAKWEPKALWSGSTGLSGVHRTVSGAPEDSSSNSPPSGISRGDSAIIHRTVWCTPDSVRCAKEERPQELATFGKTPTASPLKFTGLSGVHRTVRCNPGATAISAPTALCRAFNARSARADVRRAHSGTPDKEQ

SEQ ID NO: 65694 - protein, 376 aa, Zea mays
  Coding DNA Sequence Number=SeqID_22319
  Gene Ontology: Mol. function=hydrolase activity; Biological process =DNA repair
  Homolog annotation: Hit_ID=A2YMY3; Match level="QueryCoverage=76%, HitCoverage=75%, E-value=1e-131, Identity=76%"; Hit description =Putative uncharacterized protein
  Pfam annotation: Domain name=Abhydrolase_1; Domain location=92-324; Score=48.3; E_value=2.7e-11; Accession=PF00561.11; Description =alphabeta hydrolase fold
MAEELPLSRTRAPVALLLRLPEFSLRLGRRHSSTVQCPHTNARAARRTWKWRGYNIRYQHAGTAGPALVLVHGFGANSDHWRKNMSVLAMAHRVYAIDLIGYGYSDKPNPREIEENFYTFETWGEQLNSFCAEVVQSEVFFICNSIGGVVGLQAAVMEPKTCKGIVLLDISLRMLHIKKQPWFGKPFIKSFQSLLRNTIVGKLFFNAVATPESVKNILCQCYHDTSAVTDELVQIILQPGLDPGAVDVFLEFICYSGGPLPEELLPLVKCPVLVAWGEKDPWEPVELGRAYASFDTVEDFVVLPDVGHCPQGLVLENVNVRLCYLQMGPVIATYLHLRAGGKHHLTDYNLIIRDHEEIFDFITAKEHVISEQREFL

SEQ ID NO: 65695 - protein, 170 aa, Zea mays
  Coding DNA Sequence Number=SeqID_22320
MAPPVDVVGPCPRLGEVEAPPRSRSSLSSKVEVESEPPGRTRRRPSAEARAESEPWVRAKWSSSSFKAEPESEPWGRAERKRSSSSSGAEPESKPWGRAERSFPWRLGLDLAAAIFALNAPAIWSVGVAIWPRLLLGEDWASGEPKLCADGGYQLRFRSLEGTPNYGPRQ

SEQ ID NO: 65696 - protein, 81 aa, Zea mays
  Coding DNA Sequence Number=SeqID_22321
MAIRLRINVFEFKTLQANLVIRKAWVYMGIATLLCRINDIFKAFIGLVLVFGVSIWVWDKRLRYICYVGQVVGYGRVDLGH

SEQ ID NO: 65697 - protein, 19 aa, Zea mays
  Coding DNA Sequence Number=SeqID_22322
MAIRLRINVFEFKTLQANL

SEQ ID NO: 65698 - protein, 323 aa, Zea mays
  Coding DNA Sequence Number=SeqID_22323
MNALSREGCRHFEVFDQADEDFEREIYKVEDPIVKESAGAIYDRMWGPHGREVVRERAETARAQAARGERVDDFGALNSALPDPEPTPAEAVSGAALEPPPETAEGAPDAPASAAAGGDLPLETAEGAPDAPAAAAPSAEDPATVAAEATAEATAEATAEATAGSSQVQDFGPAHATATTKFLAASTVDGGNKCDGSASKFSDFANSGSSIEWTEESLEEDLDYFAALDVATTEASPHAADTEDVPGPSTGRRRRRAVAKRRVSEAEGGRLRVSRAGRQELLTLPAAVSTGEGKLRSLFAGEELRIMLFNYREMGIIPKAEPM

SEQ ID NO: 65699 - protein, 131 aa, Zea mays
  Coding DNA Sequence Number=SeqID_22324
  Homolog annotation: Hit_ID=O48967; Match level="QueryCoverage=94%, HitCoverage=62%, E-value=4e-20, Identity=83%"; Hit description =Putative uncharacterized protein
MGTRSQAGVPLAGVGCVALADHLHATSWPSKFRSHLPEKYDVGWLKCRPRDGRKKKKKDRDYQKSRSIALVVAAATGGRGDRNKRPRSQRGNSGSCPMHSYGRHCTAECREIIDLAKRVREQHEQSSKDSV

SEQ ID NO: 65700 - protein, 63 aa, Zea mays
  Coding DNA Sequence Number=SeqID_22325
MEAAGLGLRSPVWRGQPARPTSTDFHRRAFFSGGDEDDVYDYGNGEGEAVEGDFQEFQDYDES

SEQ ID NO: 65701 - protein, 101 aa, Zea mays
  Coding DNA Sequence Number=SeqID_22326
MPPWIGRSTRRRRARPPAHVDRAIPTIPDDEPYLDVIARPSPSQPYPSPDLLAADCNLADGEYILVPEQGAAQEVAPDPAPEPAPEDLPATALEGKPRFYA

SEQ ID NO: 65702 - protein, 108 aa, Zea mays
  Coding DNA Sequence Number=SeqID_22327
MGQVFELGRKNSSCRSTLSKHFCKTESLIIEKPYLDSLTTSIPLRVFSLVGLPLPEVAAAVLHHATEGGAGAARAVTESRSTGPLAPFTLWELEEVAGELAHFACDAA

SEQ ID NO: 65703 - protein, 315 aa, Zea mays
  Coding DNA Sequence Number=SeqID_22328
  Gene Ontology: Cellular component=integral to membrane
  Homolog annotation: Hit_ID=Q69IU6; Match level="QueryCoverage=37%, HitCoverage=20%, E-value=8e-36, Identity=66%"; Hit description =Ankyrin-like protein
SASTPCPRPQPPTPPVLIPRAPLDYQNPTAHLCNGHLPRPHPNVRCHPPSPHPTPLRHPPSVSLLSALRIPLTSLIMVERRAKKRMVFVMNKLMWLACLFISVAFIALTYVVVGRDDWWLAWCTMGIGAAIMLTTLGSMCYCIIAHRLEEKNTRKIRRASASQSRGSWSRSVDSDEEILNSEYKTKIGCGTTSVFFNQRTEGPSCGTKFKSLDRAILASQRRTRPSRRDRVIALDPRNVALLIFKALALDLQGHHLPAMHAVRRGAYKQCVDFSPSLLGDVVVAGGRCWGMLSVRGDEFHAMVNYFPKNQQVYLA

SEQ ID NO: 65704 - protein, 728 aa, Zea mays
  Coding DNA Sequence Number=SeqID_22329
  Gene Ontology: Mol. function=transferase activity, transferring nitrogenous groups; Cellular component=endoplasmic reticulum; Biological process=biosynthetic process
  Homolog annotation: Hit_ID=Q10P02; Match level="QueryCoverage=60%, HitCoverage=88%, E-value=0.0, Identity=87%"; Hit description =Aminotransferase, classes I and II family protein, expressed
  Pfam annotation: Domain name=Aminotran_1_2; Domain location=111-482; Score=73.2; E_value=8.6e-19; Accession=PF00155.12; Description =Aminotransferase class I and II
MDMALPVVNATAAVLARVSAAFNAPLARAVVFGVHIDGHLVVEGLLIAVIVFQLSRKSYKPPKKPLTEKEIDELCDEWEPEPLCPPVKEGARIDTPMLESAAGPHTIVDGKEVVNFASANYLGLIGNEKIIDSCIGSLEKYGVGSCGPRGFYGTIDVHLDCESKIAKFLGTPDSILYSYGISTIFSVIPAFCKKGDIIVADEGVHWAVQNGLHLSRSTVVYFKHNDMVSLASTLEKLTHGNKRAEKIRRYIVVESIYQNSGQIAPLDEIVRLKEKYRFRVILEESHSFGVLGKSGRGLAEHYGVPIEKIDIITAGMGNALATDGGFCTGSVRVVDHQRLSSSGYVFSASLPPYLATAAVSAVNYLEQNPAVLANLRSNIALLHKELSDTPGLEIFSHVLSPIVFLKLKKSTGSPTTDLDLLETIAGRGFSKSLAMTVLSEIRDKTFFAVAVQECYELGCCDFADSEVVALTENIGKPLAEVLKELGKRVPDSLVKTRIEDDGFTIKMFEVIRMLEGDKLIERWEVSQNVDTPEFVSSELLLQKYMDFAADECSLGVDAMELSGPSFWPPKAAANYQTLGFSASFYKIRLGLRRGPASTWFPLGNDSDNDADAALFHFHMRKSPGQTLTTSTPAAEPLRLRASTVHRARRTRSSSSSPAPHTPAGRPVKRTHDPTQRRRDPAGSGSQRIAATRSSVWTRGGPEIVSSKRHTATCQEWGRPGGADPRSEP

SEQ ID NO: 65705 - protein, 80 aa, Zea mays
  Coding DNA Sequence Number=SeqID_22330
MVWSSGEGERTERRERARDREREVWLHFIGKGKGDERAAGYGFKLSSTPSMKRGINGKVETDEMKLPITQSREERSQLLH

SEQ ID NO: 65706 - protein, 95 aa, Zea mays
  Coding DNA Sequence Number=SeqID_22331
  Subcellular localization annotation: CTP_CleavageSite=74; ConfidenceScore=5.61e-01
MPWSRAQPPNTARTPAAPAPLQRDALGNPPRAVPVPLRPQPRRPRSVPCFRTRARPWPRSECPTRRPAHPQELAAKLVVKPIHSQRQQPHPSSSL

SEQ ID NO: 65707 - protein, 21 aa, Zea mays
  Coding DNA Sequence Number=SeqID_22332
MAAAARSQGRPAHGPNGPRWG

SEQ ID NO: 65708 - protein, 225 aa, Zea mays
  Coding DNA Sequence Number=SeqID_22333
  Homolog annotation: Hit_ID=Q6JAD6; Match level="QueryCoverage=75%, HitCoverage=23%, E-value=1e-26, Identity=45%"; Hit description =Putative uncharacterized protein
MVQTKNVSSSGGGDDEDPPRPFRQVKGKTVYLEQHEGMKKCRMERAAPAALAATTAVEQAEQGGHLKISSDQIAYRVLRLTSRPRSTAPSTPSAIVSTPPPTSPALVAPEPSTTSSIPTTSTTLASIVPPLAPISAPPIPPPRFRERDETEVRPIAPDPRLLDLQRATATWTIQDHQDTLQQQLLADRAKHRASMTHILQHTGVKLPPVQSAPPPALRAAIVPAL

SEQ ID NO: 65709 - protein, 61 aa, Zea mays
  Coding DNA Sequence Number=SeqID_22334
METARADGSEVAEGDVEEREENRTGGERTWAPPDDGGGWATAHTRTRAGDLLRGRLGRAED

SEQ ID NO: 65710 - protein, 378 aa, Zea mays
  Coding DNA Sequence Number=SeqID_22335
  Subcellular localization annotation: CTP_CleavageSite=10; ConfidenceScore=5.04e-01
MAPVARGLARGTARRARHDVRRATPSRGRGAPAWRAVLGVRPWHAAVPLTPPGLAMAWPMLRRGSARPLGGDEDDGFGYDYGNGEDEAVEEDFQEFQDHLERLHHRLHDEQQRRRQELEQQGSSSSPQQEVESMRSCSPVLPLEAPPARVAVGGDPDDEGGDSSSSYSTDLSAGQEPEGWVARPITRDAARGCHFHDTLDTLLRQALDRHTWSIEYRCVVFQHSCRVYPDRWEANCLVRRPENSIRGAEVCSEHYSISERDSAEAAMQDVARRALSHYCSVLGGIADGLNQRYYPYRPSGSTGVNQAVVLNTELDHALDDLSRARAEIAQLRAERAESCHLEDGSPAPVGTRHLYCSPQRGQHAYDNPDCRTRINLEP

SEQ ID NO: 65711 - protein, 326 aa, Zea mays
  Coding DNA Sequence Number=SeqID_22336
  Subcellular localization annotation: CTP_CleavageSite=56; ConfidenceScore=5.15e-01
MGATRVRAQSTQGTRSRLARAQPWAKAADPGGFTSHPRENSAACAAPTAVPLDRVRLTAAKSSLGRHRKLRLARPQGSDSTSTPDDGLRLARPQGSDSASTSDDGLRLARRQGSDLASTLDDGLRLARPQGSDSASTSEEPPPRPTPGSDRPRHKGAIIILPLASSGYREQDRRPIWLAPEGPGLSYEKVGRTGERADAQGSLSPSPTQVLVTPYCKRIRPGRRTTRRPWFPLAVSPPFVFRLAPTHLGWDTQRQFTRRSRDPPGSKRRQGACKGAETREQRTRSDLKRASHSEDLFTMAETRSGGSEQFGGSSEQLETRVGVLGA

SEQ ID NO: 65712 - protein, 54 aa, Zea mays
  Coding DNA Sequence Number=SeqID_22337
MAMMGSTSEKMYLCQNKITRNGSGEMTRVACTLYGKRLDGGVSVLSVSVNMIWS

SEQ ID NO: 65713 - protein, 46 aa, Zea mays
  Coding DNA Sequence Number=SeqID_22338
MAMMGSTSEKIYLCQVKKQQTFVASVQRWYPKKRTKTKAARGKALR

SEQ ID NO: 65714 - protein, 46 aa, Zea mays
  Coding DNA Sequence Number=SeqID_22339
MAMMGSTSKKMYLCQVKKQQTFVASVQRWYPKKRTKTKAAGGKALR

SEQ ID NO: 65715 - protein, 314 aa, Zea mays
  Coding DNA Sequence Number=SeqID_22340
MSLTQLKEKCIAQPSQDNRDHMVKKLETETTVACTKSLEENVKDLRIANRREQKKKINTSSKSLNRASMQGATRPRGLTSGFAHWLTSRAVGHVAASGLLLSGEQKQSRDLAVSGPDPTQRGPGPVLGVRFTLVEVLDLTRRSGPHVHGSDTFPWGSGLAADTLEYIFFSGRVAALEPSTWVPTVALGPTSGEDMSLQVGPKLDWRLARCFRALADVITASPPSVTPTATSVRAADRPATPMPDGFARPRARRLDTAALVLKNLLSVFCYGPEEAQYWREWRFALSAPRNQRPRSMTCGPGPPCHILDRCFRRR

SEQ ID NO: 65716 - protein, 309 aa, Zea mays
  Coding DNA Sequence Number=SeqID_22341
  Gene Ontology: Mol. function=hydrolase activity
  Homolog annotation: Hit_ID=Q2QLY7; Match level="QueryCoverage=79%, HitCoverage=79%, E-value=2e-73, Identity=57%"; Hit description =Expressed protein
  Pfam annotation: Domain name=DUF1637; Domain location=61-306; Score =362.9; E_value=5.4e-106; Accession=PF07847.3; Description=Protein of unknown function (DUF1637)
MEVAAAATAGAGVVELQLDLLEAAAPTEREAKRRRVHPVPAGPPAGAAAPGRRSCSRRRRAVQRLFQACRHVFRGPGTVPSPGEVQLLRHMLDRMRPEDVGLSPDLSFFRARDATRGGGTPTITHTTIYKCPNFSMVILFLPRNAVIPLHNHPGMTVFSKLLLGSMHVKSYDWLNTADPDPSSATSTTSSSSSDGPCLRLAELVVDDVFTAPCDTSVLYPTAGGNMHRFTAMAPCAILDVLGPPYSIEEDRDCTYYAELPYAHHSLVAAGEDVERGQGQGHLAWLEEIDMPRELKMCSVHYGGPPISDE

SEQ ID NO: 65717 - protein, 370 aa, Zea mays
  Coding DNA Sequence Number=SeqID_22342
  Gene Ontology: Mol. function=sequence-specific DNA binding; Cellular component=nucleus; Biological process=regulation of transcription, DNA-dependent
  Homolog annotation: Hit_ID=P24345; Match level="QueryCoverage=33%, HitCoverage=47%, E-value=2e-18, Identity=40%"; Hit description =Homeotic protein knotted-1
  Pfam annotation: Domain name=KNOX2; Domain location=169-220; Score =91.0; E_value=3.7e-24; Accession=PF03791.4; Description=KNOX2 domain
MGPMGVLLTLPSRSYVQVQVPVEATSWGAGHQLFLRYAGIQPRHIEPTSQGAKYQERSWVALEVCGRCLHGILYDLPGGVFSVGNRASDHYYRPWASSLSTAGRRPTAHPEHDGGHWEQQCQRQPGATACQRWQPPRCVRQGEGALIVGGDVEAIKAKEMEARQRTTLGGLATETEPELDQFMEAYREVLVKFKEELTRPLQEAMKFMQKMEPQLNSLSISRRSLRNTLSSGRWWKKCHPHEHLAEVGKDGRLEDGWRLEERRDRQCQPAGEVGEEEHELPGGEVAEGSDADALQPSRLRTRLSAPLDWKRLGWTSEAMATTAAESGRVRMQRGAESSKAKGHNDWRECKSVTTTRGVNPFSRQTLPLVP

SEQ ID NO: 65718 - protein, 93 aa, Zea mays
  Coding DNA Sequence Number=SeqID_22343
MASSTPSPIDPNLIVIAAIDTEFDKRISSLDTKWEQRFSALEKSVAGCNAGFTAFIEEISSDFTNQIVLSESTTLASITRTEQTIYEHIDRVE

SEQ ID NO: 65719 - protein, 408 aa, Zea mays
  Coding DNA Sequence Number=SeqID_22344
  Gene Ontology: Mol. function=cysteine-type peptidase activity; Biological process=proteolysis
  Homolog annotation: Hit_ID=Q5NKQ2; Match level="QueryCoverage=92%, HitCoverage=51%, E-value=1e-177, Identity=72%"; Hit description =Putative uncharacterized protein 9C20.3a
MKSVDHPPANPKRITIELSQEFFSVEIPRSVSTGDPPNTKHSVHRPAPVERPYVIHEANDQIGSGDDDDDFMTPTKKRNATGSPIKILQKTCTKRMKTMQKLNVRCNPQDIIITIKILNERQRQAVARKGFSNILDMTLDALGSRSYLLWLMDKLDHKDMTLRPGQGKELKITKEIVHLILGLPNAGGGKPLGIDEAVAGNNLRAELGLPKDEFVVASLQDRLRKGDDDDISIICFFLILFNRLLFPTSSWGISNHEVLLTEEMDRFHETDWCHLIFNDICEAAQKWHTRSTTNVSTTIYGCSIVILFRSTSETCYSVVPSVYVQSELPLIKDMLSSKIKQLQPRDRPKFIEKFVEYDSEVGKACSIIKNTLTKMVVKQGTHPFWYPKYFGPDYAIFATDYGVDRHPV

SEQ ID NO: 65720 - protein, 95 aa, Zea mays
  Coding DNA Sequence Number=SeqID_22345
MGAHDSFFPTTIHGGIIVAMGRESETLAIGWWHRSVGKTSAMILAVEKRGLGRVCADELNQSMELLLCAVDLRCEDDTEGDAIYVVVKKRDKKNK

SEQ ID NO: 65721 - protein, 201 aa, Zea mays
  Coding DNA Sequence Number=SeqID_22346
  Homolog annotation: Hit_ID=Q6J9V9; Match level="QueryCoverage=66%, HitCoverage=46%, E-value=6e-60, Identity=87%"; Hit description =Putative uncharacterized protein
  Subcellular localization annotation: CTP_CleavageSite=60; ConfidenceScore=5.37e-01
MEARVHTSCNRCTGYYVQRNRTATCANAASSRLQNQCSDSRASDTSGRQSGRRFTSVMMTASKKGSGKGIFQKRILLSEGSGPRALLLIRGSKVAPCGARQPPQSTRAPNRLLIRGSKADHSEGFDSRPRTRRVKDDLGYVRYMAEARATLPRYPRTFLRPAETICNGIPPEGGTEPSDPIKWVRVQQITCSYFWSVPLGH

SEQ ID NO: 65722 - protein, 115 aa, Zea mays
  Coding DNA Sequence Number=SeqID_22347
MTVGLVVGKSEPGHGLSLALSFKDVHHPCWGGGRAELGPASAWAAARSFSQCSGEKGVRRPWRCQLSRVWLPGLSGSGAASGAASYRWGGAWLPVRRTGVGRAVRGEDKGRSLSS

SEQ ID NO: 65723 - protein, 250 aa, Zea mays
  Coding DNA Sequence Number=SeqID_22348
  Subcellular localization annotation: CTP_CleavageSite=16; ConfidenceScore=5.22e-01
MANGPKTDFRPRPRKRARGRARDPPVVPPRETWKFGTPRSPGRGYGPQVSSAEPRTPSRPSRGRSAPYRAQLRLALLAAWPAVRLRWRMSCLGPVTAWRTPAAVRPTPGARVPSLVRASRACCVEKCLRAATRPTGSRARYTLPSSSSPPGVRLVGSRAPAAFASCRRQPMAGGTEDTSLALLVSDVAHAEGRRRVGVTRPRIGPPERTTASPARRLRAEAGAGPSARTCYLVDPASSHMLVSKIKPCMC

SEQ ID NO: 65724 - protein, 48 aa, Zea mays
  Coding DNA Sequence Number=SeqID_22349
MIGRADIEGSKTYVTMNAWLPQASYPCDVPPQPNSPPDNAFRPDRFMI

SEQ ID NO: 65725 - protein, 145 aa, Zea mays
  Coding DNA Sequence Number=SeqID_22350
MSHLKKKASIKGEMKLIKKRRMNKRFKIKDHLTQESTKQFNEITPSTPYLVTFKKGGCTLYPQVVTPFQPGLYRPDLHYQGEWLGIHYVAFTKTPLVHSCLLGFVSRTNALHLPKVLTERYSGKTPEPPKVSQDHPQYQDNNIVS

SEQ ID NO: 65726 - protein, 153 aa, Zea mays
  Coding DNA Sequence Number=SeqID_22351
  Subcellular localization annotation: CTP_CleavageSite=29; ConfidenceScore=5.01e-01
MAHQSYSGPPEAFSPPFSPLCPWIHGPFPANEFAVAPSSSLPNSGDAGTPLAHACLNSGDLTAAERSSSARSHSTPSVWSPPSDSDRMTRTAGTASRTRALTPWPACQRPNPLALGPLDNEQSEVPECVVGDLPEQQPGEGKCPLTYYVLHTL

SEQ ID NO: 65727 - protein, 184 aa, Zea mays
  Coding DNA Sequence Number=SeqID_22352
MESLLAKDYHVFEKIKKQLIKEAGRNTYPISRWTSIRKSSSNGRLTWHRFDLLRLPLMCLGQPADPRQHLDSLHPDEVPPGSEIQAPPTNSAAPAHARTIRPVKQGTRALRQVVDRPTPGRGPFAPVQRAPSQVLNAVIGAWIGANNGVPPGGRDPSVVGDCRRPCVRRPFGSTQRRPTPVAGS

SEQ ID NO: 65728 - protein, 74 aa, Zea mays
  Coding DNA Sequence Number=SeqID_22353
  Homolog annotation: Hit_ID=Q7G2B6; Match level="QueryCoverage=48%, HitCoverage=38%, E-value=3e-07, Identity=61%"; Hit description =Nonspecific lipid-transfer protein, putative, expressed
MAKSTAMFVAALALVVVMATTSTGGGRAAAACDPKPLVEACLCVYAKDPKFAKYINNPNTAKTFTSCGIAIPKC

SEQ ID NO: 65729 - protein, 805 aa, Zea mays
  Coding DNA Sequence Number=SeqID_22354
  Gene Ontology: Mol. function=CDP-diacylglycerol-glycerol-3-phosphate 3-phosphatidyltransferase activity; Cellular component=integral to membrane; Biological process=phospholipid biosynthetic process
  Homolog annotation: Hit_ID=A2YNU4; Match level="QueryCoverage=17%, HitCoverage=19%, E-value=9e-32, Identity=50%"; Hit description =Putative uncharacterized protein
  Pfam annotation: Domain name=CDP-OH_P_transf; Domain location=550 -653; Score=0.6; E_value=0.019; Accession=PF01066.12; Description=CDP- alcohol phosphatidyltransferase
  Pfam annotation: Domain name=DUF1639; Domain location=756-799; Score =65.3; E_value=2e-16; Accession=PF07797.5; Description=Protein of unknown function (DUF1639)
  Pfam annotation: Domain name=HR_lesion; Domain location=1-102; Score =87.4; E_value=4.7e-23; Accession=PF05514.2; Description=HR-like lesion-inducing
  Pfam module annotation: Pfam domain module=CDP-OH_P_transf::DUF1639::H R_lesion; Domain location=550-653::756-799::1-102
MPAGPLALEPLAFSAHLGVAVPHIELKHVVAATIGLKGLGSLLFILSSSLGAYLLLLYLALITPIIHDFYNYDMEKAEFAGLFAKFTQDLALIGALLFFLGMKNSIPKRQGGKKSPRRRRTSLLEVAGNWRLVKPQTGATKVEEIHSKNHPVSLLIIEYSPFLAVVESKDRRISVALAFAGHQEGDVVVSSLTKLSTCLVTISLHGMAFNFQIIQFMHSSIWNNLKSPNVNRDRYNDGSIKHSLLKQSSLDLLTIETPGLKKNDSFSRWMSKELEEVVDLGIKSTSDAFWSSIETVKVPHGSNVLTNEQLDAYVVNPSLSQDQLFSILDVSPGCAYIGTNTKVSAQFSQGNLCKRFVTGAGIAEADSCASGAGISLGRIPNFIFSKMCTSKQHSALAFFHCLLPCEVSVLCCKEPTSLFSLYVDVVTRLLTKYYYSIVLPLIHKVFDILLCPVDAAYKAVDKIIQIPTILPQYGMTSIIEGIDAIATTWVVVTRDMSNNRRCSGRGGGGRGGVPGDAALAGCASGSSWPPSSCPGSAFYMEGPWAAMTTTGIFLAVAVTDWLDGYIARKMQLGTPFGAFLDNSNKYRHCRSITNIARASSTIPLSVSMSSSGSIGTNPALTAFPLLPCTFNHQLHGVFEVASFGGSNIDPTAWEDKKCKGESRFPAQVRIRVRKLCKPLCPVLHHYDGPKFRLELSIAEDRRGLIGRRRRRAEAVIAGQGAQVHHGRRLPPPPLRVAVDGQRCRHRHRRREARRGAKEKDDDFLAMKGTKLPQRPKKRAKNVDKTLQFIFPGMWWGWGYRMDLNL

SEQ ID NO: 65730 - protein, 441 aa, Zea mays
  Coding DNA Sequence Number=SeqID_22355
  Gene Ontology: Mol. function=protein serine/threonine kinase activity; Biological process=protein amino acid phosphorylation
  Homolog annotation: Hit_ID=A2YQC4; Match level="QueryCoverage=81%, HitCoverage=64%, E-value=4e-74, Identity=47%"; Hit description =Putative uncharacterized protein
  Pfam annotation: Domain name=ACT; Domain location=170-238; Score =21.4; E_value=0.0034; Accession=PF01842.16; Description=ACT domain
  Pfam annotation: Domain name=Pkinase; Domain location=234-417; Score=- 57.7; E_value=3.7e-05; Accession=PF00069.16; Description=Protein kinase domain
  Pfam annotation: Domain name=Pkinase_Tyr; Domain location=260-417; Score=-55.7; E_value=5.4e-09; Accession=PF07714.8; Description =Protein tyrosine kinase
  Pfam module annotation: Pfam domain module=ACT::Pkinase::Pkinase_Tyr; Domain location=170-238::234-417::260-417
MAPPARPPRAGEDLEEGTGESSPPPRSPRASNPDCHEVQRKICERLRQTGRHDRTLADPTFNARFARHLERLPRRYLLDLDLDDKLEDVLLHWGILDECADPNKRPVFRARFIKYKTVPREDDGIGHDQDHEEPCQKLLEDLSLERRKIADRNDSLSISSRGDLKTVLLHEIIFSSIDKPKLLSRMLVQQLTALLSEVGLNIQEAHVYSTKDGFCLDVFVVDGWKTEETDELIAAIKETLTQKNASPSNSTNSSTPEKIVDLQQQVGDYEIDLSMLTRGDKIASGSSADFGVNHENILQFYGACTKHPNYCIVTVTKGSNIGAALPRMVVVKIADFGVARHGSQQGQMTAETGTYRWMAPEVPYDNMTPLQAALGVRQGLRLDIPGSVHPRLTKLIRQCWNEDPDARLTFAEITKELQDSLHHIEAPKGASRRSRAKMQKK

SEQ ID NO: 65731 - protein, 188 aa, Zea mays
  Coding DNA Sequence Number=SeqID_22356
MRAANWKMVQRLTRSMCAGGFLNSGEHDCAIPVMRVLGSSLSKLHGLTRKLSEGLDRTEEDGKGAVHGGCSRAALAGRGEVAGAKGWLGKVRRASIRVPIAQKGFALGFWGNSHLDVHDKLGHDIQDSLHLLRTLNSKFEDSWPQLPPLPPLQPTYSQSQQPEGHQHSQQQREFSEESETRTVNSTVP

SEQ ID NO: 65732 - protein, 128 aa, Zea mays
  Coding DNA Sequence Number=SeqID_22357
MENFGSKTVQIAMNAVVTSQLLVSLYSAAVDRKDQTVTLQGGTDTRLEVGSFLRNELREGVFWTFGFPKLKRLFSRVKLVTKNDLAPRKGLLLGSCFGAPKVSHEEAASAEVVSERWPKVPFHGASAF

SEQ ID NO: 65733 - protein, 272 aa, Zea mays
  Coding DNA Sequence Number=SeqID_22358
  Gene Ontology: Mol. function=glutathione transferase activity; Cellular component=cytoplasm; Biological process=response to stress
  Homolog annotation: Hit_ID=Q9FQA2; Match level="QueryCoverage=100%, HitCoverage=100%, E-value=7e-99, Identity=71%"; Hit description =Glutathione S-transferase GST 37
  Pfam annotation: Domain name=GST_C; Domain location=105-246; Score =34.7; E_value=3.3e-07; Accession=PF00043.16; Description=Glutathione S-transferase, C-terminal domain
  Pfam annotation: Domain name=GST_N; Domain location=10-83; Score =66.6; E_value=8.2e-17; Accession=PF02798.11; Description=Glutathione S-transferase, N-terminal domain
  Pfam module annotation: Pfam domain module=GST_C::GST_N; Domain location=105-246::10-83
MAGREADKDPELKVLGVWSSPFVIRARVALNLKGLAYRYVEDNLDSKSELLLASNHVHGKVPVLLHDGRPVCESRVIVEYIDEAFPASGPCLLPADPYRRAVDRFWASYVDDKVLITVPPLPCTARLQINFRFRTGRLTPVVVRGLDNGLQLFPTWIPVYNGRTSEDRVAAARQVVAVLEKFERAFDECSGGKAFFGGDAAGLVDVVLGGFLGWLRASEVMCGVRVIDPAKTPLLAAWADRFAALDGVREVIPDVQRLLEYNKIRRARRGLP

SEQ ID NO: 65734 - protein, 287 aa, Zea mays
  Coding DNA Sequence Number=SeqID_22359
  Gene Ontology: Mol. function=two-component response regulator activity; Cellular component=nucleus; Biological process=two -component signal transduction system (phosphorelay)
  Homolog annotation: Hit_ID=Q94LW1; Match level="QueryCoverage=30%, HitCoverage=13%, E-value=3e-30, Identity=79%"; Hit description =Response regulator 9
MPPSDLVTPCVAVPVMDAALLAVIVPPRRSIHARHGWCSHAMWRGEVTAGAAEVEGEGEDEGTGKRDPDNRPCEPAFLPTTCVHTGGTLGDPGKGQRRPRPKDQFPVGMRVLAVDDDPTCLKVLENLLFRCQYHGTSLDNNGTGNHDLELLREKKDQFDLVISNVHMLDMDGFKLLKLVGLEMDLPGIRYFHHFWYGSVCNVPGIIILFLVWIWNGLGSTTMMRQSCSKDWMISIPLLPIRLGSPSPLCPTGTKQPMELEQPMDDFHSPAANSLNCFDPSTQSACTQ

SEQ ID NO: 65735 - protein, 57 aa, Zea mays
  Coding DNA Sequence Number=SeqID_22360
MESHDLRAEWESRLVGGNETDGFGYVYGTGCQHCNHCSGEDEAVEGDFQEFQDYDEF

SEQ ID NO: 65736 - protein, 77 aa, Zea mays
  Coding DNA Sequence Number=SeqID_22361
IESKKTEIVGGDDEDSGTVTAALGLRDSTIGLGDGGLWGSEKETAALGLGDDDSGSRARSRARRLSGWVKGAVFLAR

SEQ ID NO: 65737 - protein, 109 aa, Zea mays
  Coding DNA Sequence Number=SeqID_22362
MAIHKHSSTPRFFNNLSGDDGFIHICLMTKGEKSCKYGIYEEGNQWLNKFMASGCMEFAWTSLPRVTLDKDFDARLSHPDLRDKAGCISYMRQTLVQFGSIQAKYANTI

SEQ ID NO: 65738 - protein, 199 aa, Zea mays
  Coding DNA Sequence Number=SeqID_22363
SRTPVLKRSAGALFDWMWGPHGRETVQERSNRAMDQMECDEEVEDLSDLDSTLPEASGVELALPSDAGEGPLATPAPTGAGEDPVPATAPTAESSTRVEVSEVANLPSASAKYRRRRVVSKHSVGAFAEIVNVLESFKSSLLGVASLYALGDAFILTMNGPTHFSFCLPHDSFRARTRSPFNEGFNVVSQLREPLMAWS

SEQ ID NO: 65739 - protein, 60 aa, Zea mays
  Coding DNA Sequence Number=SeqID_22364
MEGAMNGGWGLAEIAAGERGALAEGDGHEGAHVVWSSWDGRRWASVVFAGREVGSYSCLG

SEQ ID NO: 65740 - protein, 74 aa, Zea mays
  Coding DNA Sequence Number=SeqID_22365
MTVRWEQLRHRIPRARTLWQPHEAEGVSAHRSRVITDGGLRLNRPHPQPGAHREGRRLTGKVGGPAAKEEEQGH

SEQ ID NO: 65741 - protein, 457 aa, Zea mays
  Coding DNA Sequence Number=SeqID_22366
  Gene Ontology: Mol. function=structural constituent of ribosome; Cellular component=intracellular; Biological process=translation
  Homolog annotation: Hit_ID=A3AVJ9; Match level="QueryCoverage=13%, HitCoverage=19%, E-value=7e-24, Identity=93%"; Hit description =Putative uncharacterized protein
  Pfam annotation: Domain name=Ribosomal_L14e; Domain location=409-457; Score=23.0; E_value=3.2e-05; Accession=PF01929.8; Description =Ribosomal protein L14
MMILASVAATLFAILLLFSFPSCLRIYATPFSAEGVGAGASSPYSFDTSPDTDLGQWLLHVHEDILHHARTIVFAVIGRPVRLPGLHPVLHPQPTAPAHGRSRELTDTRRRDCPASPHPHPPANPDQAGLHRKQVAVFRDARAPCSVAPAPLAPPPPPYTALLPAGTPRELHMHCNLRHVAICAQSPAFHTPASPTSREPRLSLSTKFDVNLHPRNLRTPSARALAPPSCYLREIPRPAATFAHSTLSCRRYHACVVLLGTRAVLTSAPRSSVQDAPASPSPRSARALTQLSAPRNLHRHPRGRNRCTPASNSRPSQTSYGSFAKYDTVKAPRPLQLPAGIVLLVSVCWAPEMRKGLCGINRMASYTYHMCVVRISEMLAIFLPLGNKKHLLLHIAEALVDAPDMVKCQINFKRLSLTDIKIDIKSVPKKTTRIKAMEEADVKTKWENSSWGKKLIV

SEQ ID NO: 65742 - protein, 153 aa, Zea mays
  Coding DNA Sequence Number=SeqID_22367
MARACAYKAPRNLDRTPPHALDLNGAQTHRRLPVHDVPAAARLPCHRRPANRTLPNPVRPSEKTVHTSVKLPERGIGVCFAGEASPRSPDSTRLPASVDRVKENRKDCNLAGGEYVLVPEQGAAQEVAQDPAPEPAPEDLPATALEGKPRFYA

SEQ ID NO: 65743 - protein, 139 aa, Zea mays
  Coding DNA Sequence Number=SeqID_22368
  Subcellular localization annotation: CTP_CleavageSite=21; ConfidenceScore=5.35e-01
MGTTTMWSHCLRASNKRQRTSSPHRTSLNRLGMDTMSGAFHVFLARLGSLCLISLPPKAKIGQMLIPLTILTMKLHLFLRWNLLVGGGFLFGWLRGSRKAITRDVRKDIDINIFELQMYLQLEGDDSTSVTQKANAKSA

SEQ ID NO: 65744 - protein, 93 aa, Zea mays
  Coding DNA Sequence Number=SeqID_22369
MKALRGGSGHLVSGQRHAVDLANRGPKGPKQEEAAGRRRSGDRVGEEAAPFHGLQWSRKHSNEITRRTKEHAMWTVEGRGSNKRKGGKGNNIL

SEQ ID NO: 65745 - protein, 307 aa, Zea mays
  Coding DNA Sequence Number=SeqID_22370
  Homolog annotation: Hit_ID=Q6JAD6; Match level="QueryCoverage=34%, HitCoverage=17%, E-value=3e-21, Identity=50%"; Hit description =Putative uncharacterized protein
MEKCKPIKTPMPTNGHLDLDEGDRKFEKFQNPICLGSPDSPSSGQDGAHEECVGTRGETTRTLLSPLEFDVVDFLICEIEDTVLDGLRARCQPPQFQGTFEASRLHFGSYRPAPEDQVPVPDPVTDIQIEDTSFHQFETQGTIVPDDDDDFGIPPPPPMPPRSHDHESLAQQQDLMVSEQARLVAEQARQAAEQARQAAHTGVQIPPVQSAPPPALQAAIVQTFRKDPLYLHSVLLPLRSGRPVWTSRCRLSAPAAPAAQPQFESVPAPASTTDPGSETDSVPQLVFALLPRPRPDAPPPPPSFSGL

SEQ ID NO: 65746 - protein, 582 aa, Zea mays
  Coding DNA Sequence Number=SeqID_22371
  Subcellular localization annotation: CTP_CleavageSite=25; ConfidenceScore=5.15e-01
MPQVLGERTEQGSSSFIRIASRYAVAPRRGASSLLQFGLQVASTTALCFFHGSCTSLLPKLLSRDMPPSPGQLACPWFPRLLPALAERLSTSRNFPKIPGAFSSPVPSSSLKLSPHGAPKPSPSSASTRRDSELGSPIRCSLFPDLARPWSPAPQLLALLAARTPPCTPLILVVALCTFFSAMAAPCSLRKRRHRTPYVLAPSSCSVSAVWQIRIRCATRKARGGLAGHPASFYALRLPSSSMRRMARLRHTARKSVIPFLPSRLAERPLRRPVAGQSSHLERLHHRLREEQERRRQEQQSSSFSLHQEIESVRSCSPVLPLEPPPAPPLGAPASGVAAGGDPDDGDGDDSSSHDTDFSANPEPEGWVARPITRDAARGCHFHDALDTLLRRAFDRHTWSVEYRCVVYQHSRGVYPDRWEATCLVRCPEDSLQGAEACSEHYSISERDSAEAAMQDAARRALSHYYSVFGGAADGLDLKYYPRRPSGSTGGTIVSPVGEGNPRLSSTVNLAAVLNTELDHALDELSRARAEIALLRAERAERRHLDGGSPAPVGTQHPYRSPQRGHQSYGNPDCKTKITLEP

SEQ ID NO: 65747 - protein, 118 aa, Zea mays
  Coding DNA Sequence Number=SeqID_22372
MGEPSRESRRAEEEEGEGLGTPWGGKLQGGARHRRGASTRELGEAARRREPLGERNKKPRKPGASELARAWRHVARKKLGEERGAAAVEEAGRGGGGNLEAELQQGGSSTPGRDGWRR

SEQ ID NO: 65748 - protein, 95 aa, Zea mays
  Coding DNA Sequence Number=SeqID_22373
MEAVSALAPASSVVALALRQEALSARPRRCSIIVVHDAGLGGIGTDVLAGAHCETMDVVAVLDSSAPSLNLGFSDPTAITGIEVPKIDWGHQVNV

SEQ ID NO: 65749 - protein, 111 aa, Zea mays
  Coding DNA Sequence Number=SeqID_22374
  Subcellular localization annotation: CTP_CleavageSite=24; ConfidenceScore=5.23e-01
MDSTAAAGCAPVGGRTRGWRQSVCGSRPSPRLGTGLATTVTPEPPGDYGCCCSKTMGAHRFEVGCFHGSITNGFRKVARNGPDEKLLSRIGIRSPEAGGCVPMRCNGSTLG

SEQ ID NO: 65750 - protein, 51 aa, Zea mays
  Coding DNA Sequence Number=SeqID_22375
MAREIHGRQICAYLFLSSPQREIQVKHEELLEYAQSIISGLKRNDEIVRWY

SEQ ID NO: 65751 - protein, 152 aa, Zea mays
  Coding DNA Sequence Number=SeqID_22376
MRAPACTRGPDDSDHPRRRAVHHCDRQNLPEPIRPSPDFSHRWKDCNLADGEYVLVLEQGAAQEVAPDPAPEPAPEDLPATALEGKPRGLYPSRDLRRGLPFRLWWVQVRSLHDGSRGSLEDMVAGVTWPSILPPGWTVEWDPASAEEEHEE

SEQ ID NO: 65752 - protein, 60 aa, Zea mays
  Coding DNA Sequence Number=SeqID_22377
MEQRITRSTLAGGRVESGDRGLASLAKQTSIPRSGSFTESASNTWLFASARVLPSAERPK

SEQ ID NO: 65753 - protein, 98 aa, Zea mays
  Coding DNA Sequence Number=SeqID_22378
  Homolog annotation: Hit_ID=O48967; Match level="QueryCoverage=67%, HitCoverage=14%, E-value=5e-21, Identity=71%"; Hit description =Putative uncharacterized protein
MEAHLHAVRQEPGETLRAFISRFNKDGKKKKKNRGHEKPQSAAPIVAAVTGGRSERNKCPRPQGGNSGSCPVHPNARHSASECHEIIKLAKRVSERHE

SEQ ID NO: 65754 - protein, 295 aa, Zea mays
  Coding DNA Sequence Number=SeqID_22379
  Pfam annotation: Domain name=Transposase_28; Domain location=22-184; Score=-61.6; E_value=0.048; Accession=PF04195.3; Description =Putative gypsy type transposon
  Subcellular localization annotation: CTP_CleavageSite=26; ConfidenceScore=5.07e-01
MSSSSSSTASASPATLSEKTLSDLVVVELQPSHTVEFGTSRIFSGHVLEMQRLGYFGNGVGRAPVVEEVHELEGELVVFEAFFTAGLRLLTHLFVVEVLWKFKVQVHQLTPNAVVALAKHMVGHLVRLPHPHRMPTLGGQLVRSPAFTVDLRGRDAAAFVREVETEAVKIVGKYAPKTETLRSWDIRGSNARLNRVFELNHLSYGAYPEGDSADTADRRGKQTWPSTDEGPSRDKAPVAATRKRKLGTSAEDLGLRASGHFVGELLETCAAPGEMMSLPELRKTSARMLKVTGGH

SEQ ID NO: 65755 - protein, 116 aa, Zea mays
  Coding DNA Sequence Number=SeqID_22380
MEGASAALKNGARSMERRVEMRQSMEEEGALGREWSSGAAHGCCWALPWSSCSPAGSREGAVQVVSLHPGSSCSCDKGQREEDTGLRRKKGEEGAMDKSSQGRAAAVRGAGEGARE

SEQ ID NO: 65756 - protein, 339 aa, Zea mays
  Coding DNA Sequence Number=SeqID_22381
MAVAGTRGVSTKLSVDDYLQLEGRIERLRTQHTEAVRDKSATENKSRNLLEKLSAAEKEREDLSRRLAEENEGTERARAKAQVTRAEADAVRAKAKLALKRAADKGSELKSLCSYCEKTEASTRAGVERAHTLFVEAYPELGAQTAPFDKSGEEVDLRFLGWLLEELESLSSIVTGLMSYASLVTCEGASNALSREGCRHFKVFDRASEDFDRGIFQVEDDVLKRSTATLYDKSGVLMMMNEEEVYDLVGLESSMTRMGGAEEAGFEGHSTPQDGSGEDPATASAPAHVEEVSTSGPAQANPDDVDTNDVSMAANASVMWWLEVYSTLGLGHVGNGKPK

SEQ ID NO: 65757 - protein, 164 aa, Zea mays
  Coding DNA Sequence Number=SeqID_22382
MASIPVLHSAEVAHLYPQVMLPICQGIATSHTPLPRRRGRVTLRGLYKVPLASENPLQFIGSSNAWIPRMIAIAAKSSQGPPYTDHSPTALAPFGHWTKHTNSGKPGVKFAKVYQTQTTPVGMAQSLVSRRATASACGSKREQRLRIAEMIANYRNVLLLAIEA

SEQ ID NO: 65758 - protein, 69 aa, Zea mays
  Coding DNA Sequence Number=SeqID_22383
MAQSLGSRHGFIARDGYANGRPDSEISAGLEVVCCGLAMNSVEDSSGRSFRHTVEASAEKTAWITQGPG

SEQ ID NO: 65759 - protein, 189 aa, Zea mays
  Coding DNA Sequence Number=SeqID_22384
MGRGRRGRGWPRHTDGKHKHAPSSPSDDFGDSEYSEEVSSESDRSPAPISPSTSSKDSDDSMGLSTVAWAYWRSIERAGLGGSDEPEVSSDEANSFDSSKEWSGGDGDDEDEDEDNSGSDGDNDEGDSSKGGGSKGDGGSDGGKGHGDDSSDGGKGDDDSGDDDKGDDGSGGSDGGGSGGKASGIMPLV

SEQ ID NO: 65760 - protein, 243 aa, Zea mays
  Coding DNA Sequence Number=SeqID_22385
MKLQSHPHPTARYLVLLEQLHRILGRRSITCSLQYLPQDEGKALSCETRKLTNGKEKEDGEAWSINPHAPHLLRQGPTRLFSPMAGWSAKSFQQPYPPENLTMDQAVSLAARSRRFKSIFNLARWVELAGDTCSGLLTAIEFNQIAWGGSLEVNGAVGAKNRRLGELHRAPRRLAEGLDGVEEGWSGQSTVVGLGRPLARRVQGTEAGVGAGPSVARAGPSVVTCSSIARAYRTHGRFILPEF

SEQ ID NO: 65761 - protein, 173 aa, Zea mays
  Coding DNA Sequence Number=SeqID_22386
MALHVLTTFCGFHPLEMSTHPIGLFPSEKEDDPMWKDLWALYPRHTAHLMVRCIIALYRLQALRGEAMSQLMRRISRWSRWPTTYKSSRIKLEARENTIEVLEDQLQNTQQQLEEANQHLDLHHQEIEDTEAEGADEDVDIEGGEEPEPASSLDTSGSGRPPSPESSIASFAR

SEQ ID NO: 65762 - protein, 285 aa, Zea mays
  Coding DNA Sequence Number=SeqID_22387
MATVGTVEKAVVACGHEVPHGTGVAKSGEIPTEAGLIVFLGPRGPVGRDVRQPVPRYEGDVQQAFRERAGVICLLGIGVSRGDGARLRLKREVDARRAPRWGAGAVDSLDSRRGAASRLALVAPPPPPLARERTGRARMLFFHHAAKTSSIPPPAGGLSAAIVAVVRRWKEYHVVAAVEGHELKAPEMEHRPGSERLLETAHLELDGKLFVNTQQAPTWRTNCRRFETGRSLSRRVKCRRVPQPRWVGARPSAKGGSEVAGDGRERGGNPAAFVFVPRPSRVRLQ

SEQ ID NO: 65763 - protein, 611 aa, Zea mays
  Coding DNA Sequence Number=SeqID_22388
MTSYGGQPSVEVFAKYYCLHWQKRMIGSKVAQFGSCTFTPKTSKTSMEVVELVPCARNKWGNWHEFWFYVAEGTVEDHSGLPVAEMCSHYYSAYPPFEVAEEDADEGALRCAAGLSSGRDLVEEFVAYGVWPLAHGWALGEVCPRQMPSRDGMVVRSPAFALDLRSRDPAAFVREAEDGADCRVFELNRLPYGGYPGQDDVDHRGKKPAVETGDDPAPAAAPSSKKRKLGIGTGGLGVSDGFVRELMRTCAAPGGRMSSPEFRESLARMLRVTGGWWPKNVPIPRAAGEDFFTSRMVHDWRVFPYGRNIAAVVSAVMDKDRQGAAQKRQAVIRLHEVRPKRSRGTAKAAAPGGSQPTLAAKSAAPGSSREPEAAKAAAAGGTKSVPAGAVKARELPPPGKRVADFATDISVDDYLVGSGEDQLVVVPPAVATAAATVVPRAKGSALSAGSEIPALTAVRDEAGAVSCRLKEALSQVADFADRAASGALTAVVSPEVKRLRAQHADAVQEKSATDNKCRKLADKVAALEGERTDLRRQLAEERKEANEALAKAQSAQAEANLARAEGSLARQCAEELEERLNALQTRVERAEASTRSEDERTRKQLMDSYHK

SEQ ID NO: 65764 - protein, 89 aa, Zea mays
  Coding DNA Sequence Number=SeqID_22389
  Gene Ontology: Mol. function=protein serine/threonine kinase activity; Cellular component=plasma membrane; Biological process =protein amino acid phosphorylation
  Homolog annotation: Hit_ID=Q8LPZ7; Match level="QueryCoverage=97%, HitCoverage=15%, E-value=2e-38, Identity=86%"; Hit description =Putative calcium dependent protein kinase
MEICEGGKLFDRIVARGHYTERAAANFTRTIVEVIQLCHRHDVIHHDLKPENFLFANKKENSPLKAIDFGLSIFFKPGHRFSRALSSLL

SEQ ID NO: 65765 - protein, 337 aa, Zea mays
  Coding DNA Sequence Number=SeqID_22390
  Subcellular localization annotation: CTP_CleavageSite=64; ConfidenceScore=5.52e-01
MARARLSRPGRPVLLRPVVPSVKHRSPAVVSPVGPCATLGPRIQQPRTPSFGEQRPPLPSVDVAAASLRRWLDLDTLLVPPAPPRDALAVGGATGGGPGGDPDDDDSDHSTESSEPQEAEGWVARPITRDAARGCHFHDALDTLLRQAFDRHTWSIEYSCVVYQHSRGRYPDRWEATCLVRRPEDDLRGAEAFSEHYSISERDTAEAAMQDAARRALSQYCSLFGGVADGLNIRYYPRRPTGNTESVVVSHVGEDNPRLSSTVNLVAVLNTELDHSLDELSRARTEIAELRVELAERRHQEGGSPAPVGTQHPYRSPPRGHHTYGSPACKTRIDLDP

SEQ ID NO: 65766 - protein, 144 aa, Zea mays
  Coding DNA Sequence Number=SeqID_22391
MGKNNKHKREPTPPSEDFGDSEYSEEEFSSESEGSPTPIPLRESSDDSQGLAVEVWTYIRAVERSGLEGSDESEYSSDEEDSSEEDGGGDGEDDDDDDDEGGGGGDGDGSGRGGSSGSKDGDGGSSRGSNRGGSGGSSSNRASG

SEQ ID NO: 65767 - protein, 423 aa, Zea mays
  Coding DNA Sequence Number=SeqID_22392
MVRSPAFALNLQNRDPAAFVREAEDRAVRLVGRYVPRTEVQRSWDIRGSNDRLNRVFELNQLPYDGYPGQDDVDRRGKKPVVETGDVPAPAAAPSSKKRKLGTAMGGLGVSDGFARELMRTCAAPGGRMSSPELRESSARMLRVTGGWWPRNFPIPRAAGEDFLHLACRVPEAARVLPSAGKRVADFATDISVDDYLGGSDEGQLAIVAPAAATTTAAVVPKAKGGALSAGGEMLALAAVRDEAGAVSRRLKEVKEAISQAADFVDRTASGALTAVVSAEVERLRTQHADAIREKSAVDSKCRKLADKVAALEREKTDLRRQLVGERRETNEALAKEQAAQAEAKLARAEGNLARERAEQLQERLTALESRVERAEVASRAEAERMRKQLMDTYHELGARTSDFEVPDREPGLRCLEWVQEEL

SEQ ID NO: 65768 - protein, 91 aa, Zea mays
  Coding DNA Sequence Number=SeqID_22393
MSQAFERTEHMPRNMVNRGHIPSRDLRRGLPFRLWWVQVRSLHDGSRGQWGIVRQGGSLEEMVAGVTWPSILPPGWTVEWDPASAEEEHEE

SEQ ID NO: 65769 - protein, 333 aa, Zea mays
  Coding DNA Sequence Number=SeqID_22394
MGLGVCGSLCQGGDKDDGFGYAFGNGEDEVVEEDFQEFQEYDEFKAWMARLRHTARKSVIPFLPSRLAERPLRRLVTEAPPAPPLSAPAAGGDPDDGGGDSSSSHSTDLSEEQELEGWVARPITRDTARGCHFHDALDTLLRQALDQRTWSIEYRCVFFQHSRGVYPNRWEVTCLVRRPENSLRGVEVCSEHYSISEQDSAEAVMQAATRHALSHYYSVLGGVADGFNLKYYPHCPSGSTGGVVVSPVGEDNPRLSSTVNLAALLNMELDHALDELSRACAEIVELRAERAEHRHLEDGSPTPVGTQHPYRSPQRGHHAYGNPDCRTKINLEP

SEQ ID NO: 65770 - protein, 106 aa, Zea mays
  Coding DNA Sequence Number=SeqID_22395
  Homolog annotation: Hit_ID=A2Y4L9; Match level="QueryCoverage=58%, HitCoverage=11%, E-value=5e-15, Identity=65%"; Hit description =Putative uncharacterized protein
MAQKIHFTCKLRLGCLETEIGCGFGNKLLEKVMVCFQTDTENEFKAIQSKIVRLRAEISGAIDHGDPPPVVDENDLSLKRLVELKEHLNDLQTEKNGRLQKIDIHK

SEQ ID NO: 65771 - protein, 109 aa, Zea mays
  Coding DNA Sequence Number=SeqID_22396
  Gene Ontology: Mol. function=5'-3' exonuclease activity; Cellular component=nucleus; Biological process=nucleobase, nucleoside, nucleotide and nucleic acid metabolic process
  Homolog annotation: Hit_ID=Q10PN9; Match level="QueryCoverage=72%, HitCoverage=18%, E-value=1e-27, Identity=77%"; Hit description=5'-3' exonuclease, N-terminal resolvase-like domain containing protein, expressed
  Pfam annotation: Domain name=5_3_exonuc_N; Domain location=3-108; Score=-29.0; E_value=1.4e-06; Accession=PF02739.7; Description=5'-3' exonuclease, N-terminal resolvase-like domain
MESHMVIILPCHLKNVTWQKVWVYDVSKLMGTWKTFSHMLYPAYKSNRTPTPDTVVQGMQYLKASIKAMSIKVIEVPGVEADDVIGTLAINSVSAGYKVKKRSDQENYN

SEQ ID NO: 65772 - protein, 917 aa, Zea mays
  Coding DNA Sequence Number=SeqID_22397
  Homolog annotation: Hit_ID=A2XE49; Match level="QueryCoverage=98%, HitCoverage=80%, E-value=0.0, Identity=50%"; Hit description =Putative uncharacterized protein
MQCNPSLEGTLQVLVRFDSKRFCRECRRNVIREFKDLKELKRMQREPRCTSWFCVADTAFKCEVFEDAVVIDWHQCLSEPDESYDHFEWAIGTDEGESDIFGFENVGMNAQVHRNGIDLDQFEDYFITLRAWRLDGQCTELCVKAHALKGQSCAHHRLVVGDGFVTMTKGESIRNFFEHAEEAEEEDEDDAMDRDGNDFDGDDAHSQKHAKSPELAREFLLDAAAVIFKEQIEKAFREGTAQQNARSVFVTLALKLLEQRVHVACKEIITLEKQNKLLEEEEKEKREEHERGMKRRTREREKKNRRKERLKEKDHSKGKRLVESKSPDNISSSAPSNSTASINDYSTNTLDSRDSVTEFSPMDNSDISTSDQPKSLRRSPRSRDYFPQDQSCWYDDCGDESGRIGELRWKSREKTRGTDRSCNTASTSNNKTRERHSYNFCSCGHPEDYGVMDSCFLPTVRSVREMKIARKSGVEKPKVQYNRCYTLDSFIVPKGNHAGCTQKNAIPKQVWEPMDARRKTNLHNTVHDSGSINDVDPLKHVVFDNSGSHKFSVRCESQPQASESSRDVCNSDQRCANGGRNQTTSCASTLMVNKQNCYSENDEGSRHDVELMTNSASSDSTSSCMSQGDRESSSSSTTSSSAQNPESSSESEESPERINSTVGTPSSRAASRSLLEACAGNGFREYQPKTTRPAHNDMFGYNVSPVQDQLLHYQITHPPQQPPITMGFHDRSWAAPTNGNFQYARPSHLYSSPLVFGVPGNHFIDYPYMAPAFSHIPPEPIHKAAGSFRAVPLSLPFQNGHRQVAEHTQRDMNLERHPSKLTMLTGKDPPEDKNKSGLKYLPEDKNKSWEADASFSLFQFNLPIASPVTPSSKDKSGKLAARTPLVEVQPQLCLREQADVKQYNLFSSKDNGIFSFM

SEQ ID NO: 65773 - protein, 86 aa, Zea mays
  Coding DNA Sequence Number=SeqID_22398
MASTQLGTVSALSTNYGFLIAVNRERGEASADRDVRLKLKVRFRQQLHVQHGPVQEGGFLEQCEYTGTSEYDTDSRDAATRRQQHR

SEQ ID NO: 65774 - protein, 151 aa, Zea mays
  Coding DNA Sequence Number=SeqID_22399
  Gene Ontology: Mol. function=5'-3' exonuclease activity; Cellular component=nucleus
  Homolog annotation: Hit_ID=Q10PN9; Match level="QueryCoverage=91%, HitCoverage=32%, E-value=2e-54, Identity=76%"; Hit description=5'-3' exonuclease, N-terminal resolvase-like domain containing protein, expressed
MACCFVRVAAAPRLLIYRAAAPRQLPSPLNVFRKGFSEQSVLPVTDSIECFQGPSVPNTPRIPLYDDSVSSSILDTLSNPTGGVPHADPSKSRIMLVDGTSMMYRSYYKILAQLQHGQLEHADGNGDWVLTIFKALSLSKWTMSINPVLAF

SEQ ID NO: 65775 - protein, 288 aa, Zea mays
  Coding DNA Sequence Number=SeqID_22400
  Gene Ontology: Mol. function=NAD+ ADP-ribosyltransferase activity; Cellular component=nucleus
  Homolog annotation: Hit_ID=Q10PL7; Match level="QueryCoverage=97%, HitCoverage=63%, E-value=5e-45, Identity=40%"; Hit description=Poly polymerase catalytic domain containing protein, expressed
MDCSSGDVKAETTRPAAVAAAAAAAAGGGTPSLLRGWREFRRSAVPARFLCFEDGKWVDVAGEAAAQLRRAFQERRVMADASCGGKAYLFDFLRMVRIDEATGEETGLAWIDHRGGCFFPAPAACGGGRKRGRDDDGAPAEDKAEAESSSAASGVDDRSGGESRGADAKRRKALGNAAASLGEKDRSYQVVSKLFLEYGMAQRGAAVTAVRKVACGARAAAFRDQGRLLADARGAAAGSAKFAWYGASADDVAAVVDRGFASNNAPRLGAHKHGDGVHLSPPHCPYRR

SEQ ID NO: 65776 - protein, 101 aa, Zea mays
  Coding DNA Sequence Number=SeqID_22401
  Gene Ontology: Mol. function=5'-3' exonuclease activity; Cellular component=nucleus; Biological process=nucleobase, nucleoside, nucleotide and nucleic acid metabolic process
  Homolog annotation: Hit_ID=Q10PN9; Match level="QueryCoverage=82%, HitCoverage=19%, E-value=1e-38, Identity=97%"; Hit description=5'-3' exonuclease, N-terminal resolvase-like domain containing protein, expressed
  Pfam annotation: Domain name=5_3_exonuc; Domain location=45-101; Score=-16.8; E_value=0.0047; Accession=PF01367.11; Description=5'-3' exonuclease, C-terminal SAM fold
VRIVSPDKDFFQILSPSLRLLRIAPRGSGMVSFGVEDFVKRYGPLKPSQFVDVVALSGDKADNIPGVEGIGDINAVKLISKFGFDFSLGTGNPLQKPGILY

SEQ ID NO: 65777 - protein, 88 aa, Zea mays
  Coding DNA Sequence Number=SeqID_22402
MKGKERLWNRRTMRESRYKKKHFQADSICSYRKRVVESEGYLDRYQNQGSDLIGLIDEWRIGLKRDEAAWFPCSEASDLRVCSETIGA

SEQ ID NO: 65778 - protein, 201 aa, Zea mays
  Coding DNA Sequence Number=SeqID_22403
MEKLVIGPISVYQLQFLMTFLTCSAADTVRWRTGHGPEAHRTVRCAYRQQPSPTATIWLVAINTTPTDHFKATILTTKEARTIAPATAKPLVHVKYKKGGQTHVDETSKKVIRMPNLQLCQHEQFILASPYPPLPCRRADSISRGSDLEDGYVFVSTRLKILFKEGGCGTFDPLAVRYNQIDIQSGASMTPIWTPCNMCMS

SEQ ID NO: 65779 - protein, 134 aa, Zea mays
  Coding DNA Sequence Number=SeqID_22404
MLNMTCCSIVAVDITVREGCTWFCYSGRTAGHGHTAAATTRAQVVVRWGRSEGGTTALLGWRAFDVEMWARDDDAGARVGWSRGHSCDRRVYLLFLLRDRTTAVTTHASHSAVGGGWCGGTAALLGRVAVDFGV

SEQ ID NO: 65780 - protein, 175 aa, Zea mays
  Coding DNA Sequence Number=SeqID_22405
  Gene Ontology: Mol. function=protein binding; Cellular component =membrane coat; Biological process=intracellular protein transport
  Homolog annotation: Hit_ID=Q10PM8; Match level="QueryCoverage=83%, HitCoverage=78%, E-value=8e-59, Identity=80%"; Hit description =Clathrin adaptor complex small chain family protein, expressed
  Pfam annotation: Domain name=Clat_adaptor_s; Domain location=1-160; Score=145.3; E_value=1.7e-40; Accession=PF01217.11; Description =Clathrin adaptor complex small chain
MIQAVMVISTQAKPRLLKFYSFQPPEKHQDLVRCVFQLLSARPESASNFVKVDSIFGPVMADAVVNLMLMGQLGTKMVYKHLATLYFVFVFDSSENELAMLDLVQVFVETLDRCFKNVCELDIVFNFNKLHTILDEMISGGQAGETIEHNQLHTQVDYRAFYPLSFHSFPEQCDI

SEQ ID NO: 65781 - protein, 171 aa, Zea mays
  Coding DNA Sequence Number=SeqID_22406
  Homolog annotation: Hit_ID=Q7XIM8; Match level="QueryCoverage=32%, HitCoverage=16%, E-value=3e-07, Identity=55%"; Hit description =Putative CR4
  Subcellular localization annotation: CTP_CleavageSite=23; ConfidenceScore=5.13e-01
VPCRSSGGSRPRWWRLPRAALPRCSTPPARPTGRFAGGLVTTVVRLRRDDDHRQGEGGGPTDAFYLELQLLARLNHRHVVRLRGFALAHHARPVPFRPPTLSSFPPHRSLSLLLRIGEIHLWIWLGWGGTFQVPRLRSHGEQEPQRMPPRLVNQRPLQCTLAYHYHITLCG

SEQ ID NO: 65782 - protein, 135 aa, Zea mays
  Coding DNA Sequence Number=SeqID_22407
MGKKRKREPTPPSEDFGDSEYSEEEFSSKSEGSPAPIPLRESSDDSDDSQGLAAEVWTYIRVVERFGLAGSDESEDSSDEEDSSEEDGGDGGEGGDDDDDDDDGGGGGRGGNGSSRGSNSGRGGSGGSRGGKASG

SEQ ID NO: 65783 - protein, 171 aa, Zea mays
  Coding DNA Sequence Number=SeqID_22408
MQVACNCTKGAHPFDFDASSMEAQAHMSCNQRAGYYVRETAPPLAPVPRLLRCETGATTRGDPAHGPTVPTEHIGHGSVSRGRRRDDRYGQKWAGRTGKGDTPKGILLREGSGPRAPLLIRGLKASPSEGFNNHLRALGLRAHYWSEVRRLAPRKGSTVASGHSGSAPTTD

SEQ ID NO: 65784 - protein, 95 aa, Zea mays
  Coding DNA Sequence Number=SeqID_22409
MTDESEVRWWLVDISHWHPSPAQFDDAPSLLLLHDGTTISRYRADGGKEKQGILKDTNTTKVSIFLIHYSILQKNRAEKPDVCSTIREAAKCNKY

SEQ ID NO: 65785 - protein, 334 aa, Zea mays
  Coding DNA Sequence Number=SeqID_22410
MTSGWTLLRRAPRPRPHSRGEDKLSKPKSQRPGACMVAVTPVGDEDFFNHRHLSADDISHLPTGRFPLGSSRTSEAPTSAQRRRTGEKAGQPQNTNAALAARDVLGGPPVHAARQPLSRREETPGAEPGQPSQRAQRTEADDAHRRPAPRCRSPALPLGREGKQPGCLTKILEAERWLKGTNFRKVAFPQRRQGGRTDCTPHLGARKDRRHLWQAKQATLPLRHNDRVKKGVGKGDTPKGILLREGSGPRAPLLIRGSKAGPSEGFNSRLRALGLRAHYWSEVRRPAPRKGSTAASGHSGSAPTTDQGFEGWPPKGSTAASDTERGMTLGTFDT

SEQ ID NO: 65786 - protein, 243 aa, Zea mays
  Coding DNA Sequence Number=SeqID_22411
  Gene Ontology: Mol. function=nucleoside-triphosphatase activity; Cellular component=integral to membrane; Biological process=defense response
  Homolog annotation: Hit_ID=Q8GU88; Match level="QueryCoverage=52%, HitCoverage=8%, E-value=1e-45, Identity=70%"; Hit description =Putative pleiotropic drug resistance protein 7
MGFRCPNRKGVADFLQEVTSRKDQYQYWCTRDEPYQYILVNDFVESFKAFHVGHALQSELELPFDRTKNHPAALTTSKFGISKMELLKACFCREWLLMKRNSWTKENPLLRLTVENCELSSIGVITLLECLTNVKQLLDVLSIADNHLGSSMAAALARFLGSHVRALTATDIGLGIVGFQTLEETLPTEVALSHINIRIHQESAGQSEQMSQMCLQQPSLFLLQQEVRSIKASTLILQAFGQI

SEQ ID NO: 65787 - protein, 195 aa, Zea mays
  Coding DNA Sequence Number=SeqID_22412
MAGVGRSTRAGGDARRRRGVRPGHETQWIARSTRGGGRPKSGEVDLGPQVKSGRVRGLGKLHGLLAELAEALARLEDGWSGLATVAEALAAMAGGIELAGAKGKWLAGEEGKVFFAFGSKSINFVHTKAFHTLAERPFELRQHPWSFDFLFCSFSFGLINLSGALRSYQGTKVAVSGNNIIEVINLTFDVFEGSC

SEQ ID NO: 65788 - protein, 152 aa, Zea mays
  Coding DNA Sequence Number=SeqID_22413
  Homolog annotation: Hit_ID=Q6J9V9; Match level="QueryCoverage=19%, HitCoverage=10%, E-value=6e-07, Identity=86%"; Hit description =Putative uncharacterized protein
IEKRDIRRILLSEGNGPRTLLLIRGSKVAPCGVRQPASEHSRLRALTDQGVEGWPLGKGSTAAPEHSESGMTLGMFVTWPRLGLHSRANHLQVLLERASGPLADPYRTGLGRPLGSPNSNSLETPCSAPTEGSEAALAPGYGQIVDHVDKPA

SEQ ID NO: 65789 - protein, 211 aa, Zea mays
  Coding DNA Sequence Number=SeqID_22414
GDVGGFPSGSPRVGVLPFCLPVAEPPSQGVRAEAEIRLGRGPGRESEPWGSGEAGVSSSFRVLARVRALGSGGAEFAVFPVLARVRALGSGGAEFAVFRVLARVRALGSGGAEFAVFRVLARVRALGSGGAEFAVFRVLARVRALGSGGAEFAVFRVLARVRALGSGGAEFAVAPLARPDCLSDSLCRVALQSEWRRRRCLSVRLASGAVE

SEQ ID NO: 65790 - protein, 158 aa, Zea mays
  Coding DNA Sequence Number=SeqID_22415
MDQAVSLAARSRRFESSFYPCKIRAHRLGVQCLTDPDCRRVVTALVPTITGMGDHVSGRVRGKVYCQALVLDLGYLLSSSLLQHEDVLSISKVTVYRNAMNIARKKEKGGAAYRWRDRSGEGRRWLGEALADTAMYGSTAGWPESLGPRAQAGVLVGG

SEQ ID NO: 65791 - protein, 246 aa, Zea mays
  Coding DNA Sequence Number=SeqID_22416
MTTAAPSSLTEAGRRQQGLDRSNSCPSIRLRRTSDSHDITPAGCPDLSGCHIGMNELPPHQRGCEITNSKQLAGNHCTSSDNDLRLGRLDNSSNCPRANATVKRPSPPSPYEGREQAIKAKEPEVRPQVALTVSSAEATPSIVGSLTYGGHHLSTDDSGRLRTNAASANGGRPSAHKEVLTPVLATGVGTGPSKNADTAPAAYDVLYDPLVRPAAREGSWTWLTYARHDRRPCGGRTATPQPGSRW

SEQ ID NO: 65792 - protein, 261 aa, Zea mays
  Coding DNA Sequence Number=SeqID_22417
MASHGSSDDGNALSHTDGLAREGFPRILWEQFEKHRVPRCRVRMTLEPHPLQPGWRSLDSESFGYRTEDTIEAIALHGLTTFCGFHPLELATHPIGLFPAEREDDPMWKDRVEHAKDIWAIYPGQTAHLTVRCMNALYRLQRVEKDWQVEQLSHEIQELEELVGTRKNTIEVLEDQLLNTQQQLAEANEHLDMHHQGIQDMEANEDIDIEGGEEPTSSVDTAGSGRPPSPESSVASWPGDSAVARMSAFLHRHHRLPLCRS

SEQ ID NO: 65793 - protein, 40 aa, Zea mays
  Coding DNA Sequence Number=SeqID_22418
MSKKGSCEADVEGGSNALEVDDTEAMLIYALVGKKEPANK

SEQ ID NO: 65794 - protein, 96 aa, Zea mays
  Coding DNA Sequence Number=SeqID_22419
MPGHKGAGSRGVQARGRRGAEAWTCRGAGAGALGRQGAEAAPRGSRGAPGEGAEATPRGWPGPHRGREERKGEGEGRWSSPWGPNPVITIPNLGYH

SEQ ID NO: 65795 - protein, 119 aa, Zea mays
  Coding DNA Sequence Number=SeqID_22420
MGGSEPGSFAEKDPFRGGYWDEGEASRAPPTKGPACPAAELMLGVNCLAGPPLLAWDPFEERCRGAPSSRRERKLSLRPPEGTLDSWLMVPNGKGPMVAKWPSGILPAAMARPLSQAGE

SEQ ID NO: 65796 - protein, 228 aa, Zea mays
  Coding DNA Sequence Number=SeqID_22421
  Subcellular localization annotation: CTP_CleavageSite=34; ConfidenceScore=5.54e-01
MTSGQTLLRQGPRPRPRSRGEDKLSKPKSQRSVRGRRRRSRRQRSLLQLPPPQHIPRRRSRGGPTRKDHPLRLRVTREGMEQAIGDKGFQIVLRDGGERPRVARRNNGYPFGHHQAKGVAAERTRDRERGYSERDPPPRRKRALSPLLIMGSKAGPSEGFDSHPRALGLRAHYWSEVQRLTPRKGSTAASGHSGSAPTSDQGFEGWPPPEGFDSRPRTRRARDDSGYV

SEQ ID NO: 65797 - protein, 251 aa, Zea mays
  Coding DNA Sequence Number=SeqID_22422
  Gene Ontology: Mol. function=protein dimerization activity; Cellular component=nucleus; Biological process=regulation of transcription, DNA-dependent
  Homolog annotation: Hit_ID=Q65X73; Match level="QueryCoverage=83%, HitCoverage=91%, E-value=1e-40, Identity=48%"; Hit description =Putative uncharacterized protein OJ1579_G03.9
  Pfam annotation: Domain name=bZIP_1; Domain location=69-128; Score =32.4; E_value=1.7e-06; Accession=PF00170.12; Description=bZIP transcription factor
  Pfam annotation: Domain name=bZIP_2; Domain location=69-126; Score =59.0; E_value=1.7e-14; Accession=PF07716.6; Description=Basic region leucine zipper
  Pfam module annotation: Pfam domain module=bZIP_1::bZIP_2; Domain location=69-128::69-126
MDDGADLPCQLLFSHPEMPHSFDEFFSSATTTTTCTHTHSCDPPGPSAAMHTHTCLHTHTQVLGSGGEDDGSAKPRRPLGNREAVRKYREKKKARAAFLEGEVKKLRAANQQLVRRLQDHAALEAEVARLRGLLLDVRGRIDAEVGVSPFQRPCSAGSVECGADPALRFDGSSEVVGGGGWEKSSSPQVADCRIDEGGGGMSRELDVLEGLRHSIDAGATFENEEPTGTEYFHMSTEEIEIDNVSCEIVLR

SEQ ID NO: 65798 - protein, 231 aa, Zea mays
  Coding DNA Sequence Number=SeqID_22423
MYDKLWRSHRLDAVQSGCSALSIVKQGDLMVVANPSQETSVLGMSRTFDNYYIEDCGIILAPEVMQRRTDNNDQFVILTTVGSLNLNSYGPNPRVMKAGKHREDKEGKKEIGFCQNEDGFPKLMRACTVRLRIKSQPEYDGREFVEHGTEKMRALEGQQLLEDDPTVVYLTAYLLTLDAQYDFLARHHRQMIARAEDAEKRNHQLHVDLTTAQARVAALEGREVIAIEALK

SEQ ID NO: 65799 - protein, 210 aa, Zea mays
  Coding DNA Sequence Number=SeqID_22424
MPPKKNTRLSSPSNDEDVRVALAAKKGKGEAAKKGQVTLASDHSPPPNPKASTDLHGEALTAKQKQKAVNTEEEGEVHTTISENSQDPSPNPKKGITYLQDSQDLGINTKEQLLIKSLCMHSSNLKKQRDVLATKQQRSEAQARVCLLILAQPSQGRVRLSSFDEVRQPLQDYASQTFNFTDNRFPLSARLQATPWPNNYMPEICPKYNG

SEQ ID NO: 65800 - protein, 126 aa, Zea mays
  Coding DNA Sequence Number=SeqID_22425
  Subcellular localization annotation: CTP_CleavageSite=41; ConfidenceScore=5.29e-01
MPPPPLHTFSAEGMGVGASSPYSSDISPDTDPRSGYCTSTRVFHNMHTPSFSPSSDVIFVFLTFALFFLPNLLPLPTVAAASRPTLVDAGLDPIWCGEFVMFAWTRRQAQSSPGGVPPEIVTWTWI

SEQ ID NO: 65801 - protein, 350 aa, Zea mays
  Coding DNA Sequence Number=SeqID_22426
  Gene Ontology: Mol. function=hydrolase activity, hydrolyzing O -glycosyl compounds; Cellular component=vacuole; Biological process =carbohydrate metabolic process
  Homolog annotation: Hit_ID=Q9S7W9; Match level="QueryCoverage=92%, HitCoverage=100%, E-value=1e-104, Identity=63%"; Hit description =Beta-1,3-glucanase
  Pfam annotation: Domain name=Glyco_hydro_17; Domain location=26-345; Score=563.6; E_value=2.1e-166; Accession=PF00332.9; Description =Glycosyl hydrolases family 17
MAAPWLLACSLLLLSLATFHGAEGAIGVNYGMIANNLPAPEQVVSMYKAKNISYVRLFHPDTTVLNALRGSGIGVILGTLNEDLPRLASDPSFAASWVATNVQPFAGAVQFRYINAGNEFGLPLSSLIPGDPAAQVLPAMKNLESALRSAGVAGVPVTTAVATSVLGASYPPSQGAFSEAATTVMAPLVSYLSSRGAPLLVNVYPYFAYSGSGGQVALGYALLSGAGAGAASTVTDGGAVYTNMFDAIVDATHAAVEKAGVQGLELVVSETGWPSAGGEGASVENAAAYNNNVVRHVDGGTPRRPGKALETYLFAMFNENGKAEGVEQHFGLFQPDMSEVYHVDFTAGSP

SEQ ID NO: 65802 - protein, 338 aa, Zea mays
  Coding DNA Sequence Number=SeqID_22427
MVVQFCRAERFLFLRAIEGVVYWIEQVVAYAHTVEGIQENDVCMATIIDEYFVQIPPCDSTIYHQRVYMGCTAEVDISCIKVVGEVVRVGLDVEVVEVAMIEFLDVEGAVDVEKDCGFDAGGNSGVHFEFDAGWLVGMSDDSLVVSWSGPSHSVLCCFSLWAVPGQVPAMKICGKGEAWSCGARGFRSSSTHNFSWSSVEMPRTSPSSMISLARRQSLAEGSDGGLQSYTCERCLQWALSGNAQVLNKTVGRELQRLVKHPSMYNAMVFIGNHVGGHTLLSIIMPPVTCFSPGIFPLGGHYNEVKYNMIKYTISLTPGKGLTNGHEWPAGRRMGPSHR

SEQ ID NO: 65803 - protein, 477 aa, Zea mays
  Coding DNA Sequence Number=SeqID_22428
  Gene Ontology: Mol. function=phosphoglycerate kinase activity; Cellular component=chloroplast; Biological process=reductive pentose- phosphate cycle
  Homolog annotation: Hit_ID=P12782; Match level="QueryCoverage=90%, HitCoverage=90%, E-value=0.0, Identity=89%"; Hit description =Phosphoglycerate kinase, chloroplast precursor
  Pfam annotation: Domain name=PGK; Domain location=74-469; Score =849.0; E_value=2.4e-252; Accession=PF00162.10; Description =Phosphoglycerate kinase
  Subcellular localization annotation: CTP_CleavageSite=68; ConfidenceScore=5.69e-01
MASAAAPPTSLSLAARAASRAAAAPLRRGGLAAARQPARSLAFAAGDARLAVHVASRCRQASSARGTRAMATMAKKSVGDLTEADLKGKRVFVRADLNVPLDENQNITDDTRIRAAIPTIQYLLGKGAKVILSSHLGRPKGFTPKFSLAPLVARLSELLGIQVQKADDVIGPEVEKLVAALPNGGVLLLENVRFYKEEEKNDPEFAQKLASVADLYVNDAFGTAHRAHASTEGVTKFLKPSVAGFLLQKELDYLVGAVSSPTRPFAAIVGGSKVSSKIGVIESLLEKCDILLLGGGMIFTFYKAQGLSVGASLVEEDKLDLATSLLAKAKEKGVSLMLPTDVVIADKFAPDANSQIVPASAIPDGWMGLDIGPDSIAAFNAALETTQTVIWNGPMGVFEYDKFAIGTEAVAKKLAELSRKGVTTIIGGGDSVAAVEKVGVADVMSHISTGGGASLELLEGKELPGVTALDEAATVTV

SEQ ID NO: 65804 - protein, 417 aa, Zea mays
  Coding DNA Sequence Number=SeqID_22429
  Gene Ontology: Mol. function=oxidoreductase activity, acting on the CH-OH group of donors, NAD or NADP as acceptor; Cellular component =glycerol-3-phosphate dehydrogenase complex; Biological process =glycerol-3-phosphate catabolic process
  Homolog annotation: Hit_ID=Q8S2G5; Match level="QueryCoverage=95%, HitCoverage=95%, E-value=1e-176, Identity=73%"; Hit description =Glycerol-3-phosphate dehydrogenase-like protein
  Pfam annotation: Domain name=NAD_Gly3P_dh_C; Domain location=222-381; Score=156.7; E_value=6.1e-44; Accession=PF07479.5; Description=NAD -dependent glycerol-3-phosphate deh
MVGSYANGGGAAPAAVAAEKLDELRLLLGKSDGDTLRVVGVGAGAWGSVFCALLQDAYGRHRDRVQVRVWRRAGRAVDRADAERLFEVINSREDVLRRLIRRCAYLKYVEARLGDRTLHADEILRDGFCLNMLDTPLCPLKVVTNLQEAVWDADIVINGPALHGDQGAGVPLENILYLGGPNIASEIYNKEYANARICGADKWRKHLANFLRQPHFIVWDNSDLITHEVMGGLKNVYAIGAGMVAALTNESATSKSVYFSLCTSEMIYITHLLAPEPEKLAGPLLADTYVTLLKGRNAWYGQKLAKGELTLEMGDSIKGKGTIQGVSAVNAFYELLSQGSLSVMHPETKKAVAPVELCPILKTLYKILIKRELTTNSILQAIRDESMYDPRERIEMAQRQSLYRPSLLGLPKADAKA

SEQ ID NO: 65805 - protein, 79 aa, Zea mays
  Coding DNA Sequence Number=SeqID_22430
MGLGVCGSLCQGGDEEDGYVHDYGNVHYSQMGYIAEYVDVYSPLLYTPNPPGFPRCNHWSGEDEAVEEDFQEFQDYDEF

SEQ ID NO: 65806 - protein, 121 aa, Zea mays
  Coding DNA Sequence Number=SeqID_22431
  Subcellular localization annotation: CTP_CleavageSite=74; ConfidenceScore=5.19e-01
MKPWRRTSRSSKIMMSSRRGWLVLDTLHGSQSFLSCLLVSRSVRFGVRWLHSRGVYPDRWEVTCLVRRPENSLRGAEVCSEHYSISERDSAEAAMQDAAWRALSHYCLMLGGVVDGINLKY

SEQ ID NO: 65807 - protein, 69 aa, Zea mays
  Coding DNA Sequence Number=SeqID_22432
MPGHEGAGRAGRGAAGARDRQGARAAGAPGHGTEPPPGQGGARGAQGSPGQGVRARKTLGEQGTRRELS

SEQ ID NO: 65808 - protein, 113 aa, Zea mays
  Coding DNA Sequence Number=SeqID_22433
  Gene Ontology: Mol. function=transferase activity, transferring glycosyl groups; Cellular component=integral to membrane; Biological process=cell wall organization and biogenesis
  Homolog annotation: Hit_ID=A2Y0X2; Match level="QueryCoverage=50%, HitCoverage=5%, E-value=4e-23, Identity=82%"; Hit description =Probable cellulose synthase A catalytic subunit 1 [UDP-forming]
AKPTKSANGQVCQICGDSIGVSATGYVFVACNECAFPVCHPCYEYEREGNQCCPSARLDTRDKNVGFLATSLRDYRDKDGVKGLYASKNIIASCHWAYKGVEEDSTLEDPYFL

SEQ ID NO: 65809 - protein, 298 aa, Zea mays
  Coding DNA Sequence Number=SeqID_22434
  Gene Ontology: Mol. function=sequence-specific DNA binding; Cellular component=nucleus; Biological process=regulation of transcription, DNA-dependent
  Homolog annotation: Hit_ID=Q94D31; Match level="QueryCoverage=98%, HitCoverage=99%, E-value=6e-44, Identity=36%"; Hit description=WRKY transcription factor 61-like
  Pfam annotation: Domain name=WRKY; Domain location=133-193; Score =127.0; E_value=5.5e-35; Accession=PF03106.6; Description=WRKY DNA -binding domain
MELKTTLVFKDEMMRGAGAAHKMNLGDDEPAAGPVLSLSLGPAANANRASFRAEGRRGEISASNDADDGTGLALGLRCGGGSGAKRQRVVIVDNDDGGSSEKALRRLPGAPPPPPQQRPDRVTVRTRCSAATVNDGCQWRKYGQKVAKGNPWPRAYYRCTATPDCPVRKKVQRCAHDTAVLVTTYDGVHSHPLTPYAAAAAAARRASCDGAPPRLAFPLAALPQRYCSPSGAVAISGLPAAASSHGHGNVVPMASIMQKAVADPNFRAAVMAAVASYVSEQCGGRNIDDGAFTLPPPG

SEQ ID NO: 65810 - protein, 247 aa, Zea mays
  Coding DNA Sequence Number=SeqID_22435
MGERSGTQAELEHHGLLRSHGDEQMGAGRRKVLDDGATGKELETGHTADELEGCELEALADEHAQETSVGREHRERAGPERAEFHGAVAMANARALKRAQQGEKRTEGGARKPRARSREARGRARHGGRRAGNFTARGDHGRAQGTPGSRRRRAQGLCARREDAMEGSLGKTTTRWEMGGGKRSGRWGEQDRARELSRHGSRGALGPREELGAHPWRAGEGRMGELLGAMELEGRWEQEPGIWKDGA

SEQ ID NO: 65811 - protein, 84 aa, Zea mays
  Coding DNA Sequence Number=SeqID_22436
  Subcellular localization annotation: CTP_CleavageSite=42; ConfidenceScore=5.44e-01
MAVAPERARAVDPQPVAANPLPRRAVAEVPRSGVVAAVPRLVAAAPRSSGRAAASPRPRGGGTSKADEQETLVDVRVATTTHET

SEQ ID NO: 65812 - protein, 164 aa, Zea mays
  Coding DNA Sequence Number=SeqID_22437
MTTSKKVRHVVQFRILFLFPFLSLATGTGKGDTPKGILLREGSGPRTPLQIRGSKAGPSEGFDSRLRALGLRAHYWSGVRRLAPRKGSTTASGHSGSAPTTDQGFVGWPLGRVRQPPQATRATFPRRPLGSPVSNSLETPCSAPSEGNMALSPLLLEERRRRGV

SEQ ID NO: 65813 - protein, 65 aa, Zea mays
  Coding DNA Sequence Number=SeqID_22438
MDEFRRVPYGPHMWRCIKYNGSPGLLIVKGSTGRPLCNVVQPNTQTQPACWVRHLPYGRKKGMNA

SEQ ID NO: 65814 - protein, 73 aa, Zea mays
  Coding DNA Sequence Number=SeqID_22439
  Subcellular localization annotation: CTP_CleavageSite=46; ConfidenceScore=5.54e-01
MQATCNRTKGAHPFDSDTSSMGAQAHMTGGTFGRRSRRRFTSALMTASKKGPGKGILRKGSFSVKEASPEPSY

SEQ ID NO: 65815 - protein, 1005 aa, Zea mays
  Coding DNA Sequence Number=SeqID_22440
  Gene Ontology: Mol. function=transferase activity; Cellular component= endoplasmic reticulum
  Homolog annotation: Hit_ID=A7QI51; Match level="QueryCoverage=100%, HitCoverage=92%, E-value=0.0, Identity=64%"; Hit description =Chromosome chr17 scaffold_101, whole genome shotgun sequence
  Pfam annotation: Domain name=C2; Domain location=271-350; Score=31.1; E_value=4.1e-06; Accession=PF00168.21; Description=C2 domain
  Pfam annotation: Domain name=C2; Domain location=426-512; Score=20.1; E_value=0.0019; Accession=PF00168.21; Description=C2 domain
  Pfam annotation: Domain name=C2; Domain location=598-689; Score=79.6; E_value=9.8e-21; Accession=PF00168.21; Description=C2 domain
  Pfam annotation: Domain name=PRT_C; Domain location=853-1005; Score =350.4; E_value=3e-102; Accession=PF08372.1; Description=Plant phosphoribosyltransferase C-ter
  Pfam module annotation: Pfam domain module=C2::C2::C2::PRT_C; Domain location=271-350::426-512::598-689::853-1005
MHAEALDVSLYHDRRFNPSGGGGGSGKNHFLGRVRIYGSQFSRRGEEGIVYFPLEKRSLLSWIRGEVGLKIYYYDEPAMMPPPPEDKPPEQQADNAPPPEVPPEAPRELPEMPAPTEAAVEVQQPAAQPPIIIVEEAPMHPPMMMPPMHGPHGPHGPMMPPMHGPHGPMMPPPMHGPHGPMMPPPPEAPQPEPEPKPEPEFGDQYPPEVRKTRMASSTERVRVVRHPSGGLGPDYYAPSPRVIPGRFVSTGESVEPVQSSSYDLVEPMRYLFVRVVRVRGIRACEGPYVKVQAGPHSLRSRPGRDVSGTGNPEWNQVFAISNAKPEPTLEISVWDGGAPSPAEAFLGGVCFDLSDVPVRDQPDGPLAPQWYRLEGGEPGMVTGDIMVAVWIGTQADEAFPEAWNTDAPYAAYTRSKVYQSPKLWYLRASIIEAQDLRVPAPPPGLPFDVRVKIQLGFQSARTRRSVASSSGSAFAWSEDLMFVASEPLDDNLIVLVEDRSMIKEPALLGHATIPVTSVEQRLDERQIVAPRWFNLEGGTSGIGMPHGYDGGPPAFYSGRLHLRLCLEGGYHVLDEAAHVCSDYRPTAKQLWKPPVGVLELGIIGACGLLPMKTKGGAKGSTDAYCVAKYGKKWVRTRTITDSLNPRWNEQYTWQVYDPCTVLTVAVFDNWRMFAGAGDERQDYRIGKVRVRVSTLESNRAYTASYPLLVLLRSGLKKMGEVQLAVRFSSPAQLPDTWATYTTPLLPRMHYLRPIGVAQQEALRGAAVRTVATWLARSEPPLGPEVVKYMLDANAHTWSVRRAKANWFRIMGVLAWAVGLARWLDGVQRWRNPSTTVLVHALYLVLVWYPELVVPTASLYVFMIGVWYYRFRPRAPVGMDARLSQADTVDGDELEEEFDPVPPPEVLRLRYERLRTLAGRVQRVMGDVAAQGERLQALVSWRDPRASRIFVGVCLAVAVALYAMPPKMVAVASGFYYLRHPMFRDPMPPPAVNFFRRLPSLSDRLL

SEQ ID NO: 65816 - protein, 180 aa, Zea mays
  Coding DNA Sequence Number=SeqID_22441
MLLFQTLGESLSIGKDGKKIEKEAGVEENKEDSDEKLDFGDSEEDLLSSQELEGLVKYMGVDIGDPHEDVLSPKEDDNVQEDLQMAKVKKGSPIHRPLGALIRPLTEMKPKMPSSTKNLERDRTNLIHTSSVKISEMLVDDNDSTFCLPEPMDKMINDLFDSEHEKEVEAHVLFGIVKDW

SEQ ID NO: 65817 - protein, 257 aa, Zea mays
  Coding DNA Sequence Number=SeqID_22442
  Gene Ontology: Mol. function=hydrogen ion transporting ATPase activity, rotational mechanism; Cellular component=proton -transporting two-sector ATPase complex; Biological process=proton transport
  Homolog annotation: Hit_ID=A2WRY1; Match level="QueryCoverage=69%, HitCoverage=81%, E-value=1e-72, Identity=57%"; Hit description =Putative uncharacterized protein
  Pfam annotation: Domain name=vATP-synt_AC39; Domain location=51-254; Score=-75.4; E_value=1.2e-05; Accession=PF01992.7; Description=ATP synthase (CAC39) subunit
MSHLHPSTTSSKSGEIKVGWPHARWAWTLARWDLAPWLSVLARGDAPDYGGLKPRMTDDKRCNNEARCNAMIVSRSSLEPSPLHTTTIVEKCTLKLVDDYKHMLCQATEPLSTFLQYITLVLVDTPLAPYFSECITSEDLDDMNIEIMRNLSTKHILRTSTNFARYPYGHEELVVCEDVDQVRSAMEKYPPYQSIFSRISYGKSQMLDKAFYEEEVKRLCLSFEQLREQEIRNLMWISECVAQNQKSQVHDSVVFIF

SEQ ID NO: 65818 - protein, 62 aa, Zea mays
  Coding DNA Sequence Number=SeqID_22443
MYNRLKTMVNQCATSGAPNGMNMKWSRLQTHCQLGARCHLYTRGATRRIQSDERKEGGVYTK

SEQ ID NO: 65819 - protein, 516 aa, Zea mays
  Coding DNA Sequence Number=SeqID_22444
MSTSRIARGLRIFPYGRNIAAVVSVVMNKDRQDAAQKHRAVIRIADPRCEAKKAWGSAKAVAPGSSQPMPTAKPVAPGSGKSSVSAKAAGAGGTKPPLVEGAKVRELPSPGKRVADFGMNISVEDYFVGSGEGQMVVVPPLVATTSPSAVVRAKGTAQDPWATFCASGEILTAVAAKDVAGTMSQRLRDASQRLSQQLSQAADFADRIVSGVLTADVVVEVERLRAQHADIVWEKSATESKNRRLAEKVAALEAEKTDLRRQLAAQAEAKVARAEGSLASQRAKEWEARFNALRGRVDKAEASTRSEVEQTLAQFVNSYRELGARTADFEVPDREAGLRFLEWLQEELLVLPTIVEGFMSFASLVTYEGAINVLSREGCRHYEVFDQSDESFEREIFKAEDPVVKQSAGALFDRMWGAHGQEAVRERSDRAREQMERAEDVEDLGGLVGASPEAAKGNPMLPLDAGEGPSAVPVPAMAVEDPASAPEPAVEGAPEAVAEPVVEDPMAAVVPSQVAK

SEQ ID NO: 65820 - protein, 117 aa, Zea mays
  Coding DNA Sequence Number=SeqID_22445
MAPKRASSKAAPSVDEAAKAALLAEKKGKALVDTTHQEACEDDALSKRQRNEQPTTEGSLRTCSSEGQPQLPPGFAPPKGVDATEDGEVIGVSAEEQLQLRALRIKNHNLQKQKEIL

SEQ ID NO: 65821 - protein, 132 aa, Zea mays
  Coding DNA Sequence Number=SeqID_22446
  Subcellular localization annotation: CTP_CleavageSite=23; ConfidenceScore=5.01e-01
MASKKGGSFTSTRLRYWASKGPRSQRRMHAYQVAIELGATVQSWCCQRSRSCWCTGGGPPATPLLLLRHSRQTKSGERKYQVWLGWEIEKQRAEGIKKAQRKVLNRSKLRKEAYIERIREVDQIGVNYCNFN

SEQ ID NO: 65822 - protein, 459 aa, Zea mays
  Coding DNA Sequence Number=SeqID_22447
  Homolog annotation: Hit_ID=A2ZUT9; Match level="QueryCoverage=90%, HitCoverage=48%, E-value=1e-136, Identity=61%"; Hit description =Putative uncharacterized protein
  Pfam annotation: Domain name=SAPS; Domain location=1-163; Score= -97.7; E_value=3.6e-09; Accession=PF04499.6; Description=SIT4 phosphatase-associated protein
MDEVHSQQIQIVEFISVLLTIGSETAEKELVRQSAIKRSIDLFFEYPYNNFLHHHVENIIVSCLEGKRPEVVEHVLHECDIVGKILVSERLSSLSTESNGPTVPTEGKTHPRVGNVGHMTRIANKLIQLGNSNNTIQAHLQENNEWVEWQTNVLVKRNEVENVYHWACGRPASLHDRGRDSDDDDFRDRDYDVAALANNLSQAFRYGIYSSDDIEEAQGSLERDDEDVYFDDESAEVVISSLRLGDDQEGLIDYASMYFSSLFTNSNWFTFDGERGIDDRSSASVPSSSPNSEETSLKTEEADDGKVIGTEDEMETVYLGNGSVEEVKDVAKCTEQPNCCTEEERLKNEEGMEWHPNASNNDTEAEAAAESSAPSVEIVAEKTVDEPLEVGRKLDEPAESSLDSSVSVALPAPVNGSEPANSEVSSEQVAHATDVQQPVKEAPAEDDDAKKTDAAKTNE

SEQ ID NO: 65823 - protein, 412 aa, Zea mays
  Coding DNA Sequence Number=SeqID_22448
MEKDRQDVARKRRAFARVGDPRREVKMARASVKPTAPGASMSPPGAPGATMPLPTAPTHERRPPSPPHAAEAAVAGAEVSMDISVDDYLVGGVAMFDAHTGRGPATAVTAGPMAVATMVKWSSQDPWFKFCASDKIASTAAAKDVATSVAQQLKHRFRTQHTEAVRDKSAAENRSRNLLEKLSAVEADKEDLGHRLMAEREDVEKSYAEAQAAHAEASLALKRATDVESGQRNLHGHLDKTEASTRAGVDRVHALLMDAYHQLGARTAPFDTSDEGVGLCFLRHFEVFDRATEDFDHCIFQVEDEVLKWSSGALYDRMWGPHGRDTVRERSGRALEQMMNDEEVEDFNALESSVTRAEDARTGAEEQPAPQADPSEDPVEEAMPAGRDPATVAAPTGEDPPVAAAPSQVVGS

SEQ ID NO: 65824 - protein, 54 aa, Zea mays
  Coding DNA Sequence Number=SeqID_22449
MQRRFEQTALKEASDFGMKNFYYDRMKGDKEWATRLEAKDLRLNILTKLKHDDD

SEQ ID NO: 65825 - protein, 67 aa, Zea mays
  Coding DNA Sequence Number=SeqID_22450
MGVLFDNGLNRGRAAKRPYVRLRPMAYVTGNKPRGSIGSPPERGAQVLGAFGLRRSSKTGFNSISGA

SEQ ID NO: 65826 - protein, 84 aa, Zea mays
  Coding DNA Sequence Number=SeqID_22451
MADEAIKKSEKESHDARVEAKEAEEAAERAMTIAGLLPPPEPYNLEADPIMKEALDVMKIANEVVDEVVDRLLHEAAERILNEV

SEQ ID NO: 65827 - protein, 117 aa, Zea mays
  Coding DNA Sequence Number=SeqID_22452
MALLDPCERFQPEVALNMVRNPLGWGVLAFAGRTCAGVSPLGDLAAQEFVFFVSKLSSGLALPIPSFFAQLLEGLGLQPLPMVSCFILQAAIIAYFRGMSVEATLLPASSSSIQGEG

SEQ ID NO: 65828 - protein, 88 aa, Zea mays
  Coding DNA Sequence Number=SeqID_22453
MYQLDQTSKREHRTLVHTTRTPDYGLGLQSKHAESLGWGPDPIQVRSGPQQGPGTGDTQALEGDENTGATQKQMPNQREQYGVLLTYL

SEQ ID NO: 65829 - protein, 140 aa, Zea mays
  Coding DNA Sequence Number=SeqID_22454
MAASVGSGETRLTRGGRRGRNESCACCYTERARSKVVSSSGVLAAVVARPRAKKGEALSLLAVGGHHRRSWVRVCHRSSGLGGRSRLPTRLGSVTASRAPQGLGFAAASLHRGPVVARPLDWGDGRHRATDLRTTAATSD

SEQ ID NO: 65830 - protein, 121 aa, Zea mays
  Coding DNA Sequence Number=SeqID_22455
MGSACVAFVSLLLEERNFVLVGTFQPSLGFKDFHQAARLHPLTNAGEGFSADETVSATRGPTSGSLALIACPRPSSGDTGEGLVAAASAQRSSLLLFGRLERRSLSLLQWLAASQLEFVVP

SEQ ID NO: 65831 - protein, 203 aa, Zea mays
  Coding DNA Sequence Number=SeqID_22456
  Homolog annotation: Hit_ID=Q6J9V9; Match level="QueryCoverage=62%, HitCoverage=34%, E-value=7e-19, Identity=47%"; Hit description =Putative uncharacterized protein
  Subcellular localization annotation: CTP_CleavageSite=20; ConfidenceScore=5.33e-01
MGMHPFNFDASSMKAQAHTSCNRRAGYYVRKTAPPLMPMSRLLDCGTGAATRGNPVHGPTVPTKHIGHRSFSHGRRTGKGDTPKGILLHEGSGPRALLLIRGSKAGPSEGFDNRLRALGLHAHYWSEVRRLAPRKGSTAASGHSGSAPTTDQGFEGWPPEGFDSCLRTHRARDDSGYVRYMAEARATLPRYPRTFTRPAGAIQ

SEQ ID NO: 65832 - protein, 128 aa, Zea mays
  Coding DNA Sequence Number=SeqID_22457
MLVDYTTVLDRLGVSVEGPTQQGIESIVEVTPTSGVTGSPPAARMPRGGVGASLAEVQGKDASQTPPLAEARGKSPAAPAPGISAPAPQAGDDAVSLAGWTDLTPCDAVDAPPGEKAKRRSQTYVQCT

SEQ ID NO: 65833 - protein, 194 aa, Zea mays
  Coding DNA Sequence Number=SeqID_22458
MQDAARRALSQYCSLFSGVTGGLDLKYYPRRSIGSAGGVIVSPVGEGNLRLNNMVNLVAVLNTELDHALDELGKVRAKVAELRAECAARHYLDGGSPAPVGIQHPYHLPPRGRFDYESDLIHVCDFHRCLRIGAEVRGVLSQNSRHPKRKQAPPMTIEQMFLIHTQAVQAIGQTLAAMQQAQQQPPPPQPLVQV

SEQ ID NO: 65834 - protein, 194 aa, Zea mays
  Coding DNA Sequence Number=SeqID_22459
MPPRTRRTARKHTGPIGVPSYQLAPRHEDSSSGSNDPIRDLEAQVNRLQTELRRRTNIWVADGDKINELISDVRRLRDQLADRDLALDWVVQSRSLAWAKEAKAQARVEELSSAIDDLQAYYNTLHEEVHVLYSQLHPSEPADPVGTEARPSHVAGEAFGGELDLFRPPPSMRLVDEWSPTPDDEATRSNGKQE

SEQ ID NO: 65835 - protein, 183 aa, Zea mays
  Coding DNA Sequence Number=SeqID_22460
  Subcellular localization annotation: CTP_CleavageSite=63; ConfidenceScore=5.14e-01
GHQDPGANIITRCAGTKSEPWVGRSGVRRLPGLSPSPSPGSGGAELPMVPEVGPDCLSASLCRAAQQSERRRRRCPSVRPATFALNAPAIWSVGAVIWSGLLLGEDRASGEPELYADGGYQLRIRRLEGDQPFSVAFCSGGCARAHPPGVASEASEEWFDSSEVLMPRVMLRLVWLFPHANWP

SEQ ID NO: 65836 - protein, 228 aa, Zea mays
  Coding DNA Sequence Number=SeqID_22461
  Gene Ontology: Mol. function=carboxyl- or carbamoyltransferase activity; Cellular component=ornithine carbamoyltransferase complex; Biological process=amino acid metabolic process
  Homolog annotation: Hit_ID=Q8SA97; Match level="QueryCoverage=78%, HitCoverage=23%, E-value=6e-15, Identity=37%"; Hit description =Ornithine carbamoyltransferase
MSPPVDVVGPRPRLGDVEAPPRSRSSLSSVAVVESEPLGRARRRPSAEAKAESEPWGQAKRSSSSSGAEPKSEPWVGRSGSSSSSGAEPESEPWVGRSGASYGRSVERQSDCGHFGSVDWRTRVRIKVSGHLCIKCSCDLVGWRGDLVRVASWRRQASGEPELYADGGYQLRIRRLEGYWAAEQGAGRFLAAAPRMVSTDSLSRQRRYQDDLQVTRDLTASRSNTTNM

SEQ ID NO: 65837 - protein, 315 aa, Zea mays
  Coding DNA Sequence Number=SeqID_22462
MGGIRRLSASSLEERNSMGVGTSQPSFGFKDFHRAAWPYPATGGHPRWPRWKMRRVGGPPPRGSAAPFFPLRPGVKGVLEPHGDFLQPCQDMQGARGPGSPSPCLNGWFSSSAGGGEPFCRDTSPKAAAYAASLSGAGVVAVAVGTGGSEPPIVLQLLRRPSPSEGGCLGSGWRPWKPVDRGPRGNRLSRLLGPDSRRSPWTAAPPEAGSGFAEDVVDAEGATAPFGVKTRACRIRSSCSVCFLRPPRPEENTLAALAKLRLFSSCFEHLDSVGNRDVCVSESRFSRKGRVRSPSARSALAAYVYLVVSRIRFPK

SEQ ID NO: 65838 - protein, 394 aa, Zea mays
  Coding DNA Sequence Number=SeqID_22463
  Gene Ontology: Mol. function=kinase activity; Cellular component =cytoplasm; Biological process=D-ribose metabolic process
  Homolog annotation: Hit_ID=A2ZZL6; Match level="QueryCoverage=99%, HitCoverage=31%, E-value=1e-161, Identity=71%"; Hit description =Putative uncharacterized protein
  Subcellular localization annotation: CTP_CleavageSite=67; ConfidenceScore=5.73e-01
MAMAAPAFLLPSLFPKPTLLAASLHSSFPRGLSLRCSPNGAAVPEFPEPASRRGRKKSPSPSAPKPRATRRRTKKADRDPDSEGEEEPVKRTNRRTRKSKGEAKQEEVAQAANHGTGDTIQKANEEEDAVEVGSDDDDFANEWPPLVCCFGAPRWEFVPTVRVSDRQMHPDMYSTWRHLQWEPPEFARAPGSAASNVAIALTRLGGRAAVLGKVGDDDFGRELVYRMNCERVQTRAIKFDDKAVTATARMKVSFRDREDGKGGTKLVAETVKSAAEDSLRRTEINVDVLKEARMFHFNSEVLLNPSMHDTLFRAIELSKKFGSKVFFDLNLPLPLWTSKDKTKEVINRAWKEAEIIEVSRDELEFLLDHEYYEYKRNTPPQYYLEGFHFTRNWP

SEQ ID NO: 65839 - protein, 316 aa, Zea mays
  Coding DNA Sequence Number=SeqID_22464
MPECIYRGSVEGQLAMIAPPRGERDRGHSAEGEGRALSRRRRDAIREKSASDSKCRKLTDRVAALEREKADLRRQLAAERREANEAVAKGQAAQAEAKLARAEGNLAKELAEHLQERLTALESRAKEAEAAMHAEAERTRTRLMDTYRELGARTGDFEVPDREPGLRCLQWVQEELLELPAVAGGLMSYASLVTCEGAMNALSREGCRHFEAFDQADEEFERDIYKVEDPVVKESAGALYDRMWGLYGHEVVRERAETARAQAERGERVDDFGALNSALPDPEPTPAEAVTGVALEPTPETAAIAAAAPEGGRRRP

SEQ ID NO: 65840 - protein, 234 aa, Zea mays
  Coding DNA Sequence Number=SeqID_22465
  Homolog annotation: Hit_ID=Q5N7A7; Match level="QueryCoverage=85%, HitCoverage=71%, E-value=2e-99, Identity=76%"; Hit description =Putative uncharacterized protein P0529H11.3
MDWLLEECITCIGPDHCSRTWDLWPFQSLAKRKWSFHPFVYHSKRFYTVLLWRRVLAFLVASQFLRIMTFYSTQLPGPNYHCREGSKLATLPPPNNALEVLLINFPRGVLFGCGDLIFSSHMIFTLVFVRTYHKYGSNRYTVNLVVFFVDKKLPEMPDRTNGLSLLPVNTKDKDGRMKEELHKLEKDGRMMDEFHKLLNGNTVDATDWRQRVQINGKHGEDTNHTVSDATPTGT

SEQ ID NO: 65841 - protein, 228 aa, Zea mays
  Coding DNA Sequence Number=SeqID_22466
MQAACNRTKGAHPFDFDASSMEDQAHTSCNRRAGYYMQETAPPLEPLPCLLDCGTSTATRGNPAHDLTMPTRHIGHGSASRRRRRDGRYSQKWVDSNGSGRQAEAAVTSSAKLTSPSGTAREPSPTDRRHLWQVKQATLRFLRNDRVKKGTEKGDTPKGILLREGNGSRAPLLIRGSKVGPRKGSTAASEHSGSAPTTGQGFEDRPLGRVQRPPQATRAPRPLLIRGS

SEQ ID NO: 65842 - protein, 102 aa, Zea mays
  Coding DNA Sequence Number=SeqID_22467
  Gene Ontology: Mol. function=protein serine/threonine kinase activity; Biological process=protein amino acid phosphorylation
  Homolog annotation: Hit_ID=Q9ATQ1; Match level="QueryCoverage=50%, HitCoverage=6%, E-value=5e-10, Identity=63%"; Hit description=TAK14
MGEIIEMLECGTHGLGLQMPSRPFFCDDDDPNMPATDSYHFSSELTAISEEDDSPTRIGTEEKASQDKDGDRDGEPFLDRTFRVAIPNLNGCGGNPKNYMGM

SEQ ID NO: 65843 - protein, 234 aa, Zea mays
  Coding DNA Sequence Number=SeqID_22468
  Gene Ontology: Mol. function=protein serine/threonine kinase activity; Biological process=protein amino acid phosphorylation
  Homolog annotation: Hit_ID=A2ZNI2; Match level="QueryCoverage=76%, HitCoverage=62%, E-value=2e-25, Identity=65%"; Hit description =Putative uncharacterized protein
MCTCSIYSLFCILASFTCLFYFCDCSSAVRAVDAGGQDAGGQGQCPDFSCGDLGNISNPFRRPGDPEECGVKAYELVCSNGKATIRINTGTYFVTSIDYTNRSFWVVDANLDMHNSCPLPRWDPLLAICMLDTAPYTRAYYSQQAICMLPSRCWATPTAMGASSFSTIGRIHHINVVRLVGFCAEKMRRALVCEYIFSAERSFSWDMLNEIALGIARGINYIPASRVRHADPSL

SEQ ID NO: 65844 - protein, 194 aa, Zea mays
  Coding DNA Sequence Number=SeqID_22469
MADRGSIGRGSWEREIVDRARWPGRGWALGFRAGATEPRPGLGSGRTRRTEAAPGQAPLELERALAVHGEGSALGISIDWGEGYRLGNCGSYSPSESTRDCSTDGDGERDVGMKDSPAHARRPITAWMGCLLLRDLDLGGRQGLWDNGVGVTPGLGLDLDLGRQTRPRPRRSLRLARLRARTDHVTGGPSLPYP

SEQ ID NO: 65845 - protein, 294 aa, Zea mays
  Coding DNA Sequence Number=SeqID_22470
MYSASAVERATEFCFFEAQDTKDLPKNWQVPDGVTSVRVGGSERPARAVPSSPHGQPPYECPGPSFYRCKEMAQGNDGPHVTWSVRALGRARRRLLRGRGRVCLPRSRSSPSPGSGEAEFVVFRGRGRVRALGSGEAEFVVFRGRDRVRALGSGEAEFVVFRDRGRVRALGSGEAEFVVARRSFLWRPKPDLAAVSLTLSSGTAVGATQAALSSCQAGQWSGEAIFALNASAIRSVGVATWPRLLLGEDWASGEPKLCADGGYQLRLGVLGGAEHGVSSELLTGNLSGRPCPIR

SEQ ID NO: 65846 - protein, 286 aa, Zea mays
  Coding DNA Sequence Number=SeqID_22471
  Gene Ontology: Mol. function=nucleoside-triphosphatase activity; Cellular component=microtubule; Biological process=embryonic development
  Homolog annotation: Hit_ID=Q10MD7; Match level="QueryCoverage=40%, HitCoverage=29%, E-value=3e-30, Identity=59%"; Hit description=XPA -binding protein 1, putative, expressed
MVFTRLKLHVLVSSMVQAPFTIIKGSRNHGCLPSAVSFCGWWLITNVGLLIGWQKRNKVVFDGRTPCISVLLQAAGEEREKWQMAGAKGLSFLAAQLPSTYGCSGSNFSLSGTDILFIADQWMQDFEAFQTAVESDKSYSATYTRSLSLVLDEFYNNLRSVGVSAISGSGVNTFFEAIEASAKEYMETYRADLDKRIAEKERLEEERRKENMEKLQKDMMKSKGQTVVLTTGLKEKNSVSDMMDGADEEEEEEALEDFGFSEDDEDEDEGEDEEVAHFGFLSCYLT

SEQ ID NO: 65847 - protein, 132 aa, Zea mays
  Coding DNA Sequence Number=SeqID_22472
MAHATNHVAGLSERPVGPDIFMVAAHGAQGLSGGMRTMISRLGGAASGWPDGRAPPVRASRQPRRVGALRGAAAQQRAATGGAGAAARRLSAGRQPGARGRHDPSAWAWHPGPYSARRRGLAAKRVSVDLSL

SEQ ID NO: 65848 - protein, 125 aa, Zea mays
  Coding DNA Sequence Number=SeqID_22473
  Subcellular localization annotation: CTP_CleavageSite=51; ConfidenceScore=5.17e-01
MATGPQTTYSAHQRKYIAQPTPRSPATVTDRRDPNPRILRGTGGRRAPEPYAMAEPPPIGPRSGHCIIQGGGSVLRCSGGLTGAWAENRAHADELAVWDCSGAAALSAQWGRQGMALDFEICGWD

SEQ ID NO: 65849 - protein, 558 aa, Zea mays
  Coding DNA Sequence Number=SeqID_22474
  Gene Ontology: Mol. function=cysteine-type peptidase activity; Biological process=proteolysis
  Homolog annotation: Hit_ID=Q109R5; Match level="QueryCoverage=53%, HitCoverage=28%, E-value=3e-37, Identity=33%"; Hit description=Ulp1 protease family, C-terminal catalytic domain containing protein
  Pfam annotation: Domain name=Peptidase_C48; Domain location=80-287; Score=49.0; E_value=1.7e-11; Accession=PF02902.10; Description=Ulp1 protease family, C-terminal catalytic domain
MESLFVGLSHNKPKNSVATAIVREVLSHDWLLLDYICTQGDLALIDFIKEIPCEPRVEVVLIDDAFVERKWMECLFQPNAYLGDEVIDCYINLIKAQKHLKCRSGGRVHIENAFQFNFLKRDGDVEIKTEELYPNKDMTQICSAERRVLLYLDHDKVFIPINIRETHWYLAVIHARNMEIQVLDSLGTSQDRKDLTDSIKGLQRQIDMISQRKELKDHRWPDLQVASWPLREIDMGYAKQTDSSSCGLFLLNYIEYWTGDELCDSFTQDDMSHFRKKMAAILLSSDLNKRRGCLLYKNEKEDDSGSPSDVEILENPTDSNKRKLLHMLDDSEVVYEDEEGPITQADLQRWFVDDWDKRAPVKVSTDGCTNDFLMVGLSTKDMPVTKADSIDVLCDYIMAIEDDTTLEYVLMPWKFNGCHALFVIDHVKKYVTFIDFTPTQDWCKHMPYKRFAEAIIMASKKYKIAYSKKRSGWAEDIFKWEHTIQTGVPVDLRGFNTSYLVLQAMAMWGNDRRLKFVGDAKTLRKNFVIDLLSYEDNSCRYAIPANIQQRLIDIAKKD

SEQ ID NO: 65850 - protein, 108 aa, Zea mays
  Coding DNA Sequence Number=SeqID_22475
  Gene Ontology: Mol. function=oxidoreductase activity; Cellular component=chloroplast; Biological process=metabolic process
  Homolog annotation: Hit_ID=Q53CF4; Match level="QueryCoverage=57%, HitCoverage=12%, E-value=4e-27, Identity=95%"; Hit description =Betaine aldehyde dehydrogenase
ELSSTDGYMEGLGPDAGAPLSAHPDVDKVTFTGSFETGKKIMASTAPMVKPVTLELGGKSPIVVFDDVDIDKENLTDENAKCLNPSKPFIGFWDFHRNTQLSLIRLLQ

SEQ ID NO: 65851 - protein, 255 aa, Zea mays
  Coding DNA Sequence Number=SeqID_22476
  Gene Ontology: Cellular component=extracellular region; Biological process=sexual reproduction
  Homolog annotation: Hit_ID=Q7XCL0; Match level="QueryCoverage=83%, HitCoverage=81%, E-value=1e-79, Identity=66%"; Hit description =Expansin-like A2 precursor
  Pfam annotation: Domain name=DPBB_1; Domain location=59-126; Score =40.1; E_value=7.8e-09; Accession=PF03330.9; Description=Rare lipoprotein A (RlpA)-like double
  Pfam annotation: Domain name=Pollen_allerg_1; Domain location=139 -223; Score=17.3; E_value=5e-05; Accession=PF01357.12; Description =Pollen allergen
  Pfam module annotation: Pfam domain module=DPBB_1::Pollen_allerg_1; Domain location=59-126::139-223
MAAGASDYLTVEYHSRDSPLSPPTTREPPAAAASSYTTVGTPGRAGYGSLAASFNGGLLAAASPELYRGAVGCGACFQGQRAVHVTDQARTSNRTTLVLSAAAYAAMASAGKAARLRDRRVVDVEYKRVPCGYMKDRNLSIRVEEKSRPPSNLSIRFLYQGGQTDTVAVDIATVGSSNWRFMARDHGPAWSTTQAPPGPLQFRLVVTGCYDGKWVWAELEVLPRRWEAGRVYDAGVQVSDVSREGCYLCDTHKWQ

SEQ ID NO: 65852 - protein, 119 aa, Zea mays
  Coding DNA Sequence Number=SeqID_22477
  Gene Ontology: Mol. function=oxidoreductase activity, acting on NADH or NADPH; Cellular component=mitochondrial inner membrane; Biological process=electron transport
  Homolog annotation: Hit_ID=Q10MD5; Match level="QueryCoverage=61%, HitCoverage=42%, E-value=2e-34, Identity=95%"; Hit description=ETC complex I subunit conserved region family protein, expressed
  Pfam annotation: Domain name=ETC_C1_NDUFA5; Domain location=35-91; Score=112.8; E_value=1e-30; Accession=PF04716.5; Description=ETC complex I subunit conserved regio
MFLRRILTGGGGLAALRAARAVKETTGIVGLEVAPNAREVLIGLYTRTLKEIEAVPKDEGYRKAVESFTNHRLQICQEEDDWKRIEDRIGCGQVEELIEEAEDELKLIAKMIDEEGRLN

SEQ ID NO: 65853 - protein, 78 aa, Zea mays
  Coding DNA Sequence Number=SeqID_22478
  Gene Ontology: Mol. function=oxidoreductase activity, acting on NADH or NADPH; Cellular component=mitochondrial inner membrane; Biological process=electron transport
  Homolog annotation: Hit_ID=Q10MD5; Match level="QueryCoverage=76%, HitCoverage=34%, E-value=5e-29, Identity=95%"; Hit description=ETC complex I subunit conserved region family protein, expressed
MASGLVPLTQHPFFLASEWDPWGVPDDYECEVIEDDTPIPKHVPQHRPVALPEEFFKTLDAVKSDPALQGDAPPQVKA

SEQ ID NO: 65854 - protein, 253 aa, Zea mays
  Coding DNA Sequence Number=SeqID_22479
  Homolog annotation: Hit_ID=Q6QP51; Match level="QueryCoverage=47%, HitCoverage=31%, E-value=4e-18, Identity=60%"; Hit description =Putative growth-regulating factor 1
MQAACNCTTGTHPFDFDASSMEAQAHTSCNRRAGYYVRKTAPPLAPVPRLLDCGTGAATRGKDRERGYSERDPSLRRKRAPSPPTDQGFEGWPLGRVRQPPQSTRAPRPLLIRGSKAGPSEGFDSRLRALGLRAHYWSEVRRLAPRKGSTAASGLSGSAPTTDQGFEGWPPEGFDSRPRTRRARDDSGYVRYMAEARATLPRGSGAALANPAPAKPLTASTYQPENSEPDHAPGLRSDRMREQPDRPKRHERH

SEQ ID NO: 65855 - protein, 209 aa, Zea mays
  Coding DNA Sequence Number=SeqID_22480
MEECLTVTTSSMVGRSKPGCGLCPALSFKDLHHPCWGGGRAEPELYLPYGPAGHLLLQHSGEMALTGLAEGADFDNAGPIGRKRRQLQHAWFAGSAGSGAASGATSHRWAECGYLPAVQATVTPRAPGDRPRRRTLLGRRSCSWAVLPSLRHDASARRSVLARPGGLEWGSAGRQVAAIVGAEVVAAGEGFPADEIVSATRGPTSGSWL

SEQ ID NO: 65856 - protein, 212 aa, Zea mays
  Coding DNA Sequence Number=SeqID_22481
  Homolog annotation: Hit_ID=O40947; Match level="QueryCoverage=56%, HitCoverage=12%, E-value=5e-07, Identity=25%"; Hit description=ORF 73
MAMPSSTPSAAVEEDPTAPTPAIEGDARGASSSNPPPTLEEPEVVLGRRLRSGAEPEAAPVPLPRLLSRAHRSLQETEAKVYSRELEASRKEKRLAKREEALNQREEVVIELSAKLSAMNAILEEQRTQQTATVERLQKLQQELDDKASVATLAEERLKAKEQSLDRREIDHARREKDLAFREEMLTRRGEMLAEHELEAEQKEKELEDRIW

SEQ ID NO: 65857 - protein, 948 aa, Zea mays
  Coding DNA Sequence Number=SeqID_22482
  Gene Ontology: Mol. function=protein binding; Cellular component =nucleus; Biological process=regulation of transcription, DNA -dependent
  Homolog annotation: Hit_ID=A2WXW9; Match level="QueryCoverage=99%, HitCoverage=93%, E-value=0.0, Identity=67%"; Hit description =Putative uncharacterized protein
  Pfam annotation: Domain name=TolA; Domain location=260-560; Score= -153.5; E_value=0.078; Accession=PF06519.2; Description=TolA protein
MKSGVMVLGVGSPEEAPDRNDAEPRRDMGQSQMQVGGPVVLNRSAELGSGDFMAIDDAPVQAPSGQPAAAKHQSPAALTDTIMEVQKQLKRKRASNNPVIAAADKDALAAGCRQELEGLFQFYKEVSDRKVQLDGGNLSVNGMVGCLLEESSLGLTKLVDGIYEKLKGLDGVSVASVRGSVLLVGQRMMYGKSSLDADVLEDDTESALWCWETRDLKLMPVKARSVLSTRRSVRKKIHERITAIYSTLSVLENPGVYVQVNDLKKASLRLNKSLNLEGIRSMVERVAQKNLERGVKVAGSAIKELKQETEKNDQNLRRLEDTSVSELQNGNSPDNEKEVQKAQKQVEKEIKRQEKEEARMKKLQKKQQEDVLREQKRREKEEAEAKKQQKKQEEEALKEQKRREKEEAEMKKQHKKQQEEAEKEQKRLEKEAAQLKKQLAVQKQASMMQRFFKSKKDNGKLQKSGENNSADGPCNDNKETVPSTTSKIDYSLSQQESWVLEDLWRLQITGWKKLSSHNRSSRWGVRCKPKTKAFNELKLQKSSDDMVDEILSTPNKDGCHTSSQENEHATLESDIDMLQAIEVQCHDTNNPKPLQTRLIRRKLLQFDKSNRPAYYGSWRKKSVVIGPRCPLKMDPNLDYEVDSDDEWEEEDPGESLSDCEKDNDEFMEEDSKITDEEDEDSFVVPDGYLSDNEGIQIESLLDDKDEEASSSPTGQCAEVEEFRSLLRQQRVLNILTEQALRKSQPLIISNLNHEKAELLTAEDLKGTAKIEQLCLQVLSMHICPGGAVVDVPLTDSSSATVEEINQPNPKDGSPGAASAIPETDLPEIVQVIRSCRDGIHKVVELLQHKFPNVSKTQLNRKVREISDFVDNHWKVKKEVLDKLGLDSSPVKSKKNKSIAMYFSKRCLPPEEAVNALSASPELRLKSRTIQNGNGGTEAPQINLFPSKQ

SEQ ID NO: 65858 - protein, 68 aa, Zea mays
  Coding DNA Sequence Number=SeqID_22483
MSILLAGGDLCILLTGGDLSIPQAACLSIPLAGKLNAQAYLRQGSNGCHAKEGDDNIASRNHSLTSLV

SEQ ID NO: 65859 - protein, 325 aa, Zea mays
  Coding DNA Sequence Number=SeqID_22484
  Gene Ontology: Mol. function=cytokine activity; Cellular component =chloroplast; Biological process=response to stress
  Homolog annotation: Hit_ID=Q8S0J7; Match level="QueryCoverage=93%, HitCoverage=93%, E-value=1e-139, Identity=86%"; Hit description =Probable membrane-associated 30 kDa protein, chloroplast precursor
  Pfam annotation: Domain name=PspA_IM30; Domain location=58-283; Score= 185.8; E_value=1.1e-52; Accession=PF04012.3; Description=PspAIM30 family
  Subcellular localization annotation: CTP_CleavageSite=43; ConfidenceScore=5.93e-01
MEIRAPPTSLSLAPPPASASFRRTPLRTFFLNGSVSLKVVQVRQSNVNRFKCNSIQSNLFDRLTRVARSYANAVLSSFEDPEKILEQAVLEMNDDLTKMRQATAQVLASQKRLENKYKAAEQASADWYRRAQLALQKGDEDLAREALKRRKSYADNASSLRSQLDQQKGVVENLISNTRVLESKIAEAKQKKDTLKARAQSAKQMWILFHFRTATKVSEMLGNVNTSSALSAFEKMEEKVMAMESQAEALGQLATDDLEGKFALLENSSVDDDLSQLKKELSGSSLKGELPSGRRAASNSGAGRPFPDLEIESELNELRRKAKEY

SEQ ID NO: 65860 - protein, 452 aa, Zea mays
  Coding DNA Sequence Number=SeqID_22485
  Homolog annotation: Hit_ID=Q5N8N6; Match level="QueryCoverage=31%, HitCoverage=38%, E-value=3e-43, Identity=64%"; Hit description=SF16 protein-like
MGKKGNWFTALKKAFTSSPKEKPTNVHQLVAQYPSTHAHGWEKKRWGGFGRSRPHAEPASPAAGALINIPLYREPSSIEKILGDAEMDQQRQYYAATRAQYQITPARPTTAVAGSAASAAAVPLPQPVVGVGTARERERRREDKPAAVVLPLPPPSPPPLIRRFDHDREQQKKLQLQPQSCRAETEWRRQQQQPRRHRAARQSAAPPDRARAAAVAIQAAFRGYMASPSRRLALLFAVRRQTAQAMRCMQTLVRVQAQVRASRVEAMERRNRQHHGAMLRDGGRWRASSQDGGFWDASRLTREEADARTKRKVEAVIKRERALAYAYSHQRLTCFLFVVLSFWRWCRRRRRRQLLKATPMAAHAILADLQSGRSPWWWTPIERRHEPGAYRPADPAIRKPLPALAIAHRDMTTTPVAMTAATTPARSVVSAYSKTRATRPVIRVGSPAAFEP

SEQ ID NO: 65861 - protein, 234 aa, Zea mays
  Coding DNA Sequence Number=SeqID_22486
  Gene Ontology: Cellular component=integral to membrane
  Homolog annotation: Hit_ID=A3A0H4; Match level="QueryCoverage=69%, HitCoverage=38%, E-value=2e-77, Identity=90%"; Hit description =Putative uncharacterized protein
  Pfam annotation: Domain name=Rhomboid; Domain location=22-165; Score =21.8; E_value=0.00012; Accession=PF01694.13; Description=Rhomboid family
QPNKSREALCWKHGETADLRDTGEAGEQQRHGHLLLIGAHPEAGHRIGLSVEYYLHYTLVLVVLSRLLVLGFYHVMIQRFKVEYFRRVTAVGYSCVVFGWMTILAAKQPSSKLNIFGVLSLPISFAPFESLIFTSIMVPQASFIGHLSGIIVGYSIAWGLVHGMNNYWAVTMLGWTPLVFVLSLKRTGSMELSFIEIEPVTDPSLPSVGVVATRNGRSRTLQMDALSGSGVADI

SEQ ID NO: 65862 - protein, 112 aa, Zea mays
  Coding DNA Sequence Number=SeqID_22487
MASAVALYSAAAWACRGRIGCSRTVGRRSQILWSVLNTVRINDDLIVAADRRSGGSGCKIPLRSGDLSKEPLGFTIINPPSPKVIKSIPTSPVFSQFRPWTSGVFVSAVHNP

SEQ ID NO: 65863 - protein, 215 aa, Zea mays
  Coding DNA Sequence Number=SeqID_22488
MDRLLRAPPTQYGPMGGRLRSWPRETCATGRRVVEGCLLDRWGPKEAPQGSQSWGKNRSLSWRLKPGTGKPENKDDILTSSFGDGGQSDSKDIVRFKVHVKSVAMIPPIIEVGVKPFLYDIYFKIDNITDEGWNDDSINLGKRASVDRQGFGDPSFEKSVKKAKSGGEKSSMDDKGKSLLEDPSSHGNEVGFQSEHSDGMKTGKISEGVKGYLDS

SEQ ID NO: 65864 - protein, 219 aa, Zea mays
  Coding DNA Sequence Number=SeqID_22489
  Subcellular localization annotation: CTP_CleavageSite=3; ConfidenceScore=5.15e-01
MARGAGGGGDPVGDEDFSSRFRLGADGRGHQPFGRSPLKSSRTSGAPASARGRRPSAKAGPPQNTNAALTARGIVGGPPVHAARRSPSGRRGRRKPGRRLRHAGGDDARRRSAPRCLSPRRPQGQRAPPPPNAAEKGDPRTRAGGTGKGGYPEKDPSPRRNRAPSPPLLIRGSKTGPPKGSTVASDRVGLTPTTGQGFEGQPPEGFHGRLRLLGLRAHY

SEQ ID NO: 65865 - protein, 465 aa, Zea mays
  Coding DNA Sequence Number=SeqID_22490
MVSPVSCKRVIRVDVRAPFVGGRLGARRHAQKYLRRLARRLLDAWAWASKLACQKSEKRVHLARLHAACMAARPFRPLVWAKMGGRFPRVGGIRRLSASSLEERNSMGAGTSQPSFGFKDFHQPARPHPYAGDHPGCVRVLGWSCFCTGTAPSRRGRRPTRPGGFEWGSAEGLVSPAIGAEAEAAREVLVADGITATTRAPGHRAGVLVLAPRASAGARARSQQRRSTVAVVRTGGGEPLVSLLLLRRPSPWSGVVRTCGGGNRSSVRNGTSNASVFCSLWLSRPEHESLGPIGLVVWGSSSLVKETLRPPFDEPRPGPTPKSISRGLGSGWRPWKPVGRGPRGNRPSRLLGPDSRRNPWTASPSEAGSDSAEDVVDAEGATAPFSVKTRACRIRSSCSSLYPSASYFSQKVMSEDPLSEVVKKHESNPAEKRSFFEEKFDAKGVSPLLAPEGGSGFAEARPTLP

SEQ ID NO: 65866 - protein, 101 aa, Zea mays
  Coding DNA Sequence Number=SeqID_22491
MTVASPTPEPPIIPDTMSGREGPLGVGIPGVALLHPLSTTDTLERRSCAIRAWRWTRGGASAYAELEWSAVRGAGATCALREKEAELEAVRLHAVELEEWL

SEQ ID NO: 65867 - protein, 107 aa, Zea mays
  Coding DNA Sequence Number=SeqID_22492
MVAQRCLPTVRAEPTAEDPHQRENCGAWLISWSRDASPMKFMPRRSSSAAHRSFRATGADTRLITTKPQRWHPYDYPARFAYGDNQAAHAYLYPRSWCGVRSQAPNG

SEQ ID NO: 65868 - protein, 85 aa, Zea mays
  Coding DNA Sequence Number=SeqID_22493
MEQVTRGSMRDMGRGPIAGDDGGGCAAKGGVGGGGGAHGGGHACGGHGGRIEFFQSTNYSDSGAKHNYYCLAPELRTMLDETYEH

SEQ ID NO: 65869 - protein, 70 aa, Zea mays
  Coding DNA Sequence Number=SeqID_22494
MARSARAVQGRALGHRVRLLGGFGCAGGLRGWRGGFASGSWRCRGEAGVARLVEAPARWLGPWSCVRAGA

SEQ ID NO: 65870 - protein, 27 aa, Zea mays
  Coding DNA Sequence Number=SeqID_22495
MARSARAVQGRALGHRVRLLGGFGIFI

SEQ ID NO: 65871 - protein, 116 aa, Zea mays
  Coding DNA Sequence Number=SeqID_22496
MAEGERTDNVGPLGRLNRMRVAQLSQVQTPHSERPGDGYRLQSLSRQVGLPCVELTPFAGADNSSGVGHRRRPVETLSEGISNKGSRCCVMAASPRVYLLQEFLTFGDGDASLEDA

SEQ ID NO: 65872 - protein, 332 aa, Zea mays
  Coding DNA Sequence Number=SeqID_22497
  Gene Ontology: Mol. function=transporter activity; Cellular component= mitochondrial inner membrane; Biological process=transport
  Homolog annotation: Hit_ID=A7PZS6; Match level="QueryCoverage=27%, HitCoverage=26%, E-value=2e-28, Identity=68%"; Hit description =Chromosome chr15 scaffold_40, whole genome shotgun sequence
  Pfam annotation: Domain name=Mito_carr; Domain location=253-332; Score=27.0; E_value=9.6e-06; Accession=PF00153.18; Description =Mitochondrial carrier protein
MPTSATDARTTKTRRHRRGVGNRRRERGWSARGRSAGPWAQTEQRRTRGEELDAGVAAGNGEGLGAGVWLPKKISARASSCRGRGGAQRGRAATEEKIGAGEQLPGKSSTQRPARRAGDLSHWAEARRLGGEALIGGRWQNSGQRRTAGAQQLKGWGQVGGRLGVGGCDSRRRLRGRQDLADEPISLHLSDPSNKIAIPRVRQDTIGGVTIDGLLAAAAGFSIGLAFVLIGFFTTQCAPDTNSFGLANDNEIHVVTRLECGAVAGTIGQTVAYPLDVISRRMYMVGWSHADSIVIGQVKEALQYNGMINAFRKTVRHGVGALYKGLVPNSVK

SEQ ID NO: 65873 - protein, 88 aa, Zea mays
  Coding DNA Sequence Number=SeqID_22498
  Homolog annotation: Hit_ID=A2WS30; Match level="QueryCoverage=62%, HitCoverage=21%, E-value=1e-22, Identity=90%"; Hit description =Putative uncharacterized protein
MVWDPWLIVSQIVCLQCLYYLSLGVAMALLVGTRVPRLTLLYLFDFSTLTPRTPTDRLQKHAPLHSFFSDRIVAVDTTDKSWVHALCD

SEQ ID NO: 65874 - protein, 65 aa, Zea mays
  Coding DNA Sequence Number=SeqID_22499
  Homolog annotation: Hit_ID=O24586; Match level="QueryCoverage=60%, HitCoverage=6%, E-value=8e-07, Identity=74%"; Hit description=Gag
MELVEGELGRFAMKRGEERTETYNRLKTLCLGRCRSHCSASCLRTMGRYNVMTSSAASAAQAVVV

SEQ ID NO: 65875 - protein, 229 aa, Zea mays
  Coding DNA Sequence Number=SeqID_22500
MGWRETEHEGGKRSQRETGERGETRGLRVCPAPRSGVRKGSRAEPESEPWGRAKRSSSSSGAEPESEPWGQAKRSSSSSGAEPESEPWGRAMRSSSSSEAEPEFEPWGRAMRSSSSSGAEPESEPWGRAMRSFLWRLRPDLAAVSLTLSSGTAVGAAQAALSSCQAGQWSGEATFALNAPAIRSVDEATWPRSLLGEDWASGEPELCADGGYQLRFRSLEGTPNYGPRQ

SEQ ID NO: 65876 - protein, 271 aa, Zea mays
  Coding DNA Sequence Number=SeqID_22501
MNSRFPKRKYRPGLERLLETAHLDLDGKLFVNTQQAPTWRANCRRFEPGGSLDRRGNDGASYDVVGPSPGLGEVEAPPRSRSSLSSKAEVESEPLGRARRRPSAEARAESEPWGRAKRSSSSSGAEPESEPWGRAKWSSSSSGAEPESEPWGQAMWSSSSSGAEPESEPWGRAMRSSSSSGAEPEFEPWGRAMRSFLWRLRPDLAAVSLTLSSGTIVGAAQAALSSCQVGQWERRSDYGHFGSVDWRARVRIKLCADGGYQLRFRSLEGTP

SEQ ID NO: 65877 - protein, 107 aa, Zea mays
  Coding DNA Sequence Number=SeqID_22502
  Gene Ontology: Mol. function=aspartic-type endopeptidase activity; Biological process=DNA integration
  Homolog annotation: Hit_ID=Q8H6I0; Match level="QueryCoverage=44%, HitCoverage=2%, E-value=1e-08, Identity=62%"; Hit description =Putative gag-pol polyprotein
MARTMLDEYKSSDRFWAEAINTVCYSINRNPKSLHKHKINLHLPYKHLHQLKMRIKLKMMKMKIKKSHLKRRTMIKGEIPMIQTRKMIRVQDRHTQESTKRYNEITP

SEQ ID NO: 65878 - protein, 169 aa, Zea mays
  Coding DNA Sequence Number=SeqID_22503
MASRAGTGQQQIGAGPGSNEVNAACVLLELLHEVEWDEDQKLVPHLILERGHSIPVVNTGGAAPASQRYTLAILDFITEQETLDADILNEEIFSHLISQTKVALSAEHSSSYAEVISKPGLRCIESYLHDLQAHPTKESSKNFREATNSLPLHPFSFQHNNTNFPLSQV

SEQ ID NO: 65879 - protein, 434 aa, Zea mays
  Coding DNA Sequence Number=SeqID_22504
  Subcellular localization annotation: CTP_CleavageSite=68; ConfidenceScore=5.44e-01
MSFPFLMHCVLPSSKPPDGGCLPSFRLIVGGTQLRGSWYLSAIVRLQGFSSCSPAAPLRRRSPKTVTSSLMVGESEPGCGLCPSLSLKDFHHQGWGGECAELGSAPARVAGRVVAVRGAGGCTVPGSRTRVASEPLAAPASATAAGRGSSAGAIAKADLGPTSNSAAFRPSLPHEFGQGRGEVVVVAAAGAGVDAPFVGLLLLRRPTPMEWGCSYLRRGNRSSVCSGTSNANSHVDNLNHFTKHESPRVKVTSEHEQRRSWLENKTWLAGAEPGCSLAGPTPESINRGLGSGWRPWKMVGRGPRGIRLSRLLGPDSRRRPWRQWLGRGDDVALRSKGLRTALPSEARSNLAEGVVDAEGAAAPFPASRPEPAGSECLVVDVCASESCFSRKVMSEKVMSEKKSFFEENFNAEGVLPLLAPEGGSGFAEARPTLP

SEQ ID NO: 65880 - protein, 315 aa, Zea mays
  Coding DNA Sequence Number=SeqID_22505
  Subcellular localization annotation: CTP_CleavageSite=59; ConfidenceScore=5.18e-01
MQTGSERKKPNRRARRARPPGGYKRPSTFAQTNGRKRQAALQAACNRARQLHRHLRHHRASSIAEPTPRLEATQRTTQQRQPGATVDVAKGGPAVMAVAGGREQRSRRQPSSRPIREQQGNPLLRREDDAPVIRPSNDSRTRNGRPANHSPRRINSATRQAAQERQATLRLRRNDRTKKGWPSEGFKQPPQIAWALHPLLVRGSKAGPPKGSTAASGYPGFAPITDQGIPPEGGIEPSDPVARGPGLADHSQLTGNTMFGAHRGGSGAALANPAPAKPLTASTYQPENLGPDRTPGLRPVRMREQPGQPKHYARH

SEQ ID NO: 65881 - protein, 177 aa, Zea mays
  Coding DNA Sequence Number=SeqID_22506
MAAPSSLTKAGGRQQGLDRSNSCPSAKHRRSSDGHDITPAGCQDLSGCHIGMKDQGPLREGWPREDEDETGAPLGPLASLTRVDACNPLLQAHPTWARDEHEGRGIPTTPTPDSGRLAPLPPSCFAHALDPSGLGHAALTRRPEGPPVSKRRQAHNKNRPIAIGRAIVPMAEPVSVL

SEQ ID NO: 65882 - protein, 146 aa, Zea mays
  Coding DNA Sequence Number=SeqID_22507
MGAIKPEISPFERLDHASSEPSLGQGQPTPSETDMRSGPTKGAIGSSARPMARTRARSRKTANSAPPDQGLGLGLGPGRRRTPLRPTQGSDSGSAPEDNELRSARPQGSDSALASAERSPPRPTRRLGLGHGRRTRLRLRRSPHVA

SEQ ID NO: 65883 - protein, 173 aa, Zea mays
  Coding DNA Sequence Number=SeqID_22508
MAAPSSLTKAGGRQQGLDRSNSCPSAKHRRSSDGHDITPAGCQDLSGCHIGMKDQGPLREGWPREDEDETGAPLGPLASLTRVDACNPLLQAHPTWARDEHEGRGIPTTPTPDSGRLAPLPPSCFAHALDPSGLGHAALTRRPEGPPRSYFKSEPLIRDPASIVAYRIGRNEI

SEQ ID NO: 65884 - protein, 154 aa, Zea mays
  Coding DNA Sequence Number=SeqID_22509
MSHFFSSFVDLPLKISQPRHLLLLPLYLLMDDFHVPDLLVQLLLLECWTGSFSLLASSFSGEKEFPYLDPVAATQQPPGAEAFFGGTTKVSACRRRSNEFTGGPSEDERRSDTKKTFSLAAAQLLKRATERSVTIQNKAKFTILASRSMFVSIV

SEQ ID NO: 65885 - protein, 308 aa, Zea mays
  Coding DNA Sequence Number=SeqID_22510
MLTLSVRSQPPTAKCRKLTDKVAALEREKADLRRQLAAERREANEAIAKEQAAQAEAKLARAEGNLAKELAEHLQERLTALESRAKGAEAAMRAEAERTRTQLMDTYRELGGAAGTPRCRGGGGFMSYASLVTCEGAMNALSREGCRHFEVFDQADEDFDRDVYKVEDLVVKDSAGALYDRMWGPHGREVVRERAETAMAQALRGERVDDLGALNSALPDPEPAPAEAVSGVALEPTPETAAIATAAPTSAAAGEDLPPKVAEGEPDAPAAAAPSAEDPAAVAAETTAEAAAEPMAEAFAVPGPSQVA

SEQ ID NO: 65886 - protein, 180 aa, Zea mays
  Coding DNA Sequence Number=SeqID_22511
  Gene Ontology: Mol. function=protein binding; Cellular component=ER -Golgi intermediate compartment membrane; Biological process=vesicle -mediated transport
  Homolog annotation: Hit_ID=Q10CF7; Match level="QueryCoverage=81%, HitCoverage=42%, E-value=8e-73, Identity=87%"; Hit description =Serologically defined breast cancer antigen NY-BR-84, putative, expressed
  Pfam annotation: Domain name=DUF1692; Domain location=9-176; Score =200.5; E_value=4e-57; Accession=PF07970.3; Description=Protein of unknown function (DUF1692)
MRQTCFLALPLNRVLLCNLVLQLTFLILFQLIFEGSSHVNVSHVIHELSFGPKYPGIDNPLDDTSRILHDTSGTFKYYIKVVPTEYKYLSKKILPTNQYSVTEYFLPIRPTERAWPAVYFLYDLSPITVTIKEERRNFLHFITRLCAVLGGTFAMTGMLDRWMYRLVESVTNSKTRSVLR

SEQ ID NO: 65887 - protein, 66 aa, Zea mays
  Coding DNA Sequence Number=SeqID_22512
MGVDWEHTYYHAGGLLNCFSLQEDEVPADSASETDLLTDCSDGSNTGAEDTAFGTADAAEVDAGSA

SEQ ID NO: 65888 - protein, 424 aa, Zea mays
  Coding DNA Sequence Number=SeqID_22513
MESHDLRAERESRLVGGNETDGSGYEYGAASPLQPNRILAEYVDVYSPLLYTPNPPHPQVVSIATTAREKMKLWKETSRSSKTTTSSRRGHTARKSVIPFLPSRLAERPLRRPVAGQSSHLERLHHRLHEEQERRRQEQEQHGSSFSLQQEIESVKSCSPVLPLEAPPAPPLGAPASGVAAGGDPDDGGGDNSSSHDTDFSADKEPEGWVARPITRDAARGCHFHDALDTLLRRALNRRTWSIEYRCVVYQHSRGVYPDRWEATCLVRRPENSLQGAEACSEHYSISERDSAEAAMQDAARRALSHYCSVLGGVADGLDLKYYPRRPSGSTGGVIVSPVGEDNPRLSSTVNLAAVLNTELDHALDKLSRARAEIALLRAERAERRHLDGGSPAPVGTQHPYRSPRRGRQPYGNPDSKTKINLEP

SEQ ID NO: 65889 - protein, 218 aa, Zea mays
  Coding DNA Sequence Number=SeqID_22514
MCSSTNLKSWNADPSLDPIFEGPKADAKVEAMRVVHDAAEYMTKDFVRETGADTEDDDGDGDDPVIQRQRPFPTFVEAKSYLRLAEISMAAKQAQPSQALLPRLLLWSHRSTPVAAAEQAWRRQEDAWRAWFWCCGISCVLGWPFRMAHILVGGLRHLLSILGRPIRRPTTRAQHTSAIVLRWARGAWTASDGARDVASDSAPAWAPSEEARLHHQIS

SEQ ID NO: 65890 - protein, 163 aa, Zea mays
  Coding DNA Sequence Number=SeqID_22515
  Gene Ontology: Mol. function=dTDP-glucose 4,6-dehydratase activity; Biological process=cellular metabolic process
  Homolog annotation: Hit_ID=Q6QP37; Match level="QueryCoverage=65%, HitCoverage=27%, E-value=3e-50, Identity=93%"; Hit description=DTDP -glucose 4,6-dehydratase
MDFIPGVDGPSEGVPRVLACFSNNLLRREPLKLVDGGQSQRTFVYIKDAIEAVVLMIENPARANGHIFNVGNPDNEVTVRELAQMMTEVYANVSGEAPLDEPMIDMPTGLCRLEPKDTSQGSAGDNIDVPAQDIQRSCEEANVAGFSNKLSWRWLGTAPRLEP

SEQ ID NO: 65891 - protein, 339 aa, Zea mays
  Coding DNA Sequence Number=SeqID_22516
MEVRCQTNFCQNEDGFPKLLRACTVRLGIRSQPEYDGHEFIEHGTEKCVVTVYIGSSPHHVEWSVTTAGHRFKDTCQVVARKALRALCQIYEEEVPDTPLRFFSPFQRDRPAWMARMRALEEQQLLEDDPTVVYLTAYLLTLDTQYDFLARHHPQARATALESREVIAVEALKQAKDEHIHKLMEAYLVTHNQHRALRIREPASYNPVHPGELKIPRFLKVTRSLSEERRRLGNSRKEPYSWKGIPVSPKAMDKQDHPESSQDPPPELCEPLTMKKIPAPSLEVKEEAASTPPAPPPSEELQEPVPLEEEFDPVLPSQSLPEEVINISSLLTHPGDVSD

SEQ ID NO: 65892 - protein, 136 aa, Zea mays
  Coding DNA Sequence Number=SeqID_22517
  Gene Ontology: Mol. function=dTDP-glucose 4,6-dehydratase activity; Biological process=cellular metabolic process
  Homolog annotation: Hit_ID=Q6QP37; Match level="QueryCoverage=88%, HitCoverage=38%, E-value=2e-58, Identity=76%"; Hit description=DTDP -glucose 4,6-dehydratase
MSSSLSPAAAAAPLDLDGNSVAPLTICMIGAGGFIGSHLCEKLMAETRHVVLAVDVYCDKIRHLVDPAPPHLAGRISFHRLNIKNDSRLEGLIKMADLVKYCSENSKRLIHFSTCEVYGKTIGSFLPKDHPLRKVT

SEQ ID NO: 65893 - protein, 107 aa, Zea mays
  Coding DNA Sequence Number=SeqID_22518
MSGAPEDSDSNSSPSGNSRGNSAIIHRTVRCSKEERPQELASLGNSFQLLRYNSQDCPVYTRLSGVTAGQRLLLAPTATCGALNARQRVERSGTPMLAHRTLYSACP

SEQ ID NO: 65894 - protein, 353 aa, Zea mays
  Coding DNA Sequence Number=SeqID_22519
  Homolog annotation: Hit_ID=Q5JJV6; Match level="QueryCoverage=34%, HitCoverage=60%, E-value=2e-45, Identity=71%"; Hit description =Putative uncharacterized protein P0458E05.22
  Pfam annotation: Domain name=SnoaL; Domain location=12-132; Score= -18.2; E_value=0.025; Accession=PF07366.3; Description=SnoaL-like polyketide cyclase
MTTATAVGSVADRIMPHLLNIYGSSATARDFEIYAPNATFEDPLMRAHGVKQIKSAFYTLPKVFGESKITEYTVQENPMGPGKTEVVIQNKQHYKVLGKPVDLTSLIRLQLQDGKVVKHEDWYVVVSSAAARIYICICFSGQTYSMNNGDIYDDDGAGGTGSLSRTGTRWACRWGAALASGPRRPSCRSRRTARPTAATKKGWRRRHHHLALLLLLLCSGRRRRRARVEVDPGCRTPSPYAGDAPSSSTAVLEEEEVVAAWRERWIGGPALRALYTIYEEADEEAAGDGEGMDGDARETETPFYTPPASPPRAGGDGGSNGAVPTQPTDGAAAPIVPAHADTEDVADATLDGR

SEQ ID NO: 65895 - protein, 542 aa, Zea mays
  Coding DNA Sequence Number=SeqID_22520
  Gene Ontology: Mol. function=metalloendopeptidase activity; Cellular component=mitochondrial respiratory chain; Biological process =proteolysis
  Homolog annotation: Hit_ID=Q5JJV3; Match level="QueryCoverage=87%, HitCoverage=87%, E-value=1e-164, Identity=62%"; Hit description =Putative mitochondrial processing peptidase
  Pfam annotation: Domain name=Peptidase_M16; Domain location=112-258; Score=123.6; E_value=5.8e-34; Accession=PF00675.11; Description =Insulinase (Peptidase family M16)
  Pfam annotation: Domain name=Peptidase_M16_C; Domain location=267 -449; Score=123.0; E_value=8.5e-34; Accession=PF05193.12; Description= Peptidase M16 inactive domain
  Pfam module annotation: Pfam domain module=Peptidase_M16::Peptidase _M16_C; Domain location=112-258::267-449
MTTLSRMLPRLRSSATRALRKVFGLEPAAPPRRLPAPEAFVASERSLLRPLPGLDLPPCLPDNLSRSPTRVTTLPNGLRVATEDIPVMHSTTAAVPRSKNASPLFLLSILNLCGARRRQGPSACIGFFVNSGSVYESGETTGVSYLLERMGFKDTKHRSHLSIVSELELAGASVSVSASREQMVYSYDTLKGYMPEALEILIDCMRNPLFLQEEVQRQLVLAREGFQELQRSPERFLHEQLNIVGFSGALANPLIAPEHVLARINDRIIQKFYHENFTADRVVLAAAGVDHEHMLGYADFLLKDWHRGAPMEKPKSTYVGGYSKHRAYSDMTDVALAFEVPGGWFQERDAAIMTVIQTLMGGGGSFSTGGPGKGMHSRLSLRVLNKYHFVESLSAFSNVYDNTGLFGIYLTTSPYHVAKAVDIAISELIAVATPGEVTEVELRRAKNSTISSVLMNLESRVIMNPWSISASCQVVVAEDIGRQMLSYGSRKPMDNFLQRMEGITLDDVATFARKMLASRPTMVSWGDVDKVPPYESICKRLR

SEQ ID NO: 65896 - protein, 101 aa, Zea mays
  Coding DNA Sequence Number=SeqID_22521
  Homolog annotation: Hit_ID=A2WZG5; Match level="QueryCoverage=59%, HitCoverage=41%, E-value=6e-26, Identity=91%"; Hit description =Putative uncharacterized protein
  Pfam annotation: Domain name=Vps55; Domain location=2-99; Score=-3.4; E_value=2.3e-06; Accession=PF04133.5; Description=Vacuolar protein sorting 55
MVLKVYTGLIYGFAQGPKKFEDGAVDRLVCFVQQLVAHASRWINAAKFLTGASAMGSLAIPAIPRHAGLIETGAMFIQFTSFFILVCTVLCFHRATLDEDW

SEQ ID NO: 65897 - protein, 206 aa, Zea mays
  Coding DNA Sequence Number=SeqID_22522
  Gene Ontology: Mol. function=metal ion binding; Cellular component =nucleus; Biological process=chromatin modification
  Homolog annotation: Hit_ID=Q8LHD6; Match level="QueryCoverage=43%, HitCoverage=23%, E-value=7e-30, Identity=66%"; Hit description =Putative uncharacterized protein P0458E05.18
  Pfam annotation: Domain name=PHD; Domain location=65-113; Score=48.8; E_value=1.9e-11; Accession=PF00628.20; Description=PHD-finger
  Subcellular localization annotation: CTP_CleavageSite=52; ConfidenceScore=5.63e-01
MGRAAPSSSPSSPQLGRKRTAAPTPEPPTPQRHCSMVDVMRRSRAVAAPPPVARARVYTYYETLLCETCGLGDRDDEMLLCDRCDRGCHTFCLRPIAAKVPIGPWFCPVCAPPTMAPKSFPVKQTKIVDFFRIQKDEQDAQAAKCRLSQGNPPHLFNAPAKSCSSDHQIFLLVCQSLLLVLIVAALPSNMLLRIGNSRQQRIRFTL

SEQ ID NO: 65898 - protein, 147 aa, Zea mays
  Coding DNA Sequence Number=SeqID_22523
MAPPVDVAGLRPRLGDVEAPPKPRSSLSSVVEVESEPLGRARRRPSAESSSSSGAEPKSKPWVGRSGVRRLPGLSPSPSPGSGGAEFAVFRDFSPSPSPGSGEVRRLLGLSPSPSPGSGGAEFAVFRDLARVRALGRAERSSPSSGT

SEQ ID NO: 65899 - protein, 294 aa, Zea mays
  Coding DNA Sequence Number=SeqID_22524
  Subcellular localization annotation: CTP_CleavageSite=60; ConfidenceScore=5.42e-01
MAEGCQPPAKLRSSNNSKTKATRVLPIRGLGRRKAWRPRPTRHVTGAPVTTCEKLHRYLRQSHAFSTEELVPQLEATLCMAQQCLPSTSVTGQSAAGEGATVDIAKSGPAVMAAVGERKKRSNRLRAHVPSWSSRGALSHGVKTTRPCSVPRTARTTTASRTTRPVALTSRQGKRHLWQAKRATFHLRHKDSAKKGTGKGDTPKGILLREGSGPRALLLIRAASEHSGSTPTTDQGFEGWPLEGFDSRPRARRARDDSGYVRYMAEARAMLPRIGGCSRKPGYGQTVDSVNKPT

SEQ ID NO: 65900 - protein, 168 aa, Zea mays
  Coding DNA Sequence Number=SeqID_22525
  Gene Ontology: Mol. function=transferase activity; Cellular component= cytoplasm; Biological process=amino acid biosynthetic process
  Homolog annotation: Hit_ID=Q5JJV9; Match level="QueryCoverage=100%, HitCoverage=48%, E-value=1e-77, Identity=86%"; Hit description =Putative UMP-kinase
  Pfam annotation: Domain name=AA_kinase; Domain location=1-125; Score =4.1; E_value=1e-05; Accession=PF00696.19; Description=Amino acid kinase family
MESIGIPTRVQTAFRMSEVAEPYIRRRAVRHLEKGRVVIFAAGTGNPFFTTDTAAALRCAEINAEVMLKATNVDGVYDSDPRQNPNARLLETVSYHEVTARDLSVMDMTAITLCQENNIPIVVFNLQEPGNIAKAIVGKKVGTFVGCKRNQKRNENTLVEERRLVNEV

SEQ ID NO: 65901 - protein, 168 aa, Zea mays
  Coding DNA Sequence Number=SeqID_22526
  Gene Ontology: Mol. function=asparaginase activity; Biological process=glycoprotein catabolic process
  Homolog annotation: Hit_ID=A5C3M5; Match level="QueryCoverage=76%, HitCoverage=55%, E-value=3e-14, Identity=34%"; Hit description =Putative uncharacterized protein
MVLCICSYMLLVDSGLAITCLKLSLITLMEFVPPMSLYRIIYEFSPPSSSGLFSNFSGVHLGDLSDPETFDYLIPPMGMDKCNANSVDNDNVHKAGMVMNGLPISVRLMSKMLRRIGDSPLIRFGTYTCDACAMSCTLKWDVATAMEYKGLPLQQAVDYYVRGTMQNI

SEQ ID NO: 65902 - protein, 42 aa, Zea mays
  Coding DNA Sequence Number=SeqID_22527
MAMQEAAPRRLLGTFGFRRYLRTQVGITVDQNNTKVGTAPKV

SEQ ID NO: 65903 - protein, 234 aa, Zea mays
  Coding DNA Sequence Number=SeqID_22528
MKVYDRRRCSKNSKSGSEFTGEILLNLVFEDLRKPKVPNNRRGAASCMAMVTPSPPPPTRRVAGQTRVFLFCHGGKSSSGSPPPGEPTTVVAVALWGEEYHVIAAVKGHELETPKAEQRPRLKRLLEATHLELNGKVFVNTQRAPTWRANCRRFGRARTVNQPGLQASREGARARATNVVRVAVSAHDVQRRARRRLLLRPRMGSGEVVTPPEAEAWGRARRRSSSRAKAEAEA

SEQ ID NO: 65904 - protein, 149 aa, Zea mays
  Coding DNA Sequence Number=SeqID_22529
MENHPGKTVLPQGCNGTSLANNAQLQPLFIAQPYTSYGLPPLMQTALSLKSGCDIGVVKQGGCTLYPRAVIPSLARACKTLIYFRGEWLGIDYKAFTKIPSGCSRPSGFLNVPHSSPRGKPPSAERAAYTEPHCWHDVEANYTSVPLIS

SEQ ID NO: 65905 - protein, 43 aa, Zea mays
  Coding DNA Sequence Number=SeqID_22530
MDVLMIRNLGEDQQGLRKDLGVEEEQQELALVARSIAQCTIDN

SEQ ID NO: 65906 - protein, 117 aa, Zea mays
  Coding DNA Sequence Number=SeqID_22531
MAKKEQRGTGLLQERERRPWERAGKVGQHDREMEHAICREGGRASWRSTAMAEKEHALEDEELRPGAGRSRGKGGRRHGKGQKEGRAWEHQGARMPERATGGEDEDGDQIFPCYVSG

SEQ ID NO: 65907 - protein, 96 aa, Zea mays
  Coding DNA Sequence Number=SeqID_22532
MARGAALTDLLKGNPTGLLMRPGRDEEVLKLDGLFHPDLVIDFLCIKYRAPFSPHEALQLPCEDTKNAFLCLTLVVESPYFTKSQGFPLLLFPILR

SEQ ID NO: 65908 - protein, 313 aa, Zea mays
  Coding DNA Sequence Number=SeqID_22533
  Gene Ontology: Mol. function=GTPase activity; Cellular component =cytoplasm; Biological process=immune response
  Homolog annotation: Hit_ID=A2Y7G2; Match level="QueryCoverage=60%, HitCoverage=20%, E-value=3e-77, Identity=78%"; Hit description =Putative uncharacterized protein
  Pfam annotation: Domain name=GBP; Domain location=23-261; Score= -24.7; E_value=9.9e-06; Accession=PF02263.10; Description=Guanylate -binding protein, N-terminal domain
MGRKWNELLSSAPWRTGEAAEDEDATRMSREGKVSVTSNPEEMPTMSVPQSRRPDLDLTIDDFKEDEIDPELRYSFQRNSRYHLPAQFSPVNNGLKPVFHVSRLSWVIMMGGIDESTLDRLSLVTDMTKHIRVRASGGSCTSSYKPSNINLRGPVMHQTPLDFYLDLAEDNRKITPRDYLEIALRPVQGGGRDISAKNAIRDSICALFPDRECFTLVQPVNNEKDLQRLDQLPLSNFRPEFRSGLDGFAKFVLDRTRPKQLGASTMTGPILAGLTQSFLDAINNGYVPTISSSWQLVQNLKSFFTVLPKRPLR

SEQ ID NO: 65909 - protein, 408 aa, Zea mays
  Coding DNA Sequence Number=SeqID_22534
  Pfam annotation: Domain name=zf-CCHC; Domain location=244-261; Score =27.2; E_value=5.9e-05; Accession=PF00098.14; Description=Zinc knuckle
  Pfam annotation: Domain name=zf-CCHC; Domain location=359-376; Score =24.2; E_value=0.00033; Accession=PF00098.14; Description=Zinc knuckle
  Pfam module annotation: Pfam domain module=zf-CCHC::zf-CCHC; Domain location=244-261::359-376
MSDLGMSTASDVTKYKEYIMLATPPAKDQMEQFKKAHAHFLQATSQVVARLQQVDLAEFIAHEQTTDNHMTSTTTSPSIVDLEKLLHAQALVIQNVSQLTSSYQQVLASRNVTRNETTDEQKDAHQQTNDLGTCCCCEYYGIPCRQISTNESETTKQKNRILFSGIKSQWSSQEQLIADALSDDELPGFPKRKHHKDAQLQKEANECYIDGWTITCTQFQPRRRISSKKQKGKHGKSQEITSRKACYQCGREGHYFRNCPEKRSLLDTPEIKLSQSPDMEYEQKYTETSTNIVKNNKRNRKMFGYMSSPPQPQAKALKHMDTQMEESSQTQLYEIQTPNHPSSPVGQAKLTRKELKARGACFYCKNEEHIIRECPKKRLDRLKKKTVKQDPNNNLEDQPAISTMTKIA

SEQ ID NO: 65910 - protein, 100 aa, Zea mays
  Coding DNA Sequence Number=SeqID_22535
MSSCHCLIAPGEAVGLGKWCNNSLATESAPAGLSPNGVRDAHPSVRRHAGCMAAARSVGWPELYGVEDAASSSMEKPSEGFATMLGDTNHGVEQEIQAKT

SEQ ID NO: 65911 - protein, 95 aa, Zea mays
  Coding DNA Sequence Number=SeqID_22536
MRGGHTPVDRETGTADTDFGPTYRLAPSPEEGLGATVGTLRQGRSPAAAVWLEARDISQWAKPDLGPMEPFDLSIYCGKDVPPATTLTSDKPSRH

SEQ ID NO: 65912 - protein, 199 aa, Zea mays
  Coding DNA Sequence Number=SeqID_22537
MAGPFHRRRPRRELGHTAKPSTWVEHRNRGVVFVVAEGAKQRITVKQRAEDWERWPSTKGRAVRAGCREEHAAGLEAEREKSERRGKLGEMGGRTRGARLRVSEQREGRASARETRAGGGGEAPRRESRLGEAQLDTRPWEGERSAQKLETEKRGAPWGLGPGTQGAGRALEQEDGGWSLRLLKTGPDFSWLRADEDDG

SEQ ID NO: 65913 - protein, 571 aa, Zea mays
  Coding DNA Sequence Number=SeqID_22538
  Gene Ontology: Mol. function=3,4-dihydroxy-2-butanone-4-phosphate synthase activity; Cellular component=chloroplast; Biological process=riboflavin biosynthetic process
  Homolog annotation: Hit_ID=Q6L506; Match level="QueryCoverage=100%, HitCoverage=100%, E-value=0.0, Identity=80%"; Hit description='GTP cyclohydrolase II/3,4-dihydroxy-2-butanone-4-phosphate synthase'
  Pfam annotation: Domain name=DHBP_synthase; Domain location=159-346; Score=247.9; E_value=2.2e-71; Accession=PF00926.10; Description=3,4 -dihydroxy-2-butanone 4-phosphate synthase
  Pfam annotation: Domain name=GTP_cyclohydro2; Domain location=351 -520; Score=382.9; E_value=5.1e-112; Accession=PF00925.11; Description=GTP cyclohydrolase II
  Pfam module annotation: Pfam domain module=DHBP_synthase::GTP _cyclohydro2; Domain location=159-346::351-520
MDRVLLSSHLPSHAHANTRLQQGPGGLNSIGFAVIKKGCLKLRCYAIGDELGGPGRFSKHFIENSNGPVFQGLDASAGSFRTVGAEITQDTGDFFVSDAEGDPDKPTDGFSSIDQAIGALREGKDQCRNVMDIAEDVNHRLKVGWVKWHQTYGVVGDKKFVIAVDDENGDNEGDLVMAATLVDQKSVAFMIRNGSGIISVGMEEEDLTRLMIPMMSPITEIEDITAAASTVTVDARVGISTGVSAADRAKTILTLASSDSKPSDLRRPGHIFPLKYRNGGVLKRAGHTEASVDLVALAGLRPVSVLSTVMDPRDGSMAGVTVLQQMAMEHDIPIVSIADLIRYRRKREKLVELIAVSRLPTKWGLFRAYCYQSRLDGTEHIAVVKGDIGDGEEVLVRVHSECLTGDILGSARCDCGNQLELAMQLIEKAGRGVLVYLRGHEGRGIGLGQKLRAYNLQDEGHDTVEANVELGLAVDAREYGIGAQILRDIGVRTMRLMTNNPAKFIGLKGYGLAVVGRVPVISPITKENQKYLETKRTKMGHVYGSDLPGSLPEFANPQEAPTEQDDDDNQN

SEQ ID NO: 65914 - protein, 130 aa, Zea mays
  Coding DNA Sequence Number=SeqID_22539
MAIRHYMLQSKRAQQIDKDTICYFYIMCTDIIVLMGASCSVDNVPSPPVCEEEGPLLRFLREVLHELPFLSSVASWSVRLFLTEVQLSGMRLAVTQGVLVLYPFLWLKLYQHVFKQRKSKLGKGSRKKRA

SEQ ID NO: 65915 - protein, 144 aa, Zea mays
  Coding DNA Sequence Number=SeqID_22540
  Gene Ontology: Mol. function=small conjugating protein ligase activity; Cellular component=cytoplasm; Biological process=ubiquitin- dependent protein catabolic process
  Homolog annotation: Hit_ID=O22656; Match level="QueryCoverage=100%, HitCoverage=64%, E-value=4e-46, Identity=65%"; Hit description =Ubiquitin carrier protein
  Pfam annotation: Domain name=UQ_con; Domain location=1-137; Score =115.0; E_value=2.2e-31; Accession=PF00179.17; Description=Ubiquitin -conjugating enzyme
MTFPQNYPNSPPSVRFTSGMWHPNVYPDGRVCISILHPPGEDPSGYELASERWTPVHTVESIVLSIISMLSSPNDESPANIEAALLNIYCDNFLLDYHSASAIVKMPLVSEVIHDFALQKDWREKRDEFKKKVRQCVRRSQEML

SEQ ID NO: 65916 - protein, 64 aa, Zea mays
  Coding DNA Sequence Number=SeqID_22541
DALLGHLGSDQWRVMISGQNGNHGLWRYFGTGGYEIDGFGYDYDAVEDEAVEGDFQEFQDYDEF

SEQ ID NO: 65917 - protein, 89 aa, Zea mays
  Coding DNA Sequence Number=SeqID_22542
MASSKDRTKVSLSNIMKPTLESLSAEDQQQFEDYIRQQQAQERKEAKVKYLAHFKVDRHQRIVQQGEFEMTSLLPTTHAPNMNSYIGQP

SEQ ID NO: 65918 - protein, 67 aa, Zea mays
  Coding DNA Sequence Number=SeqID_22543
MGHELHRQGQGAVGWMWLGGEYVIQSAKMKRKQRKAMVNLVGEEGKCSALVASVQVEAWFRRLEKPS

SEQ ID NO: 65919 - protein, 908 aa, Zea mays
  Coding DNA Sequence Number=SeqID_22544
MEVVEMVPCARNKWGNWNEFWFYVAEGTVEDHEGLPVSEMCSHFYSAYPPFEVAEEDADEGALRCAAGLSSGRDLVEEFVAYGVWPLAHGWALGEVCPRQMPSHGGKMVRSPAFALDLQSHDPAAFVREAEDGAVQIVGRYVPRTEGQRSWDIRGSNDRLNRVFELNRLSYNGYPGQDDVDRRGKKPVVESGDDPAPAAALSSKKRKLGTVMGGLGVSDGFARELMRTCAAPGGRMSSPELRESSARMLRVTGGWWPRNVPIPRAADEDFFTSRMVREWKVFPYGWNIAAVVSAVMDKDCQGAAQKRQTVVRLHEARPKRQRWAAKAASPGGGKPPLAAKSAVPASSKAPEAVAGAGGSRPAKALPASSKVPEVAKAARGLPSPGKAVADFATDISVDDYLGGSDKGQLVIVAPAAATMAAAVVPKAKGGALSAGGEMPALAAVRDEAGAVSRRLKEMKEALSQATDFADRAASGALTAVVSAEVERLRTQPADAVREKSAADSKCRKLADKVAALEGEKTDLRRQLAGERREANEALAKAQAAQAEANLARAEGNLARERAEQLQERLSALESRVERAEAATRAEAERTRKQLMDSYHELGARTGDFEVPDREPGLRCLEWVQEELQALPTIVEGFMSYASLVTCEGAMNALSREGCRHFEVFDQADEDFERDIYKVEDPIVKESAGAIYDRMWGPHGREVVRERAETARAQAARGERVDDFGALNSALPDPEPIPGVRGRHVQDFGPAHATATTNFLAASTVDGGNKYDGSASEFSDFADSGSSVEWTEESSEEDLDYFAALDVAAAEASPHAAGTEDVPGPSTGRRRRRAVAKRRACMMKVEPMSGVFVMLDWCVYSRSWRGQFGVVVFAFVTLRPAVPSGNLGADGLCSGLRFFALAVLIRLHP

SEQ ID NO: 65920 - protein, 191 aa, Zea mays
  Coding DNA Sequence Number=SeqID_22545
  Homolog annotation: Hit_ID=Q10Q41; Match level="QueryCoverage=34%, HitCoverage=38%, E-value=8e-11, Identity=52%"; Hit description =Expressed protein
MKKHTDCEHENVCDHVQMMCDDAREQHAATRDPDARLECANKRRRCANSISAYELNTNVVQVPYIVQKLLQIHCKVSRSRSSSGPVQAKDLFLLQAFYHSGPFLTHGNHVSLFCSQAENQKKYTEFDNRFKKSKVLQDLLEKRRKNKEKNERMIQDKYCLRGAEWGSGTAPRRACQTRREEGLHFGAQEES

SEQ ID NO: 65921 - protein, 139 aa, Zea mays
  Coding DNA Sequence Number=SeqID_22546
  Gene Ontology: Mol. function=calcium ion binding; Cellular component =calcineurin complex; Biological process=positive regulation of sorocarp stalk cell differentiation
  Homolog annotation: Hit_ID=Q6Z8S1; Match level="QueryCoverage=100%, HitCoverage=100%, E-value=5e-63, Identity=74%"; Hit description =Putative Calcineurin B subunit
  Pfam annotation: Domain name=efhand; Domain location=20-48; Score =9.5; E_value=1.7; Accession=PF00036.23; Description=EF hand
  Pfam annotation: Domain name=efhand; Domain location=84-112; Score =24.9; E_value=0.00029; Accession=PF00036.23; Description=EF hand
  Pfam module annotation: Pfam domain module=efhand::efhand; Domain location=20-48::84-112
MGSTSSMLTQYDIEEQEIVSLYHRFCQLDRNGGGFVSADEFMSVPEFAVNPLSQRLLRMLDGLNFKEFVAFLSAFSPRTSLQQKIEFIFRVYDTDCNGKVAFDDILSILRDLTGSFMTEQQRQIIGNSELKMEVEVPID

SEQ ID NO: 65922 - protein, 20 aa, Zea mays
  Coding DNA Sequence Number=SeqID_22547
MAVRLLLLFYYLIGLNDMMI

SEQ ID NO: 65923 - protein, 171 aa, Zea mays
  Coding DNA Sequence Number=SeqID_22548
MAPRVLHDDGGSQPLTEARRRTPRGRNADIMYMGFLSVFYRNKMLMSAACVAPTVVPLDRVRLTAATSGLGRHRKLRLARPQGSAPVSASDDELRLALPQGSDSASAPEDDELRLARPRARTQPRLRKTTVSASLEPRARTRPRPRRSLRLARPRARTDHVTGGHHYPTPS

SEQ ID NO: 65924 - protein, 542 aa, Zea mays
  Coding DNA Sequence Number=SeqID_22549
  Homolog annotation: Hit_ID=Q6J9V9; Match level="QueryCoverage=15%, HitCoverage=31%, E-value=2e-12, Identity=56%"; Hit description =Putative uncharacterized protein
  Subcellular localization annotation: CTP_CleavageSite=31; ConfidenceScore=5.21e-01
MNRHRHSRCHYKRNFGSTSAGTNNPPRWRACGATERQRDSRWLTAARSGSSDNDFRPGRPNSSSDDLRADAAATRPSLASPPKGRGHAEGRRVGGQSAGGTGYLIGGETSSGCLSGRWHRKQRRSRSGRRAGHAAAASATNGERPSPRSLRKGAGRCPRGGRPQLGALPSPALMMNNLEAEGGAEAAAWLASPHHRTGDQRVKGRTAMQAACNCTKGAHPFDFNASSMEAQAHTSCRRKQQSSRQQAHVPSWDSERTLSHGVKTTRPCSVPRMARARAKAAPRTTRPVALTLRQDRRHLWQAKQATLHLRHDDRVKKGTRKGDTPKGILLREGNGPRAPLLIRGSKAGPSEGFNSRLRALGLRAHYWLAPEGFDSRLRHRARDDPGYVRYITKARATLPRGSGAALANPAPAKPLTASTYQPENLGLAMHPGYGHAACVASTVVPLDRVRLTAATSGLGRHRKLRLARPQGSAPVSASDDELRLALPQGSDSASAPEDDELRLARPQGSDSASAPEDDSLRLARAQGSDSTSTSEEPPPHPT

SEQ ID NO: 65925 - protein, 216 aa, Zea mays
  Coding DNA Sequence Number=SeqID_22550
MELLSRIPHVQLLQPTERRIHQNLMLYRLAVIEKVGSRIREKAAAGEAVEAAGGDADEELLCGDLRRVGEELRVVELERGGVAGAAGELDLARAAGARLGRVGELEVKRRAPADRRRAVVAAHAHAAAVAEHLALVRHGRPLLRGGVAAPGLSLSTRLPLSWTAAADTFWPPVLEDQSTTPDPLTSWRSPLDEKRSELHESTAAPLPADQTGTPPA

SEQ ID NO: 65926 - protein, 276 aa, Zea mays
  Coding DNA Sequence Number=SeqID_22551
  Homolog annotation: Hit_ID=A2Z4D1; Match level="QueryCoverage=76%, HitCoverage=16%, E-value=1e-91, Identity=79%"; Hit description =Putative uncharacterized protein
MVAEAAPFSSSAIWSCHRDEITFDRLHKFWSALSPHARHELLRLDKQTLIEHARKNLYCSRCNGLLLESFTQIVMYGKSLLHEGSCEPRIQEVEAEVQEPSVHPWGGLSTTKDGILTLLDCFINAKSLHVIQNVFDNARAREREREMLYPDACGGGGRGWISPVIPNYGRGHGTRDTCALHTAHLSCDTLVDFWSALGEETRSSLLRMKEEDFIERLMHRAGLWVIQATLSKSVSRPTSIVLHKPEEEFTLSWSPGFPNAFSRLKANRAKKQSPVS

SEQ ID NO: 65927 - protein, 248 aa, Zea mays
  Coding DNA Sequence Number=SeqID_22552
  Homolog annotation: Hit_ID=A2XE49; Match level="QueryCoverage=87%, HitCoverage=18%, E-value=3e-91, Identity=74%"; Hit description =Putative uncharacterized protein
MLTENIPRFDSKRFCRDCRRNVIREFKELKELKRMRREPRCTSWFCVADTTFKCEVFEDAILVDWHQSLLEQDGIYHHFEWAIGTDEGKSDILNFENVGMNGQVHRKGLDLDHFEDYFVTLRAWRLDGRCTEFCVKAHALKGQSCVHRRLIVGDGFVTITKGESIRSFFEYAEEAEEEDEDDVVDRDSNDPDGDIAHPQKHAKSPELAREFLLDAAAVIFKEQEGNLWCLAGNSALSLLCARLVGLGP

SEQ ID NO: 65928 - protein, 722 aa, Zea mays
  Coding DNA Sequence Number=SeqID_22553
  Homolog annotation: Hit_ID=A3C1U6; Match level="QueryCoverage=98%, HitCoverage=60%, E-value=1e-180, Identity=49%"; Hit description =Putative uncharacterized protein
MQQPLAILVLVIEKAFREGTARQNAHSVFVSLALKLLEERVHVACKEIITLEKQTKLLEEEEKEKREEEERRERRRTKEREKKNRRKERLKGKDRDKEKTLVRSKKPDLSPFSLCSQATPSNNESQDVLDLRYSDSEEEDNVVVGEHYPDSSADQSSSKDSDERSNGHECSVTIEFVPSDCDSSFLCDEPKSSRNLRFRRDFPEEKDASYWHEGCCDDSGDTQWQSRERTRNNTRNYNSVFNTNNRTRDRYNPCSCSHQEDYRYFTTATRSSRETKMPRKTVAEKPRLQYRRCYPPDSFAVSNGGRVGGTPNKNPGPKQVWEPMDARKKTGNGNSATGAADGSDQVECSNNISECEKLEAVCDSLVEICSEISAETCKSDTDQPWRQGEKNQSACSDESKCVDKPNCSKDTGRTTNLTTSDSSSCLSEGDRDSSMTSLSVQNVESSSASDSEESSDRNNSSPGDIPAKNVSRTLLEMCAGNGFREYQPKGLNPPNGNQFGFMVAPSQEQMLYQQKVHAPPYSSPFMGFHNHPLAVPTNGYLPYTQPGHFYPASMTPVGYGVAGDQCVDFSMQYRNNIHPYSGPEFGFLPSQPVHKTSVNFHAVPVTPLTPLCSRGMPVATNQERQQSPALFPKLKQAVLVPETVCAGDNTFKQKGDDVDSTPFSLFQFNLPIAPPTLATSKERSGELAPAQIARVQPCSREETNVKEYNIFSGCDGVMFQLN

SEQ ID NO: 65929 - protein, 417 aa, Zea mays
  Coding DNA Sequence Number=SeqID_22554
  Gene Ontology: Mol. function=protein serine/threonine kinase activity; Biological process=protein amino acid phosphorylation
  Homolog annotation: Hit_ID=A2XNU0; Match level="QueryCoverage=71%, HitCoverage=44%, E-value=1e-47, Identity=55%"; Hit description =Putative uncharacterized protein
  Pfam annotation: Domain name=B_lectin; Domain location=123-210; Score= 13.3; E_value=0.00015; Accession=PF01453.15; Description=D-mannose binding lectin
MRSGSCRKEKFAIMEVLRCGFDDLEVRRPSAVTSPLLSAAQKPPGRQKRYALCGEAPGGLVALGCCLFLLPPLLSRGADMPLGSTLSPGNSATWTSPNSTFSLGFTASASSPSLFVAAITYAGGVPVWSAGNGAAVDSWSSLRFSSNGDLQLVNGSGVVLWSSNTGGQNVSAAAVQDSGNLVLKDNPGAATPPRRSGRPWRTSASYNGTSPVCGCPSLNFQLSDPSKPRAGCTRKVELASCPGNSTTLELDNTQFLTYPPEITTEQFFVGITACRLNCLSGGCFFANPAPNFFNNCEPAVAIEHAGCGSITPLTELVEGDSSRKIVDINCLSGGSCVASTALSDGSGLCFLKVSSFVSGYQSAALPSTSFVKVFRGGTTAGDNFRGERRRAATVSTAPGWESSEELTALGRRLYQQH

SEQ ID NO: 65930 - protein, 166 aa, Zea mays
  Coding DNA Sequence Number=SeqID_22555
MGKNNKRKREPTPPSEEFGDSEYLEEEFSSESEGSPAPVPLRESSDDSDDSQGLAAEVWTYIRAVERSGLEGSNESEYSSDEEDSDGGGEDEDDDDDDGDDDGDGNGSGRGSGGGSKVGDGGGSRGSNQGGSSRGSNQGAAAGAAPGAAAAAATGPVARCHWSFRY

SEQ ID NO: 65931 - protein, 23 aa, Zea mays
  Coding DNA Sequence Number=SeqID_22556
MEPVCIHTSSEIGDSTVQHLKVA

SEQ ID NO: 65932 - protein, 371 aa, Zea mays
  Coding DNA Sequence Number=SeqID_22557
  Gene Ontology: Mol. function=adenosine deaminase activity; Cellular component=cellular_component; Biological process=RNA processing
  Homolog annotation: Hit_ID=Q1PFZ4; Match level="QueryCoverage=45%, HitCoverage=61%, E-value=3e-34, Identity=42%"; Hit description =Adenosine-deaminase family/editase family protein
  Pfam annotation: Domain name=A_deamin; Domain location=233-371; Score= -161.6; E_value=0.023; Accession=PF02137.9; Description=Adenosine -deaminase (editase) domain
  Subcellular localization annotation: CTP_CleavageSite=64; ConfidenceScore=5.41e-01
PKSRTPRVGAEAGGLPSSGVFSPEFRAPGGRAERSFAVFPGLSPSPSPWGRVGAEFAVFRVLARVRALGSGGAEFAVFRVLARVRTLGSGGAEFAVFRVLARVRALGSGGAEFAVAPLARPDCLHLQLYADGGYQLRIRRLEALLFTKLLHSFRFSDPAPENSSTPSMLSSSPAPSQEGAAVPSSWAEAASSAALRHYRSLAKKGKPQGRESTVLAAILLSAPQDSHSLTVLSMGTGTKCLGASMLSARGDLVHDAHAEVIARRALLRLVYSEIGRGAPPDWLVASGDAGRWRLRDGHCLHLYITQLPCGVMPVPPSQSDLPRKQLNSMNVEIGFVQRKPGRGDTTSSMSCFDKITRWSVVGIQGNHFHFC

SEQ ID NO: 65933 - protein, 270 aa, Zea mays
  Coding DNA Sequence Number=SeqID_22558
  Gene Ontology: Mol. function=protein kinase activity; Biological process=protein amino acid phosphorylation
  Subcellular localization annotation: CTP_CleavageSite=48; ConfidenceScore=5.52e-01
MPSHLLQQPLPPAAPPSSLLLAHSQHRRHHRFRGGRSSFVALARCPPPATEAPDRIPTLPCSPLLDPARPLRRYSRRTLRRATGGFHPSRLLGSGAASPVFLATFPDASLAAVKTCASAHELHLLASLPESPHLVSLHGYSPGPGSVGGTAERPPLLVFEYMPQGSLQGALFGGGDAAARDGQFLDSQRGDAAAVRSGICGSHALCGESWLGGAVRARAGSSSVVVCRAAWNRGWVVAGASVGRGIPAGCVRATGSAGGRGERGQSTDDS

SEQ ID NO: 65934 - protein, 116 aa, Zea mays
  Coding DNA Sequence Number=SeqID_22559
MAFRSRDTLSEIMSAIEGLKPVREDSLAHIKSAIGEAIKSILEPIPDALAKLSHEILDAAPPPLAELMKPFAQLMAPNNNGNGPSDVHAKGSSSSSSAQVPAEAKNEPKVRPSLGL

SEQ ID NO: 65935 - protein, 112 aa, Zea mays
  Coding DNA Sequence Number=SeqID_22560
MKIVHRDLVRNGPGSVKVLLPLAPPLVLSVRALRLLVGFALFWVAGSRADPTAGIQWVALLLLIRLTVVLRSWCRRRRTTCGTRTTSLPLVTASRPSPYDLVPFRHEVLLAD

SEQ ID NO: 65936 - protein, 15 aa, Zea mays
  Coding DNA Sequence Number=SeqID_22561
MACSCREWLWSYLDD

SEQ ID NO: 65937 - protein, 381 aa, Zea mays
  Coding DNA Sequence Number=SeqID_22562
  Gene Ontology: Mol. function=protein serine/threonine phosphatase activity; Cellular component=protein serine/threonine phosphatase complex; Biological process=protein amino acid dephosphorylation
  Homolog annotation: Hit_ID=Q8S8Z0; Match level="QueryCoverage=72%, HitCoverage=87%, E-value=1e-118, Identity=76%"; Hit description =Protein phosphatase 2C
  Pfam annotation: Domain name=PP2C; Domain location=125-364; Score =256.2; E_value=7.1e-74; Accession=PF00481.12; Description=Protein phosphatase 2C
MEVEPNPAATREDPHPFVLDVLEGSCRCRRARAEGQGTRRKRKRKRKRKREPEAAKSHVSLTSHGTFSKSEKQELGKLRGGKAQKAQNARAGDPSGMGYLSSVIGHPTDGSSVSGGGLRCQNGRFSYGYASSPGKRASMEDFYETKIDCVDGQIVGLFGVFDGHGGAKVAEYVKENLFNNLVSHPKFISDTKVAIDDAYKSTDSEFLESDSSQNQCGSTASTAVLVGDRLFVANVGDSRAIICREGNAIAVSKDHKPDQTDERQRIEDAGGFVMWAGTWRVGGVLAVSRAFGDKLLKQYVVVDPEIREEVVDDTLEFLILASDGLWDVVSNEEAVAMTRSIKDPEEAAKMLLQEAYKRESSDNITCVVVHFLHGQGSSGYA

SEQ ID NO: 65938 - protein, 590 aa, Zea mays
  Coding DNA Sequence Number=SeqID_22563
  Gene Ontology: Mol. function=kinase activity; Cellular component =mitochondrion; Biological process=protein amino acid phosphorylation
  Homolog annotation: Hit_ID=Q2HTV1; Match level="QueryCoverage=100%, HitCoverage=100%, E-value=0.0, Identity=58%"; Hit description =Protein kinase-like
  Pfam annotation: Domain name=ABC1; Domain location=250-376; Score =117.3; E_value=4.4e-32; Accession=PF03109.7; Description=ABC1 family
  Pfam annotation: Domain name=APH; Domain location=264-485; Score= -13.1; E_value=0.054; Accession=PF01636.14; Description =Phosphotransferase enzyme family
  Pfam module annotation: Pfam domain module=ABC1::APH; Domain location= 250-376::264-485
MSRFAHLGKSRKLAETLLVASKPNTAGGQNIASSFAFGLGYSSRAFLHGKVHNGPNTSYMLGRANDSLHWSTGVRKFSILSSCSQNAFQSQLAWKRLVALGSRAPKASPIFSKVACAIGLAVSRSNIAPYLVAFIAGEVMLAQKTSADGEYYPIRERAQDGRIYVTSLIYSAVELVIIIFRSIYLALLFTPSILMAPFAETLGSPAFIKWGQWAATRPDLFPSDLCTELSKLHTKAPAHSFTYTKKTVEKAFGRKLSDIFENFEEDPVASGSVAQVHRAVLRFRYPNRQTKRVTVAVKVRHPGVGDSIRRDFNIINAVAKISRYIPTLNWLRLDESVQQFAVFMMSQVDLAREAAHLSRFIYNFRRWKDLRLTSMGESVSHYVDDLEGHDRIKSALAHIGTHALLKMLLVDNFVHADMHPGNILVRVAQPKNSNNTLKKSRPHVVFLDVGMTAELSSNDRVNLLEFFKAVARRDGRTAAESTLKLSKQQNCPNPKAFIEEVERSFSFWGTAEGDAIHPAECMHQLLEQVRCHKVNIDGNVCTVMVTTLVLEGWQRKLDPDYNVMKTLQTLLFKEDWAKSLQYTIQGLMAP

SEQ ID NO: 65939 - protein, 109 aa, Zea mays
  Coding DNA Sequence Number=SeqID_22564
  Gene Ontology: Cellular component=nucleus; Biological process =translation
  Homolog annotation: Hit_ID=Q8S3N8; Match level="QueryCoverage=38%, HitCoverage=9%, E-value=6e-11, Identity=73%"; Hit description =Putative pelota
  Pfam annotation: Domain name=eRF1_3; Domain location=1-81; Score= -10.9; E_value=0.00082; Accession=PF03465.6; Description=eRF1 domain 3
MQDFFNMFINESARACYGPKHVEFALQQFAIQTLLITDTLFRKIAILLALGSTLLYMEIRLVPTPVYTDKSCGGVGGRYRPAWPFGSVDPVGTYQCAREPVDTDLTGRY

SEQ ID NO: 65940 - protein, 112 aa, Zea mays
  Coding DNA Sequence Number=SeqID_22565
  Gene Ontology: Mol. function=protein binding; Cellular component =nucleus; Biological process=translation
  Homolog annotation: Hit_ID=Q8S3N8; Match level="QueryCoverage=59%, HitCoverage=15%, E-value=1e-27, Identity=92%"; Hit description =Putative pelota
  Pfam annotation: Domain name=eRF1_1; Domain location=8-97; Score= -4.1; E_value=0.00045; Accession=PF03463.6; Description=eRF1 domain 1
MTLTTDQLQRLGAPHWKVLREVASGGRDAERVKLKLEIVVESVDYDKEGSVLRVRGKNITENDHVKIGQFHTLELELKRPFVLRKGKEKKVKEKVDYTPQLSNQSGMVLPYS

SEQ ID NO: 65941 - protein, 224 aa, Zea mays
  Coding DNA Sequence Number=SeqID_22566
  Subcellular localization annotation: CTP_CleavageSite=2; ConfidenceScore=5.31e-01
MSSSSLKRRVFPSSKPPDGGYPPPFRLLVGGTQLHWSWHLSAIVRLQGFSSAGPAVPPCRRSPRMVTVGFWVGKSKPGCNLGPTLSFKDVHHPRWGGSHAEPALYLPRGSAGRPFPWRLGVEAFAGPADGADFDNAGLNDGERRHLQRVGVVGRASGGPSCRRAAAASCAREDHPGFRAPLGRRSCSGVVLLRDGNGFWIMISLIITILIDYEKNKYIGDETRG

SEQ ID NO: 65942 - protein, 186 aa, Zea mays
  Coding DNA Sequence Number=SeqID_22567
  Gene Ontology: Mol. function=aspartic-type endopeptidase activity; Cellular component=lysosome; Biological process=sphingolipid metabolic process
  Homolog annotation: Hit_ID=P42211; Match level="QueryCoverage=23%, HitCoverage=8%, E-value=4e-16, Identity=93%"; Hit description =Aspartic proteinase precursor
MAGRTAPALPPLLLLHARLPRCPFILGSRHGCYHDPTIDIMSKFFKLMVAYSVLEVLRPLYNSPKILEQKFSKIFTNHYIVQHWAVNIFCTMCHKHEMLPVEYQCFIAVFLLVCPNVGKSALFNRIIASLRANQFCERLPSPNGESTVDCHQISKMPNLAFTIANKTFTLTPEQETPYLQFLQCLN

SEQ ID NO: 65943 - protein, 292 aa, Zea mays
  Coding DNA Sequence Number=SeqID_22568
MVAFQGGRPPFKGDSPYLRPQPSWAESSPTRSEVLPLRRGGWVPHVMQAGPEQKKPNHRARCMQPPSGYEHSSAFAQTSGRKGGQPCRRHATAPSGRAPPTSNAPSMGAHAHASCNRRAGRYMQATAPPLAPLPHLLDCGTSTATRGNHAYDPAVPARRDGQYGQKWAGSNGGGRRAGAAVTSSAKLTSHPGAVREPSLTGPGKGDTPKRTLLREGNRLRASLLIRGSKAGPSKGFNSRLRARGLHTHYWSEVRRPAPWKGSTAASGHSGSAPTTDQGFEGWPSKGSQPPQT

SEQ ID NO: 65944 - protein, 166 aa, Zea mays
  Coding DNA Sequence Number=SeqID_22569
MASAHDDLVTYSAKMDLILAQLATINARLDSHDARLAKLEQAWVSPSASTASYLGASEGGLGAGGGGRVKDDGLQPDTPKEEVEAAFYVVVVVPLLQPAFVLVETTICCVVAAVVDVGHLGHHRGVVTRATTPEGATDLRQAQGALCATAAASVIGRSGRRRILLW

SEQ ID NO: 65945 - protein, 154 aa, Zea mays
  Coding DNA Sequence Number=SeqID_22570
MRLIMRYRPVGDDDSDSPGPQHSDSIEQVREWGDTPPSEIGGEAALATGARQSSRPLLDPGRRGGAVEGTEVEGRMAERDRSAVADSPLAVGLGAVPPSSVEGSKSKPSPSLLPPVLFLCTSRGDLELDLDLVTWTSEPCWRKKDRDGVGGRVR

SEQ ID NO: 65946 - protein, 59 aa, Zea mays
  Coding DNA Sequence Number=SeqID_22571
MAGNLRAVITGSRLLGVGLANSGRTAVAGEALRHHGSGLLGSWDEECAVAVRSRMDGSD

SEQ ID NO: 65947 - protein, 171 aa, Zea mays
  Coding DNA Sequence Number=SeqID_22572
  Gene Ontology: Mol. function=diacylglycerol kinase activity; Biological process=activation of protein kinase C
  Homolog annotation: Hit_ID=Q6YW20; Match level="QueryCoverage=68%, HitCoverage=24%, E-value=1e-43, Identity=74%"; Hit description =Putative diacylglycerol kinase variant A
  Subcellular localization annotation: CTP_CleavageSite=74; ConfidenceScore=5.77e-01
MTSTTTQSGLRPRSRSWSDVALSMSSSFSSSSSSPTPLEREPPRSPTPPAAPLVGALIESLSFRGCGFGRAATSAFEKEDLKARAAFPQRLRTAVHAAMRARDPTAGAFALVDRDNDGEGHGTGNPWFDSAVHDDAPESPLVAFVNPRSGGRLGPVLKTRLQELIGEDQVK

SEQ ID NO: 65948 - protein, 34 aa, Zea mays
  Coding DNA Sequence Number=SeqID_22573
MDESEKGDRLHILGEMKAEVITASVAMCTHERGT

SEQ ID NO: 65949 - protein, 120 aa, Zea mays
  Coding DNA Sequence Number=SeqID_22574
  Gene Ontology: Mol. function=hydrolase activity, acting on acid anhydrides, catalyzing transmembrane movement of substances; Cellular component=integral to membrane; Biological process=calcium ion transport
  Homolog annotation: Hit_ID=A7NZ92; Match level="QueryCoverage=50%, HitCoverage=6%, E-value=6e-26, Identity=96%"; Hit description =Chromosome chr6 scaffold_3, whole genome shotgun sequence
MPRNINCELLTDLEPWQSSRYMIDGKRIAEYINRRRKTKYRDYWPARDQLQPIQEKIRYMISSNIGEVASIFLTSALGIPEGLIPVQLLWVNLVTDGPPATALGFNPLDKDIMKKPSSKK

SEQ ID NO: 65950 - protein, 147 aa, Zea mays
  Coding DNA Sequence Number=SeqID_22575
  Gene Ontology: Mol. function=nucleotide binding; Biological process =response to stress
  Homolog annotation: Hit_ID=A7P7D9; Match level="QueryCoverage=36%, HitCoverage=11%, E-value=1e-15, Identity=70%"; Hit description =Chromosome chr9 scaffold_7, whole genome shotgun sequence
  Subcellular localization annotation: CTP_CleavageSite=59; ConfidenceScore=5.07e-01
MVTGQSAVGIGTTVSMAIGGPTVIAATGAQEQRSNRQSDSGPTCWLASSPEAGPGATVGAANYSAFPMLLEQLVTPLITQLWDRRSSVVKQIGDPVEARYKESTERGSSVDQLVYCINSFREAALSNDQKFGHIDISKKRKVSNSWK

SEQ ID NO: 65951 - protein, 53 aa, Zea mays
  Coding DNA Sequence Number=SeqID_22576
MGLGVCGSLCQDGYEIDDSGYDYGAGCQHCNHCSGEDEAVEGDFQEFQDYDEF

SEQ ID NO: 65952 - protein, 580 aa, Zea mays
  Coding DNA Sequence Number=SeqID_22577
  Gene Ontology: Mol. function=hydrolase activity, hydrolyzing O -glycosyl compounds; Cellular component=extracellular region; Biological process=carbohydrate metabolic process
  Homolog annotation: Hit_ID=O81189; Match level="QueryCoverage=95%, HitCoverage=95%, E-value=0.0, Identity=93%"; Hit description =Invertase
  Pfam annotation: Domain name=Glyco_hydro_32C; Domain location=420 -532; Score=138.8; E_value=1.5e-38; Accession=PF08244.3; Description =Glycosyl hydrolases family 32 C termi
  Pfam annotation: Domain name=Glyco_hydro_32N; Domain location=58-379; Score=612.1; E_value=5.3e-181; Accession=PF00251.11; Description =Glycosyl hydrolases family 32 N termi
  Pfam module annotation: Pfam domain module=Glyco_hydro_32C::Glyco _hydro_32N; Domain location=420-532::58-379
MRALVVVSFASACLLLLLQLAGASHVVYNYKDLEAEAAAATDQVPPSIVNPLLRTGYHFQPPKNWINAPMYYKGWYHFFYQYNPKGAVWGNIVWAHSVSRDLINWVALEPALRPSIPGDRYGCWSGSATVLPDGGGPVIMYTGVDHPDINYQVQNVAYPKNVSDPLLREWVKPSHNPVIVPEGGINATQFRDPTTAWRGPGPEQWRLLVGSAAGSSPRGVAYVYRSRDFRRWRRVRRPLHSAATGMWECPDFYPVSKGGAPRAGLETSVPPGPRVKHVLKNSLDLRRYDYYTVGTYHPRAERYVPDDPAGDEHRLRYDYGNFYASKTFYDPAKRRRILWGWANESDSAADDVAKGWAGIQAIPRTVWLDPSGKQLLQWPIEEVEALREKSVTLKNRLIKAGHHVEVTGIQTAQADVEVSFEVSPAALAGAETLDPALAYDAEKLCGVKRADVRGGVGPFGARTAVFFRVFKPAAGSDKPVVLMCTDPTKSSLNPNLYRPTFAGFVDTDISNGKISLRSLIDRSVVESFGAGGKTCILSRVYPSLAIGKDARLYVFNNGRAHVKVSRLTAWEMKKPVMNGA

SEQ ID NO: 65953 - protein, 372 aa, Zea mays
  Coding DNA Sequence Number=SeqID_22578
MNKNTGIQSAITNGTPVPPPQVRTTPLDGGGPAEQQKTDERRAVARSSSSDDDDFCSGGPNSGSTDLRADAAAKRPPPMPKLVRQGRAEGRRVGGRSVGGPGYLVGGRTSSSCRGRRRRRERLRSHSRPRARHGAAASATDDDRPSLRSLSEGAGHHPRRGRPQLGTLPSPALVMKILEAEGGAEAAARLAFPHHQAGDQRAKGAAAMQAACNRAKWARVSDSRHAQHGGPRPTRHATGAPDASCKQLHRRSRHYRASSTAEPIPRLEATQRTTQQRQPGATVNAAKNGPAVTAVAGGQEQQSRRQPSSRPIWGQRENPLSRREDNAPVFRSSNGSRMRNDRPANHSPRRINSAAGQAAPQAEEAGDTSPSP

SEQ ID NO: 65954 - protein, 294 aa, Zea mays
  Coding DNA Sequence Number=SeqID_22579
MAPGEAVELGGCRNNSIAADNAPGDVLDGVRDDVKGKAQTRVSTGTLLIPGFSSFRDPARAPFPAWLGDVTWVRRLHAIEEARFSITMMTKPDARKFACAKKETIHLGLTVSDHICMRGTRESTEGERGLTGGAGDEDDNGAAALLNPDGWRSCGCLGWVPARRDRVGREKREDARDCDAMEGEGRCLREPATVMGGEGCILGGERSCDAGGRAGLVAKKRRADCGRRAVRGAGGEAGDSREIEERLRRRGAGGGGFRGMGGAGFVVLEVQAGVRVGFAMGEARDSRCLKRGKS

SEQ ID NO: 65955 - protein, 163 aa, Zea mays
  Coding DNA Sequence Number=SeqID_22580
MRAKNWKTVQGLTRSTCAGGFLNSGERDWAIPVTRVPRSSLSKSHGFTRKLTEGLDRTEEDGRGAGHGGCSRAALAGRGEVAGVNGWLGQVRRGGNPGVDTLSNTWGVTVAVPSTLEMAVILGVVEASKCLEVPASTQHRSTMAMTLELVLATVPILVPASHF

SEQ ID NO: 65956 - protein, 144 aa, Zea mays
  Coding DNA Sequence Number=SeqID_22581
  Homolog annotation: Hit_ID=Q9LGH0; Match level="QueryCoverage=93%, HitCoverage=38%, E-value=1e-22, Identity=40%"; Hit description=NAM -like protein-like
MALFKRKDKDNKSFQFMHCWNVLRNQPKWNEKRKHIEAIKQVPNKKMKSNLNSSPGNAITIVVDSTNKDVDVNASLEANAPKRPNGTKKAKEAVRCGDAYIEASDYFWAKKEVDAEKERNKQERFNQSYELEKERLLIEQVEST

SEQ ID NO: 65957 - protein, 80 aa, Zea mays
  Coding DNA Sequence Number=SeqID_22582
MGDPVSGRMRDKVHARLHSDKVNFTYVRPLGGILGKLGQTLAKWLGTGVYFFASKFGGHKWGSGGYKSTEFLLSILGMVL

SEQ ID NO: 65958 - protein, 60 aa, Zea mays
  Coding DNA Sequence Number=SeqID_22583
MTIAGMAASRGRRGRRSQLGAWATQPGLGAGTAGGGVGEGGWGRGRRGPHVTKPVVLSLF

SEQ ID NO: 65959 - protein, 64 aa, Zea mays
  Coding DNA Sequence Number=SeqID_22584
MASTSKEYFQLEQWWDLTAKLPVMLFSSLGTETILRMEVCKSRLGLGTGLMIEDPLTGHMPRHG

SEQ ID NO: 65960 - protein, 70 aa, Zea mays; identical to SEQ ID NO: 49003
  Coding DNA Sequence Number=SeqID_22585

SEQ ID NO: 65961 - protein, 120 aa, Zea mays
  Coding DNA Sequence Number=SeqID_22586
MGLADHWPPWPQHQQQPPPLSNMNQQQLLLDLDGRLEDGNISCSSSNNAHARQRGQCDILALVDGDIRTQGFIELIEYSYQQGASFFRSLSRKNLQVKRAWLGEILGWVTDREVFAGAHE

SEQ ID NO: 65962 - protein, 61 aa, Zea mays
  Coding DNA Sequence Number=SeqID_22587
MSQSEFVILNKLILRGATEGKGTFGFRIKSIHEEKSMIVTKVAVASKLCARELRLNRGKRN

SEQ ID NO: 65963 - protein, 144 aa, Zea mays
  Coding DNA Sequence Number=SeqID_22588
MERREEWLTTEDERRRGRAVEATPRHGNNGSGVNEGEVGERDCWATWEGEGSRGRRDKRGRRARGPSRQRQRRPNPSACLRWWPSERASALGQRRGVGRGRGAPGGPRGAGPRGSVLGRGGAEGASWAARRSGPKGGRGDDRLG

SEQ ID NO: 65964 - protein, 144 aa, Zea mays
  Coding DNA Sequence Number=SeqID_22589
MAPAVGAEAEAAREVPVTDGITATIRASGLRAGGGEPLVSLLLLRRPSPMEWGYSPVDYLNRFTKHESPRVKVTSEGPTPELTSRGLGLGWRPWNMVGRGPRGNRPSRLLGPDSRRSPRTASPSEAGSVLAEGVVDAEGATAPF

SEQ ID NO: 65965 - protein, 179 aa, Zea mays
  Coding DNA Sequence Number=SeqID_22590
  Gene Ontology: Mol. function=structural constituent of nuclear pore; Cellular component=nuclear pore; Biological process=nucleocytoplasmic transport
  Homolog annotation: Hit_ID=A3BB16; Match level="QueryCoverage=42%, HitCoverage=5%, E-value=9e-16, Identity=56%"; Hit description =Putative uncharacterized protein
MRLGGAPPSLGEQEQRCMVVDERRQDGHCQEHNVDEQAICAVGLARAKPGIFIEAIQYLLVLATPVEVLANANGHFAYYNIEAVPNSFAYASNVIEPSLDLESISNRRPQIRTPTFDLSLRAPLLSRLLFSIYSCRSPQTYKRHSNGPGGGGQGAFYAPLGEEADGEIWVGSSIKEGLE

SEQ ID NO: 65966 - protein, 99 aa, Zea mays
  Coding DNA Sequence Number=SeqID_22591
MAKLAFHYGVILNFSDFRGSGGARRIPDAVRGLSSPDPNAIRGLSSPDPGLVGAGVGCGGRPHGSGGGSELGMIVAVGDRPHSPQVARGSELWKKRGGS

SEQ ID NO: 65967 - protein, 146 aa, Zea mays
  Coding DNA Sequence Number=SeqID_22592
MENCDATMFTSDEPSVPITVEKLGRGSMAYDQRQVCSDTHHRPGRARDDMREPQGDLRRGLHAKARSENADKILDVENGGSGTSVGELTHVADREMRRARVMKLGVKLLLWRQGSLTTHLNAGIKEHAVAMSGITLRRGLEVSTAA

SEQ ID NO: 65968 - protein, 180 aa, Zea mays
  Coding DNA Sequence Number=SeqID_22593
MKFADEDMMLNSMDASLVIPPVIFLWMDVLARCTLMNKGAKGSAQTNKKIKLGFTKRGAKETEVCPGLAHRTVSDAPGWINFKLFNFGFLESHSAIIHRTVRCSTGLSGAPSEATTTAPTVVCKSEQWREQCADSLRKVRAAPEGASNSEYCLSGAAPDCPGPHEDRAPTVETVRTLMVG

SEQ ID NO: 65969 - protein, 243 aa, Zea mays
  Coding DNA Sequence Number=SeqID_22594
  Homolog annotation: Hit_ID=Q6QP51; Match level="QueryCoverage=27%, HitCoverage=30%, E-value=2e-16, Identity=66%"; Hit description =Putative growth-regulating factor 1
MAEAQATLPRYPRTFPRPTGTIYNRIPPEGGIEPSDPVEGVWVRRITRRPHEGTTRPAEASRKALRPQRSQTTPPRPQGLHPAGALARTHQNKVKPRKAGPLTKNAAKASKRVPTLPSRLRGYCQENSAARPAPTAVPTTQAKLTTSHDQPPSSASGATGSSASPDLRLQPREEVSASPDLRLQPRKEVSASPDPGSQPRSRSREESRPRPTLASASGEVPASPDLGLEPTAPQGIHHYPIPS

SEQ ID NO: 65970 - protein, 71 aa, Zea mays
  Coding DNA Sequence Number=SeqID_22595
MARRRGDPRVATGVGPAYPIPFRAGAFVKEPSGFCGINPPSCAGVVCALGILTPSPLGFSGIEAQSSEHLN

SEQ ID NO: 65971 - protein, 187 aa, Zea mays
  Coding DNA Sequence Number=SeqID_22596
MLTDWSTAQSRDPTIRLPLRFGRPVDEFNRRKEGFEQAAAGCDLGVGEFLALGYGETRRPLDAALKWRKRLRAEIRLRAGKVNRIRADGGSGGRGIDWRMRRPRFLAPERKQRTQIRGIREETMDAIFGIREEAADAGRIGETDEAGARGRDSWHQRDAVRQTGLGAFGDWQNRAPSCCERLHYVLK

SEQ ID NO: 65972 - protein, 144 aa, Zea mays
  Coding DNA Sequence Number=SeqID_22597
  Homolog annotation: Hit_ID=Q2QYH0; Match level="QueryCoverage=92%, HitCoverage=28%, E-value=1e-20, Identity=48%"; Hit description =Expressed protein
MEKVMVLVAGVSKMTDLGSGSAAKPERKSWDDPTHTTATPSMTKSKAKVDKVTILRTQEAMSRRLSDAMTKQFGNDDSFVEERSKPHYNKFSEICASARVSNPFPNVDLFLVVCEDALKWKTIAAKSVATNGAEEEELLEKKST

SEQ ID NO: 65973 - protein, 53 aa, Zea mays
  Coding DNA Sequence Number=SeqID_22598
METSSVPAAATEAGWYVLGPNQEGVGPYALAELRVSLEGGTSWDVGPKEQQIF

SEQ ID NO: 65974 - protein, 205 aa, Zea mays
  Coding DNA Sequence Number=SeqID_22599
MAVAGRRKQRSSRQPSSRPLLGQRENPLPQREDGTEKGDTPKGILLHEGSGPRAPLLIRGSKAGPSEGFNSRLRALGLRAHYWSEVRRPAPRKGSTAASGHSGSAPTTDQGFVGWPSKGSTTASDAERGMTLAKSGLGRHRKLRLARPQGSDSASAPEDDELRLARPQGSDSASALEDDELCLAQPQGSDSASAPEDDELRLARP

SEQ ID NO: 65975 - protein, 138 aa, Zea mays
  Coding DNA Sequence Number=SeqID_22600
MVGRSKPGCGLCPALSFKDLHHPCWGGGRAEPEPAFAWAGVPLLPPTSGGGNHPLALRRRHPPAMPGKDGSEDLPVRFGVAGARWCGVGGQVDAAVGAEVVAAGEGFSADEIVGTICAPGLRLFGINSWFSSPARGHE

SEQ ID NO: 65976 - protein, 104 aa, Zea mays
  Coding DNA Sequence Number=SeqID_22601
MAEYLHTLDNQFDDLFSHYTYLNSRVESLERQIKELKEEKAALQDNIKMAEGEEANTHEAYRTLKMDYARRLKKLAPSRRSERVSRAKDAKPSQRKKPHQHYPP

SEQ ID NO: 65977 - protein, 32 aa, Zea mays; identical to SEQ ID NO: 50459
  Coding DNA Sequence Number=SeqID_22602

SEQ ID NO: 65978 - protein, 183 aa, Zea mays
  Coding DNA Sequence Number=SeqID_22603
  Gene Ontology: Mol. function=DNA binding; Cellular component=nucleus; Biological process=regulation of transcription
  Homolog annotation: Hit_ID=Q84U76; Match level="QueryCoverage=87%, HitCoverage=43%, E-value=4e-10, Identity=33%"; Hit description=R2R3 Myb transcription factor MYB-IF35
MALKPGGRKGSESTRRRAADFCDGVAIDINLSKPPGGGKRHDGWASRGTVVTATKEKKVIETSRGSISYACVSPCCAITLELFTTRLAEPEDVCLPALYLSAGSVKISLCPGVLAKACSELLAEGVKIQAEVVTEEESTPVAADQVEEPSNCAKVEHRSSSDPDGTSSPELGSPPFAVVDWGL

SEQ ID NO: 65979 - protein, 222 aa, Zea mays
  Coding DNA Sequence Number=SeqID_22604
MALPEGTRRRSYVQPKGCPMGHGGRCRRGSRVGYRSCLLVSTAASPLAFSHRGGRADRPGQHCSWWSPNPGAQPSPIIATSSSPRIALPALSDPGPGECHGTSPFILKRSEGEEMEAEKWHLIEAASDRVDRRLEIVDRILNNFREAVSIAHSSMTRDLLPHGQRECELSMLHADADCLRSEAACLRAGCLEARSDANRIWGEISLLQRDLREANLRAEEAE

SEQ ID NO: 65980 - protein, 188 aa, Zea mays
  Coding DNA Sequence Number=SeqID_22605
MTLPPHLSGRWSLRGCLPLHLSQRCPLHHNRASRLLEETLTETETMTPVAVRATARSARRSRSRRDGSLDPSLMKLLAADGLDLKYYPHRSTSSAGGVIVSPVGEGNPRLSSMVNLTAVLNTELDHALDELGRVRAKVVELRAECAACHYLDGGSPAPIGIQHPYRSPPCGRFNYGTPDCRTRIDLDP

SEQ ID NO: 65981 - protein, 245 aa, Zea mays
  Coding DNA Sequence Number=SeqID_22606
  Subcellular localization annotation: CTP_CleavageSite=22; ConfidenceScore=5.26e-01
MQAACNHAKWAHPFDSNAPSMEAQARTSCNRRAGCYVRATAPPLAPLPRLLDCGTSTATRGNPAYDPTVPARRIGHGSVSCGRRRDGQYCQKWAGSNGGGRRAKAAVMSSAKLTSHPGTTREPSLTDRRHLWQEKRATLRLRHNDRVKKGTGKGGYPKRDPSPRRKRAPSPLLIRGSKAGPSKGFNSRLRALGLRAHYWSEVQRSAPRKGSTTASGHSGSAPTTDQGFVGWPSKGSQPPQTQSEG

SEQ ID NO: 65982 - protein, 294 aa, Zea mays
  Coding DNA Sequence Number=SeqID_22607
  Homolog annotation: Hit_ID=A2XFR6; Match level="QueryCoverage=48%, HitCoverage=46%, E-value=6e-20, Identity=37%"; Hit description =Putative uncharacterized protein
MGTYSWLSWDIWDTLIMEHGVILEDSLEELLPTPTPLTESLAFTARSSASTPLAPVVQAPAPGGDDPDDSGDDDEDDDDEEDEEENVNEEADGVQQDYFMGLGPVTEHYTSMFETWHFPNLLQDVLHALGTYVRPLYETRRVCKLPRACYYITRIHVRVMDAGDRGFRTLSAHESLAPLSTYAASPHLRRQQLHDTKYMHLPLRISGGSQTSIVLGGAGEDRLNTLAGVVAGLNTNLDLSRVHLELEDSHARIAALEAQLQGRDPPEAQVPTMALSPPRKRIRYGEPGSITKLL

SEQ ID NO: 65983 - protein, 145 aa, Zea mays
  Coding DNA Sequence Number=SeqID_22608
MEVGEWKWDGRAGAVVVVGVVASLRSTAYNALAPVVDDEGNSGDEGHGGISAGGSQHERRARGLEVWAGLQGRDLGFYRERRGGGERGEEEARPFSARGGYQSGLGSGASQAARTSRRRHGLPCQPSGGGAWPGKRKGQSGSACK

SEQ ID NO: 65984 - protein, 320 aa, Zea mays
  Coding DNA Sequence Number=SeqID_22609
  Homolog annotation: Hit_ID=Q6J9V9; Match level="QueryCoverage=36%, HitCoverage=31%, E-value=3e-16, Identity=47%"; Hit description =Putative uncharacterized protein
MNTLQGPPPTTRGLGPTQHASWPRTEEAKPPRAERLTAQRLQALLHFRPNQRVKGRTAVQAACNCTTKMHPFDFDASNMEAQTHMSCNQRAGYYVRKTAPPLAPVPRLLDCGTGAATRGNPAHGPTVPARHIGHGSVSRGRRRDDRYGQKWAGSNGGGTTRPIALTPRQGRRHLWQAKRATLHLRHNDRVKKGTGKGDTPKGILLCEGSGPRALLLIKGSKDGPSEGFDSRLRALGLHAHYWSVVRRLAPRKGSTAASGHSGSAPTTDQGFEGWPPEGFDSRLRTRRARDDSGYVRCMTEARATLPRYPRTFPRLAGAIL

SEQ ID NO: 65985 - protein, 337 aa, Zea mays
  Coding DNA Sequence Number=SeqID_22610
MGSARVAFVLLWEERNLVEVGTFQPSLDFKDFHHAARLHPLTNGHPRRFKDLHHPCWGGGRDEPELYPPYGPAGHLLLQHSGEKALTGLAEGADFDNVGPIGRKRRQLQHAWFAGSAGSGTAFGATSHRWAECGYLPAVRAAIAPRAPRDRPRRRALLGQCSRSWAVLPSLRHDASTRRSVLARLGGLEWGSAGGQLEKASSPTRSSVPSALRASSSLALIACPRPSSGDVGEGLVAAASALRSSLLLFGRPERRSLSLLQWPTASHPELVVPQALRCGGCSYPREWNWSSVCNGTLSAGKPRPLYDEPEPEAAVSAWTKAESAREEASSAQEQGTS

SEQ ID NO: 65986 - protein, 145 aa, Zea mays
  Coding DNA Sequence Number=SeqID_22611
  Subcellular localization annotation: CTP_CleavageSite=65; ConfidenceScore=5.08e-01
MAINGANTGHFFLSRVPLFSTSLYKSQGDALGALPKPLALAPFLFGCEPPAETPSCPSSPTTGAKASYAVERSEATTLMTTTAPAWPSHFHSPSPLFADLHLPVRTYCSKRVMKKTLMEILMNTESNDVPVIFPWEITHVISAIL

SEQ ID NO: 65987 - protein, 213 aa, Zea mays
  Coding DNA Sequence Number=SeqID_22612
MGEGIVAAASALRPLLLQFGHPERRSLSLLLERATESLDSVGLAVRGFSCLVKGNPRPLFDEPKPEAAVSAWTEAELARKEDLVGRSLAGSSTGGTDAGVESPMPRAGLISSRDSWLRLRGGRPSRLLEPDSWRRPWWQWPGRGADVVLRSGDPPTASPSEARSDLAEGVVDAEGAAAPFNCQGPSLQDRESLGSVSLGCLRVLRRFKDPLSK

SEQ ID NO: 65988 - protein, 45 aa, Zea mays
  Coding DNA Sequence Number=SeqID_22613
  Homolog annotation: Hit_ID=O24587; Match level="QueryCoverage=60%, HitCoverage=2%, E-value=4e-07, Identity=96%"; Hit description=Pol
MNMYLKKRGMIKGEHRKNRVEEALQDPDWVLAMQEELNNFKRNEV

SEQ ID NO: 65989 - protein, 172 aa, Zea mays
  Coding DNA Sequence Number=SeqID_22614
MKATKEAGRRWRMRHVQEETSLREWGVKLQDLLLATGAYHGSSVAFGQMVPHFDEIDDVMITKSFAAGRSDDELDSIEEHAHPHARSIVGRVDEIVIAVLEPVSPRAQDLCHDEWSLPQLGELMLVLGRHHSSQHQVTDVELSTTNLSVMVASQILLVFGKPDDDYVACLIG

SEQ ID NO: 65990 - protein, 219 aa, Zea mays
  Coding DNA Sequence Number=SeqID_22615
MSPLDFHVVPNLVSEALKQATLVCGPDFLLPEGHGDVAERSEGGDEGGRMLVGYFHGDLMIARVGVQKGKKLAPRSGVYYLVDAWERKRIFGTCLVKACVVVSHRPPPVPLFNKYMIHNPRRVVYFPYEPYYQELGDLFLEGLALFFVEAAKLLGEWPSHRLDVLGVLSDFCWDPQHVNEFPGKDITVGLEEVDDRTFLFVKEHYPNVSHPVLGAKPNA

SEQ ID NO: 65991 - protein, 40 aa, Zea mays
  Coding DNA Sequence Number=SeqID_22616
MGHEECPSGRGVTLHKIVTAIGGGVSVAKAQRLWKAVVGL

SEQ ID NO: 65992 - protein, 288 aa, Zea mays
  Coding DNA Sequence Number=SeqID_22617
MDRAELGRSVRAQGSRDAQRLILTSTSFDKNTGAIHQTSKEPRQGGRHAGEDGKAPKELRSRDRAPWSASEQRETRGGATRLGAMEAEQVKQCAAPGASRAGRHGRGRSELGGSKAWREGSQVPAMGDGAELEQEEGGATLGERAVEQGPDDEHSCDPASRGRNQGRAGIWVRGHEHEVASPELGWKGMREGIRAGVIDTQREPLGKGVGRGRGPTSRGEREGLEWSPRHDHGREMGRRKVCAPWRRAVGAGGWENRGCAQLEEQIALPWTTSPELGPSPFAVKDRGL

SEQ ID NO: 65993 - protein, 393 aa, Zea mays
  Coding DNA Sequence Number=SeqID_22618
  Gene Ontology: Mol. function=hydrolase activity, acting on glycosyl bonds; Cellular component=extracellular region; Biological process =cell wall organization and biogenesis
  Homolog annotation: Hit_ID=A2WQP9; Match level="QueryCoverage=99%, HitCoverage=100%, E-value=1e-121, Identity=53%"; Hit description =Putative uncharacterized protein
  Pfam annotation: Domain name=Glyco_hydro_28; Domain location=88-391; Score=297.9; E_value=2e-86; Accession=PF00295.8; Description =Glycosyl hydrolases family 28
MAASTNNTLRVLFTLMVVCAAVCTAKRTVAKAGDLAPAPAPLGAGGATAAPEGAARASRTFDISKFGATSDGKTDSTQAVQDTWTSACGAMGDATMLIPKGDYLVGPLYFSGPCMGDITIQLDGILLGSNDLAKYTASWIQVSHVNNIVINGSGTLDGQGTAVYTKSKTDVVKAMPNTLVLFYVTNGTVSGIKLLNSKFFHINIDTSKDITVKDVNITAPADVEITDGVHVGGSSNGISVGCLGRYKDEKDVSDVTVRDCVLRNTTNGVRIKSYEDAESVLTASHLTFENIRMEEVANPIIIDQYFCPQKVCPGKRSNSSHVSIKNVTFRNISGTSSTPEAVSLLCSETQPCSGVSLIDVNVEYAGKNNKTMAVCSNAKGTAKGSLQALDCLV

SEQ ID NO: 65994 - protein, 60 aa, Zea mays
  Coding DNA Sequence Number=SeqID_22619
MAMEMLMKPRLVILDEPTVGLDSASTLLRLFVGAVTQDIPMMIVSELHEEVLLGSDPDKG

SEQ ID NO: 65995 - protein, 225 aa, Zea mays
  Coding DNA Sequence Number=SeqID_22620
  Gene Ontology: Mol. function=protein-tyrosine kinase activity; Biological process=protein amino acid phosphorylation
  Homolog annotation: Hit_ID=A7QIW3; Match level="QueryCoverage=20%, HitCoverage=9%, E-value=5e-11, Identity=72%"; Hit description =Chromosome chr2 scaffold_105, whole genome shotgun sequence
  Subcellular localization annotation: CTP_CleavageSite=53; ConfidenceScore=5.59e-01
MSVPRAPSPNLCNFTFWFTCNHHVHGGKRRQRRGVNGKSSSTRQMTRRHTTCLCSKGSAFGQLRLAASGFGMENIVYEHGEKEPNVVYKGKLDAQRHIVVKLSNHSAWAKKKANAQSHIVPGIPFAFFFTLSNYVHLVELLKYRDAAKMVAVETTQETAMAEILVRCLRNKCLCGIVGTNASCPAPPDVVEVRRLQSHRVQGRRRDDWCHCPEESPLRFNETFFA

SEQ ID NO: 65996 - protein, 298 aa, Zea mays
  Coding DNA Sequence Number=SeqID_22621
MNVCELTLAVSQPPQVKNRYSRMRRMEDAVMSSLPNRKLHVARHLVSVVYGGDRGSTSDPSGHAVLRPALSFVGVLYSLLSGPAASNPSAEVASVRPALSRALGNRCHIRSASPWTPYATPAIARYPPLPASPALLQPQPLPLLRCHAPSQYKSQLRFLSSLSSSSVPTSSDAPSDGRGGRDGEEDGAKSGGHVDYLEMSDEELMEQCDMGTFKASGPGASDALADAHGAFLEALLDLRRGHAALWLCDTAGAQRHAESDLVRLVSPARPGVRLPQAAVPVAPASERGIALPVGHRWR

SEQ ID NO: 65997 - protein, 177 aa, Zea mays
  Coding DNA Sequence Number=SeqID_22622
MSTTASRGARMSEAELGRARPLSPVRSRAVGHDFHGSRDRDARRTKEGTCAIASRRQNAGQGGLRNSAERCEQRKERTGKHMAAMGTSLTRGATDEPKPSARKNEGDEDAPVREHPRAGRWSSRMRLPWARNEPRELGAVQWSSGTTAEQERAEQRASRTSWWSAAQRERSRGTLVG

SEQ ID NO: 65998 - protein, 98 aa, Zea mays
  Coding DNA Sequence Number=SeqID_22623
  Gene Ontology: Mol. function=carboxyl- or carbamoyltransferase activity; Cellular component=ornithine carbamoyltransferase complex; Biological process=amino acid metabolic process
  Homolog annotation: Hit_ID=Q8SA97; Match level="QueryCoverage=100%, HitCoverage=23%, E-value=2e-15, Identity=44%"; Hit description =Ornithine carbamoyltransferase
MTPPVDVAGLRPRLGDVEAPPKPRLSLSSVAEVESEPLGRARRRPSAEARAECEPWGSSEADPSPSPGSGGAEFAVFRDLARVRALGRAERSSSSSGT

SEQ ID NO: 65999 - protein, 372 aa, Zea mays
  Coding DNA Sequence Number=SeqID_22624
MQPGCTPPPAVTQDGDLQFDGGGKQTGPRPLPLPQPQGFSSPGLGRGVCRVGVGPCVGGGPLLPSVIGGKGGLLSVALAAAACLALGRRWLRSPLSAPASATAAGRGSSADEIARAAQGPTSNSTAFCPSLPHEFGHGRGPPGSSIRPEVIAAAVRPPGAEVVVIATAGAGDGAPFVGLLLLRRAPPIEWGYSPVGCLNRFTKRGSPRVKVTSEESLGSVSLVVRGFPCLVRGTPRPLFDEPRPGVAVSARTEAELARKEDLVGRSLAGSSVSGIDAGNKLPRPRAGLMSSEDSWLRPRGDRPSRLLGPDSRRRPWRRWLGLGDDVVLQSGDPWIVSPSEARSALAEGVVDAEGAAAPFKRQDPSLQDRIIL

SEQ ID NO: 66000 - protein, 167 aa, Zea mays
  Coding DNA Sequence Number=SeqID_22625
  Gene Ontology: Mol. function=small conjugating protein ligase activity; Cellular component=cytoplasm; Biological process =regulation of protein metabolic process
  Homolog annotation: Hit_ID=A2Z7Y7; Match level="QueryCoverage=74%, HitCoverage=70%, E-value=4e-64, Identity=87%"; Hit description =Ubiquitin carrier protein
  Pfam annotation: Domain name=UQ_con; Domain location=37-165; Score =182.0; E_value=1.5e-51; Accession=PF00179.17; Description=Ubiquitin -conjugating enzyme
MLDLSWSVFQFCLTVFCLLFFLIWPFLPAFLVYRRRRMMSDYKVEMVNDGMQEFFVEFKGPAESIYQGGVWKVRVELPDAYPYKSPSIGFINKIYHPNVDEMSGSVCLDVINQTWSPMFDLVNVFEVFLPQLLLYPNPSDPLNGEAAALMMRDRPVYEQKGKGTVVH

SEQ ID NO: 66001 - protein, 97 aa, Zea mays
  Coding DNA Sequence Number=SeqID_22626
  Subcellular localization annotation: CTP_CleavageSite=25; ConfidenceScore=5.34e-01
MASFNDRAGAASAPKLVLPITGWVRAQNQPTKSKRKEAQRRVHMLECRDPSSSQSGPTYQSPLPGDSAPGISSYDAMEEKLPIKRDPLFILGRLGTS

SEQ ID NO: 66002 - protein, 366 aa, Zea mays
  Coding DNA Sequence Number=SeqID_22627
MSRLEATLRMDQQCQPSTSVMGQSAAREGTTVDMAKSGPAVMSAAGGRKQQSNRLQAHVPSWDSERALSHDMKTTRPCSVPRMARTRTTAAPRTTRPVALTLRQDRRHLWQAKQATLHLRHDDRVKKGTRKGDTPKGILLREGNGPRALLLIRGSKAGPSEGFDRRLRALGLRAHYWSGVRRLAPRKGSTAASGHSGSAPTTDQGFVGWPPKGSTAASEHAERGMTLGTSDTWLRLGLRSRGTLGHFRDPQERFCNGIPSEGGMEPSDPIKRTGSGKSPAAQSCKGLMGAIQVKAPSAQGTRSRLARAQPWAKAADPGGFTSHPRVPSSNGRTFSSPEAQASWRSNLGQIATPTDRIAGAFNARID

SEQ ID NO: 66003 - protein, 254 aa, Zea mays
  Coding DNA Sequence Number=SeqID_22628
  Subcellular localization annotation: CTP_CleavageSite=41; ConfidenceScore=5.57e-01
MSSHSPHASRPPTFRAPGWGAPESLSSCRRWRNATSRKLVPFSHRSASRIFIRWPGCIPSPVVTQDGDHQFDGGEKQAGLRPLPRLQLQGCSSSVLGRGSAPSWGGGESLGSVGLVARGFSCLVKETLGRSAMSRSRRQRCQRGQRQGWLQKKLRWPEPGWAVHWPDQRRSRVAEAMSRADVLGGQLPEATERPVEPSARAGFPDETLTAMAQAWCRQVPLRWRSSDRVAVRGRVGFRRRWSRRRGCCCSPTDV

SEQ ID NO: 66004 - protein, 167 aa, Zea mays
  Coding DNA Sequence Number=SeqID_22629
  Gene Ontology: Mol. function=small conjugating protein ligase activity; Cellular component=cytoplasm; Biological process =regulation of protein metabolic process
  Homolog annotation: Hit_ID=A2Z7Y7; Match level="QueryCoverage=74%, HitCoverage=70%, E-value=6e-65, Identity=88%"; Hit description =Ubiquitin carrier protein
  Pfam annotation: Domain name=UQ_con; Domain location=37-165; Score =186.9; E_value=5.2e-53; Accession=PF00179.17; Description=Ubiquitin -conjugating enzyme
MLDLSWSVFQFCLTVFCLLFFLIWPFLPAFLVYRRRRMMSDYKVEMVNDGMQEFFVEFKGPAESIYQGGVWKVRVELPDAYPYKSPSIGFINKIYHPNVDEMSGSVCLDVINQTWSPMFDLVNVFEVFLPQLLLYPNPSDPLNGEAAALMMRDRPVYEQKVKGTVVH

SEQ ID NO: 66005 - protein, 123 aa, Zea mays
  Coding DNA Sequence Number=SeqID_22630
MAYVVLEDALLQNPQPAVLQSLSDDPKTAHNGAHPCSPFDTFASNFSFWLHSRVLCILRYDPRWRDKDVSEGNQLLIGGKGGEEAARRETPEEKRKRLEELDALLEGAGRAHDAASNATSSSG

SEQ ID NO: 66006 - protein, 149 aa, Zea mays
  Coding DNA Sequence Number=SeqID_22631
MTRFERRRRHGPRQRLEPDGRTCPYFHFPPARGFNSFPTPARVSSSVRGTAALPFRSPGGSKQHIGDLPALPDPTRVSVQHSDKEKPRNPTSAVAPETIGKPVAVTTHWRGACPNQTLPMWNHACVLGNGNGSRRVLLGVKIRDSSEAH

SEQ ID NO: 66007 - protein, 73 aa, Zea mays
  Coding DNA Sequence Number=SeqID_22632
MSEPRMHSPDIRARFKTSTGGVPVRSGGRQYTHTAAYTVLIITRTLPVKLPQHADTTQTADISAQGDCTGDQH

SEQ ID NO: 66008 - protein, 684 aa, Zea mays
  Coding DNA Sequence Number=SeqID_22633
MDKDRQGAAQKRQAAIRIVEARPKRQKRESAKAAAPGGGKPPLAAKSGVPASSKAPEAAAGAGGSKPAKAVPPLSEVAEAAKAARALPSAGKRVADFATNICVEDYLGGSDEGQLAMVAPAAAIATAGIVPKARGEALGSGGEVSALAVVRDEAGAATRRLKGVTEALSQATEALSQVADFASRAASGALMAAVSAEVERLRTQHADAVREKSASDSKCRKLTDKVAVLEKEKADLRRQLAAERREANEAIAKEQAAQAKAKLARAEGNLAKELAEHLQERLTALESRAKGAEAAVRAEAERTCTQLMDTYRELGPRTGDFEVPDREPGLRCLQWVQEELQELPAVVGGFMSYASLVTCEGAMNALSREGCRHFEVFDQADEDFDRDVYKVEDLVVKDSAGALYDRMWGPHGREVVRERAETAMAQASRGERVDDLGALNSALPDPEPTPAEAVSGVALEPTPETAAIAVAAPTSATAGEDLPPKVAEGAPDAPAAVVPCAEDPAAETAETTAEAAAEPAAEAPAAFKIFGPAHATATAKFLAASTAEGGNECGGSGSEFSEFFDVADSGSSVEWTEESSEDLDYFAALDVAAAETSPHAADAQDVPGPSTGRRRRRAVAKRRVSTEERSRLRVSRAGRQELLSLPAAANTGEGELRSLFAGEELRIMLFNYREMGIIPKVEPM

SEQ ID NO: 66009 - protein, 81 aa, Zea mays
  Coding DNA Sequence Number=SeqID_22634
  Subcellular localization annotation: CTP_CleavageSite=42; ConfidenceScore=5.63e-01
MARSAIRRAVLAAPILKPSLSLAVSHSHPRPASRSVTVPFISAAMAKEARPRFPPSLSHGYTARHSFEQMGGALYEQRRTM

SEQ ID NO: 66010 - protein, 44 aa, Zea mays
  Coding DNA Sequence Number=SeqID_22635
MTRQAHQSAVIQGDLGRLHQAHQLGHCLSSHGLQTIQGIHAPHR

SEQ ID NO: 66011 - protein, 321 aa, Zea mays
  Coding DNA Sequence Number=SeqID_22636
MHRALPPSEPPDGERPHCFCLTVVGGTQLRGSWYLSAIARLQGFSSGSPAASPRRWSPKTVTTSSMVGRSKPGCGLCPALSFKDLHHPCWGGGRAEPELYLPHGFMGHLLPQYSGERALTGLAEGADFDNAGSSGRKRRQLPRARFAGSAGSGAASGATFHRWAGCGYLPVYDAPARRSVFARPGGPEWGSAGGQTAAVVGAEVVAAEEVLVTDEIAATIRALGLWLFGFDSLSSPLEWGRGRGPYRSSVCPEVIAAAVWPPGAEVVVAAAGVGGGEPPRVLSSRRPSNVGGCSYLRGWNRSSICNSTLSVGVLFIAAVGA

SEQ ID NO: 66012 - protein, 297 aa, Zea mays
  Coding DNA Sequence Number=SeqID_22637
  Homolog annotation: Hit_ID=Q6QP51; Match level="QueryCoverage=68%, HitCoverage=90%, E-value=5e-17, Identity=34%"; Hit description =Putative growth-regulating factor 1
MQAACNRTKGVHPFDFDASSMEAQAHTSCGRKQQSSRLQAHVPSWDSERALSHGVKTMHPDRERGYSERDPSPRRKRAPSPPTDQRFEGWPLGRVRQPPQSTRAPRPLLVRGSKAGPSEGFDSRLRLLGLRAHYRSGVRRLAPKGFDSHLEHAERGMTLGMSDTWPRLGLRSRGSGAALTNPAPAKPLTASKYQPENSEPDYAPGLQPLVNPISTKPQRPDGRDSGQGSINSRDAISPRPSPASGRNSRPRQIHASPEGLLKQRTHLRLARGPAQAGFAEKQPWPDRHANRSYHRSI

SEQ ID NO: 66013 - protein, 30 aa, Zea mays
  Coding DNA Sequence Number=SeqID_22638
MTKTEGPSTGSYIRKAYSMKMDVCFLIRDK

SEQ ID NO: 66014 - protein, 127 aa, Zea mays
  Coding DNA Sequence Number=SeqID_22639
MALGLPSPEKSQQMLGSSSSSDPEGHELKTPETEHRPGLERLLETAHLELDGKLFVNTQQAPTWRANCRRFETGGSLGPTSECRRVPQPRWVEREGGRSEATGDRCERGGNPAAFVFVPRPGRVRLQ

SEQ ID NO: 66015 - protein, 168 aa, Zea mays
  Coding DNA Sequence Number=SeqID_22640
MRRKDGGYPPSGGLEGGKTRCMRERENMVYFQGGHPPFKGDYPYLRPQPSRAESSPTRSKALPCGAGAGSRMSCKPAQSRRSQTAARGAHDRPAGPGKGDTPKRILPREGTRLRASLLIRGSKTGPPKGLKAASDRVGPTPTTGQRFEGRPPEGFHGRLRLLGLRAHY

SEQ ID NO: 66016 - protein, 690 aa, Zea mays
  Coding DNA Sequence Number=SeqID_22641
  Gene Ontology: Mol. function=cysteine-type peptidase activity; Biological process=proteolysis
  Homolog annotation: Hit_ID=Q5NKP7; Match level="QueryCoverage=94%, HitCoverage=79%, E-value=0.0, Identity=87%"; Hit description =Putative uncharacterized protein 9C20.3c
MMITANTLFGYSKSSQECFSVDIPSAEQPNPCPEVGNPPNVDSQNLTNETVQIDSDEDDFMPALKKRNVSESHTRVLRKVVTKRIKHEELPRQRLNVRCNPQDVIASINILNERQREAIRRKGFSTILDMTVDALCSRSHLQWLMDKLDPKDMTIRPGPGKELKITKDIVHLILGVPNHGGGKPLGIDEAVAASNLRAELGVAKDEFNVTFLQDRLRKGEDDDLSIICFFLILFNRLLFPTASWGITYHEVLLTEEMHRFHEIDWCLFIFNDLCEAAKKWHNRITTNVSTTIYGCSIVVLLYYLDHLHTAAAPQNKTGTPRIKFFNKNSIKALTKADKRKVRHGAEPFGHCEPECRTNIFDAPRPAPMPRPTFNIKLPSIKEMMSSKINDLPHRHRSKFTDILAAYDLEVDKSCIAIKDSIDKIIEKQYDIAHKFIELIDEDTLLMPPSPHPDMPSQASQLETQLGGTQFEEIHERQQHICRVLETCPDESDVVSDQQRGEMAPEEMEHNDSGPVFYQTPTPHDDTLKGTTNSGSDPPLTEQECVRSLWELICSKDIDQSRVVIDYGEYSANCMDIYESFAEGKCLENVFMQCFIECVRDDSKNHRRSLTSNRLILDVNVGALLNFEEQERHSKNPQPFDQNVLQNCLHNTLPPLVNLDKCKSVSYLLSINQTIPETYVLMPFINSHSIA

SEQ ID NO: 66017 - protein, 118 aa, Zea mays
  Coding DNA Sequence Number=SeqID_22642
MAENVEAVGSAESEEAEASAEKVGFSPVWTPVSGCSDANIGARIRDTEDAPLKCRLRLDRQRAARGWKSRRKGERSRRGWKNRRRFPESWRGWGFAVMETEPGAKELIAGARQYLYGN

SEQ ID NO: 66018 - protein, 40 aa, Zea mays
  Coding DNA Sequence Number=SeqID_22643
MTGPVEPPPDNSGDLTASLIGRLQMAPPKCVHEYESSVLT

SEQ ID NO: 66019 - protein, 108 aa, Zea mays
  Coding DNA Sequence Number=SeqID_22644
  Subcellular localization annotation: CTP_CleavageSite=48; ConfidenceScore=5.34e-01
MGQRFTRSTFTGGRAKSGDRGLASPAKQSPIPCSGSFTENVSNTWRCSSAHVQKLAEIANVQILAKIRRRPLPDTYGYLLGCLRWYATFLVYNLGGFGAIYKVNTVDL

SEQ ID NO: 66020 - protein, 302 aa, Zea mays
  Coding DNA Sequence Number=SeqID_22645
MDYSALAGSRWKLAPGSLTSGGNHHYSERLASEDGHLCTDRSPAAAATFALVARQRRRPPQRVRRGPRPHPPMGMRTRPSKNASATSTAYDVLYDPPGGVGAVWPATQGTPRMRQTCAWRDYRPCGGRTAAPRLVVGGSVGGGAKAIKAKEMEPQHGSLPTPKSWGARGMETWLSPLSTFTRLVITLPPRMLEEEAGRGVASTDIPRREVAEKRDTSTSPPGKYRRIPSKRAVYHFEHSLSLDALGMKLQGHGKLWRQKARTLKAKGHRELEGVTPQVLLWPWHIYALMTVITCGRNLRRRA

SEQ ID NO: 66021 - protein, 199 aa, Zea mays
  Coding DNA Sequence Number=SeqID_22646
MPPAAERPGAGVLGRGQLPARALTLGPGGEQPRRRAAPAASTVDLGFGKGGQAPIEAHDSTPRAAPASLATRAREHATAMRAGGPFPVQARVSAPARTAPRPCADGLPAAGLGGPQRSSSGAAPRLERFWRLGHGPAGVDRVRALLGASTLGGGAVKAQVRRRLGRSLEDDGWGGWAGVLATRPLPGPPGRPPGLFLRI

SEQ ID NO: 66022 - protein, 174 aa, Zea mays
  Coding DNA Sequence Number=SeqID_22647
  Gene Ontology: Mol. function=cysteine-type peptidase activity; Cellular component=nucleus; Biological process=proteolysis
  Homolog annotation: Hit_ID=Q10FZ7; Match level="QueryCoverage=55%, HitCoverage=52%, E-value=6e-22, Identity=56%"; Hit description =Protein YABBY 2
  Pfam annotation: Domain name=YABBY; Domain location=34-141; Score= -10.3; E_value=7.5e-10; Accession=PF04690.4; Description=YABBY protein
  Subcellular localization annotation: CTP_CleavageSite=58; ConfidenceScore=5.02e-01
MGNRKRERERRRFSTMLCAVQKGKATVTYSFVCMLHSPSSNLQVSVPSHSMLNIVTVRCGHCTSLLSVNLRGLIQSLPVQNHHYSQQQENFTVQNMGFTENYPEYAPSYRMPTTLSAKGDLDHMLHVRGVISSFNQPDNSRDLRAHALHQLTFHRINKVLPLPLDIQRFMFARN

SEQ ID NO: 66023 - protein, 340 aa, Zea mays
  Coding DNA Sequence Number=SeqID_22648
  Gene Ontology: Mol. function=nucleic acid binding
  Homolog annotation: Hit_ID=Q5NKP8; Match level="QueryCoverage=100%, HitCoverage=56%, E-value=0.0, Identity=94%"; Hit description =Putative uncharacterized protein 9C20.4c
MGTEGPRVMLTDQDPAMPVALERVFPHTIHRLCLWHVQNSTNSKSQLMKMQESILVNANIGNIQIDRIPKEYILQRYTTSARQDVPFSRDDRNLKGKDGETKSYRQKMLLKKAMKENDRALTVMDELLEVLSRLETDIDIEETCGTSGGDGIQDDDEANRDNEKDDEFDERNNKEIQDVSNILEQGVANDQIHIPIRPLEEVNLHDHAIMNVSGVSEQNDNARKKLEFAVDGISLARPSNSKPKGRTIKGSEERVIKLGAKGTKKMTRKCQKCGIADGHNSRTCLSMEENRQRLASLAGRKRGRPPGSRNKGGSKAPDWNETTTSKKHANDFDSSESDSD

SEQ ID NO: 66024 - protein, 226 aa, Zea mays
  Coding DNA Sequence Number=SeqID_22649
  Gene Ontology: Mol. function=5'-nucleotidase activity; Cellular component=endoplasmic reticulum; Biological process=nucleotide metabolic process
  Homolog annotation: Hit_ID=Q60DI6; Match level="QueryCoverage=96%, HitCoverage=59%, E-value=1e-103, Identity=84%"; Hit description =Pyrimidine 5'-nucleotidase-related
  Pfam annotation: Domain name=UMPH-1; Domain location=1-226; Score =95.0; E_value=2.4e-25; Accession=PF05822.3; Description=Pyrimidine 5'-nucleotidase (UMPH-1)
MARSRGTGSHGLLRQGNEEYDAKREALYQHYHPIEICPDIPLSEKAKLMEEWWEKTHGLLIEGGLTYEAITKSVSDAAIAFREGVVELFEYLENSSCCLVEEREIPVLVFSAGLADIIEEVFRQKLHKTFKNIKVVSNRMVFNEEGRLIAFKGKTIHVLNKNEHALDMAAPVHGNPGDPNGSMDDYSLVKKRTNVLLLGDHIGDLGMSDGLNYDNRIAVGFLLVTF

SEQ ID NO: 66025 - protein, 202 aa, Zea mays
  Coding DNA Sequence Number=SeqID_22650
  Subcellular localization annotation: CTP_CleavageSite=79; ConfidenceScore=5.20e-01
MGVGKGRLVTAVGGERLPSSSINSAFASLVISHLLLFFAACFLPLLAFPPWARTTNASASRLLRQRTFGDSEYSEEEFSSESEGSPAPVSPPASSDDSDDSQGIAAEVWTYIRAVERSGLEGSDESEYSSDEEDSDGGGEDEDEDDDDDGGGDDGDGDGDGSDRGGNGGSRSGNGGSRSGNGGSSRGSSGGDSSKGSNKASG

SEQ ID NO: 66026 - protein, 45 aa, Zea mays
  Coding DNA Sequence Number=SeqID_22651
MGRQIHRIVYAESIILLFLPDLDRRILGLMAEPMDPSIESPIHEV

SEQ ID NO: 66027 - protein, 637 aa, Zea mays
  Coding DNA Sequence Number=SeqID_22652
  Gene Ontology: Mol. function=protein dimerization activity; Cellular component=nucleus; Biological process=regulation of transcription, DNA-dependent
  Homolog annotation: Hit_ID=A2YXP8; Match level="QueryCoverage=35%, HitCoverage=72%, E-value=1e-15, Identity=29%"; Hit description =Putative uncharacterized protein
  Pfam annotation: Domain name=bZIP_1; Domain location=537-600; Score =9.7; E_value=0.029; Accession=PF00170.12; Description=bZIP transcription factor
MDPKTSTSTSPVVWTPTAAVLEHDEPSSMHDLSYQPPTFPSALSPGLVVPASSGSGSSSWYQQIPPSRGVAVWKRSHSIHAHAMSSQSQSSLPSSVPTAGTLPTVGYDLLGSREAAVASHFPTLLGGQWEQGESSSSRAAEMSSFFSPSCAGGLAPQSSNHLLGFTQPSWGSELAPPPLSLGRPSHAVEERPTIDAPPPPIEDDEEEEEEEIDVSAFLASDQEDQMPNASWPTSPHMGGGAGREGSASWMAPGRTCNNWPPKLMTPATASTCAMHMLSTSFGSMPRHSGDSSIGVATSTGAVIKPPLSSQLCAGASSSIFNGFAQPSSSSVLAPRAPNLQAPLLPAVKQEFTAEHVDATTRRRHPDFVSLVDDDEDGLYEDAIPFSSSRASLISLGSGSALNAWACTSSSGDKQGPSLTPEAESRHINDFGSSTFAPGSWPGSSSDTLSGVGPVSGGHRPSFAASMPCFNRSTSADVSIGGKMPMPSTFCLPPPPTSRMAGAARASSCSGHGAGIFFTDAEMAIIRKEKNLQELLRTNNPKKVKRILYNRAYSAMAKARKVMHTKNLERLVETLEQKRKSLVAQLQSLEKGSAALRAEKMEMQMMVGELEQQTMFKDAVRELLKAEIQKLNHLKLNY

SEQ ID NO: 66028 - protein, 319 aa, Zea mays
  Coding DNA Sequence Number=SeqID_22653
  Subcellular localization annotation: CTP_CleavageSite=24; ConfidenceScore=5.04e-01
MSGATATSPKAVGFDRWSSVFWARLDVRWRTGTCTVDCPGLFLSKALKNKRNVEGKATQREIVKLRFEVFELRFDCGGKEKSFKILEKDFIESRIEVRTISKESNKVKETMVKKISELKASDDEKDKRVALLKAELKQAKKEYETETTRLRQVSVETTVNLRAAQVKIEDLNDEINQTRRLNENYRILMTNCYTLGNRCCNELMKTFSSTGAKSREKNFTGGDLEGMMRGGKEISIDESRKNMEKAQQAAEKAIDIRNNLQGKKAEEVSTLQVIIEVKQTEAKAKDAAIEAEAVAARAAKKATNDVVLKICEQIYDEMM

SEQ ID NO: 66029 - protein, 277 aa, Zea mays
  Coding DNA Sequence Number=SeqID_22654
  Homolog annotation: Hit_ID=A2ZEP4; Match level="QueryCoverage=87%, HitCoverage=84%, E-value=1e-29, Identity=46%"; Hit description =Putative uncharacterized protein
KLGCGTSIPEKYAIGGKRRKRRSIIQEEVAVFVPTVRVPVASDVAHPLAGMVSEDLVVGRLSSRTPRSRGRAGLRDLLDLIMINGSDLLFSFPIGDLLLWKDYADVSAVQELQHALEGVLLPVVLGLTTTKESRLESSVQFSWKTLDDDQANLLLLPKNSQGGGERKVSEDGKKDAVGSLLSASGCLHYSVHGILVQIPAQVKYALTLQCTLARGRVPPPWGVMKNMHKEIPDVACKKFQVYRQGTSCRALIHSGRMLMASLRFRVPRSIRTMTKMK

SEQ ID NO: 66030 - protein, 23 aa, Zea mays
  Coding DNA Sequence Number=SeqID_22655
MDFMVFEVAELDGATMICHTNET

SEQ ID NO: 66031 - protein, 238 aa, Zea mays
  Coding DNA Sequence Number=SeqID_22656
  Gene Ontology: Mol. function=hydrolase activity; Cellular component =membrane; Biological process=metabolic process
  Homolog annotation: Hit_ID=Q10I42; Match level="QueryCoverage=90%, HitCoverage=67%, E-value=1e-109, Identity=91%"; Hit description=HAD -superfamily hydrolase, subfamily IA, variant 3 containing protein, expressed
  Pfam annotation: Domain name=Hydrolase; Domain location=15-198; Score= 31.3; E_value=3.5e-06; Accession=PF00702.17; Description=haloacid dehalogenase-like hydrolase
MSLQELRLRDATKRTKSTDSCSFKRELGVSWDVELYGELLRIGGGKERMTAYFNQTGWPAKAPKTDDKRKEFIASLHKRKTELFMALIEKKLLPLRPGVQRLIDEALGKAVKVAVCSTSNEKAVSAIVSYLLGPDRADKITIFAGDVVPHKKPDPAIYILAATTLGVDPQSCVVIEDSTIGLAAAKAAGMKCIVTKSGYTAEEDFETADAVFDCIGDPPEVRFDLDFCAKLLKKQYVS

SEQ ID NO: 66032 - protein, 516 aa, Zea mays
  Coding DNA Sequence Number=SeqID_22657
  Gene Ontology: Cellular component=integral to membrane; Biological process=positive regulation of gene expression, epigenetic
  Homolog annotation: Hit_ID=Q2R3P9; Match level="QueryCoverage=39%, HitCoverage=72%, E-value=6e-80, Identity=70%"; Hit description =Nodulin MtN3 family protein, putative, expressed
  Pfam annotation: Domain name=MtN3_slv; Domain location=115-201; Score= 129.0; E_value=1.3e-35; Accession=PF03083.7; Description=MtN3saliva family
  Pfam annotation: Domain name=MtN3_slv; Domain location=12-81; Score =69.6; E_value=1e-17; Accession=PF03083.7; Description=MtN3saliva family
  Pfam module annotation: Pfam domain module=MtN3_slv::MtN3_slv; Domain location=115-201::12-81
  Subcellular localization annotation: CTP_CleavageSite=22; ConfidenceScore=5.08e-01
MAGLSLQHPMAFAFGLLGNIISFMTYLAPLPTFCRIYRNKSTEGFQSVPPNEFLLITINSAGCVIETLYIATYLLYAPNKAKLFTAKILLLLNVGVFGLILLLTLLLSAGPHRVVVLGWVCVAFSVSVFVAPLSIIRQVVRTRSVEFMPFSLSFSLTASAVVWFLYGLLIKDKYVALPNVLGFTFGVVQMGMYALYRNATPRVPAAKEAAAAADDGNTFNFKAPGEHVVTIAKLTAAAPATAAELIIKARDDAQHPPEEEAAAAKAAPAKSKLLIPLPEHATAPATPYESCNASSANSCYDYGYASGELNVEEYFQEYADGLALAEDAAATPRKSWSRRLRFMRQLNLGLRLRASKVYLKTILFAARPGSPANEKSVLGAATTRGAREEIAAHGHGHLRAWTWNPFTQTRMNTRCVASHGGSSRAAAATGRCKEREHGAHRHSFSSVIVRYSPSNKTSPVPSLSPSSCSFSSASSSVRTSSRSSDGGVGPTLRRSSSASSEVENPVQGLIAYCKRS

SEQ ID NO: 66033 - protein, 42 aa, Zea mays
  Coding DNA Sequence Number=SeqID_22658
MASADSLTHEPTLTHWFIDHVLEDLMAIGNISGNQCRPFVCD

SEQ ID NO: 66034 - protein, 273 aa, Zea mays
  Coding DNA Sequence Number=SeqID_22659
  Subcellular localization annotation: CTP_CleavageSite=23; ConfidenceScore=5.54e-01
MSSCSLMRRVFPPSKPPDGGPAVSPRRWSPKTVTTSSWVGRSKPGCDLGPTLSFKDVHHPRWGGGRAEPALYLPRGVVGHPLPRRSGERALTGPAGGPNFNNAGPVDGGRRHLHRVGLVGLAPGGPSHRRAAAAPCRCPTRPGGFEWGSAGGLMASAIGVEAEAAREVPVTDGAHPMEWGCSYLRRGNRSSVCNGTSNADSPVDYLNRFTKHESPRVKVTSEHEQRRSWLENENLVGRSLAGLSVSGTDVGVDQPRPRTGLAPSEDGWPRPLG

SEQ ID NO: 66035 - protein, 243 aa, Zea mays
  Coding DNA Sequence Number=SeqID_22660
MGARGRRAEHGAAAAGERGAPTAAAATRGQREGSARENETARGVGSALKRLMSDGYGLGRRTVGDKPMKQLNPLGAAYPGDLQVASLEYSQQRAFSGVSAGMSILRQILGSLLPDGVPPRSQIQVLLPNFAASTHTLTIRPPGGREDGLGLERQRPRFWPGGAADVRMSHERMESWRTGELTLGTMHVLLIGNLEEDQQGLGKGQGVKEEKQRLQQEGDPVQDLRKAQVSSRRSKDDYNRKEI

SEQ ID NO: 66036 - protein, 69 aa, Zea mays
  Coding DNA Sequence Number=SeqID_22661
MATARSPFRGSVVAIRGKMAPGDKAHKSATNEGGATELSMWYDKKRFLATFALAVALSCFHLAYTTLRG

SEQ ID NO: 66037 - protein, 237 aa, Zea mays
  Coding DNA Sequence Number=SeqID_22662
MGVVVSMCIFQLFQNITGNLEVRRLHRGPETFIKFSSEPRLPHPVAPDLATKAVWCLLPTEPLSSATVSLFLALADGSPIQALNVRAAVGVPRAKTPEERALVDLETHYTKSFARTLADKSHLFCEQEKAWGRSIGDLQAARSEAAVARTHAASIQKDHGGLTEAVRRDTESAAFARLECTKAVSRLRVLEQGKEVAEAPHRGLGRGNERPGALRYNSPDSPMCHRTVRCTSGATTI

SEQ ID NO: 66038 - protein, 65 aa, Zea mays
  Coding DNA Sequence Number=SeqID_22663
MATTRSPFRGSVVAIRGKMAPGDKAHKSATNEGGATDVIMDITPQPITLNQRSKPYNHKNKHSSV

SEQ ID NO: 66039 - protein, 234 aa, Zea mays
  Coding DNA Sequence Number=SeqID_22664
MAPWRAGSAAAGLHKEEESLGFAVSTMHQTPACVGVQAGASPCQIALMTIPSGELVKVSEPILEYNVLLRLGVAGGYGLDGYSVRRLEVKSRYHRMRRMEDAVMKGSGFQGPAHFLFVVKDKVKVLEVDRRFGDPIGIATDHPEPRKSVENVQGPYLGAPTIGVSNRRSDKSSSLIGRVRLPLVKCLLFCVPLPFIVTTLLLLWAKPTTYGRPISGQVRNPLEWVPFVLPGSPL

SEQ ID NO: 66040 - protein, 36 aa, Zea mays
  Coding DNA Sequence Number=SeqID_22665
MAYAKDYHTGSTWRCLTGHSGAKKMEDILVGHFFWP

SEQ ID NO: 66041 - protein, 357 aa, Zea mays
  Coding DNA Sequence Number=SeqID_22666
MARIRCTARKSMIPFLPSQLAERPLRRTVSGQSSHLDRLHCRLHEEQERRRQEQEQQDSSPSPQREVESERPPSPAPQPEMPLAPPQGIPAAGGDPDGDGDDDAGGSSSHSTEGLEETEPDGWIARPITRDAACGCHFHNTLDTLLHQAFDRHTWSIEYRCVVYQHRRGLYPNQWEATCLVRRPNDDLRGAEAFLEHYSITERDTAEAAMQDAARRALSQYCSLFNGVADGLDLKYYPRRSTGSAGGVIVSPVGKGNPRMSSMVNLAAVLNTELDHTLDELGKMSENRRKGARHAQPEQQAPQEEAAPQQHLPPPPPMTIEQMFLMQTQAVQAIGQTLAAMQQVQQQPPPPQPQVQV

SEQ ID NO: 66042 - protein, 93 aa, Zea mays
  Coding DNA Sequence Number=SeqID_22667
  Homolog annotation: Hit_ID=Q7XBD3; Match level="QueryCoverage=36%, HitCoverage=6%, E-value=2e-08, Identity=85%"; Hit description=Zeon1 gag protein
MAEKGTDLKGKRLSSPHRIVYKLTIYVKGMNHLRASPQHWRPPPVNPLSDHLRRALTFFMPPKKASATGATALQPLDPNQETLSLREAQSQKR

SEQ ID NO: 66043 - protein, 199 aa, Zea mays
  Coding DNA Sequence Number=SeqID_22668
MVELRLRENHSGEHGPAKPGREGAHRRVSRACDSEAELPWHWTGRERDGGRRTGGGRRWAVAGLSAHVGRARERARELGRGRKWARGGGRAGHGAQKGREVSDVAGERTVVGASTARRSWAGGWGRADRVSYAILPWRRGTGRLQPLDRHLRARIRSPSYVNRYPIRAAGFRIHGPDFTEKGYVVALISPAHRPIDAQI

SEQ ID NO: 66044 - protein, 120 aa, Zea mays
  Coding DNA Sequence Number=SeqID_22669
  Subcellular localization annotation: CTP_CleavageSite=83; ConfidenceScore=5.47e-01
MARSMVQITQRSPSNLDRPCKIGRRNSLHCPRPTNPPAARSPSAAAPWPRHPKAQPRAQSSDPRSPTRCPKQGECDERIRTPQCAAESPGHGEQRISNSGWEPAQNYDDSPHTMHRDTTA

SEQ ID NO: 66045 - protein, 62 aa, Zea mays
  Coding DNA Sequence Number=SeqID_22670
MAKPTTPLVYLINQLRASHSTLMVPLLSRVVTPQTGTFEDRLRVYKNMVKTKLDWDGDHDEG

SEQ ID NO: 66046 - protein, 51 aa, Zea mays
  Coding DNA Sequence Number=SeqID_22671
MVLVCGQQSMGIGYLRGSLEDMIAGVTWPSTLPPGWTVEWDPASAEEEHEE

SEQ ID NO: 66047 - protein, 107 aa, Zea mays
  Coding DNA Sequence Number=SeqID_22672
  Subcellular localization annotation: CTP_CleavageSite=61; ConfidenceScore=5.37e-01
MGKPVPSLLMLLLSRGRVPLNSPTRCRSGLTALAYNASLTPTGRRAVTALVPTITGMGDLVSGRVRGYVHCQVHSDQHNYDIKNGYNQFPDLARVLEKSLDFYRDPT

SEQ ID NO: 66048 - protein, 230 aa, Zea mays
  Coding DNA Sequence Number=SeqID_22673
  Subcellular localization annotation: CTP_CleavageSite=31; ConfidenceScore=5.42e-01
MAFAGGPPTTRPNARSQPARAPHLPPGMRTTANAARATTAHMPTPHTTTEEPDPPLLADARLSPRPQRSLGREGRGGEEESATHSAYTSPKPTPLPTQTPPAASATRPCPLARCRQNAVEALAGPAALEKGRGGGGPDGVQLHELEDAAGSLLPGGLQLGRLVLLEAKSPRRHLPWIARTSGGALRSVNSDWPNRICAARIRALSLSPSSQPDVPLCASLLLSTAAAFAP

SEQ ID NO: 66049 - protein, 297 aa, Zea mays
  Coding DNA Sequence Number=SeqID_22674
MGAPAICARRARIKCATESRWSGGSRCSAGTPDSPELCLLIKKNGIDPVLRETGPKTYTERTVEKPAKELTNNLDNDRPHTQTHLESSLPSSKRDEQLRHPKTSRTLPKQHDDAYIQTSTQGIRPRRAIVAKPQHTHMRQLRFFTTSKDPQRRTPGASRRQKRQRPEHHQTKRSDKEPPQHGRTHRLEVSWAAPSRRRNDVEKPSPPAWYKPSKVSSEDLAEQCRSPAARRKLKGQPRRCHPAKPSRDVTFCRPPDAPTHQPQPSEPQRRSSTSERPQEGRGEGSRMGREVQRRHPQ

SEQ ID NO: 66050 - protein, 847 aa, Zea mays
  Coding DNA Sequence Number=SeqID_22675
  Homolog annotation: Hit_ID=Q10NJ8; Match level="QueryCoverage=95%, HitCoverage=97%, E-value=0.0, Identity=56%"; Hit description =Expressed protein
MPTKVQVSSERNVKIISGRDGQKKGNSQHDQIVRVPKDMVTPVNGNVDGKFEDKVRVVKNDKFRRQRESWGGERAACMKGSKPWPGRKATTVDELVKHMSNVPSYLQRKETSEHLQDKALNVGVLEWGLLANWSQQQKHELARSHGASPSNTSRSVLFSSPSHSSASPSSRSLESNQSTPISDYHHSSIRAQQSRLADKHHGKARCSPSPNSAVLSLLPGHGTHPCQENGCNYVDLDLNNVSLASDSLGSSSRSCSRHEIVEDEETRWKIEDVVHHCSRRLFTDSDNIGKHFFTSNNKDSMCNDPEQSSGLDCENFESLISDAVMDTARNGSRSPDCFLEDIETSREFPRIPYSCPLPIIDSAAKEIGTTSTEAGDNFIGTAAKVSKNSSLNQSALNATENPPRYSAKFSDRMPDRHQGSVMNRVSRSSSLKESPHARQPNVVPPVDKTGDRSSPNSKVNTTKQSLDLGGSVPQNMQRSARYIQKEKDSTTTRQAFLQLAWKNGLPLFMLSYGDSDILAATVRRKGISEKDDLESTYAVFTVEEPKKKSGAWIKAGGKNKKHHLLSSIVGEIKVARRKSRCHHTADVHVYREFVLLGSGFLPSSEESGDSHVSGEFAAFISALPQQEAETSNQSSSQNTRQKNLALTGCGCPPLGNFQPSSASANVIAVLPDGFHGKSTSGQPLPLIERWKSGGACDCGGWDEGCMLSVLTDAAEENDAVQANQAKDGSQRFELLAQGGSREDRHAFSMTSFKEGLYTVEFRSSIALLQAFAMCIVMLHGRYPDRLQVGSQAAQEHDLLAGHEVKAMSRSAGGIDIPWSSGPYAIRILKVTISEQSIGFRGSYLYML

SEQ ID NO: 66051 - protein, 351 aa, Zea mays
  Coding DNA Sequence Number=SeqID_22676
MAPPIDVVGPCPGLGDVEAPPRSRSSLSSEAEVESEPLGRARRRPSAVARAESEPWGRAKRSSSSSGAEPESKPWGRAKRSSSSSGAEPESEPWGRVKRSSSSSGAEPESEPWGRARQSSSSSGAEPESEPWGRAKRSSSSSGAEPESEPWVGRGGVRRLPGLSPSSSPGVERSGVRRLLGAEPESEPLGSGRSGVRRLPGAEPRVRALGSGEAEFVVFPGLSPSPSPGVARSGVRRLPGSSPSPSPGVGSRSGAGGAVLLSDRSVERRSDCGHFGSVDWRARVRIKLCADGGYQLRFRSLEGTPNYGPRQDYTKVGELLGATAKDEIWSGVEAFVFTEDSNSLSISYDLV

SEQ ID NO: 66052 - protein, 37 aa, Zea mays
  Coding DNA Sequence Number=SeqID_22677
MERVACTLHGKRLDGGVSVLSVGVNQGYPRSLGQGQL

SEQ ID NO: 66053 - protein, 94 aa, Zea mays
  Coding DNA Sequence Number=SeqID_22678
MYDEHSDPKHGCHGEVLCHGSQKCGSNMVFFCSVGNNHVMAKAEGYASHQLPGFPDEASDCSSSILMHTGPRGILASVCPKVSMSQSSDANGSK

SEQ ID NO: 66054 - protein, 137 aa, Zea mays
  Coding DNA Sequence Number=SeqID_22679
MADLAKRWSHRWWSCGHVAGQVGTVRAFEILIILDYYYPHALILGWLVLDAWHGAEAFLEDYSITERDIVEAAMQDVGRHALSQYCSLFSGVADGLDLKYYPRHSTGSTSRVIVSPAGEGNPKLNSMVNLATVLNTG

SEQ ID NO: 66055 - protein, 77 aa, Zea mays
  Coding DNA Sequence Number=SeqID_22680
MNRAGLEGSDESEYSSDEEDSSDSSEEGSDDDGGDDDDDGGDGNGGGDSGRGGDDGSKGGDGDGSKGSNKASNKASG

SEQ ID NO: 66056 - protein, 131 aa, Zea mays
  Coding DNA Sequence Number=SeqID_22681
  Subcellular localization annotation: CTP_CleavageSite=55; ConfidenceScore=5.08e-01
MAEVKRRPLRLPKVSLSGARGTMDNDVQCSCFPGIFTSLTALCCLFSSSSFLSTMGKSKKGSGSSHHSGDKHKREPTPPSEDFGDSEYSEEEFSSGSEGSPALVSPPASSDDSDDSQGIVVEVWTYIRAVV

SEQ ID NO: 66057 - protein, 177 aa, Zea mays
  Coding DNA Sequence Number=SeqID_22682
  Subcellular localization annotation: CTP_CleavageSite=74; ConfidenceScore=5.38e-01
MARIPSSPTQAARDDGEFTTGHSGDHAVTTVRSASATQRNSNEQFTGLLRTSGPDFPRSRSSSPGKSARPLIASGAAVQALGHGGGRFAPHGDERTRDEAEVRISVNGSEVRGKLRHGRDSVEGDGQLTYAADRWVPDVGAPLFVAASGASGSVTGSHAWAEWVKGRAAWFADGPNS

SEQ ID NO: 66058 - protein, 56 aa, Zea mays
  Coding DNA Sequence Number=SeqID_22683
  Subcellular localization annotation: CTP_CleavageSite=36; ConfidenceScore=5.11e-01
MAAVSLGSPSQTAISVPGGPGDMSVSEGFFSPHIPRVSRVLDAQIRFNFVVDLSSH

SEQ ID NO: 66059 - protein, 245 aa, Zea mays
  Coding DNA Sequence Number=SeqID_22684
MPGKANCCCPARVQHPVLCPGDSGQPHRGVSQHVVRREGGTRVLGRSHSRFHGEDGSEDLPVRFGAADAHWCGVGGQVDAAAGAEVVAAGESFSADETVSATRGSTSGSLALMSGSRPSSGNANESIPAVASALGPSLLLQRSPASHPEFVVPQAPRCGGCSYPREWNRSSVCNGTLSAGVCSLWLSGPEHLEKFSSVETCSVSGIAYPSVSYLSQMVMSEDHTIEVVEKRERRSDRKTFPEEKF

SEQ ID NO: 66060 - protein, 210 aa, Zea mays
  Coding DNA Sequence Number=SeqID_22685
  Gene Ontology: Mol. function=hydrogen ion transporting ATP synthase activity, rotational mechanism; Cellular component=proton -transporting ATP synthase complex, catalytic core F(1); Biological process=ATP synthesis coupled proton transport
  Homolog annotation: Hit_ID=P0C1M0; Match level="QueryCoverage=92%, HitCoverage=53%, E-value=1e-80, Identity=82%"; Hit description=ATP synthase subunit gamma, chloroplast precursor (EC 3.6.3.14) [Contains: Inceptin]
  Pfam annotation: Domain name=ATP-synt; Domain location=4-210; Score =94.8; E_value=2.8e-25; Accession=PF00231.10; Description=ATP synthase
MSPRRFPRAASSPSGQLGHQTLSSVPPDSLKGNAYFQHRPYIPLEQDLEVNGVPTVKDSQAICDLVYSLFISEEVDKVELLYSKFVSLVRSDPIIQTLLPMSPKGEICDVNGVCVDATEDELFRLTTKEGKLTVEHEKVKIETQPFSPVVHFEQDPVQILDALLPLYLNSQLLRALQESLASELAAQMSAMSSATDNAIELRKNLSIAYN

SEQ ID NO: 66061 - protein, 83 aa, Zea mays
  Coding DNA Sequence Number=SeqID_22686
  Subcellular localization annotation: CTP_CleavageSite=37; ConfidenceScore=5.49e-01
MSSPSLLASSGPGSIMAKPDAQKSSYLKWVSKNSRPMAVNLSQVTDNADPFLVLSDYTWVNSHGSKNHNKKSSKSKKGKTKET

SEQ ID NO: 66062 - protein, 766 aa, Zea mays
  Coding DNA Sequence Number=SeqID_22687
  Homolog annotation: Hit_ID=A2XZU0; Match level="QueryCoverage=73%, HitCoverage=85%, E-value=1e-122, Identity=48%"; Hit description =Putative uncharacterized protein
MEGLTLIDVSVEDDLLFDIASPPHAGEVFHPHFWRIFLVEEWWDWCLFGFVDLTGDDSSLGSLVGAVATSSGAFPSAAGRAPDPDSVMEEQALPERTDSPEQRKAKKGVNLRKSLAWDSAFFTSEGVLDTEELAIVNSTFRKTQGSRLPGIVEEMSRSGESATSTLESESWVMESVETELFDNVRASIQRSLGKPDKVPGRPVAGSNHPKATANVPRVAVAARKGVDRMPQPKIRAPVSTSQGAGVRQRAQVTTKEPVAARVNLLGAAEAKISSKPPRALPRVAMMRSSTTTAVTSGVSDKRSSTGGAANRQAAGKTASTSAGLRSGGGTKSSSISKSGPFTSAATSHGVSMDTKPEAKTKSATLSNKNRTAQRVPVHPPSKSGISKTIPSRSSGNTIPAKGHADRASPSISPSSSMDSMSSVISGASTASTVGRMSHTSESLNGLSPSLRKSNDCPPTPKLRPPVVTEGHSSGTAAPGVNLKATSEMTNQRKGFKPSGLRRPTPKIGYFDAEKYIDQNIGAQLQPQPSKVQCLPDTTQFQSMNVDAAPATYVQQDSKLTATPHEESCASESKVVKLLPLKVEVEPFKVAEPCTHQTDPVVVRPEAVQQQSMEIQCLLYATPNSQQTFGQQVLEPIVAPHEVSACKSNTVKTPLETVQMEVEAPLEAVQLEAEAFKVDKPEACRHLDKFCDQNARALVAEREDCTLMTEAVVALATDYSKENIPVLHENIQANVDASSLVEVLTQKLSSISLGEDNSNVALRSCSE

SEQ ID NO: 66063 - protein, 1083 aa, Zea mays
  Coding DNA Sequence Number=SeqID_22688
  Gene Ontology: Mol. function=metal ion binding; Cellular component =nucleus; Biological process=biological_process
  Homolog annotation: Hit_ID=A3BK90; Match level="QueryCoverage=66%, HitCoverage=61%, E-value=0.0, Identity=56%"; Hit description =Putative uncharacterized protein
  Pfam annotation: Domain name=Bromodomain; Domain location=13-97; Score=97.4; E_value=4.6e-26; Accession=PF00439.16; Description =Bromodomain
MVFVASSFNERDFFPFATVLFRRKDTYGVFAEPVDPEELPDYHDVIEHPMDFSTVRKKLARNAYRSFEQFEDDVFLICSNAMQYNAPDTIYFRQAHSIQELARKKFQELRDEGIPTENPIKSEQKSRPNFCSGEQVKKPVLRYLDDDLDFLSRKDQDKRSNSNNVNDDMSFNGHVKKTLSKNAPDQSCLLQKERINKPISRNSEDNLSSSFHKKQRKKLISRHSEDDLNCPSGRDRARKVISKNSENDENSPFHKHQVKKSAPQRSIDGLSFQEKHIKKPIDGNGEDPGFSSCKRRIEDPFCTNVEDASFSSTKRLSEKPMSEKPISINKEEDLDHCHQESSKKPSCRVEQDDHGYSCDEEAVKKPGCMDSHDAQGSDISAATIASVGDGSNGLSMPQPNNSEPTGCTVANGVIDKDISSPLDEIRSEKTDDILAKPSYKTIVVDENRRKTYDASEGQSPMESDPVFDVFSAEPKELVNVGLDAEHSYAYARSLARFAGSFGAQGWRIASDRIRQALPADVKYGRGWVGEYEPPLLPILVVNDQPRYLKSSETNRQRNASLPRDNERLRSTETNNPKDMRRMTTDNNVVGVPGQLDSPEFKPRLFGVSNELQHRSTGTLSLHENHRVSGNVAKTKRTTNEKTRKGTSSSSARPREMQLQKGASSGALDNLASNKMAGQPRPFLQPPESNRTQPMRKIDSSKNKIPIEMAPQQVECAKGAASGVHDTPLSDGQPKHFFQSQAAASSGVHDMHSSNGQPKHYFQSQAAASSDMHAMPSSNGQPKHYFKSHAAVSSVVHDMPSSNGQPKQIFQSQAVASSGGHDMPSNGQSKPLFQSQEATILQPKNEATWVYHGRPGDGKVGTSNKSRPSTSIGFINKNHQSVNAATFAMNLNGQKIVSDHAKSAGTTAMPVQVNIPNRGLDAPRNMFSAFPAAVRENHSIPPAPMAQSWISFGATTENKPTIVSPTSLDNNCGWKMPFANVQPSDDTKINAVPQLFRHPVQVARENSVQSKGLVIFPQLVQPDFARSQGQPQWQGLVPHMQQKPGKDVLRPDLNIGFPSPRSPPARQSSGINLEAQQPDLALQL

SEQ ID NO: 66064 - protein, 181 aa, Zea mays
  Coding DNA Sequence Number=SeqID_22689
MYKGSEPPTRGPRDKWKNGSTACHARVISVRLDTRDLRSLIAQEEASRVRDEYSAPRSMGTLFRQRTGQVRSLQGGPGAACQRNGQDAINAVEAHHLSEGWTGGLGYNTPFLGTLSWAVRSSLGGVRTLSNGFGLLYFEGLGRVHRGPVPSGPDDVVSENATLTAHKIPLRLFSARLKVAA

SEQ ID NO: 66065 - protein, 327 aa, Zea mays
  Coding DNA Sequence Number=SeqID_22690
MAKPAVGNLRAVGAPDTVRCTPDSPVPPSSRWLDHVSRADRAADRWLTGQFGAHWTVRSRGLLRVGDEGLGFGEGLSVLHALHVAFVRVSVRGSDGDDPVGARHLELEVGVVGDGHELSVAWSPQHCVVGSSEPDHLEREGFLSEVGESPEADGQIELPKGLDALPGDDPVKGRHTGPHRGQIDLQEPEGLGVDDVEAAASVHEDLGKPDVADDGIDNERVGASERLPRVPVLGGGDKVCVGGVAFRLRLLLVLLLGAALSGRLRDVFRLAPLRLLVLPEDGLDRLLTRGELGGDVHQLARPGGSLATQLAHQVATSGAGEERADDI

SEQ ID NO: 66066 - protein, 111 aa, Zea mays
  Coding DNA Sequence Number=SeqID_22691
  Homolog annotation: Hit_ID=Q6QP51; Match level="QueryCoverage=37%, HitCoverage=19%, E-value=4e-10, Identity=71%"; Hit description =Putative growth-regulating factor 1
MQEACNCTKWAHPFDFQRTQHGGLGPRVMQPARRLLRTGKGVYPEKGPSPRRKQAPSLPTDQRFKGWPLGGVQQTPQSAWAPHPLLVRGSKAGPSEGFNGPLRLLGLHAHY

SEQ ID NO: 66067 - protein, 175 aa, Zea mays
  Coding DNA Sequence Number=SeqID_22692
  Subcellular localization annotation: CTP_CleavageSite=83; ConfidenceScore=5.87e-01
MASSLPKLSPSTLPLTLLSPPLIPRLSSQNRNSVAVSPTYPVSLSVVFYLSFTQPAASPSQRWTASPRTSVGRAAEPAASPSRAASPSQASGGLAEPGGERPRRGRRPHLARRRADITEPGGLAELQDPGAAQCLAEPSDLAKPDAGWSRRTPSSGWRSAQVIRCITFMLCCWFS

SEQ ID NO: 66068 - protein, 610 aa, Zea mays
  Coding DNA Sequence Number=SeqID_22693
  Gene Ontology: Mol. function=transporter activity; Cellular component= membrane; Biological process=oligopeptide transport
  Homolog annotation: Hit_ID=A2Y4M6; Match level="QueryCoverage=99%, HitCoverage=99%, E-value=0.0, Identity=77%"; Hit description =Putative uncharacterized protein
  Pfam annotation: Domain name=MFS_1; Domain location=48-527; Score =2.3; E_value=0.016; Accession=PF07690.7; Description=Major Facilitator Superfamily
  Pfam annotation: Domain name=PTR2; Domain location=110-519; Score =402.1; E_value=8.6e-118; Accession=PF00854.12; Description=POT family
  Pfam module annotation: Pfam domain module=MFS_1::PTR2; Domain location=48-527::110-519
MAEDARGEKKDAYAAAPASKLPAKQRGGFRSMPFILANISWHGCARRTAANDFCDRLASVGFTTNLISYLTLQLHLPLVEASNIITNYNGTANLTPLIGGLIADSFAGRFWTITFGSIIYQLGMVCLTLSAALPSLHPPSCAKHAADCQRASSYQISVLYLSLLCTSIGTGGTRPCTMAFGADQLELNAHRHRGAKPKWSFFNLYFFAVELAKLAAVTAVVYIQDNVGWSWGIGVPTVAMVAAVIAFVSGYSLYIRMPPGGSPLVRLAQVATAAYKKRKAVVPDPSLLYEDKELDAGISTTGRLLHTDQLKCLDKAAIVTDGDVLPSGQPKLWRLSTVHRIEELKSIIRMLPICAAGIILVTSASHNHSFAIQQARTMDRDITPHFKIPPASMLIFTNFGMLLTLAFYDRVLVRVLRRFTGRPNGITHLQRTGVGLTIAMLSNVVAAVVERRRKSVAAASGLLDAPKATLPMSVFWLVPQYAIHGIANAFMDVGRMEFLYDQAPESMRSSATALYWLTFSIGSYLGTLLVTIVHDKTKRTGQWLPDNLNRGKLDNYYWLVVALEVVNLVYFFICVKYYTFKPLEMVSGEEVELYHHGNGTDDAKKQGVEA

SEQ ID NO: 66069 - protein, 612 aa, Zea mays
  Coding DNA Sequence Number=SeqID_22694
  Gene Ontology: Mol. function=transporter activity; Cellular component= membrane; Biological process=oligopeptide transport
  Homolog annotation: Hit_ID=A2Y4M5; Match level="QueryCoverage=96%, HitCoverage=95%, E-value=0.0, Identity=73%"; Hit description =Putative uncharacterized protein
  Pfam annotation: Domain name=MFS_1; Domain location=27-531; Score =18.9; E_value=0.0044; Accession=PF07690.7; Description=Major Facilitator Superfamily
  Pfam annotation: Domain name=PTR2; Domain location=89-523; Score =371.1; E_value=1.8e-108; Accession=PF00854.12; Description=POT family
  Pfam module annotation: Pfam domain module=MFS_1::PTR2; Domain location=27-531::89-523
METAALADEDASPKKTKQGGFRTMPFILANEICDRFATAGFNANMITYLTQQLHLPLVEASNLLTNFNGTAAFTPVLGAIIADSRAGRFWTIAGGGVLYQLGMLGLVVSALVPALRPASCGATGAAPPLTCQRANGGQLAMLYGSLLLTALGGGGIRPCVVAFGADQFGQRGKRPGGEQQWSYFNLYFFSMGLAVLLALTVVVYIQENVGWGWGFGIPAIAMFVSVLSFVVGYPLYVKVKPQGSPFKRLLQVVVAAFKKGKDSVPEDVGLLYQNKQLDAPVAADGRLLHTDQLRQVLLTSCLLLQTLVSCALQRFLDRAAVLTTGDLSDSGEPNLWRVSTVHRVEELKSIVRMLPLWAASITAIAAASHNFTFAIQQARTMDRHLTPRFQIPPATMIIFTTLTMLVSLALYDRVFVPVARRYTGRRSGGITYFQRMGAGFAVSVLGVLAGALVEARRRRVAAEHGLLDSPSAVVPVSVFWLVPQYALHGVSDALSTVGHMEFLYDQSPESMRSSAAALFWVAGSLGNYLGTVLVTVVQSATRGVWLQDNINKGRLDYYYWLVTFLLVLNLFYYIACFHFYTLKTFEVDAGRTNGGERQPEAAEPCHVQVGSL

SEQ ID NO: 66070 - protein, 246 aa, Zea mays
  Coding DNA Sequence Number=SeqID_22695
  Homolog annotation: Hit_ID=Q69TU8; Match level="QueryCoverage=17%, HitCoverage=9%, E-value=2e-09, Identity=67%"; Hit description=Sac domain-containing inositol phosphatase-like
  Subcellular localization annotation: CTP_CleavageSite=66; ConfidenceScore=5.68e-01
MMPPPPPIRACPRPAERVAKSAPTSTRANRRTPTSNSRPSQTSYGSIVKYGTAKAPRPIQLPVGVGVAFVSGSVYPLTLVFLVLAILLPLGNKKHLLLHIAECCTDCLNHINVAQYAYGLAAFGRQLHAMGLTDALEIHPDRHLGSHPQAHLATTYLELHRFSMLSLLVEFFKNIERSQAVSRNTVNAIREVLDAPATADVRVAKMLLAEEMKFSGVLIKKCFYALNINQITLPMILIWIRHHCNS

SEQ ID NO: 66071 - protein, 154 aa, Zea mays
  Coding DNA Sequence Number=SeqID_22696
MAWLGATGSHEGRSEVTVPCMARERSPGLDVKEKEGCRRDQNRESKSGCGEEPTREKRLHQNHMARYDDAGGEEIEAPLPLVIIGVPEEKTTSVSKHEFVGSGGRGIRIASTTKDAERKEEMDEGDGSGSWSIVAQQPYAYPGRGAMLLVVPQC

SEQ ID NO: 66072 - protein, 234 aa, Zea mays
  Coding DNA Sequence Number=SeqID_22697
  Gene Ontology: Mol. function=oxidoreductase activity; Biological process=electron transport
  Homolog annotation: Hit_ID=A3B406; Match level="QueryCoverage=57%, HitCoverage=17%, E-value=9e-56, Identity=80%"; Hit description =Putative uncharacterized protein
  Pfam annotation: Domain name=Pyr_redox; Domain location=22-112; Score= -4.6; E_value=0.012; Accession=PF00070.18; Description=Pyridine nucleotide-disulphide oxidor
MSKQATFNQRKRPKNRKQNLDKVMKTFVHFGAPPNILVDGKPHLGTDKLVPLLRKFRHHLRELGVTIRFNARVDDLIVEDGQVKGIVVSDVELQPGPASQKLAFDAVVMAVGHSARDTYSMLWQHNVDMSPKSFAVGLRIEHPQELINSIQDPGIADNDTLTDEVKVDLHVLRTLVLLGIGGEVDCADVVAVDEGGTRERVVKLLEQLKEPGRLGHAVGHSAVLSLSVGLKVSS

SEQ ID NO: 66073 - protein, 266 aa, Zea mays
  Coding DNA Sequence Number=SeqID_22698
MARLRHTARKSVIPFLPSRLAERPLRRPVAGQSSHLERLHHRLREEQERRRQEQQSSSLSLHQEIESVRSCSPVLPLEPPPAPPLGAPASGVAAGGDPDDGDGDDSSSHDTDFSANPEPEGWVARPITRDAARGCHFHDALDTLLRRAFDRHTWSVEYRCVVYQHSRGVYPDRWEATCLVRCPEDSLQGAGSDHLVACAFCGRRGQKNTPSPRLRSCVFFPPVSSIWTSSKVTSEVSVSRRRRSPSARSALAAYVYLVVSRIRFPK

SEQ ID NO: 66074 - protein, 131 aa, Zea mays
  Coding DNA Sequence Number=SeqID_22699
  Gene Ontology: Mol. function=galactosylgalactosylxylosylprotein 3 -beta-glucuronosyltransferase activity; Cellular component=membrane; Biological process=cellulose and pectin-containing secondary cell wall biogenesis
  Homolog annotation: Hit_ID=Q50HW1; Match level="QueryCoverage=61%, HitCoverage=22%, E-value=1e-28, Identity=77%"; Hit description =Glycosyltransferase
  Subcellular localization annotation: CTP_CleavageSite=30; ConfidenceScore=5.38e-01
MCATATKGTKQAVPACRKAGALVRLLSSRSAGAVVPFTSSGALTHQSLEPDTRLLHLYKCEPVVWVVVEPATDAPATAEVLRSTGVMYMHLAFKPEDNFNAADAEAHVQQNAELAHVEKHRLTGVLHFADI

SEQ ID NO: 66075 - protein, 247 aa, Zea mays
  Coding DNA Sequence Number=SeqID_22700
MTWRGHRTVRCAIEQTASTNAGEIWAPYWRDVVAIGGAAEPDGGTAVGAVESLLTLSCCLAVAEPEPRGRARRRSFGRGQGGVRALGSGGAEFVVFRVLARVRALGSGGAEFAVFRVLARVRALGSGGAEFTVFRVLARVRALGSGGAEFAVFRVLARVRALGSGGAEFAVFRVLARVRALGSGGAEFAVFRVLARVRALGSGGAEFAVAPLARPDCLSDSLCRVALQSEWRRRRCPSVRLASGAVE

SEQ ID NO: 66076 - protein, 82 aa, Zea mays
  Coding DNA Sequence Number=SeqID_22701
  Subcellular localization annotation: CTP_CleavageSite=15; ConfidenceScore=5.13e-01
MAGSAAPPPPASPGSAAPRPARPPPAPPPAPPVRPPLRPAGGYETVDSGYDYDAGCQHCNHCSGEDEAVEGDFQEFQDYDEF

SEQ ID NO: 66077 - protein, 561 aa, Zea mays
  Coding DNA Sequence Number=SeqID_22702
MDKDRQGAAQKRQATVRLHEARPKRPRGAPKAAASGGGKPPLAAKAGAAAPSKAPEATAGRRRLQVNEDGAAGQRSGGGFEGGPGVAVVGQTRCRLRHRYYCGRLSWWAGRGPACYSYAWRGDRDGRHGAEGEGRGAWRRRRGVGPRVGHGRGGRGDPPAEGSDGGAESGDGGAEPDPLSYGLSPLSFLFYVNGLTCALQVADFASRTASGALTAALSAEVERLRTQHADAVREKSASDSKCRKLAEKVAALEKEKADLRRQLAGERREANEAIAKEQAAQAEARLARAEGNIAKELAGELQRRLTAQESRAEGAEAAMRAEAERTRTQLMTSYRELGVRTGDFEVPEREAGLRCLEWVQEELQELPTVLAGLMAFTSLVTCEAAMNALSREGCRHFEALDQADEDFGRDIFEVEDPVAERGERVDDFGALNSALPDPETTPAEAATGVAPGPTPGTAGDAPGAPGPAAAGEDLPPKVAEGAPDAPAAAAPNAEDPAEVGAEAAAEASAEAPAAAGPSQVQDFGPAHATATTEFLAASTAEDENENEYGGSVSEFFDVTDR

SEQ ID NO: 66078 - protein, 266 aa, Zea mays
  Coding DNA Sequence Number=SeqID_22703
HIERDIYKVEDPIVKESAGALYDRMWGLYGREVVRERAETARAQAERGERVDDFGALNSALPDPEPTLAEAVTGVALEPTPETAAVATAAPTSDVAGEDLPPKMAEGAPDAPAAAVPSAEDPVAVAAEPTAEPTAEAPAASGPSQVQDFGPAHATATTEFLAASTAEGGNEYGGSVSEFFDFTDSGSSVEWTEESSEEDLDYFAALDVAAAEASPHAADAPDVPGPRTGRRRRRAVAKRRGWSSGTVVFAGRCEYRGKGTAKSFCG

SEQ ID NO: 66079 - protein, 154 aa, Zea mays
  Coding DNA Sequence Number=SeqID_22704
  Gene Ontology: Mol. function=protein dimerization activity
  Homolog annotation: Hit_ID=Q53M48; Match level="QueryCoverage=38%, HitCoverage=5%, E-value=2e-16, Identity=64%"; Hit description=HAT family dimerisation domain, putative
MGLTDSNINSVDQVIADPGLRMPIEQIDANIRDAVRRAYIAKGPCQPKGHKYPKTMIGNRNRSFHDECAIGPYDFKLFTFGFLRPRSAIIHRIVRCAGAPAEQQLQRNSRLHSALTALQYAAEVRTAARGAPDCPVPQEDKAPTVETARTLTVG

SEQ ID NO: 66080 - protein, 494 aa, Zea mays
  Coding DNA Sequence Number=SeqID_22705
  Gene Ontology: Mol. function=protein binding; Cellular component =nucleus; Biological process=regulation of transcription
  Homolog annotation: Hit_ID=A3AU01; Match level="QueryCoverage=67%, HitCoverage=98%, E-value=2e-79, Identity=54%"; Hit description =Putative uncharacterized protein
  Pfam annotation: Domain name=GRAS; Domain location=71-383; Score =204.5; E_value=2.6e-58; Accession=PF03514.5; Description=GRAS family transcription factor
MNLTLSLAINDGGGGGTTKKRKLLRDSADDDVMSRDGGGDRSSRVVARLVQVQARERKLAKLEAAAADDDDHDHDPRVAAAETSPGDIGGGLRLMHLLLSSVAAAESGDAREAAAALREACRRASFRSGDPAQRVAAYFADALASRLVGRPPPTRAEQFLAYTMFYQASPIYQLAHFTANQAILEAFESGGGRLHVVDFDVSYGFQWPSLMQSLSDAAASTSSSSRDGDCAEPVSLRITGFGTSADELRQTEARLARFASGCPNLRFEFEGIVDGADDSERITVDDGATVVVNLVFPAAAAAAARSSSATSSTREGACSALARIRSLDPSLVFLVEKGGGGGNATSRGRRPSLLAPFAASLRYFAAVFDSLHERLPADSAERLAIERDHLGAEISDAVASLADYSSSSYGGDDEPSSSATAGCSWRQMMERAGFEGVELSSRAVSQAKLLLKMKSGCGGGFRVVEEGDGGRAVSLGWRDGRAQLITATGWRRCR

SEQ ID NO: 66081 - protein, 220 aa, Zea mays
  Coding DNA Sequence Number=SeqID_22706
MARRWSEATVGDLRGCTGNGGCRVGGTPDSLAWRVGGHARIDSGTATLWNCRLVSGMRHHYVPRGGCRRRSRLGKFAIAAPALDGIAVVRAQGLTRVIVHPEIRRTSRSHLAVMHALGVPSLLTCPQDPPSQPLPPHRRAHLKGSLPRASQGDAVALVPPGIHCHVRCHLVVVRTSWNRRRVRALGIRCRSRSHLVVVRASRGPSEREMCLGPFLSILVI

SEQ ID NO: 66082 - protein, 145 aa, Zea mays
  Coding DNA Sequence Number=SeqID_22707
MGKSKKGGSSSHHSGDKRKREPTPPSEDFGDSKYSKEFSSESEGSPAPASPPASSDDSDDSQGIAAEVWTYIRAVERVGLEGSDESEYSSDEKNPSDSSEEGSCGDDDDDGGDGDGGGNSGKGGGDSGDGGNGGGGGSKGNNKAQ

SEQ ID NO: 66083 - protein, 24 aa, Zea mays
  Coding DNA Sequence Number=SeqID_22708
MGTDGHTDLNKGDFGEAMGFWGQN

SEQ ID NO: 66084 - protein, 923 aa, Zea mays
  Coding DNA Sequence Number=SeqID_22709
  Gene Ontology: Mol. function=protein binding; Cellular component =nucleus; Biological process=regulation of transcription
  Homolog annotation: Hit_ID=A2ZA17; Match level="QueryCoverage=51%, HitCoverage=61%, E-value=1e-134, Identity=64%"; Hit description =Putative uncharacterized protein
  Pfam annotation: Domain name=GRAS; Domain location=255-551; Score =280.5; E_value=3.5e-81; Accession=PF03514.5; Description=GRAS family transcription factor
MRGMLFAGSAREGHAGTLLQLQLQHQRQGLAAGKVSGAGDLWEPTSVLDRRHSPSPSPPTSVPTLSSPLGAATAGVAALAGANAKNVSPPPVAAAAWPGGGGAEEAVAGGKEEWQLTPLDMGLGAGEGWDAADAAAPPGLAPDHTFLRWIIGGEDASAAMGSVMDPPVLELDHAPSMMSPAFGSTMPFAPAMEDAKPVPFGHTPNFLLHHCHQHHPQPHAAFFGSHPSLDAAPQPKRPHPMAGAPAPKLPSFPGPVAQAGGGFASALKPKAEAGNDEAAAAVDQLAEAARLAEAGDAFGAREILARLNYRLPAVPTAGTPLLRSAFYFKEALRVALSPTGEALAPPAVSTPYDVVLKLGAYKAFSEVSPVLQFAHLTCVQAVLDELGAAGRIHVLDLDIGMGEQWASLMQELAQRSPAATLKVTALVSPASHHPLELNLIHENLSGFARELGVFLQFAAYNVDALDPAELVAITSGDAVAVHLPVGSAHVAAMPAVLRLVKRLGAKVVVSVDRGCDRTELSFSTHLLQAFQSCVSLLDSIDAVGGADAEAVGRIERFMVQPDVERRVVSRHRAAVAVDKPPPLPWRTVLASAGFVPVQASTFAESQAEALLKRMALMGFRVEKRGGALCLYWQRGELADRSVYDHYLVPSDAAGEAEMLNQASSRVYWTPAKTNGGTPWERVYVPGFYMNKARSRSPSTLAHTQYVRTRENGGHRERTPRRNPEARQKIQHRAAEPREHGAGACGPRRNFSCVPVLCCLSFAVHSSAQLSSQSQAVLLFPALLPRAGEPVDHTTPRTQPPSPTPRHAATGPPTAAQHRGSNPNSCRGLLYFTYACILLSVVGQRMWLVPYLAGRRVPEKLPGKLHLPVPAPLNAKRAPLPACLQPAACRLPIAVKERGRHDLKSHSERPGIRKPLELKVPFIR

SEQ ID NO: 66085 - protein, 149 aa, Zea mays
  Coding DNA Sequence Number=SeqID_22710
MNLWNMGHLIMVLEGRCRLTMVNSTYLMRKYIWMPKVTASFIELIRRIIPMDTPMNGRASMSLAWGIYISSKAYIDMVLRPAPPSTITCHSLILLMMGPTINQDSGANHVAESVNGIEEDRSIGQLGRPIKQRHAHPGAKDSGPTKKIP

SEQ ID NO: 66086 - protein, 155 aa, Zea mays
  Coding DNA Sequence Number=SeqID_22711
MGKSNKRKREPTPPSEDFGDSEYSEEEFSSESEGSPAPVSPPASSDDSDDSQGIAAEVWTYIRAVERSGLEGSDESEYSSDEEDSDGGEDDDDDDDSDDDDDGGDGDGDGSGSGGGSGGDDESKGQHQRRQQQGQHQRWRRWQQQQAQWLNATGL

SEQ ID NO: 66087 - protein, 165 aa, Zea mays
  Coding DNA Sequence Number=SeqID_22712
  Subcellular localization annotation: CTP_CleavageSite=35; ConfidenceScore=5.26e-01
MDGDEVASGTDDTVIFGTRFMPSKPFASALASSVRLGRKVNARRVPRWGTGVIDSLYSQRGATSCLGTVAPPPPPVAGKVTGQTRMLLFRHGGKTSLSPPPSGGLTTVVVAVARQRKECHVVAAVEGHELETPETEQRPELKRLLETTHLELDGKLFVNTQQAPT

SEQ ID NO: 66088 - protein, 72 aa, Zea mays
  Coding DNA Sequence Number=SeqID_22713
MAYSLSPSTITLPCIVALPIPYAAIVEQDNCLRNLALRAESNVEIWCYHVFTVSTPSTRKNSAKRTLKLIPI

SEQ ID NO: 66089 - protein, 65 aa, Zea mays
  Coding DNA Sequence Number=SeqID_22714
MADRVDNEWFYVKADEKKREKLMSMGVPFIAPRQLGAIGGQQGRSSLPSVGWRTGTVRCATGQSL

SEQ ID NO: 66090 - protein, 274 aa, Zea mays
  Coding DNA Sequence Number=SeqID_22715
  Gene Ontology: Mol. function=Ral GTPase binding; Cellular component =clathrin-coated vesicle; Biological process=protein transport
  Homolog annotation: Hit_ID=A7Q7C3; Match level="QueryCoverage=67%, HitCoverage=16%, E-value=2e-83, Identity=83%"; Hit description =Chromosome chr18 scaffold_59, whole genome shotgun sequence
AGALTLKTDLKGRTQQKKQLVKENFDCFVSCKTTIDDIESKLRQIEEDPEGAGTAHLYSVTQKISGVANRAFEPLFERQAQAEKIRSVQGMLQRFRTLFNLPSAIRGNIRKGEYDLAVREYQKAKSIVLPSHVGILKRVLEEVEKVMQEFRGMLYKSMEDPHLDFAELENIVRLLLELEPETDPHVPAFWRLALSVFSGKFAKTASGNVVSDSDMNAKPSANKNDDKGGDVNMILNLMSETAKSYDISQPLQEINESVRLAFLNSFLDFAGMNL

SEQ ID NO: 66091 - protein, 472 aa, Zea mays
  Coding DNA Sequence Number=SeqID_22716
  Homolog annotation: Hit_ID=Q5GAU8; Match level="QueryCoverage=22%, HitCoverage=82%, E-value=6e-43, Identity=74%"; Hit description =Putative uncharacterized protein
MLQAEVAFTHVFQLCALLQGWPVLQAKVAFALHQRDLPLEMKDMYREALWQKRGRPRELYPDVSSKDAPVPPELPVPNCDCGRLAWGHQKCFFFQWIDGPDKFDPRYLLFVNWLSGKTSHERFKRWVPPPPNLPPMTDAEKEPYRWRKCRFREWLYGPLSHWPEPEVKEKRYMGWAAEEVKFDPVLCKCGIETKYGLVPSELGVGYFCGHMVDYDEETRKCSWESYDDKGEVMRTIESKRIMGQKMRCGSRLVDSYINDRIRDMRREAKSAFYDSPKRAEYRRLKAADEKRAQDVREWEAAQAEKQMLDNLADRLKGKIGSGVNYLADEAHARYVQDKMATMEEEDDDTSRLSELIALAEAGLHEEEEDDTSRLSELIALAEAGLRAQEEEDEFMSQAAAEVEAAYYKKKSDEAEAEDELFSQAADEAEANYYKRTGDKCDAGQCSKLNEVVVEDCATDDSEDELLIDCDSD

SEQ ID NO: 66092 - protein, 34 aa, Zea mays
  Coding DNA Sequence Number=SeqID_22717
MESHSTVLRLMQWGGSLLEFFVSLNLTNLLGKEL

SEQ ID NO: 66093 - protein, 251 aa, Zea mays
  Coding DNA Sequence Number=SeqID_22718
MWGPHGREVVRERAETARAQAARGERVDDFGALNSALPDLESNPTEVVPEAALEPPPETAEGAPDAPAAAAAGGGPPPETTEGAPDTPAAAAPRAEDPATVAAEATAEATAEAPATAGSSQVQDFGPAHATATTNFLAASTVDDGNKYDGFASEFFDFADSRSSVEWTEESSEEDLDYFAALDVAAVEASPHAADTEDAPGPSTGRRRRRAVAKRRLSECSCRLVEARSASLRQTVELEASSASSPFPFAG

SEQ ID NO: 66094 - protein, 243 aa, Zea mays
  Coding DNA Sequence Number=SeqID_22719
  Homolog annotation: Hit_ID=Q5YLM2; Match level="QueryCoverage=30%, HitCoverage=11%, E-value=2e-31, Identity=87%"; Hit description =Roothairless 3
MDALDPPPPPPPPLPITAPPAPAAHLHHTPSLAVDLAHTPADLALLPSMAQWRGRQRRRRRVEVGHEGVEAVGVAVAYARTTPLPQFKPTTPSPFVFHSQLCTRFPIASSTSLSPSPSHQSTVPAPLIQRYGWLHSSKRCGPRSPPARGARGGAEGDDTSGGDPAPDPGCSSIQLTYNFMDRTKIWPFVSDKNKQPYAFRANVTVLNSGTRPLKSWAALVTFGYDEILIGVDGETRTRRLIEP

SEQ ID NO: 66095 - protein, 128 aa, Zea mays
  Coding DNA Sequence Number=SeqID_22720
MAVNRGARAGGTVDPRRLRARSTTRKGHGGGVRWGQAAQGKRVGIHGRQWRPSIDGEQMGRWVGRGISRARFPWAVGEVGVVDVSGVGAAAEIAAEGRSGRSFRRAAGDWGGGAEAEHKGVDAYSGRL

SEQ ID NO: 66096 - protein, 539 aa, Zea mays
  Coding DNA Sequence Number=SeqID_22721
MEVVELVPCARNKWGNWNEFWFYVVEGTVEDHEGLPVSKMCSHFYSAYPPFEVAEEDADEGALRCAAGLSSGHDLVEEFVAYGVWPLAHGWALGEVCPRQMPSHGGKLVQSPAFVLDLQSRDPAAFVREAEDGAVRIVGRELMRTCAAPGGRMSSPKLRESSARMLRVTGGWWPRNVPIPHAAGEDFFTSRMVREWKVFPYGRNIAAVVSAVMDKDRQGAAQKRQAVVRLHEARPKRQRGAAKAAAPGGGKPPLAAKSTVPASSKAPEAAAGAGGSRPAKAVPTSSRVPEVAKVARGLPSPGKGVADFATDISVDDYLGGSDEGQLVIVAPAAATTAAAVVPKAKGGALSAGGEMPALAAVRDEAGAVSHRLKEMKEALSQAADFADRAVSGALTVVVSAEVERLRTQHADAVREKSAADSKCRKLADKVAALEGEKTDLRRQLAGERREANEALAKAQAALAEANLARAEGNLARERAEQLEERLSALQSRVKRAEAATRTEAERTRKQLMDSYHELGARTSDFEVPDREPGLRCLEW

SEQ ID NO: 66097 - protein, 93 aa, Zea mays
  Coding DNA Sequence Number=SeqID_22722
MGHVGTCSQLQGDPTRVNSDVNRVLAQDGNSFVNLASHGHCAGGAKGVPARFIFVGPTTAADASSEGWRLCLRPNICPPRDQFDKVIWCRRRR

SEQ ID NO: 66098 - protein, 273 aa, Zea mays
  Coding DNA Sequence Number=SeqID_22723
MTNANIPDSNTLTNEVKIDLDMLHVLVLNKGDRKIGDDVVAVDKCAPGPRDDVGPKKHRIAECGPTCVRPPGLVRLSGIMHVETDLLDSIRDVRSDEGEILKSADSTVVGSVVTHRGTSPESLDCMSIGVAHGLQSSVSAHTPPPQDPIQPTLPLGPCRSVGPRSHVLVNLISTKLRRPDGRDSGQGSAQRTRSRLARARPRAKTTDPGKFTPRPRIPSSNGRTVDSPEAQLGRQGRSDRSHFAAPLTDLTGIQRRLPCSDCRATRQSEVDSG

SEQ ID NO: 66099 - protein, 253 aa, Zea mays
  Coding DNA Sequence Number=SeqID_22724
  Gene Ontology: Mol. function=aspartic-type endopeptidase activity; Biological process=DNA integration
  Homolog annotation: Hit_ID=A2XI38; Match level="QueryCoverage=32%, HitCoverage=20%, E-value=5e-11, Identity=43%"; Hit description =Putative uncharacterized protein
MTTSLCDLREPVSDRKLVLSLLCGLNECYNHLRAWITCSVPFPCFHKVRNNLILEELTKGAPPRFDAATTLYSSTPRGQTSRVLGDILSKTTFPVFPKNPAAGTKTPLLKHKIPVCGPRFQKPDHIKDTSQGSPMSLPPVAPMPLMVLVPLDSLRATLPPWLDCVPLAGLRWIAGDFGGLSFALDFSDLTRATRGLSDALPDTPSLRQLRAWVGAPTCSRAEPTIALADPHWFHAMEEDTSLPITPGIWCPIS

SEQ ID NO: 66100 - protein, 257 aa, Zea mays
  Coding DNA Sequence Number=SeqID_22725
MKVLEGSTKVESASLMVAELLLDGNPSLTSSDAMLANDILQLNNDRPKDPGEDHTIHPSLGGYGVKEGNDNDLVHRKRIWERLEAGRAKQMAHGLGKLLGEAVANTELWACAPLSSSLLPPLSSSPLPPLYLVAKSALEVRHEPSRPPAQPLKCLLTIAKGRGLPAQPGQLAVVEERGHRGSDGVKGPRRRSLDSSAARSRGGEGPTPPPLALQGVLFPSPYASPRRRGDALTVEANALQTQVRRRGRLTVYARLGA

SEQ ID NO: 66101 - protein, 162 aa, Zea mays
  Coding DNA Sequence Number=SeqID_22726
MVAGGSAKHVLTYSPSFDPILDPPLTVPALATRVAKPRGYNQARRQDLWRRARCHVDATASELCQRSRYLGAIGYDAELCYLGAIGYGAEQRSGIAELGFAAVGLNVIGMTLGSLGTGATLGAAPTVRVIYLRLSPSFRPPVDVATAQSTLAVALTATKAVA

SEQ ID NO: 66102 - protein, 222 aa, Zea mays
  Coding DNA Sequence Number=SeqID_22727
  Gene Ontology: Mol. function=ATP-dependent helicase activity; Cellular component=spliceosome; Biological process=RNA-mediated posttranscriptional gene silencing
  Homolog annotation: Hit_ID=Q53M78; Match level="QueryCoverage=57%, HitCoverage=34%, E-value=6e-47, Identity=77%"; Hit description =Similar to ATP-dependent RNA helicase, putative
  Pfam annotation: Domain name=DEAD; Domain location=54-203; Score= -36.9; E_value=0.024; Accession=PF00270.20; Description=DEADDEAH box helicase
MDRDPWAKFRRPNSEHPAQSEETRTHQHPGVAGARRPNAMPSPSPAPPPVLPISEHEDEIVAAVDANPVVVVIGETGSGKSTQLSQILHRRGYTRRGAIAVTQPRRVAAVSVSRRVAQELGVPLGDEVGYAIRFEDRTSERTCIKYLTDGILLRESLSNPELKQYSVIILDEAHERSLNTYEWTVDADPLMMGGQDPSKNKEMRPHCTSAHCSPLEPHAPHI

SEQ ID NO: 66103 - protein, 83 aa, Zea mays
  Coding DNA Sequence Number=SeqID_22728
  Subcellular localization annotation: CTP_CleavageSite=38; ConfidenceScore=5.14e-01
MAHRSSSSPPEAFSPPFSPLCPWIHGPFPAIEFAVAPSSSLPNSGDPGTPLAHACLNSGDLTTTERSSAALSRSPLPGLILSV

SEQ ID NO: 66104 - protein, 223 aa, Zea mays
  Coding DNA Sequence Number=SeqID_22729
MVSEGGAAHAGQGDTRLGPGAHWCLRCLRSEILVEVATLDVLSALTRPFQRDPGVFSHLCIFGVQGKLLVEGITQCTAWHGRTVRQQTQQARRLLDDLDAACQRMGRDTLNAERARRSSAQWQAARPLLNKCRGYTTLRQARPDGLCHGPQAAGLRLRGERRTRPTHVSAPDPCIPQGPSRCGTLPGFGPPPGLRTSEAKLTHDEACGQLKGPRSTGQQSYSP

SEQ ID NO: 66105 - protein, 287 aa, Zea mays
  Coding DNA Sequence Number=SeqID_22730
  Subcellular localization annotation: CTP_CleavageSite=21; ConfidenceScore=5.03e-01
MSSLEAPIPVKTTRRTTRGLRATSPKGPKPAFPPETLLDSPRVQTFDGFVQGPLQREDVDSSGGLTCQVATRNAHRNQALRYKLPDASRVALEVRGHCPCGILQDDVTTVMAASMHAPLRRDPRPCPPTGGDNEAIKAKESEARWQGALVVSPAEATTSAAGSLTSGGDHLSTDDSGHLYTGGLPATAAASARAKRSSLPSSYRSEDKTIQERGRPLHGEEAGHQPMRKTGPQLGSPSTTTRMMNILEAEGRGRPQPGSLLSTTRLVVILVDDHWRETAAGMHDENP

SEQ ID NO: 66106 - protein, 31 aa, Zea mays
  Coding DNA Sequence Number=SeqID_22731
MDPKGKGMVINDKKKDKETLYVDEQKGWIIP

SEQ ID NO: 66107 - protein, 106 aa, Zea mays
  Coding DNA Sequence Number=SeqID_22732
MAMVITIAGLCWRSTTASSDIHSYGLATSPSRQQRSHIGAAWMNGREGVDDRIWPERGVAAWQPKLLLSTAAILPRSKRSSRGDARRSTIPTPAQIAARIGHRRRG

SEQ ID NO: 66108 - protein, 154 aa, Zea mays
  Coding DNA Sequence Number=SeqID_22733
VISPAGPTTSGPGAREWTLVSWGGPEPVQPLSLVPYREPARSTACDKCPNPDLGEFASRGLLTTFSETLEWTTLHQQESRWKLVPDSPTNDGDLLCTSNDNDLCTERLASSSDHLRVAPTVSPAEATTSAVDNLTSGGDHISATGGSDHLFTDG

SEQ ID NO: 66109 - protein, 104 aa, Zea mays
  Coding DNA Sequence Number=SeqID_22734
MAVAGGRAQQSRRQPGSRLILGQQESLLPRDRERGIPRKGSFSAKEPGSEPPLLIRGSKTGPPKGSTVASDRVGPTPTTGQGFEVQPPEGLHGRLRLLGLRAHY

SEQ ID NO: 66110 - protein, 181 aa, Zea mays
  Coding DNA Sequence Number=SeqID_22735
  Subcellular localization annotation: CTP_CleavageSite=33; ConfidenceScore=5.28e-01
MGSSASPDPGLGPSLGLGRRPLPRPTQGSDPASASEDGLRLARPRARTQPRPRKTDSASPDPRARTQPRPRKMVSASPDPELGLSLDPGRRTPPRPTLGLDSASTSEDELRLARPRAQTRPRPRRSLRLARPRARTCHVTRKAIITLPLASSGYGEQDRRPIWLAPGPPGVETPTLSKIRL

SEQ ID NO: 66111 - protein, 125 aa, Zea mays
  Coding DNA Sequence Number=SeqID_22736
  Gene Ontology: Mol. function=catalytic activity; Biological process =cellular metabolic process
  Homolog annotation: Hit_ID=Q9SV17; Match level="QueryCoverage=32%, HitCoverage=12%, E-value=4e-09, Identity=75%"; Hit description =Putative uncharacterized protein F3L17.100
MEWSSPYDTGGIRLKNPKVKSSDCMAPGALDTVRWHTGQSGERFDPISLSNTIHDYQVFRPRRLIDGPYTSYDLNTLLKATAGERRAVVIGKAAIHREKNTVEAAAAAGLQPQQAAANKLEVPTT

SEQ ID NO: 66112 - protein, 29 aa, Zea mays
  Coding DNA Sequence Number=SeqID_22737
  Homolog annotation: Hit_ID=Q10HP1; Match level="QueryCoverage=96%, HitCoverage=12%, E-value=4e-07, Identity=92%"; Hit description=DAG protein, chloroplast, putative, expressed
MEFPTDPKPSEEEMVAAYVKTLAAVLGSP

SEQ ID NO: 66113 - protein, 116 aa, Zea mays
  Coding DNA Sequence Number=SeqID_22738
  Gene Ontology: Mol. function=protein serine/threonine kinase activity; Biological process=protein amino acid phosphorylation
  Homolog annotation: Hit_ID=A2XXJ2; Match level="QueryCoverage=60%, HitCoverage=19%, E-value=2e-24, Identity=75%"; Hit description =Putative uncharacterized protein
  Subcellular localization annotation: CTP_CleavageSite=34; ConfidenceScore=5.03e-01
MRPGSTPGPSSRRCIHGSAAALPTLLLLLLLLLAASSAQAQQTSRMKTDPVEAAAVNAVFAKLGQAATSAWNISGDPCTGAATDGTNIDNDPTFNPAIKCECSVQNNRTVCHVTKL

SEQ ID NO: 66114 - protein, 98 aa, Zea mays
  Coding DNA Sequence Number=SeqID_22739
MAFQMELQRLLAALGITYSPPIGALTGAPPAPTHVNPHRPLISHLLTSRLRLAPIPNSSMLRMRLSPVYSFTSLFRSKSRSERNLWLGITFCSGGVLG

SEQ ID NO: 66115 - protein, 168 aa, Zea mays
  Coding DNA Sequence Number=SeqID_22740
  Gene Ontology: Mol. function=receptor activity; Cellular component =membrane; Biological process=intracellular protein transport
  Homolog annotation: Hit_ID=Q8S0N4; Match level="QueryCoverage=64%, HitCoverage=56%, E-value=4e-23, Identity=53%"; Hit description =Vesicle transport v-SNARE (Vesicle soluble NSF attachment protein receptor) protein-like
  Pfam annotation: Domain name=V-SNARE; Domain location=29-156; Score= -18.0; E_value=0.039; Accession=PF05008.6; Description=Vesicle transport v-SNARE protein
MAVGRLRSHGAPDSPVRQPQRKKQKLSEIQSGVEEAESLIRKMDLEARSLQPSIKSELKRISAPIARQATREELLESGMADTLAEARNPSEQGCNHDKQIEQAYDDILNSSKHTLASMMELQEALLESNQVSHPVLEGKPNANHVRARISYSRTQQLHNMDIITQCSK

SEQ ID NO: 66116 - protein, 119 aa, Zea mays
  Coding DNA Sequence Number=SeqID_22741
MKLWKETSRSSKITTSSRCGLAATPSRLPVKAAGVLAKLGELTEEEATTLLRVDAEIRALWQKLAYLQALVRGAGRQRRDRASELLLLWLRETREVAFAGGSAIHSGDGSSSQDYHIYT

SEQ ID NO: 66117 - protein, 486 aa, Zea mays
  Coding DNA Sequence Number=SeqID_22742
MCGPRGRMSSPELRESSARMLEVTGGRWPKDVPIPRAAGEDFFTSRMARDLRVFPYGRNIAAVVSAVMNKDRQEAAQKRRAVIRLPEARPKRARGTAKATAPGGSQPTLAAKPAAPGSSKVPESVKVAGVGGTKSAPDGAAKARELPSPGKRVADFGTNISVDDYLVGSGEGQLVVVLPVVATTVSAAVPRVKGSALSAGGEISAVAAIKDEAGTVSRRLREASQQLSQAADFADRVALGALTADVSAEVERLRAQHADAVQKKSVADSKCRKLAEKVAALEGERTDLRRQLVEERREANKAIAKAQAAQAEAKLARVEGSLASQRAEEWEVRFNALQARMERAEASTRSEVERTRKQLVDSYRELGARTADFEVPDREAGLRFLEWLQEELLALPTIVEGFMSYASLITCEGALNALSHEGCSHYEDNNSRLPALPTRSRPPSTSLTLRFATVLRRLCPALGPGKTSASVTCGEASAAATSKAAK

SEQ ID NO: 66118 - protein, 38 aa, Zea mays
  Coding DNA Sequence Number=SeqID_22743
MATFRSEDTCHLKIILNMERPPGKTVLPQGFNGTPLAD

SEQ ID NO: 66119 - protein, 399 aa, Zea mays
  Coding DNA Sequence Number=SeqID_22744
  Homolog annotation: Hit_ID=Q6QP51; Match level="QueryCoverage=30%, HitCoverage=31%, E-value=2e-17, Identity=59%"; Hit description =Putative growth-regulating factor 1
MATTWGVDPFLKATLLTRVLRRHGLSLHQRAPRSSPYDTGAESHTPCKLAGTKEAKPPRAERVTAQRLQALLHLRLNQWVKGRIAMQAACNCTTEMHPYDFDASSMEAQAHTSCNWRTGCYLRKTAPPLTPMTCLLDYGTGAATRGNPAHGPTVPTKHVGHRSVSRGKRRDDRYGQRDRERGYFERDPSLRRKRAPSPPTDQGFEGWPLGRVRQPPQSTRAPRPLLIRGSKAGPSEGFDNRLRALGLRAHYWSEVRRLAPRKGSTAASGHSGSAPTTDQGFEGWPPEGFDSRLRTRRVRDDSGYVRYMAEARATLPRGSGAALANPAPAKPLTASIYQPENSEPDYAPRLRPVKAPSTPGTRSRLARAQPRAETVDPGGFTPRPRASSGNGRTFDSPEA

SEQ ID NO: 66120 - protein, 172 aa, Zea mays
  Coding DNA Sequence Number=SeqID_22745
MNRSRRQRCEREQRWSRLEKKLRRPRSRGLPRPRRRSSGGWNLARSSTWRDQPWSRVAEAMSRANVLGGQLAEATERPVKPSAQVGRGADIFLQGGDPPTVLLSEAGSDSAEGGVNAEGAAAPPTDDLFVGSGIVYPSESYFSWKVMSEESLSSVDLAAYVYSVVFGIPLSK

SEQ ID NO: 66121 - protein, 170 aa, Zea mays
  Coding DNA Sequence Number=SeqID_22746
  Gene Ontology: Mol. function=receptor activity; Cellular component =membrane; Biological process=intracellular protein transport
  Homolog annotation: Hit_ID=Q8S0N4; Match level="QueryCoverage=41%, HitCoverage=31%, E-value=2e-25, Identity=85%"; Hit description =Vesicle transport v-SNARE (Vesicle soluble NSF attachment protein receptor) protein-like
MVVVGGHEPGVGLSAERKKQKLSEIQSGVEEAESLIQKMDLEARSLQPSIKAGLLAKPRDYKSDLNNVKSELKRISAPNASELMLGLDCVYETAPNNKLKKAKEIIQRIRRRELYKASTQWIGARFCRCIPRTRMEGGRHPSLPPRISRQPSPYPACPSTLPPESRIEGG

SEQ ID NO: 66122 - protein, 260 aa, Zea mays
  Coding DNA Sequence Number=SeqID_22747
  Gene Ontology: Mol. function=receptor activity; Cellular component =membrane; Biological process=intracellular protein transport
  Homolog annotation: Hit_ID=Q8S0N4; Match level="QueryCoverage=32%, HitCoverage=38%, E-value=1e-34, Identity=90%"; Hit description =Vesicle transport v-SNARE (Vesicle soluble NSF attachment protein receptor) protein-like
  Subcellular localization annotation: CTP_CleavageSite=99; ConfidenceScore=5.12e-01
MVRRTPKAVVSPAPSLACDVGRPQNGLVHGSADVSHTRAWKEAGTLPRRPGSRASPSPTPPALPFFPSRPPVNVTNPGLVPFAVATRFDERVTELLSALADAAAGRPGRWAIGEAPWSSSGGRNQAVYARRAPGSSSPPPAPASPPPPSSRADCEARRPGSRASVAPLGTPAFVDQRKKQKLSEIQSGVEEAESLIQKMDLEARSLQPSIKASLLAKLREYKSDLNNVKSELKRISAPNARQATREELLESGMADTLAVS

SEQ ID NO: 66123 - protein, 36 aa, Zea mays
  Coding DNA Sequence Number=SeqID_22748
MTSGQKYRDCRQACRSFYMSHQIAMTVATNPVSYEG

SEQ ID NO: 66124 - protein, 119 aa, Zea mays
  Coding DNA Sequence Number=SeqID_22749
  Subcellular localization annotation: CTP_CleavageSite=92; ConfidenceScore=5.10e-01
SSSESLQMDRPSETFRRSLKPLSLCAINKSWGLPLYNPKATRRCRSPPTRGLGPSATLCSAPPMPQRLGATTAARLVALLVCLSPALLAPCRGVNEQGQALLRWKGSSARGALDSSWRA

SEQ ID NO: 66125 - protein, 309 aa, Zea mays
  Coding DNA Sequence Number=SeqID_22750
  Gene Ontology: Mol. function=methyltransferase activity; Cellular component=nematocyst; Biological process=pathogenesis
  Homolog annotation: Hit_ID=A2X903; Match level="QueryCoverage=93%, HitCoverage=88%, E-value=7e-74, Identity=70%"; Hit description =Putative uncharacterized protein
  Pfam annotation: Domain name=Methyltransf_7; Domain location=36-308; Score=198.3; E_value=1.9e-56; Accession=PF03492.6; Description=SAM dependent carboxyl methyltransferase
MKVERDFHMSRGDGEDSYASNSRVQEKSILKTRPVLHKAVTAAHALSLISAGSGGGAMVVADLGCSSGPNTLLIVSEDRREKPLPPPYYVPGLPGSFYTRLFPDRSVHLFHSSYCLMWRSKVPDELTGGAVLNEGHIYIWETTPPAVVALYRRQFQEDLSLFLRLRHTELVTGGHMVLTFLGRKSKDVLRGELSYTWGLLAQALQSLVKQGRVEKEKLDSFNLPFYAPSMDEVTDVIARSQAFDVTHIQLFETNLDPHDDDDMEMEMNEDAAVQSGVNVARTIRAVIGPLHRGPLWRAHTRRSLRAACQ

SEQ ID NO: 66126 - protein, 55 aa, Zea mays
  Coding DNA Sequence Number=SeqID_22751
MGSWRTLARFNEDNLIPCVGFGDSHAQPPKRQWHPLLSPQERETVDAMDAKYSSD

SEQ ID NO: 66127 - protein, 44 aa, Zea mays
  Coding DNA Sequence Number=SeqID_22752
MAISSKAAAALVVTGMLLISTTCCFVQLPAPTHCPFTGGRTLLQ

SEQ ID NO: 66128 - protein, 137 aa, Zea mays
  Coding DNA Sequence Number=SeqID_22753
  Subcellular localization annotation: CTP_CleavageSite=37; ConfidenceScore=5.26e-01
MQAACNRAKWTHFSDSRHARMEAQAHASRNRRAGCCMQATASPAPPPSNGRRFAFAETTAPKKGPGKGDTPKGILPREGTRLRASLLIRGSKAGPPKGSTAASDRVGPTPTTGQRFEGRPPEGFHDRLRLLGLRAHY

SEQ ID NO: 66129 - protein, 219 aa, Zea mays
  Coding DNA Sequence Number=SeqID_22754
VLETVIAGFGPRGELPLLLPLPLSPPLHLLLPPRAGPPATLPARPQRRSPVPPRRAHPRPQARSPCPPVTLPRVAHRRRSPRGTGGAPSSPPAPPSPHASLTASWRRPRARPRAAPARPLLGGARPVHGAAARPRRDSRGLACPRHGLARPDTRNAFLRAAPWNWGVVRFVVVPLMGLGVCGSLCQGGDEEDGYDYAYGNGEDEAVEEDFQEFQEYDEF

SEQ ID NO: 66130 - protein, 126 aa, Zea mays
  Coding DNA Sequence Number=SeqID_22755
  Homolog annotation: Hit_ID=A2X6T6; Match level="QueryCoverage=46%, HitCoverage=5%, E-value=5e-10, Identity=53%"; Hit description =Putative uncharacterized protein
  Pfam annotation: Domain name=B3; Domain location=41-125; Score=3.9; E_ value=0.029; Accession=PF02362.12; Description=B3 DNA binding domain
MEKEPLDMVESSVRVIETHVDIIRSLVTDGVVDTSEPESVYTLKTTFVSNWRFRQRKHGCDVIMLKDPKKRLSPVVYHLPLFVGFTDGWKHLVIANDLRAEDVCELVKGPDDGEPVYYVRMSGHKI

SEQ ID NO: 66131 - protein, 68 aa, Zea mays
  Coding DNA Sequence Number=SeqID_22756
MESVDSSEEERTEEVIESIIAGMWNIMEVVADPCVRSARQNGCENYPFLEMYREHDNIVNCTTPNFTM

SEQ ID NO: 66132 - protein, 157 aa, Zea mays
  Coding DNA Sequence Number=SeqID_22757
  Homolog annotation: Hit_ID=Q9SNJ6; Match level="QueryCoverage=28%, HitCoverage=7%, E-value=2e-07, Identity=55%"; Hit description=EST AU070346(S12172) corresponds to a region of the predicted gene
  Subcellular localization annotation: CTP_CleavageSite=17; ConfidenceScore=5.14e-01
MESSTGVCRARRTSGVVASALVASPTSLRGHLPGQTHPWRGGLGRQTYRPPWACARLASVGICRARHTSGVVASASVARPAGLHGRVPGQVHPADLASVNQSPTLQQASTGMAARDNINAYICDVRPTDIYRTITRHRITYMCGVPIVFSILLDGVS

SEQ ID NO: 66133 - protein, 187 aa, Zea mays
  Coding DNA Sequence Number=SeqID_22758
  Homolog annotation: Hit_ID=Q2QVF2; Match level="QueryCoverage=45%, HitCoverage=9%, E-value=3e-08, Identity=36%"; Hit description =Transposon protein, putative, CACTA, En/Spm sub-class
MTNQSKADSASHGVGTRSQIDNFEVWEEDGMIHTRESLRLKTNISVYKKEDVPPKFVNGRPFLTTVQLSKLSTPEIRMHEWYMVASNKYKLEDFTFVVPEDAFWSNDHIDHVRHLFFDDLWSLYHRQRMETNYLTVGAKAKTPPFARGLRCSRWSDRDKTGRDTLRSIRHQTKACGDVIPQRGLVQL

SEQ ID NO: 66134 - protein, 36 aa, Zea mays
  Coding DNA Sequence Number=SeqID_22759
MTGMKVDKGRPEDEELPVASRKLVIFLRFIINGVES

SEQ ID NO: 66135 - protein, 158 aa, Zea mays
  Coding DNA Sequence Number=SeqID_22760
MDEGTPLSGLESEDDAKPSHGLHAVFSSLWGRGYLAHRLRIRFPEDKGARRLKRLDQPRRLTGPAGRGSGHGLTTLGAVSAVSATLPRPRGSVPRPPGSDINRGSSSTLGVDSTFGGIWPGLGRRHGRRISTSKEDVSTASGPSPPGSLPGTRPEQTA

SEQ ID NO: 66136 - protein, 131 aa, Zea mays
  Coding DNA Sequence Number=SeqID_22761
MAPEAGLGCCQPHPGGWHSSRSRAGGVVFLSACADGDYQPSLGVLGVPLIMVPDRHDAAAACACTEAEHAAAAPLPVRVPRLGAVVEHDHDYGQIYSTRWSRRLKLFDKGGNPPSERMRVGLSCRFLQPGE

SEQ ID NO: 66137 - protein, 68 aa, Zea mays
  Coding DNA Sequence Number=SeqID_22762
MALMPLPYVATRDNNFIETVEYLNGIVLENDGRTNIINFEWFEKVDEIKKEVDSIVDPILDKVAKDKS

SEQ ID NO: 66138 - protein, 131 aa, Zea mays
  Coding DNA Sequence Number=SeqID_22763
MSERNWAETHWIARSTRGGGRPKSGEVDLGPPMKSGRVRGFGELHGLLAELAEALAGLESGWSWLATAAEALAAMAGGIKLAGAKGSGWPERRYGARKSGLSPCPNPRQIPGFVVSRARVPMPSSGTRQRG

SEQ ID NO: 66139 - protein, 67 aa, Zea mays
  Coding DNA Sequence Number=SeqID_22764
MASSNSHMDSAGRGLEHAADRTGGEDDDRFGSRAQGARFSPVRSTGKPETTGPTWEGVSVKMSLDVG

SEQ ID NO: 66140 - protein, 875 aa, Zea mays
  Coding DNA Sequence Number=SeqID_22765
  Gene Ontology: Mol. function=transferase activity, transferring glycosyl groups; Cellular component=integral to membrane; Biological process=cell wall organization and biogenesis
  Homolog annotation: Hit_ID=A2YMH5; Match level="QueryCoverage=99%, HitCoverage=99%, E-value=0.0, Identity=63%"; Hit description =Probable mixed-linked glucan synthase 3
  Pfam annotation: Domain name=Cellulose_synt; Domain location=71-873; Score=908.0; E_value=4.4e-270; Accession=PF03552.5; Description =Cellulose synthase
MTMTSPQALSAGAVTVEDDGGLAVPLLADGSGATKTEEECGAEAEGKYWVAADEAERQAVTDCGAEDGRALLFRTYKLRGAILHPYRALILVRLVAVLLFFVWRIRNSASNVMWFWATSVAGDAWFGFSWLLNQLPKFSPVKSVPDLAALRRHYDLLPADDGAASKLPGVDVFVTTADSVDEPVLYTMNSILSILATDYPADRLACYVSDDSGALVLYEALVEAAKFARLWVPFCRKHCVEPRAPERYFETEPQGGRASQEFVNDYKRVQMEYDEFKVRLGNLPDTIRKRSGTGSMRASEGDAQGTWMADGMQWPGTWMDPTEKHRKGHHAGIVKVVLDHHPSRGHHGPRAGAGAGAENKQSADDFGAAAGLRLPMLVYVSREKDPNYDHNKKAGALNAQLRVSALLSNAQFVINFDCDHYVNNSQALRAAVCLMLDQREGGDTAFVQFPQRFDNVDPTDRYGNHNRVFFDGTMLALNGLQGPSYLGTGCMFRRIALYGVDPPHCRQQQLESVAPEPASKYGKSTALIHSVSEAMGERERLTTPPPVPPLDVEMVVAASYDGGTDWGKGVGYIYGIATEDIVTGFRIHGKGWRSMYCTMRRDAFRGTAPINLTERLHQIVRWSGGSLEMFFSRNNPLVGGQRLKLLQRVSYLNMTVYPVTSLFILLYALCPVMWLVPEEVHIQRPFTRYVVYLLITILMIHMIGWLEMKWSGVAWLDHWRNEQFFMIGSTSAYPIALWHMAKKLLTRKGIHFRVTSKQTTAGTDDKFADLYEMRWTPMLVPTAFVLVANVGAVGVAMGKALVYMGVWTVAQKTHAALGLLFNVWIMLLLYPFALAIMGRWAKRPIILLVLLPAVFAVVGTIYVALHFLLANVIPI

SEQ ID NO: 66141 - protein, 261 aa, Zea mays
  Coding DNA Sequence Number=SeqID_22766
MARLRHTARKSVIPFLPSRLAERPLHRTVSGQSSHLERLHHRLREEQERRRQHGEQQGSSSSPQQEVETVRPRSSVAQLGAPLVPPRDVPAVGGAVGGAVGGATGGDPDDDSDHSTESSEPQEAEGWVARPITRDAARGCHFHDALDTLLRQAFDRHTWSIEYRCVVYQHSRGRYPDRWEATCLVRRPEDDLRGAEAVSEHYSISERDTAEAAMQDAARRALSQYCSLFGGVADGLNLRYYPRRPTGSTESVVVSPVVWLS

SEQ ID NO: 66142 - protein, 122 aa, Zea mays
  Coding DNA Sequence Number=SeqID_22767
MTTRASFNLWHVGPPPAASPRWLHSYTRVITFVVAAKHLEARRTVLGNLWTGKILGATYTTGIASDLFGCKTIAVAGSLVIGRTLNLRQGLSSIGSGSIPVEFNDKSNLEHWFLIGRVRVVA

SEQ ID NO: 66143 - protein, 82 aa, Zea mays
  Coding DNA Sequence Number=SeqID_22768
MQESLAGPPSQQNPPEGLPTLTTPLLPLPLSGKVFLPCLGCTHYLQRTQGSRGKIPKTQKILDWTAGCRFDGTDPITQQRYD

SEQ ID NO: 66144 - protein, 67 aa, Zea mays
  Coding DNA Sequence Number=SeqID_22769
MDGKLQLRLGQPVCKYYNLNSKFKRKGNHKERSSGAPRSYQGTKVVVSSNNIIEVINLTFDVFEGSW

SEQ ID NO: 66145 - protein, 75 aa, Zea mays
  Coding DNA Sequence Number=SeqID_22770
MRVEWECYETDISAVLAVMSGQGSSIDYRYLIRYGLFTDDDEEDGYDYAYGNGKEREESVEVVPQEFQDVDEIED

SEQ ID NO: 66146 - protein, 138 aa, Zea mays
  Coding DNA Sequence Number=SeqID_22771
  Subcellular localization annotation: CTP_CleavageSite=56; ConfidenceScore=5.42e-01
MATVAESSSFIAPKSSPAVRRVLRPCPNVMRLCPAVHRRLRGLEQFLECLSVRTCSLDYRPGKQCNHEECYETDISVVLAVMSGQGSSIDYRYLIRDGLFTDDDEEDGYDYAYGNGKEREEGIEVDTQKFQDVNEFED

SEQ ID NO: 66147 - protein, 194 aa, Zea mays
  Coding DNA Sequence Number=SeqID_22772
  Subcellular localization annotation: CTP_CleavageSite=65; ConfidenceScore=5.76e-01
MDAPTTTRSPATTEPLLNPTPCSPTSPLPFATSAQLSRPLSRSAHANREPPPPPTDVHRLFRGRRCARAPSSAMPELHHRRPVVSLCLSRCPVPPALPLKESNLPAPLFPCVLHLLTHNFSWELPRAAVSPPRRVQRPLVLPIGVVPSAESARSPYNEQFEVPECVVGDLPEQQPGGEAGNMDDFEEFLEYDEF

SEQ ID NO: 66148 - protein, 101 aa, Zea mays
  Coding DNA Sequence Number=SeqID_22773
MAMLTMLLNLGLSSPIGETTKPPVLPDGRWGDRIMLRADLRTPEPIFHMAHQASRLPTVQESSASQTLPPAEARKKIPAAPAPVVDAPAPRASDVAASPNG

SEQ ID NO: 66149 - protein, 176 aa, Zea mays
  Coding DNA Sequence Number=SeqID_22774
  Subcellular localization annotation: CTP_CleavageSite=27; ConfidenceScore=5.29e-01
MKQVQQQQPPPQPQMQVQMPQMPRDKRAESMRHHPPVSLALSLALPMRTENLRHQPPTSTACSVAVVAPVSRPVPRRSSATVTPTHPCASVVASCLQRFPSSALWCSRAGVVPSAESARSPCVRLGQPPSLWCPTVADNEQSEVPECVVGDLPEQQPGGEAGNMDDFEEFQEYDEF

SEQ ID NO: 66150 - protein, 199 aa, Zea mays
  Coding DNA Sequence Number=SeqID_22775
  Homolog annotation: Hit_ID=A2XFR6; Match level="QueryCoverage=78%, HitCoverage=42%, E-value=4e-08, Identity=27%"; Hit description =Putative uncharacterized protein
MPPAPQQGISAAGGDPDGDDDDGGGSSSHDTERSEEPEPEGWIVRPITRDAAQAFSEHYSITERDTAETAMQDAARRALSQYCLLFSGVADGLDLKYYPRLSISSAGGVIVSLVGEGNPTLSSMVNLVSVLNTELDHTLDELGKVRAEVAELRAECAARHYLDGGSPAPVGFQHPYHSPPHGRFDYGTPDCRARIDLDP

SEQ ID NO: 66151 - protein, 178 aa, Zea mays
  Coding DNA Sequence Number=SeqID_22776
MSPPDPFLGRVRVLFASESRDPATHRVYLGAHPFPWPRGDLGAVDVARLRTGLRATRDLSAGVAPSYCGKGSCDYSEITSRGWFNSSLLYAKLRSTNVQGRTGLRSHVTTRRDALSFVSSALLAALFVVAGAAEARTSRLENKKKALEKLREKALGRKEENGATGGKKMPPPTNLLIR

SEQ ID NO: 66152 - protein, 175 aa, Zea mays
  Coding DNA Sequence Number=SeqID_22777
MGKPVPSLLMLLLSRGRYNGSSSLISCEKQTIRIEFFILARSGLTALAYNAPLTPTGRRAVAALVPTITGMGDLVSGRVRGKVCGQVHSGTRLTDLPYFSVMHKTGACLPKQWQAGPLVLALVLDLGLPPEQLLAPARGCTLRQQDYSLANAMNIGLSLAILACFKNLRLKETKG

SEQ ID NO: 66153 - protein, 235 aa, Zea mays
  Coding DNA Sequence Number=SeqID_22778
MPPRTRKTARKSIGPIGVPHHQLAPRHEDSSSGSNDPIGDLEAQVEQLRSELRHRNDIWVADGERINELRTDIHHLQDQLAERDLALDWVVNSRSLAWAKEAKARARVEELSTAVDHLQVYCKTLHEKMPSKTHAQDGAGTSRGRETTPNLPPVPPTLAKAIAALVNATADNTRFLREMAGQQMQQQGGRAYQQGPHETSYLDFSETRPPLFVKAKDPLKADEWIRVIEQKFGLL

SEQ ID NO: 66154 - protein, 203 aa, Zea mays
  Coding DNA Sequence Number=SeqID_22779
MEDQATPLARVPAHIGQDQGLGYGRPDINARGRRSPEAPVRAAAEKVAPVLLDIPTLYDDTCLRTAILATLPTHDDSGVAAHVLSVINAKTRVAQRLYARLRPLAYAARSRPRGSIGSPPERGAGVYVIRSGLDTCRHQTPAWVLIKARGSGTFPWGSGLTSDASEHVTFSGHVAALDPPMWWGYRQNPSGWVSSVVQIQIDH

SEQ ID NO: 66155 - protein, 134 aa, Zea mays
  Coding DNA Sequence Number=SeqID_22780
  Gene Ontology: Mol. function=cysteine-type peptidase activity; Biological process=proteolysis
  Homolog annotation: Hit_ID=Q5NKQ2; Match level="QueryCoverage=92%, HitCoverage=13%, E-value=8e-37, Identity=59%"; Hit description =Putative uncharacterized protein 9C20.3a
MPSVDDDDDFEPPKKRLNIRCNPQDVLTSIQIMNERQCQVIVSKVFSNILDTAIDAIGCQTHLCWLMQKLDPKDMTLCIGPDKELKITKETVRLILSLPNSGGGKTLNFDEANVAANLQSSLGINNDEFVISKL

SEQ ID NO: 66156 - protein, 117 aa, Zea mays
  Coding DNA Sequence Number=SeqID_22781
  Gene Ontology: Mol. function=nucleic acid binding; Cellular component= cytoplasm; Biological process=mRNA catabolic process, deadenylation -dependent decay
  Homolog annotation: Hit_ID=A2Y7T0; Match level="QueryCoverage=94%, HitCoverage=29%, E-value=5e-45, Identity=73%"; Hit description =Putative uncharacterized protein
  Pfam annotation: Domain name=zf-CCCH; Domain location=42-68; Score =53.2; E_value=9.2e-13; Accession=PF00642.15; Description=Zinc finger C-x8-C-x5-C-x3-H type (and similar)
  Pfam annotation: Domain name=zf-CCCH; Domain location=80-106; Score =23.3; E_value=0.00089; Accession=PF00642.15; Description=Zinc finger C-x8-C-x5-C-x3-H type (and similar)
  Pfam module annotation: Pfam domain module=zf-CCCH::zf-CCCH; Domain location=42-68::80-106
MRCTEPQRVYKGNGGEKKDEELPKEQHAAGGVELEVFNQGMLKTELCNKWEETGACPYGDQCQFAHGVAELRPVIRHPRYKTQVCRMVLAGEVCPYGHRCHFRHTLTPAERLHLACP

SEQ ID NO: 66157 - protein, 102 aa, Zea mays
  Coding DNA Sequence Number=SeqID_22782
MWEREREATDAIAAQIAAAEQLLASPAAHNGEATSHATGVMHGILATSAVGAGHRTTSATTVPWHDPADPLVAQLHLQAGSVQNIRLMVPVVLEAESPSYAR

SEQ ID NO: 66158 - protein, 103 aa, Zea mays
  Coding DNA Sequence Number=SeqID_22783
  Pfam annotation: Domain name=zf-CCHC; Domain location=59-76; Score =9.5; E_value=0.057; Accession=PF00098.14; Description=Zinc knuckle
MNKKAKQLRRRRIAQPLQDIHGRVVKKLEKGETTASVKLHNKLIKQQMNKEKGKDERMRICFGCNDKDHVNTSCPLMKNQRRTFPTMTLTKNKNEQQASYQAE

SEQ ID NO: 66159 - protein, 182 aa, Zea mays
  Coding DNA Sequence Number=SeqID_22784
MEIGNDIKLQMYLRLEKSFGSASTFVFLVLLHTGSDPSLKNRSFLLCHNAITCPKFGVLVIRKCQDKGSGTSVKEHPRDKAFKGSKLNLVMRGFLEFILILRGECFSFVNNAYHMLLVVLYGDNAYKMDIAQVRLGVRNSEITDQAKDGGKKSFEVPSAREKVKEAEEPKARGEEEDLQSQG

SEQ ID NO: 66160 - protein, 80 aa, Zea mays
  Coding DNA Sequence Number=SeqID_22785
MELGLRAWRGARPGKGVCAAREEWRRRINNGDLIGVGGYDLVSVAGGDVDTNNGALAGVEGKVADRSPFGYVQRRRSDVI

SEQ ID NO: 66161 - protein, 42 aa, Zea mays
  Coding DNA Sequence Number=SeqID_22786
MAPKRKTSSSSAVVIPPIDPNSQLPFAGRFLMMNGRSTLKCP

SEQ ID NO: 66162 - protein, 110 aa, Zea mays
  Coding DNA Sequence Number=SeqID_22787
MGKNNKRKHDSQGLAAEVWTYIRAVERSGLEGSDESEYSSDEEDSNGGGEDEGGDDDDDDEGSGDGDGDGSGKGGGSGSKDGDGGGSRGGSGGGGSSRGSNRGGSNRASG

SEQ ID NO: 66163 - protein, 155 aa, Zea mays
  Coding DNA Sequence Number=SeqID_22788
MGKSKKGGSSSHHSSDKRKREPTPPSEDFGDSEYSEEEFSSESEGSLAHTSPPASSDDSDDSQGIAAEVWTYIRAVERAGLKGSDESEYSSDEEDSSDSSEEGSGGDDGDGDDDGGDGDGGSGSGKGGDGSGKGGSCNGGSGSKGSSKGSNKTSG

SEQ ID NO: 66164 - protein, 263 aa, Zea mays
  Coding DNA Sequence Number=SeqID_22789
MARDPLRGLYKVPLASENPLQFIGRSSTGFLADRHRSKINQGPPRTDLSPTALAPFGGLGRGSSVNRAAEGVWSSAGRWIKHQAPRLNQKLCKLVLIADPRIWILRLRRVTWWTTQTSDLSRSSPNQRPRLQPAKGYYPGGTCHADEKLRGHGGVDDGIGDDRSSTSARRSDRMLHGGPRVRGSRVQRRWRALPERNPAALPIRAWSWSSAQQLQARTAHAAMLGDFVEDGSGAQVPFASDGEKKTQPDKRAPGVSGASAHEI

SEQ ID NO: 66165 - protein, 87 aa, Zea mays
  Coding DNA Sequence Number=SeqID_22790
MRKINTSDRAIKQCQLKEEVVHVSTVGNKESGNLLGVVKLRPALDWANLTPADRDAPVRGEDRELWSRIASLRREDAVKSGGGAVAS

SEQ ID NO: 66166 - protein, 71 aa, Zea mays
  Coding DNA Sequence Number=SeqID_22791
MYPASCNSINCFFSPFNSSTDILYGHLEIGAVPGSLSLKKVINVGLQGVKSILYQSRKDKNDQSGTVEGET

SEQ ID NO: 66167 - protein, 102 aa, Zea mays
  Coding DNA Sequence Number=SeqID_22792
  Subcellular localization annotation: CTP_CleavageSite=47; ConfidenceScore=5.70e-01
MASSSALVVPSIPLPLPDAYKRDRLSSVPSIPAPAISSTPPRANRASATASSPSLRRINQCVKLRHTLTVTGHPSPPPIAPGSLTGDLTAVSTHHRAAVRPP

SEQ ID NO: 66168 - protein, 244 aa, Zea mays
  Coding DNA Sequence Number=SeqID_22793
  Gene Ontology: Cellular component=extracellular region
  Homolog annotation: Hit_ID=Q53NM4; Match level="QueryCoverage=80%, HitCoverage=85%, E-value=2e-45, Identity=53%"; Hit description =Osmotin protein homolog-rice, putative
  Pfam annotation: Domain name=Thaumatin; Domain location=43-235; Score= -2.9; E_value=5.5e-08; Accession=PF00314.8; Description=Thaumatin family
  Subcellular localization annotation: CTP_CleavageSite=54; ConfidenceScore=5.19e-01
MSSTTEALAPMMILALAAVLLATAARQPSPVMSTTTTNLTLHNLCPYPVWPLVTANAGNPSIPTDADGEPAGRLDGNGEGLATLAFPPGAWSGRVVARTGCTGGDDNDEADAYDPLLPTPPLRCTTGDAPPVTVAQVSVGGTGGAAAYSVSLVDGFQRGEGTGPRRRCPTLGCAVDLGAECPPRARAPGGGCGAGATEAALFKHLCPDTRTNATDIEDTPQDCVDPGEIKVVFCPKPGSVSRQL

SEQ ID NO: 66169 - protein, 246 aa, Zea mays
  Coding DNA Sequence Number=SeqID_22794
  Gene Ontology: Mol. function=metal ion binding; Cellular component =integral to membrane; Biological process=ubiquitin cycle
  Homolog annotation: Hit_ID=Q53NM8; Match level="QueryCoverage=26%, HitCoverage=38%, E-value=2e-24, Identity=71%"; Hit description=Zinc finger, C3HC4 type (RING finger), putative
  Pfam annotation: Domain name=PHD; Domain location=117-162; Score= -5.9; E_value=0.064; Accession=PF00628.20; Description=PHD-finger
  Pfam annotation: Domain name=zf-C3HC4; Domain location=118-159; Score= 40.7; E_value=5.2e-09; Accession=PF00097.16; Description=Zinc finger, C3HC4 type (RING finger)
  Pfam module annotation: Pfam domain module=PHD::zf-C3HC4; Domain location=117-162::118-159
MSWSSLISGDAYKSPAFIALASALCVAVAVLLHHCVLAACCHGGDRRRRRQQHHHRHVVSAVTTSFSAGARRHQHQHQPEEEEADVSVEVSATSRTHLVAAAVVCRYRKEEPWNESTCPVCLADFDDGEAVRVLPECMHYFHAECIDTWLRGSTSCPMCRAETTPHAHAQPGLRAPPPRALLLPRGDPCADGPRYRAGRSATWREAAVLSGQARTVRGTGPNGAADDRRQRLDLAPGRDPVGEERS

SEQ ID NO: 66170 - protein, 294 aa, Zea mays
  Coding DNA Sequence Number=SeqID_22795
  Gene Ontology: Cellular component=nucleus; Biological process =regulation of transcription, DNA-dependent
  Homolog annotation: Hit_ID=A2XHV2; Match level="QueryCoverage=68%, HitCoverage=43%, E-value=1e-40, Identity=46%"; Hit description =Putative uncharacterized protein
MAATIRRSCACIATKRKYATNYMRGLSNIFLQRAGAARVSSCKIACMKPMSCHEQEQHAELAAATTNSGFDWLEDSVSFLTADVDAAGCRGYGWCPPLAHTSPSIASPAVSEPLSKKRKSPAHRASAHSGSNQRRRADQADRPGAGGGKKGGGAGSDRDTRWAEQLLNPCTTAVEAGNLTRVQHLFYVLGELTSFSGDANHRLAAHGLRALARSRLPAAVGPAAATAVRVPPCDCPTPAFAGTEPRLFRASLIRFHEVSPWFALANAAMEWNREKGNRCRDAVSVTGLIVDVTL

SEQ ID NO: 66171 - protein, 125 aa, Zea mays
  Coding DNA Sequence Number=SeqID_22796
MPPQSGARAHVSRQNGNMQLTTCEAYPTNLLLSLASLLNLDEPELVAQFAETFPRKRLRQNVSQLLGGVDGDDVHPAFLDALTNEVISGVYMFAAFVKNRVLTELDGGLVVDKDRDRTLLLASQL

SEQ ID NO: 66172 - protein, 44 aa, Zea mays
  Coding DNA Sequence Number=SeqID_22797
MSPIVVGNLLGAIANADHYVNWNMERPPGKTVLPQRFNGTPLAD

SEQ ID NO: 66173 - protein, 554 aa, Zea mays
  Coding DNA Sequence Number=SeqID_22798
  Gene Ontology: Mol. function=nucleoside-triphosphatase activity; Cellular component=integral to membrane; Biological process=transport
  Homolog annotation: Hit_ID=Q2QT07; Match level="QueryCoverage=99%, HitCoverage=76%, E-value=0.0, Identity=78%"; Hit description=ABC-2 type transporter family protein, expressed
  Pfam annotation: Domain name=ABC2_membrane; Domain location=266-479; Score=141.9; E_value=1.8e-39; Accession=PF01061.15; Description=ABC -2 type transporter
  Pfam annotation: Domain name=ABC_tran; Domain location=3-163; Score =42.6; E_value=2.4e-10; Accession=PF00005.18; Description=ABC transporter
  Pfam module annotation: Pfam domain module=ABC2_membrane::ABC_tran; Domain location=266-479::3-163
MNKTGLILINGRQEKLAYGTSAYVTQDNVLMSTLSVREAVYYSAQLQLPDTTPAAEKRAHAERVIREMVLADAMDTRIGGRVTKGISGGQRKRLSICIEMLTRPRLLFLDEPTSGLDSAASYHVMSHIARVAARDGMTVVAAVHQPSGDVLELFHGLCLLAAGRTVFFGTISDATEFFSLNGFPCPRLRSPSDHFLRTINKDFDEETVVESSDKAKRKTAADEAIEILATAYRSSIYLDKTTDQIVEMKSMDGASFRRREHASFGTKLLVLTRRSFLNMHRDVGYYWMRLAIYMGIGVCLGTIFYQLGYSTYSSIQSRCEVIMYTIALLTFMSIGGFPSFVEDVKVFRKERLSGHYGVSEFVISNTISATPYLSVVSLLPGAMLYYLTGLSKGADHFVYFVMVLCVCCLLVESMMMVIAAVVPDFLMGIIVGAGVQGVMMLNGGFFRLPNELPKPVWKYPCYYLSFHKYAVQGLYKNEFVGLSFPSDQLVDSNVTVSGLQVLEYKLQVEMGYSKWVNLAILCGMMLVYRMIFFAIVKISEEVRQKRGGKRGCVR

SEQ ID NO: 66174 - protein, 176 aa, Zea mays
  Coding DNA Sequence Number=SeqID_22799
  Gene Ontology: Mol. function=carboxyl- or carbamoyltransferase activity; Cellular component=ornithine carbamoyltransferase complex; Biological process=amino acid metabolic process
  Homolog annotation: Hit_ID=Q8SA97; Match level="QueryCoverage=64%, HitCoverage=21%, E-value=1e-19, Identity=50%"; Hit description =Ornithine carbamoyltransferase
MAPPVDVASLRPRLGDVEVPPKPRSSLSSMVEAESEPLGRARRRSSAEARAESEPWGRAKRSSSSSGAEPESEPWVGRSGVRRLPGLSPSPSPGSGGAEFAVFRGLARVRALGWAERIGVAQAALSFCQASQWSGEVTAVTSALPGGVRQDKGVRASGEPELYADGGYQLRIRSLE

SEQ ID NO: 66175 - protein, 85 aa, Zea mays
  Coding DNA Sequence Number=SeqID_22800
  Subcellular localization annotation: CTP_CleavageSite=67; ConfidenceScore=5.27e-01
MADMFQYMQSLGAAQGIAPPPPLFLPVDPTLVHTPGQSGRHPTTLRKGSAQRSPVGGYKRPRGRGKRAAPRERLSRPRPRAANPL

SEQ ID NO: 66176 - protein, 195 aa, Zea mays
  Coding DNA Sequence Number=SeqID_22801
  Gene Ontology: Mol. function=metal ion binding; Cellular component =integral to membrane; Biological process=ubiquitin cycle
  Homolog annotation: Hit_ID=Q53NN4; Match level="QueryCoverage=56%, HitCoverage=58%, E-value=6e-19, Identity=43%"; Hit description=Zinc finger, C3HC4 type (RING finger), putative
  Pfam annotation: Domain name=PHD; Domain location=113-158; Score= -7.2; E_value=0.092; Accession=PF00628.20; Description=PHD-finger
  Pfam annotation: Domain name=zf-C3HC4; Domain location=114-155; Score= 28.8; E_value=2e-05; Accession=PF00097.16; Description=Zinc finger, C3HC4 type (RING finger)
  Pfam module annotation: Pfam domain module=PHD::zf-C3HC4; Domain location=113-158::114-155
MYYYYGEGPRQTDEEQDKTIVAIVVPVIIVVILVLRLLCSCLQKDSEEQDAGGPGSTARQLRPSRQRATEAGGRVVDRAPSSTVSGAVVEVAQAGEPPLVCTYTKADGWGEGTCGVCLADLADGDALRVLPACMHYFHAACVGEWLRAHGTCPLCRAPLVAPAAAAYRISGQTDDGNDRVVPTASPAGVLVLLRL

SEQ ID NO: 66177 - protein, 326 aa, Zea mays
  Coding DNA Sequence Number=SeqID_22802
  Gene Ontology: Mol. function=transferase activity, transferring glycosyl groups; Cellular component=membrane
  Homolog annotation: Hit_ID=A2X8C0; Match level="QueryCoverage=21%, HitCoverage=15%, E-value=2e-22, Identity=75%"; Hit description =Putative uncharacterized protein
MACRTLELMLVSARDLRAVNLVSKMEVYAVAYEANDPRSRQRVPPTTPTAATPPGTPPLCSPFRPPQRRGGGTPTLHTAHRAPTRLPGRIVSETFRLGLPGVRWFVLGDDDTVFFPDNLLTVLNKFDHRQPYYIGSLSESHLQNIYFSGVRRRRLHHQSAAGRGARADAGWLPPPVPGAVRQRRPDPGVHGGAGRAAHQAPGVPPVRSRSRSARPGCGGDDRGLDPRPGCCGDGGGLNPGLDQGHGGDEGGGRGYCDGTNCFANGSGLANSIVGSMSTYSDFLVDHYNTPSAIETAKLQGLYLMEEIVLSIYDLLAIRKQLPYSFA

SEQ ID NO: 66178 - protein, 524 aa, Zea mays
  Coding DNA Sequence Number=SeqID_22803
  Gene Ontology: Mol. function=diacylglycerol kinase activity; Cellular component=nucleus; Biological process=activation of protein kinase C
  Homolog annotation: Hit_ID=Q6K9T2; Match level="QueryCoverage=92%, HitCoverage=96%, E-value=1e-157, Identity=63%"; Hit description =Pentatricopeptide repeat-containing protein-like
  Pfam annotation: Domain name=PPR; Domain location=190-224; Score =39.0; E_value=1.6e-08; Accession=PF01535.11; Description=PPR repeat
  Pfam annotation: Domain name=PPR; Domain location=296-330; Score =45.4; E_value=2e-10; Accession=PF01535.11; Description=PPR repeat
  Pfam annotation: Domain name=PPR; Domain location=331-365; Score=9.2; E_value=0.63; Accession=PF01535.11; Description=PPR repeat
  Pfam annotation: Domain name=PPR; Domain location=367-401; Score=4.3; E_value=2.4; Accession=PF01535.11; Description=PPR repeat
  Pfam annotation: Domain name=PPR; Domain location=433-467; Score=0.1; E_value=7.6; Accession=PF01535.11; Description=PPR repeat
  Pfam annotation: Domain name=TPR_4; Domain location=160-183; Score =2.0; E_value=22; Accession=PF07721.5; Description=Tetratricopeptide repeat
  Pfam annotation: Domain name=TPR_4; Domain location=191-214; Score =1.8; E_value=24; Accession=PF07721.5; Description=Tetratricopeptide repeat
  Pfam annotation: Domain name=TPR_4; Domain location=262-287; Score =6.4; E_value=6.8; Accession=PF07721.5; Description=Tetratricopeptide repeat
  Pfam annotation: Domain name=TPR_4; Domain location=366-391; Score =11.6; E_value=1.6; Accession=PF07721.5; Description=Tetratricopeptide repeat
  Pfam annotation: Domain name=TPR_4; Domain location=398-423; Score =2.0; E_value=23; Accession=PF07721.5; Description=Tetratricopeptide repeat
  Pfam module annotation: Pfam domain module=PPR::PPR::PPR::PPR::PPR::TP R_4::TPR_4::TPR_4::TPR_4::TPR_4; Domain location=190-224::296 -330::331-365::367-401::433-467::160-183::191-214::262-287::366 -391::398-423
  Subcellular localization annotation: CTP_CleavageSite=19; ConfidenceScore=5.04e-01
MQSIATAAALQLLCRPSLSAAQLRQVDGHLLRSSTLLLADRFLPNQLLRSLLPAHPLGALRLFPRLRRIIPDFRPNNYTFSFLLKAAADSSAPPYLEPESPFGSHAIVPCLHALAVVLAWDAHAYVANGLIHAYATHGVLPAARRLFGGAVASRAADVCSWTSLLTACAKAGHVDEARALFDGMPRRNDVAWSAMLSAYVAAGSFGDAVRLFEDMLRSCVRPNRAAVVGVLTACGALGALDQGRWVHALLVGGGGHGVAMDGVVATALVDMYAKCGSLETARQVFAAAPRGQRDVFAYTAMISGLSDHGRCGEAIDLFGQMLVEGVRPNEVTFICVLTACGRAGLVGRAKEVFRSMGAVHGMEPGVEHYGCLVDVLGRAGQLADALEAVRSMPMRPDSYVLGALLNACAAHGDVEAGEQVVRWLAELGLDHSGVHVQLSNMYAGWGKWEEVLKVRRDMEERRVAKVPGCSMLEVGGVVCEFVAGDRSHPLMPEIMSASRDLHGQLRQLDHDYLSLGPLCLQSSL

SEQ ID NO: 66179 - protein, 78 aa, Zea mays
  Coding DNA Sequence Number=SeqID_22804
  Subcellular localization annotation: CTP_CleavageSite=41; ConfidenceScore=5.27e-01
MGGITGGHGRGHGLVPVDAHPSTLNSSRDYQFHSNNNPKTRIFMKTDFNTRTAFLQSLPPRTVVHPNLGRRLEVSAIK

SEQ ID NO: 66180 - protein, 370 aa, Zea mays
  Coding DNA Sequence Number=SeqID_22805
  Subcellular localization annotation: CTP_CleavageSite=34; ConfidenceScore=5.08e-01
MRSWKAVCGSPRDILLHRAMAAPDVLPSAARPPRLAMRKPASTAVATLSSHPLTLHRLACLLALLAPRLIRPSHPALSLSSLPLRPTSPQPTARSRSSTPFCLSPDNKRLHDMCPPAAAARPHTSRGIASVYAKRNALTFPRVLSVVPRVWRRLATKFLAAFALLFAYHVVVVLVFIGLLIAGDNGSSLASLLRPSAPSPVTAHRATASVIDDLPTLAPAHRFATSDAFLRSRRAPACIASVPTKLVDRGSDVLNCTVSDDRLVGYWLGHNFMQDMKDSSRGAPNDYAGSRHYAGFRWLCVTVLSDLKELLLVAIDHSNGGSGGVAPAVLGMSVGDGTYYYNVLKVLSDPQKRAAYDQYGKEGLKAFADI

SEQ ID NO: 66181 - protein, 133 aa, Zea mays
  Coding DNA Sequence Number=SeqID_22806
  Subcellular localization annotation: CTP_CleavageSite=64; ConfidenceScore=5.02e-01
MVLGLSLFHYYQKSSLRRHSPPKYLGISRETKDVIKSINKSTGNKSKSSQTLSSSLSRQSKDVVKALKKQIGHRNPKVQLLALSIKHLILSSSTGYAAFNKVDFYVYIFIEETQHFAKNIMTSLAITRVGFML

SEQ ID NO: 66182 - protein, 131 aa, Zea mays
  Coding DNA Sequence Number=SeqID_22807
MGAISASPDARQYLRLEDLRQRRPPTSSSNTSGRLPPRLSKALTSIKAARNLDIIPRKDADAPRKQAFSPYPDAVTTTTGAKTSLLRIQPHQASPWTPPLCINRTVEFLQEDAQTSRTLRRTLYSPTSLRY

SEQ ID NO: 66183 - protein, 210 aa, Zea mays
  Coding DNA Sequence Number=SeqID_22808
  Gene Ontology: Mol. function=binding
  Homolog annotation: Hit_ID=A2XBB1; Match level="QueryCoverage=82%, HitCoverage=8%, E-value=3e-54, Identity=63%"; Hit description =Putative uncharacterized protein
MERKSPHWRGIHCRPVYSGRLESAKIRGWTTNAEKVWPGMLSRKPVLPQQFLKFIEETYHQLTISLPDSFQYLQPLRYALASILRYLAPEFVDAKAERFDNRIHKGLFDLLLTWSEDSGSSWGHESSSDNRREIERYKSNQYTRSLDKFSFDREMTQQLAMNWVSMNIMPLLYGPCFDDNARKMSGRVISWINSLFLEPSPVHPRTLEAY

SEQ ID NO: 66184 - protein, 293 aa, Zea mays
  Coding DNA Sequence Number=SeqID_22809
MGGTRAAFVLLLLEGRDLAGVGTLQPSLGFKDFHHAARLHSLTNGERAFTGLAEGANFNNAGPVGRKCHQLQRAWLAGSAGSIAASDAASCRLIRAWLFVHCTGDSRAAHRSGITAPPRGGRCWSVREDLSGDLPVQAGVAAIRRRGAGVQVATIVGAEVVVAIGEAASAEAVASVDDTVSATCAPGLRLFGFNGWFSSLVRGRERGPSSGSVCPGAIAAVVLPSETEVVVAAGAVVAGEPPGNLRSLCDELEPEVVASAWTKAESTRKEASSAREHVASLAEEVQRRRLELG

SEQ ID NO: 66185 - protein, 125 aa, Zea mays
  Coding DNA Sequence Number=SeqID_22810
MDKSSIGYRAHKENKYQQENKTIPKPKSKRFFEYGKEAHCMIRKDASDKVMFLGPPNKNRPKKIWVGKALVEKRRDDDRIDIQEGVKVRRWGRADKRKDVLIEDHVMGDDDTASEEIEAPIPPCD

SEQ ID NO: 66186 - protein, 79 aa, Zea mays
  Coding DNA Sequence Number=SeqID_22811
MPHLLDCGIGATTRGNPAHGPTVPIEHNDHGDRERDISKGILLREGSGPRALLLIRGSKAGPSEGFDSRPRALGLQAHY

SEQ ID NO: 66187 - protein, 77 aa, Zea mays
  Coding DNA Sequence Number=SeqID_22812
MEILRPVIFVEEALLMKLSVLRPSVLLILSKMANFFRGFVYLPLQVFKTQKVEVSSPEVGANVGDLFSMLRVKNKAT

SEQ ID NO: 66188 - protein, 92 aa, Zea mays
  Coding DNA Sequence Number=SeqID_22813
  Gene Ontology: Mol. function=carboxyl- or carbamoyltransferase activity; Cellular component=ornithine carbamoyltransferase complex; Biological process=amino acid metabolic process
  Homolog annotation: Hit_ID=Q8SA97; Match level="QueryCoverage=70%, HitCoverage=12%, E-value=3e-18, Identity=67%"; Hit description =Ornithine carbamoyltransferase
MEGNLENREVENIESIPGKVSQVVYTGYENNIVHSWLLLAVVLPFHFVCACPKELEPDANTMEIARGAGISIIEIKTVPEKQLRGLLGKKHP

SEQ ID NO: 66189 - protein, 141 aa, Zea mays
  Coding DNA Sequence Number=SeqID_22814
  Subcellular localization annotation: CTP_CleavageSite=30; ConfidenceScore=5.02e-01
MEDDDDGGEDLCLRFSAPTFFAGVDLLNLFAMAVRRRPTPTLPPNSSNSWILLSSPATSLLPATESGPPPDPPAHGLFEPSLAASSDDPRREAPSPTGIEVASDGRTKRAEFSPRRSPILRPDSERSEVSTSSVRAASSKF

SEQ ID NO: 66190 - protein, 110 aa, Zea mays
  Coding DNA Sequence Number=SeqID_22815
  Homolog annotation: Hit_ID=A2XBB1; Match level="QueryCoverage=27%, HitCoverage=1%, E-value=2e-08, Identity=93%"; Hit description =Putative uncharacterized protein
MVISFLMILRNFGSNTRNIIPVLNFLITRGIEDCNVNPSAEITGRLAPGGAALPLVAGDSSDWRSGEDRGGSQAGGVAARAVGERSAALEPGALEVRRLEQWSLERSCGS

SEQ ID NO: 66191 - protein, 306 aa, Zea mays
  Coding DNA Sequence Number=SeqID_22816
  Homolog annotation: Hit_ID=A2YGC2; Match level="QueryCoverage=44%, HitCoverage=58%, E-value=8e-09, Identity=29%"; Hit description =Putative uncharacterized protein
MGRLEPQAEWESRLVGKVCILCRVLETGISAVLTFYSYSCAYDIFCRWPVSGALHGIPAAGGDPDGDKDDDVDGSSSHNTKCSEEPEPEGWIARPITRDAACECHFHDALDTLLRRAFDRHTWSIEYRCVVYRHHRGSYPDQWEATCLVRRPDDDLRGAEAFLEHYSITKRDTVEAVMQDAARRALSQYCSLFSGVADGLDLKYYHHRSTGSARGVIVSPVGEGNPRLNNMVNLAAVLNTELDDALDELGKVQVEVVELRAECATHHYLDGGSPALVGIQHPYRSLPRGRFDYGTPDYRTRINLDP

SEQ ID NO: 66192 - protein, 267 aa, Zea mays
  Coding DNA Sequence Number=SeqID_22817
  Gene Ontology: Mol. function=membrane alanyl aminopeptidase activity; Cellular component=cytoplasm; Biological process=proteolysis
  Homolog annotation: Hit_ID=A2X2G9; Match level="QueryCoverage=34%, HitCoverage=11%, E-value=9e-35, Identity=75%"; Hit description =Putative uncharacterized protein
MKNYGLVTYHETALLFDEMHSAAANKQRVAVVVAHELAHQWFWKFCHNGMVSYLAADQFFPEWNVWTQFLEESTIGFKLDALAGSHPIEMEDPVAAISALFPLPLLPWPLKDHILLYLKHLPPELLKERLPCISENAVIPRLLDDVKKPEKTITETEIPKRPMWHTYLGCRPPETNPSVLEPQPMISNFGRGRGRAIATETMLGGGGRGYGRSFHGAESSQSRGSRNDRSSYAGRGTYGGGFQRQQTTWRPAGDAGRRGGSEQRRGW

SEQ ID NO: 66193 - protein, 200 aa, Zea mays
  Coding DNA Sequence Number=SeqID_22818
  Gene Ontology: Mol. function=hydrolase activity, acting on glycosyl bonds; Cellular component=cellulose and pectin-containing cell wall; Biological process=cell wall organization and biogenesis
  Homolog annotation: Hit_ID=Q10SE9; Match level="QueryCoverage=88%, HitCoverage=38%, E-value=3e-83, Identity=80%"; Hit description =Polygalacturonase, putative, expressed
MAYGDRVTTFEDSEKESEYGYVRKDMKHWPLIAPLSSYGRGRDEPGPRYNNFIGGSNLTDVIITGKNGTINGQGQVWWDKFHAKELKFIRGHLLELLYSDNIIISNVTFVNAPYWNLHPTYCTNVTISGVTIPAPVNSPNTDGIGPESSSRVKVEDCYIISSDDCVAVKSGWDEYDIRFNMPSQHIVIQRLTSISPTRAP

SEQ ID NO: 66194 - protein, 382 aa, Zea mays
  Coding DNA Sequence Number=SeqID_22819
MEQALVFKPKLKNQARAGKQELKFEKITQIAEMTYQMLPLWVPIYTPSTLQLAAPFVIDFRYSSKGKINSSTNARTIGVLEARVGIVDLAQVQAVPTRQSHNPANHSLLRADSWGQILPLPLSGLIGLIRLTPWSIKVMHSVPHQGKTSTMSAPREKMDSHVAEFQASAWERLDVVESALTTRVEALKHSLATCGSWRPFIEYFVGFNHSSMEALRADILRIAAHVELPPHASILGAYESTGDAHWFPQHTSMALGGTTSTTTVGRGAKGFPTPKVHSRPMEELAPRVDMLGSSMPQSLRGPSRAQLYHYLHPLLGNQAISSQMWNLCPTCPSLSQLMTSSPPYMLIPKLKDFATSVGFIILAVTVVEILSPSRLWKNYGNS

SEQ ID NO: 66195 - protein, 469 aa, Zea mays
  Coding DNA Sequence Number=SeqID_22820
  Gene Ontology: Mol. function=binding; Cellular component=nucleus; Biological process=apoptosis
  Homolog annotation: Hit_ID=A2XBB4; Match level="QueryCoverage=100%, HitCoverage=99%, E-value=1e-171, Identity=64%"; Hit description =Putative uncharacterized protein
  Pfam annotation: Domain name=DUF1716; Domain location=13-118; Score =159.3; E_value=1.1e-44; Accession=PF08216.2; Description=Eukaryotic domain of unknown function
MDAAAVHKRKRPEEADPSAGELDLSAADAVEVLDLRAAKRLLLAFERRLRDNLEARMKYPDDPARFADSEIALHAETDRLRLLAGAPELFPDLVPIGLASSLASLLTHDNVDLAAAAASLLADLTDSEDPSDLAAVQALADALVDANALDLLVHNLSRFSETDPDEAEAVHNTLAVLENLLDLRPNLADKVCGGTKLLRWLLSRVKAREFDANKQYASEILAILLQNSPANQKRLGQINGVDALLQAVAMYKSRDPKTSDEEEMLENLFDCLCCVLMPLENKERFVKAEGVELMIIIMKQKKLAYSSATRTLDFAMTKFPPACERFVDVLGLKTAFAAFMGKASGITKGSRRMRLLGKFVENECEKIDRLMELYTRYSDRVKEETERLDSLDLEDLEMDDDERYNRKLEAGLYTLQMRARVELLLKQNKLTKQDVKSILEEYHDNIGDLDGPEEKERAQVRTKEIIDAL

SEQ ID NO: 66196 - protein, 199 aa, Zea mays
  Coding DNA Sequence Number=SeqID_22821
  Gene Ontology: Mol. function=metal ion binding
  Homolog annotation: Hit_ID=Q9AV35; Match level="QueryCoverage=93%, HitCoverage=46%, E-value=2e-69, Identity=59%"; Hit description =Putative uncharacterized protein OSJNBa0001O14.13
MATNNVVLQYDLPAPGWSCSGDYTTSSHIYAGLQNGMLLVFDIRQTSAPLHSSMGLSTHPVHTIHCAVDGSGSRKVFSASSIGPCVWDASENRPSLVSGMENQGVCISLACSSPSSDVLVASYRPRVELPDAIATSQASTPQSPAPTGSGKLGCHTLLRRTTATSFARDHICSGSRYTDLKPHRQPVLDLRYAESSTGE

SEQ ID NO: 66197 - protein, 429 aa, Zea mays
  Coding DNA Sequence Number=SeqID_22822
  Gene Ontology: Mol. function=hydrolase activity, hydrolyzing O -glycosyl compounds; Cellular component=anchored to membrane; Biological process=carbohydrate metabolic process
  Homolog annotation: Hit_ID=Q7Y157; Match level="QueryCoverage=77%, HitCoverage=71%, E-value=9e-95, Identity=58%"; Hit description =Putative glucanase
  Pfam annotation: Domain name=Glyco_hydro_17; Domain location=1-225; Score=-33.6; E_value=4.8e-09; Accession=PF00332.9; Description =Glycosyl hydrolases family 17
  Pfam annotation: Domain name=X8; Domain location=224-309; Score =154.5; E_value=2.8e-43; Accession=PF07983.4; Description=X8 domain
  Pfam module annotation: Pfam domain module=Glyco_hydro_17::X8; Domain location=1-225::224-309
MASESSSSEFAKIVQSKQTRQARLCGADSELLSSLAGSDAEVMVTIPNEQLEHVAEFQEEADLWVAANVARFLPSTRITHVVAGDDVPANSPGSAHFLVPAMLNLRSALVAAGLGGRVKVSSAMSGEALSAPAWSGVVGHVLRFLESAGSPLLLKSSSRPSEEASDARVGRAYAAMRALGVSGVPVIATDLAAGGDAVPYYYSYYGYGYPGGHGRRRSLATTGTFCVALQDADPAALQAGLNWACGPGHADCSAIQPGGACYQQNNLPAIASYAYNDYYQEMASTGATCSFNGTATTTTNDPSSGSCVFAGSSTAGGSSNSSVPVGASPPTSLSPPTGFAPPVGSSPPSSSSEFSPPAVGTAPLSGFTPPDGGGFGTPPGSFNGTGTFGPSGTLSPYNGGAPGLSRAGLSLTALSAAAVAVLLASIDAM

SEQ ID NO: 66198 - protein, 75 aa, Zea mays
  Coding DNA Sequence Number=SeqID_22823
  Gene Ontology: Biological process=defense response
  Homolog annotation: Hit_ID=Q9AY31; Match level="QueryCoverage=100%, HitCoverage=100%, E-value=7e-23, Identity=63%"; Hit description =Female gametophyte-specific protein ES1 precursor
MEPSRGKLSAAAVLLLMTTLLVVAAMRAVEARDCLTQSTRAEGKGYTGGRCLISPIPLDGILCYCVKPCPSNTTT

SEQ ID NO: 66199 - protein, 93 aa, Zea mays
  Coding DNA Sequence Number=SeqID_22824
  Gene Ontology: Mol. function=protein tyrosine phosphatase activity; Cellular component=nucleus; Biological process=cell division
  Homolog annotation: Hit_ID=Q336V5; Match level="QueryCoverage=84%, HitCoverage=49%, E-value=2e-28, Identity=78%"; Hit description =Rhodanese, putative, expressed
MARSVSYVSAAKLVSMARGNPRLAIIDVRDEERSYQAHIAGSHHFASGSFEARMPELVRAASGKDTLVFHCALSQVPDPPPSLLSITLPNRCT

SEQ ID NO: 66200 - protein, 64 aa, Zea mays
  Coding DNA Sequence Number=SeqID_22825
MANAGCLDRFFAGCLDRFFAAVKQKTVNSETNTATWQYTVKCLMSDSGLVVVMHAVPTKELPTQ

SEQ ID NO: 66201 - protein, 248 aa, Zea mays
  Coding DNA Sequence Number=SeqID_22826
  Gene Ontology: Mol. function=metal ion binding; Cellular component =integral to membrane; Biological process=cytochrome complex assembly
  Homolog annotation: Hit_ID=A2Z9X5; Match level="QueryCoverage=65%, HitCoverage=64%, E-value=1e-66, Identity=76%"; Hit description =Putative uncharacterized protein
  Pfam annotation: Domain name=CcmE; Domain location=66-211; Score =82.4; E_value=1.4e-21; Accession=PF03100.6; Description=CcmE
  Subcellular localization annotation: CTP_CleavageSite=59; ConfidenceScore=5.64e-01
MAFSRLLPSRSRLLSTLLHTPGPIPTPRAAAAATTTPLGPFLRSFASGARRAGPSSRPRAADIGARARQLQTRRLWSYGLAFALHGRDQLVFYVTPTDALAKFTADPSKPRVRLGGLVLEGSVVHPSPSSPEIEFVVTDLITDVLVRYEGALPDLFREGHSVVVEGLLKPLTDDLRRDDGRKVAEKARECSCFLRGTEVLAKHDEKYMPKEVGEALERNKKRLEAEAEAAAAQVSTVAAAAEGAKPSS

SEQ ID NO: 66202 - protein, 54 aa, Zea mays
  Coding DNA Sequence Number=SeqID_22827
METLVPLQPTSSHQNEFIVLLSDYWRLLLIGRDSPFSNKVRRITWMRLQRINGS

SEQ ID NO: 66203 - protein, 52 aa, Zea mays
  Coding DNA Sequence Number=SeqID_22828
MAHRTVRCATGGYEIDDFGYDYGVGCQHCNHCSGEDEAVEGDFQEFQDYDEF

SEQ ID NO: 66204 - protein, 522 aa, Zea mays
  Coding DNA Sequence Number=SeqID_22829
  Homolog annotation: Hit_ID=Q6JAD6; Match level="QueryCoverage=73%, HitCoverage=60%, E-value=1e-162, Identity=71%"; Hit description =Putative uncharacterized protein
MEKCKPIKTPMPTNGHLDLDEGDISSGCRARRMRRRQGVAMMRTLVAPSAAAAAAAAAQATLGDQPHVPSDQIAFRARRLTSRSRSSSHTSASTPPPTQPAPVTPIAPSTSTAIPTTSSTPASTASPAPASAPPVPPPRFRERDETEVRPLVSDPRLFDLQRATAARVRRFRYVPVESWLPAQRDPAAGVLFSTRIQESFFRAQMSAQIALRVHRLLDLPAFLLAAGAESEAHLTYLPGLLTLLTISGRYVEEWVRVFYASVWIDPDHHWMRFRFEREDVTITARAAHVAALFRPPFTDGSRRSPADFTTAAKYLYELIRRTLLPRMGYREATTHIQLWLLGALVSHSEFDVVDFLICEIEDTVLDGIRARRQLPYAHYLCHIFAQLIQPPRFQSTLEASRLVFGSYRPAPEIPVPASASVFDSQAEDAALRQFDTQGTAADDDDDDDFGLPPPPPPPMPPRSHDHEAGSSRAAPAPPPAMDPALAAILANLAAEQARLSETMLSMFQSMQDRQDALQQQLI

SEQ ID NO: 66205 - protein, 208 aa, Zea mays
  Coding DNA Sequence Number=SeqID_22830
  Gene Ontology: Mol. function=transcription regulator activity; Cellular component=nucleus; Biological process=regulation of transcription
  Homolog annotation: Hit_ID=Q6ZA99; Match level="QueryCoverage=73%, HitCoverage=42%, E-value=7e-17, Identity=43%"; Hit description=DNA -binding protein-like
  Pfam annotation: Domain name=HLH; Domain location=174-207; Score=3.7; E_value=0.063; Accession=PF00010.17; Description=Helix-loop-helix DNA- binding domain
MADCLKPHTDVARRSGQIDRPIHPPIGMWEGGGSHAHEALLLQAAGSGAADYGHAGPSLLRPWLGPAAASGFSYMAPNHAQPGPLGAEAAVASRFGFGGGGYSDGGVEQEQFVVIGSAETVPPRHSLQAAGVGGRTTALLPHGPRMVSGLLGTLQAELGRMTAKEIMDAKALAASRSHSEAERSRRQRINGHLAKLRSLLPNTTKVTM

SEQ ID NO: 66206 - protein, 173 aa, Zea mays
  Coding DNA Sequence Number=SeqID_22831
  Gene Ontology: Cellular component=integral to membrane
  Homolog annotation: Hit_ID=A3BTE8; Match level="QueryCoverage=44%, HitCoverage=33%, E-value=4e-33, Identity=87%"; Hit description =Putative uncharacterized protein
  Pfam annotation: Domain name=UPF0016; Domain location=78-131; Score =14.5; E_value=4.3e-05; Accession=PF01169.10; Description =Uncharacterized protein family UPF0016
MARGGARPGVGVQKGTAWLWRAGEGWWRSLDEAPRAAEGFHDAAFKSNKGESKNKFKANDDMKKQQRPFLMQFFSPIFLKAFSITFFGEWGDKSQIATIGLAADENPFGVVLGGIMYELLLLLTWLLYLHGLLCVPWLNCQAECSSCSSVSCPYSLDQKENCNPCLSLFQLAD

SEQ ID NO: 66207 - protein, 501 aa, Zea mays
  Coding DNA Sequence Number=SeqID_22832
  Gene Ontology: Mol. function=nucleic acid binding; Cellular component= intracellular; Biological process=regulation of transcription, DNA -dependent
  Homolog annotation: Hit_ID=O24591; Match level="QueryCoverage=61%, HitCoverage=75%, E-value=2e-36, Identity=64%"; Hit description =Histone deacetylase HDT1
MWKTTGKRSTWGAADGDRLEQCLGEDKVKILEQAFMEAADNVLPHPMEDAYLEACHTNNMEWKMCIYGADCSEISLVQVKGSGMLKDSACHELDKIRSLKRPYIKRVQDRHKETVNCLKRNAIEMEGYIRPLDVVIIVSQYIPCSDDQHSDGVADDHPNDSLFSPTYHHHKEVYMVVSIGLDVKPGSTVKCEPGYGFMLHLSQKLAIGTLSVDKNPHIQFDLVFDKEFELSHTSKTTIVFFTGYKVEQPFKEDGYPFLFSIELVLFQVEVIRTFFVSLTSCLPSSTMDLDSEDEDEKLNVPVVKENVSWLFYENIVEVELAVDSYEVTLIFLQIFLIMTSVDPMHFLSSTTEARSEPHRLSPHGANHTGKADGKKQKSQEKAVPAASKSSPASKKSKDDDDSDEGETDDSNEDETDDSDEGEGLSPEEGDDDDSSDEDDTSDDEEEDTSTPKKHEVGKKRAAESSMLKTPLSDKKAKVATPSAQKIGVPLNGLTKLSSKIV

SEQ ID NO: 66208 - protein, 52 aa, Zea mays
  Coding DNA Sequence Number=SeqID_22833
  Homolog annotation: Hit_ID=Q9XEJ4; Match level="QueryCoverage=51%, HitCoverage=2%, E-value=3e-07, Identity=96%"; Hit description=Copia -type pol polyprotein
MTTDRPLELLHMDLFGPIAYISIGGRKISNPRDLKGILETGSKLVRLKDQKD

SEQ ID NO: 66209 - protein, 49 aa, Zea mays
  Coding DNA Sequence Number=SeqID_22834
MVTLAVAAPGGFARQARFNLYMALGNDRLQPRRRAPPCVLSAPPWLGGG

SEQ ID NO: 66210 - protein, 463 aa, Zea mays
  Coding DNA Sequence Number=SeqID_22835
MPSSSSSGASSEDTLSNVAAEELHPRDTVEFGVSRISSVHVQDMQQLGYFGSGVGRVPGAEEVHQLTPNAVVALAKYVWATTSYGGWPSVEGAVEDHPGLPVAVMCSHYYIAYPQFEVAEDDEDEGALRCATRMSSGRDLVEEFIGYEVWPLAHGWALGKVCPREMPSRGGQRVRSPAFALDLRGRDPAAFVREAKDGAARIVGRYVSKTEVDGDMCGPRGKDVFARALGVFGTNAGVMNKDRQDAAQKRRAVVRITDPMRDSKRARGSTKAVAPSSSQPMPAAKPAAPGSSKVLASAKTVASGGTKPPPGGSAKGRELPSPGRRVGDFRTDISVEDYFVAAAAKDVAGSMSRRLREASEELKQHVMPFGEVSGKAKQQAGGESGRLEDEKTDLRRQLVEERREANQAIAEAQAAQAEAKVAWAESSLTSQRAEELEARFNALRGRVDKAEASTRSKVERTHA

SEQ ID NO: 66211 - protein, 285 aa, Zea mays
  Coding DNA Sequence Number=SeqID_22836
MESHDLRVERGSRLVGKVHNLYRVAMRLMVLGIDSGNAGDRVCEELLPRASPGGAPAPPLSAPAAGVATGGDPDDGGGDNSSSHDTDFSADQEPEGWIARPITRDAARGCHFHDALDTLLRRALDRRTWSIEYRCVGSEICSKHYSISERDSAEAAMQDAARRALSHYCSVLGGVADGLNLKYYPCRPSGSTGGVIVSPVGEDNPRLSSTVNLAAVLNTELDHALDELSRARAGIALLQAERAERRHLDDGSPAPVGTQHPYRSPRRGHQPYGNPDCNTKINLEP

SEQ ID NO: 66212 - protein, 103 aa, Zea mays
  Coding DNA Sequence Number=SeqID_22837
MEILILVVLVEEALLAQFPVVWPSILLILSEMTHFFGSLVNLPWQIRLCVILRTLSRASSRCGFNSSPKGERLQVVEIPRKWEKRLRKKVVVFKLIIGSLERG

SEQ ID NO: 66213 - protein, 126 aa, Zea mays
  Coding DNA Sequence Number=SeqID_22838
  Subcellular localization annotation: CTP_CleavageSite=61; ConfidenceScore=5.42e-01
MEDGAAAVVLIRAAASSAPYRHSAALWSPSSQFPSPATPISDSVNTGRDFSSGELKPPLTVAMSVRRELWESLAFAAGSSTSASSAPAFQAPAPGGDDPDDSGDGDDEDDDDEDDGEDGHVNEEAD

SEQ ID NO: 66214 - protein, 101 aa, Zea mays
  Coding DNA Sequence Number=SeqID_22839
MDPMLGAIIIGAEFVCAGANTIGAYTSDVAALLAVTCQGVGAKIYGTCLVSAAHLMSGGRDGAPVPRLSHTKIGTIMPNRTQLKGRGNQRIQYISCHANSP

SEQ ID NO: 66215 - protein, 198 aa, Zea mays
  Coding DNA Sequence Number=SeqID_22840
  Homolog annotation: Hit_ID=Q6J9V9; Match level="QueryCoverage=59%, HitCoverage=31%, E-value=5e-19, Identity=51%"; Hit description =Putative uncharacterized protein
MNKKRKQSKRKGSKEHNKSLSLNTKAFVELGEDLITWVCLELNARALGRRHLWQAKRATLHLRHDDRVKKGTGKGDTPKGILLCEGSGPRALLLIMGSKAGPSEGFDSRLRALRLRAHYWSEVRRLAPRKGSTTALGHSGSVPTTDQGLKGWPPEGFDSRLKTRRARDDSGYVRYMAEARATLPRYHRTFPRPAGAIL

SEQ ID NO: 66216 - protein, 79 aa, Zea mays
  Coding DNA Sequence Number=SeqID_22841
MDPMLGAIIIGAELVCAGANTIGAYTSDGAVTWNLRGMMSKRGKYAKPRSISLKIMTPIDRGRICIPHEEKSDEDLPNE

SEQ ID NO: 66217 - protein, 544 aa, Zea mays
  Coding DNA Sequence Number=SeqID_22842
  Gene Ontology: Mol. function=sequence-specific DNA binding; Cellular component=nucleus; Biological process=regulation of transcription, DNA-dependent
  Homolog annotation: Hit_ID=Q8LLU2; Match level="QueryCoverage=88%, HitCoverage=70%, E-value=1e-131, Identity=50%"; Hit description =Transcription factor 1
  Pfam annotation: Domain name=START; Domain location=73-289; Score =97.3; E_value=4.9e-26; Accession=PF01852.10; Description=START domain
MRCINDAGHLLLEKEVERLKALNQMLQQELQLQGTEGETPVAVDPASGAFHPDPEPSLENVFAAQHDGQMLAKLAENAAQELLVLADPESPLWLPVPGGSFETLNMIAYAQTFPGQMSVDAIALKTEATRASGVVMLDPKSLVEFLMDAESYGTMFPGLVSGAATDKVYNWPTSREESYDGAVQMMTVELAFPSPLVAARKCTFVRCCKKLEQGAFAVVDVSLDDGARCRKMPSGMLIQPIRYNSCKVSAIDHVRVDDTSIHDIFHPCLSGVLFGARRWVTSMARQCARIRDVFHVTNCTLNVTSRGRKTIMKLADNLLADYTSSVAAFPDDAWTVQCGVGTEQDIKIMYKRQSEGSSSSSNTAVVCACASFLLPLRMRKAFDLLKNNLLRAKWDVLVNGGSVKEEHGHGANRDTMMILQNSSYDASGSFMVYSSLDKQLVETITNPGDSQAMSSINLFPAGFSLVPLTNPDPAPQEGSGSIAQPGATVMTAGFQILMKMARGTGLCPRSVSSAVKIMSDNITNIKDALLKSHPVFYKSIQSVD

SEQ ID NO: 66218 - protein, 297 aa, Zea mays
  Coding DNA Sequence Number=SeqID_22843
  Homolog annotation: Hit_ID=Q8RVE5; Match level="QueryCoverage=98%, HitCoverage=46%, E-value=2e-48, Identity=56%"; Hit description =Pentatricopeptide (PPR) repeat-containing protein-like
MRALLHLRRWQSLPLIARTSSTITFSSSSSSEPHEIPTIYSFLQPSIFAPRPRSQPPQPPPPPPPGAHDPARRKTLPVADAAALESDLLAAVSEGRSDDAWLAFKSLAAASCSPSPHAAAALKSPHAAPVPEPALEALFSAFVAAGSAAPAVALARAMLRCGRRLPAFSVWGHPLIELTRTDPGAFAAFLTLFDEACKLVVEEKSPAEAAAMRPDRAACNSVLSGCCRGLGSLADAERVLETMSAVGVSPDVESFGCLAFLYAWRGVPSRVDELDTLFDALGFSKKGFFKNLLKEPL

SEQ ID NO: 66219 - protein, 908 aa, Zea mays
  Coding DNA Sequence Number=SeqID_22844
  Gene Ontology: Mol. function=nucleotide binding; Cellular component =cytoplasm; Biological process=defense response
  Homolog annotation: Hit_ID=A2WVV8; Match level="QueryCoverage=100%, HitCoverage=100%, E-value=0.0, Identity=78%"; Hit description =Putative uncharacterized protein
  Pfam annotation: Domain name=LRR_1; Domain location=529-552; Score =7.1; E_value=15; Accession=PF00560.24; Description=Leucine Rich Repeat
  Pfam annotation: Domain name=LRR_1; Domain location=554-575; Score =17.7; E_value=0.043; Accession=PF00560.24; Description=Leucine Rich Repeat
  Pfam annotation: Domain name=LRR_1; Domain location=577-598; Score =15.5; E_value=0.21; Accession=PF00560.24; Description=Leucine Rich Repeat
  Pfam annotation: Domain name=LRR_1; Domain location=600-622; Score =10.5; E_value=3.5; Accession=PF00560.24; Description=Leucine Rich Repeat
  Pfam annotation: Domain name=LRR_1; Domain location=682-707; Score =0.4; E_value=2.6e+02; Accession=PF00560.24; Description=Leucine Rich Repeat
  Pfam annotation: Domain name=LRR_1; Domain location=783-807; Score =0.4; E_value=2.6e+02; Accession=PF00560.24; Description=Leucine Rich Repeat
  Pfam annotation: Domain name=LRR_1; Domain location=828-850; Score =3.8; E_value=61; Accession=PF00560.24; Description=Leucine Rich Repeat
  Pfam annotation: Domain name=LRR_1; Domain location=854-876; Score =1.0; E_value=2e+02; Accession=PF00560.24; Description=Leucine Rich Repeat
  Pfam annotation: Domain name=NACHT; Domain location=169-318; Score= -39.5; E_value=0.072; Accession=PF05729.3; Description=NACHT domain
  Pfam annotation: Domain name=NB-ARC; Domain location=133-430; Score =229.1; E_value=1e-65; Accession=PF00931.13; Description=NB-ARC domain
  Pfam module annotation: Pfam domain module=LRR_1::LRR_1::LRR_1::LRR _1::LRR_1::LRR_1::LRR_1::LRR_1::NACHT::NB-ARC; Domain location=529 -552::554-575::577-598::600-622::682-707::783-807::828-850::854 -876::169-318::133-430
MEFVASIVDTVFRPLKDYFARTVGYVMSCGDYIDAMGNEMNELKSKRDDVKRMVDAAERQGMEATSQVKWWLECVALLEDAAARIVDEYQARLQLPPDQPPGYKATYHLSKKADEAREEAAGLKDKADFHKVADELVQVRFEEMPSAPVLGRDALLHELHACVRDGDVGIVGIYGMAGVGKTALLNKFNNDFLINSHDVNVAIYIEVGKDFDLNDIQRIIGDRLGVSWENRTLKERAGVLYRVLSKMNFVLLLDDVWEPLNFRMLGIPVPKHNSQSKIVLTTRIEDVCDRMDVRRKLKMECLPWEPSWELFREKVGDHLMSASPEIRHQAQALAMKCGGLPLAIITVGRAMASKRTAKEWKHAITVLKIAPWQLLGMEFDVLEPLKKSYDNLPSDKLRLCLLYCSLFPEEFSISKDWIIGYCIGEGFIDDLYTEMDEIYNKGHDLLGDLKIASLLEKGEDEDHIKMHPMVRAMALWIASDFGTKETKWLVRAGVGLKEAPGAEKWNDAERISFMRNNILELYERPNCPLLKTLMLQGNPGLDKICDGFFQYMPSLRVLDLSHTSISELPSGISSLVELQYLDLYNTNIRSLPRELGSLSTLRFLLLSHMPLETIPGGVICSLTMLQVLYMDLSYGDWKVGASGNGVDFQELESLRRLKALDITIQSVEALERLSRSYRLAGSTRNLLIKTCSSLTKIELPSSNLWKNMTNLKRVWIVSCGNLAEVIIDSSKEAVNSNALPRSILQARAELVDEEQPILPTLHDIILQGLYKVKIVYKGGCVQNLASLFIWYCHGLEELITVSEEQDMAASGGGGQGSAAFRVITPFPNLKELYLHGLAKFRRLSSSTCTLHFPALESLKVIECPNLKKLKLSAGGLNVIQCNREWWDGLEWDDEEVKASYEPLFRPLH

SEQ ID NO: 66220 - protein, 36 aa, Zea mays
  Coding DNA Sequence Number=SeqID_22845
MAMMGPTSKKMYLCQDLVDVGLMIKDPLTGHMPRHG

SEQ ID NO: 66221 - protein, 267 aa, Zea mays
  Coding DNA Sequence Number=SeqID_22846
MAQGHISLSPAPVIDTQAEDTTFHQFKTQDAAVHDDDFGVPPPPPMHPRTHDHEAGSSSGAAPAAPPAIDPALAAILQTLTQQQTHLVAVQQQMSERMLSMFQTIQDRQDTLQQQLLQDQAENRAFMTLMLQHTGVPIPPVQSTLPPPLQAPVVPAIQPGPPLPTLGPSSCPLWPVTLVFTSPVIGSVSSQPLVPPASAITTAAVVVSVTSSALAAPAAQLPSESVLAPASTADPGSETDSDPQLAFALLPRPRPDAPPPPPPSSDV

SEQ ID NO: 66222 - protein, 154 aa, Zea mays
  Coding DNA Sequence Number=SeqID_22847
MGAIQEAPPRPTPELGLNLDAGRRTPPRPTPGLGLSLDAGRWTPPRPTLGLRLYLDLGRWSPPRPTPGLGLNLDLGRRTLPRPTPGLGLSLDLGRRTPPRPTPRLGLSLDLGRRSPPGPAPGPGLNLDLGGASSLPDLGLGPTTSQRGLSLPYS

SEQ ID NO: 66223 - protein, 363 aa, Zea mays
  Coding DNA Sequence Number=SeqID_22848
  Gene Ontology: Mol. function=kinase activity
  Homolog annotation: Hit_ID=Q6QP54; Match level="QueryCoverage=19%, HitCoverage=29%, E-value=5e-09, Identity=48%"; Hit description =Putative kinase
MGRRETEHKWGKTAKGKPAAFVLSCAQVGSEPEVGRGGGSSEVEAESEPWGRARQRPSPEVEVEPEPWGRARRSPSSGVKAESEPWGRARRSPSSGVEAKYEPWGRARRSPSSGVEAESEPWGRAKQSPSSGVEVEPELWGRARRSFLWRPRLDSADVILTLSSGTAVGAGQAALFSCQSTLALNAPAIRSVGVAIRPRLLLREAWASGEPKLCADGGYQLRLGVLGVPLIMVPDRSLRVGPNLSRLLERGGLWYEQGSSADTCPGLALHFPLRRRPAACGVKVIQQAARLLGQLANRRVHSATRPEIYSPTFGAPGRSCFLYTAGSQSPSTRHSCCARRTAAHSSANIPDSIKGVSGGVVGS

SEQ ID NO: 66224 - protein, 135 aa, Zea mays
  Coding DNA Sequence Number=SeqID_22849
  Homolog annotation: Hit_ID=Q6QP51; Match level="QueryCoverage=36%, HitCoverage=22%, E-value=5e-13, Identity=69%"; Hit description =Putative growth-regulating factor 1
  Subcellular localization annotation: CTP_CleavageSite=47; ConfidenceScore=5.55e-01
MVAIQGGHPPFKGDSPHLRSQPSRTESSPTCSKVFPLRQGGWVPRVMQAGLGQKRPNRRARDRERGYSERDPSPRRKRAPSPPTDQRFKGWPLGRVRQSPQSTRAPRPPLVRGSKAGPSDGFDNRLKPLGLRAHY

SEQ ID NO: 66225 - protein, 175 aa, Zea mays
  Coding DNA Sequence Number=SeqID_22850
  Gene Ontology: Cellular component=nucleus; Biological process =regulation of transcription, DNA-dependent
  Homolog annotation: Hit_ID=Q651J2; Match level="QueryCoverage=41%, HitCoverage=50%, E-value=1e-16, Identity=63%"; Hit description =Putative uncharacterized protein B1423D04.24-1
MIVPPSLIQKMYRVLTLGGQGRGAGEDAPPDSRAGEEFGNYVSLRGIKGLAFTCLGSMSKWEPVTFQESLSFVKKVKSPSGDEISFADWWRKARDYMLYISLLDVLNRNDQIPLQAYSEGSLAIVFVEGVRVILGHWIALQQIRLDMNRYATKAVKSRINGLRALYVSRYSRLSR

SEQ ID NO: 66226 - protein, 519 aa, Zea mays
  Coding DNA Sequence Number=SeqID_22851
MIHRAWGEVSWVSTPGTAAEVRFAGNFGTTLALSALDARGADCPGTVTVTGGSPPCAAGASGGSRGADALAWPPGVASALPAGGSGATRCKRKEEADTHQSHAPLVWAHRKLGVSGGVRLPQRDGHPPVEGVEGKRIRGHPRALQVSLRCHLPKRQSSLHQGKHPPTVDGGNHFRSGESPLPQRLQGLEKGFEVLLSFVRGPVAPSVGGSGDYSLGERREQLAVIPEVEPPALPPLVRGREDGRNIQRRPRLPQQEGAAAGPHRCADFPLPRRRGKKLRKKEMGPQIPMGGDPQVPLAHRYEDGGLRDGVGGEVVQLHPIVVQDRPQKTARRHTESPLVEGDEAHDVPRRWGRSGSAHGRNPFRSLLIGERAKQTLADQILQITRRHRGKRPWIARRDDGHPVSHHRAEGMAAQGAGRAVFSSLAKSLGLQKPKREAGSGAKNRHQTLSRVYKDQGETGSNVPPGPDAGFKNAKRNSRSSNGSRTRNGRPANHSPRRINSAAGQAALLAGEAGDASPSP

SEQ ID NO: 66227 - protein, 269 aa, Zea mays
  Coding DNA Sequence Number=SeqID_22852
  Gene Ontology: Mol. function=iron-sulfur cluster binding; Biological process=biotin biosynthetic process
  Homolog annotation: Hit_ID=Q69U93; Match level="QueryCoverage=24%, HitCoverage=17%, E-value=4e-13, Identity=59%"; Hit description =Putative biotin synthase
MAVVAHAGLPRPRLFLPFSFHGSPIYSSCLSLALPSVAVDYDHGNPWCRPDTPHNGASRGHHPSVSSGWPCVGRARSHEFLIKIRARACLKVQCQFSYSENQLEQLISDVTLNTRRMENQLEQLIIHNFWAKAFLATIEFPESKFGINRLTFVCLKIFGIGHDEPHVQIYQEPHCQSEAAYFHLSILQSVHYFHTTINKYPNLINQNAIIGLGEAEDRFSMLEQVLCFVPETNSIFASEKLLTLANNNFDTDQTMFKILGLIPNALSFC

SEQ ID NO: 66228 - protein, 63 aa, Zea mays
  Coding DNA Sequence Number=SeqID_22853
MATLGQMVDGVGRCCWLELARTSTIGSGFAGIPPEMSGPPSEPPDSGHIEPSFASRAGQNTRG

SEQ ID NO: 66229 - protein, 163 aa, Zea mays
  Coding DNA Sequence Number=SeqID_22854
MARDSRGERARTEGMDGRTPMCCGSRMVDRARGWRTGTGVRMVDRARGSWTWTGHEDGGKDGRRRGRGDSRRRGRLRGRISNVDEGTRMVGGMGVAILGGSVGFAGGDLVRGQGRENVGSRNDGEDEDGCGQRIKEGQDWLASIIKSKFQCTDVPRSSRNQQQ

SEQ ID NO: 66230 - protein, 178 aa, Zea mays
  Coding DNA Sequence Number=SeqID_22855
  Homolog annotation: Hit_ID=O48967; Match level="QueryCoverage=47%, HitCoverage=18%, E-value=7e-18, Identity=58%"; Hit description =Putative uncharacterized protein
MVGQRRPTTWYGTFNLDQVEDAVIPAPTRGVSICALALTAQSGGSRAVLRDRKKKKKKKDCDYQKPRSTALVVAATTGGQGDRNKRPRSKRGSSGSCPMDPNGRHSTAECREIIDLAKRVSEWHEQSFKDGSPSCRRPGKEKVDDDEVAAAERDLGYQSPEGDLKDIFTGGSYSGEDN

SEQ ID NO: 66231 - protein, 81 aa, Zea mays
  Coding DNA Sequence Number=SeqID_22856
MGSGCTSTHEEVLALVLSAGVRTRPSKNAAAAPAAYDILYNLPVQPVAQEKLWMWSTRARRDHRPCIGRAATLRPSGRMQR

SEQ ID NO: 66232 - protein, 208 aa, Zea mays
  Coding DNA Sequence Number=SeqID_22857
  Subcellular localization annotation: CTP_CleavageSite=51; ConfidenceScore=5.74e-01
MGAIQVKAPSTKGTRSRLARAQPRAKATDPGGFTSRPRVPSSNGRTFGSPEAQASWRSNLGRIATPTDRIAGAFNAREAPPRLTPELGLNLDAGRRTPPRLTPGLGLSLDAGRRTPPRSNPGLGLSLDSGRRTPPRPTLGLGLSLDAGRRTPPRPTPGLGLYLDLGRRSPHRPTPGLGLSLDLGGASASPDLGLGPATSQGAPSLPYP

SEQ ID NO: 66233 - protein, 89 aa, Zea mays
  Coding DNA Sequence Number=SeqID_22858
MKAHYDRLVPTTGAHRLGQLRDVVREDGCLAPFNISKPGAWDCSLEQAQAFRPCLAAVLPPRILTVGGRPTPMRALSCPCSSAVVVGCG

SEQ ID NO: 66234 - protein, 157 aa, Zea mays
  Coding DNA Sequence Number=SeqID_22859
  Homolog annotation: Hit_ID=A2ZKT4; Match level="QueryCoverage=51%, HitCoverage=33%, E-value=2e-09, Identity=45%"; Hit description =Putative uncharacterized protein
VLDQRVQSLERELDAAISAAARARVEKRQAEAAQRAAELRTREVTEELENTARVFELHMEELRLKQEDIAKKDSDIKATKAGGNVARSMGEGETVPLPPGFPATQLVSDESGQYCPAGARAWTRGRRGAGTDRVCKTLRHSQGEYLGIHCEAFTKFH

SEQ ID NO: 66235 - protein, 151 aa, Zea mays
  Coding DNA Sequence Number=SeqID_22860
MGKSRKGGGSSHHSGDKRKREPTPPSEDFDDSEYSEEEFSSESEGSPAPASPPASSDDSDDSQGIAAEVWTYIRAVKRARLEGSDESEYSSDEENSSDPSEEGSGGDSGDSDDDGGDGDGGGDSGKGGDGSGKGGSGDGGGGSKGSNKASG

SEQ ID NO: 66236 - protein, 974 aa, Zea mays
  Coding DNA Sequence Number=SeqID_22861
  Homolog annotation: Hit_ID=Q6QP51; Match level="QueryCoverage=5%, HitCoverage=25%, E-value=2e-15, Identity=75%"; Hit description =Putative growth-regulating factor 1
MICLGLGGRKKHTHTTDKLFLQVQTSTEGAAAPSASTPPSAEPDPASDGNTGGGSQPRRKMSAPRLGHHRQGLLREPGPSRRLDRLLRSLSQLSPEDISPANGLGSPTPGLVPLGDDLARESPAPGPTKPLFEPTLPLSMLTPLPPAPAHRRAAKGPDSRNGHTPALKVPLQTELRFHSRGYEQPPHRRAYGTTSSGWLAADQCSSDNDLRSERPNSNSDDLRADAAATRLSFASPRRGREPNIKAKEPEARSADGTDDLVGRGNLLRLPPPQHRRRRPPAHHYRTSERRPPQSAPVGPHSRPRHENENGTVPEHEYRPRGVRRVVRPPGAAGHLRPDRGWNAAPWLGSSSSPSPAWLEDTSSAELEDGFHPQMLEKRRYASPREGRPRLASPSAPARMMKILEAEGGVGAAAQLASPHHRTGGVADQVFTNALQGPPPTTRGLGPTRHASWPRTEEAKPPRAEHVTAQRLQALLHLRLNQRVKGRTAMQAACNCTTGMHPFDFNASSMEAQAHTSCNRRAGYYVRKTAPPLTPMSRLLDCGTGAATRGNPAHGPTVPTKHIGHRSVSRGRRRDGRYGQKWDGSNGGSKRAEAAVKSSAGSRPLLEQQGSPLPRREDDAPVFRPSNGSRNGCSTNHPSRRINSAAAAPEHSGSAPTTDQRFEGWPLGRVRQPPQSTRALRPLLIRVSKAGPPKGSTAAPEHAERGMTLGTSDTWPRLGLRSRGQGSVHSRDTIPPHPSPASGRNSRPRRIHASPEGLLKQQAHLQLARGPARAGFAVKKPWPDRLANQPCRRSIQCKDRLTPYPDARSSVGRAEENSAACPAPTAVPPARVRLAAAESSLRRHRKLRLARSRGSASTSTSEDSLRLARPQGSDSTSTSEESLPHLTLGSDRPRYRGGPRTKEVAAREDGLTDTLSPSLVNACNPLLQAHPPWAQDNGPPGVETPTSTIGGKCNNIYIHTWSLWRSFIVDQVFSQ

SEQ ID NO: 66237 - protein, 89 aa, Zea mays
  Coding DNA Sequence Number=SeqID_22862
  Gene Ontology: Mol. function=ARF guanyl-nucleotide exchange factor activity; Cellular component=intracellular; Biological process =regulation of ARF protein signal transduction
  Homolog annotation: Hit_ID=A7PER9; Match level="QueryCoverage=100%, HitCoverage=6%, E-value=3e-24, Identity=59%"; Hit description =Chromosome chr11 scaffold_13, whole genome shotgun sequence
YLPAEAQEPGFRTFWLGVIRRLDTCMKWDLDTKGGSGQMQELVPRMLKRMIMEMKSKGVLVPREGDELWEITHIQIQWIAPAVMDELFP

SEQ ID NO: 66238 - protein, 187 aa, Zea mays
  Coding DNA Sequence Number=SeqID_22863
  Homolog annotation: Hit_ID=A5HEH5; Match level="QueryCoverage=29%, HitCoverage=22%, E-value=6e-08, Identity=60%"; Hit description =Putative GRF-interacting factor 2
  Subcellular localization annotation: CTP_CleavageSite=70; ConfidenceScore=5.64e-01
MNMYDVFLPAICQGPPALPISFTFATSSHTTSSVNAVSSAAFRRSSSVICKENPLPSLSTHHSAQQTPMRCARAQHDTRLGLRRPRALTRRRAVASYASLRVGKVVGNDNVSSTALGGRLTDDSRGTDARARVAKATPVATESGRFLGGFDQRPMKLYLDENKQLILAILENQNLGKLAECAQYVFG

SEQ ID NO: 66239 - protein, 874 aa, Zea mays
  Coding DNA Sequence Number=SeqID_22864
  Gene Ontology: Mol. function=ARF guanyl-nucleotide exchange factor activity; Cellular component=intracellular; Biological process =regulation of ARF protein signal transduction
  Homolog annotation: Hit_ID=A7PER9; Match level="QueryCoverage=99%, HitCoverage=61%, E-value=0.0, Identity=52%"; Hit description =Chromosome chr11 scaffold_13, whole genome shotgun sequence
  Pfam annotation: Domain name=Sec7; Domain location=137-325; Score =316.2; E_value=6e-92; Accession=PF01369.11; Description=Sec7 domain
MFVLLRVCGGGNGPQLQEVAIEGLISFCRQPTFVIETYVNYDCDPLLHNVFEEVGKLLCKAAFPASAPITTIQLQAFEGLVNMITTIADNVEIDKTPEHGAYAVDVSEFRLFWTERWDSAAAAGGQRETWVDFVRKRKLRKKKVAVAANHYNRDQKKGVEFLKLCHLVPTPPDPRSMAYFLRYSPGLDKNKIGEFLGDPDEFSLKVLKEFTETFDFTGAILDTALRTYLETFRLPGESQKIQRILEAFSERFFEQQTTGVFATKDAAFILCYSLIMLNTDLHNPQVKKKMSEEDFIRNNRAINDKKDLPREYLSELFHSISTNAITVFSTSATAVEMTQSRWVDLVKRSRALEPFTPCDFKHKLSREVFIAVSGPTVATLAAIFDSADDEETLNQCVEGLVSVARIARYGLEDVLDELLCCLCKFTTLLNPYATTEETLFTFSNELKPRMATLALFTIANRFGESVRGAWKNVVDCLLKLKRLKMLPPSLIDPDGSGAHGGSDQRSGHRHRPSASDAGVIFPPTHRGAGTSRHVSGMIGRFSQFLSLDSGGESLLSVGSEFENNLKVIKQCQAGSIFTESAKLPDEALQNLGRALIFAAGGKGQKFSTPIEEEDTVGFCWDLLALLATANLQRFATFWPPLLECFSAVSQLPLFSPSPFAEKAIVALFRVAVRLLSTPPPLRPSDSRVSEELVFKSINMMWKLDKEILDTCCEGISENIVKLLTEHTDGVQTPLGWKTLLHLLTVTGRHPETFDQSVAAMIKLMTDGSASITRFNYAAVIEAAFGFAALKISPLDVSTKILELMAESVNWLIQWHKSGYSDPGNSGGFSGSSSSQTSVEDASRMGNLTVNMFIKLAEALRKTSLVRREEIRSQA

SEQ ID NO: 66240 - protein, 118 aa, Zea mays
  Coding DNA Sequence Number=SeqID_22865
GVRVKEEAAVVERAADPLQAGHEVHAAKVAATPLTLSAEAIPDPSAKTEGKRVADADEAGPSRRPEVPVMGRTALFPDDEGLMVKFVAKSIFLRYEHDIWDTLLHQRGLLDQLNEQLA

SEQ ID NO: 66241 - protein, 93 aa, Zea mays
  Coding DNA Sequence Number=SeqID_22866
MAEPHLKVRILIHKYLEYTTVWKSKGRSNVVVRCFKRSRKLLHIRCRALSLTTGATGSGLSQPLSQQPWRYSWSQTPHAARSQRFTEKPAGAP

SEQ ID NO: 66242 - protein, 175 aa, Zea mays
  Coding DNA Sequence Number=SeqID_22867
  Pfam annotation: Domain name=zf-GRF; Domain location=45-99; Score =7.5; E_value=0.0038; Accession=PF06839.3; Description=GRF zinc finger
  Subcellular localization annotation: CTP_CleavageSite=49; ConfidenceScore=5.44e-01
MEQRVVANSNAKLFVFTSMDSRMSRASGSSNGGQGWPSYGPVSLIRCPKCERSESLVRLRSKRWENGNFGREFVKCESKSYRDNKVVKICNFFMWMDDYVKMLEGAGLVGGSGEMMASNMWDERADVTTNWDKFAAELKKMNDNMVELKKMFGAVYASMIFILFLFFVMNYNCKR

SEQ ID NO: 66243 - protein, 150 aa, Zea mays
  Coding DNA Sequence Number=SeqID_22868
MQGNNSFQASNLGPTRSLRHDKFGGDEQSTSPMDIFFGLAMLYKIGYWVLRAEEPSQISSQKCTYQSSFTLKEPKRRKSSFTFIRTYQNVSPLPPFYLGKWGRTKVSSDSSRYHSRRSPNNTKVDTAPKMSAGKLRHGSRKGNRLKDEKK

SEQ ID NO: 66244 - protein, 137 aa, Zea mays
  Coding DNA Sequence Number=SeqID_22869
MSAYRNPELAAGKREPSRGSLAGDWRQGRKSYCSPAALDTGRKPASSTSLVCCVEGGGASGERRWEKKTAGWGSSAGREGVVEGEQRRRAMDAGELTARARAGPAMAGLLPATRARAEKAAAKESRELAGRGAQHRG

SEQ ID NO: 66245 - protein, 95 aa, Zea mays
  Coding DNA Sequence Number=SeqID_22870
MEERRTCSSPTPLVPRRGRAPWGALCPAALVPSKWRGGTGFPAAGVREQWESCSRGEEGRKKVRGDAHGAVLLPSAMGEACCRGEKTGRKNGCGG

SEQ ID NO: 66246 - protein, 119 aa, Zea mays
  Coding DNA Sequence Number=SeqID_22871
MCRAVSLSRSRLWILCRVNAALIGRMKVNRELTPDQEQLASAADAGALPSPVARCAERCSERAEPTDKTDRRWSASRTDGCTGFSFHDEATRAEAQTGLAAAGARAGPAAAVLGRNARI

SEQ ID NO: 66247 - protein, 32 aa, Zea mays
  Coding DNA Sequence Number=SeqID_22872
MEKGSREDTSPRTPFPVKDVRLEPHTDQGFEG

SEQ ID NO: 66248 - protein, 96 aa, Zea mays
  Coding DNA Sequence Number=SeqID_22873
MGMVGKADHIVPIPMRPERGYVSLGLLGYRTALPLVLEDAASRTACRLAVEEQKKKKDTENKRPTRRGRPAMHMRSATVRRRGRGGTRAIPQHIRQ

SEQ ID NO: 66249 - protein, 505 aa, Zea mays
  Coding DNA Sequence Number=SeqID_22874
  Gene Ontology: Mol. function=phenylalanine ammonia-lyase activity; Cellular component=cytoplasm; Biological process=phenylpropanoid metabolic process
  Homolog annotation: Hit_ID=A2X7F7; Match level="QueryCoverage=82%, HitCoverage=61%, E-value=1e-158, Identity=90%"; Hit description =Phenylalanine ammonia-lyase
  Pfam annotation: Domain name=PAL; Domain location=98-505; Score =444.4; E_value=1.6e-130; Accession=PF00221.10; Description =Phenylalanine and histidine ammonia-lyase
MRAAVNSSQISARHGASLPALPARAGSDEAAAVPGPATAIFQAPVAAAAVVGAPLALPPPRPRMRPPPRYPPWLPRPQHLAVHLRRVLRMVAEYRQPLVKIEGASLSITQVATGAGEARVKLDESARSRVKASSDWIMNSMMNRTDSYGVTTGFDAMSHRRTKEGGALQRELIRFLNAGAFGTGTDGHVLPAKATCATMLVRINTLLQGYSGIRFEILEAIVKLLNANVTPCLPLRGTVTASRDLVPLSYIADLVTGRENFVALAPDGSKVNATEAFKIAGIQGGFFELQPKEGLAMVNGTTLGSGLASTVLFEANILAILAEVLSAVFCEVMNGKPEYTDHLTHKLKHHPGQIEAAAIMEHILEGSSFMKLAKKLGELDPLMKPKQDRYALRTSPQWLIRSVFSNVSKCCVWKPSEAAASSSSSSSSSSDDDDTPSTAARSTRSSNPVLSSWSSDEPQLELPKEILNKFLDYGFKGAEIAMASYCYELQFLGNPVTNHVLKRFG

SEQ ID NO: 66250 - protein, 125 aa, Zea mays
  Coding DNA Sequence Number=SeqID_22875
MACMDPVDKNCVRVVIYGGMCMRAKRCSGGGGLIHTGATTGSPHANTKVNTGTSWLRRWHSCPSLTIEEAGGIARFSRVAGEVGGSTAGEKCGNGAAGRERRQKLPDLDPKLSNGIYITYNRERE

SEQ ID NO: 66251 - protein, 175 aa, Zea mays
  Coding DNA Sequence Number=SeqID_22876
MDDTTKVAEMKTLTTFCGCHPLEMVMHPLGLFPAEKKNDPMWCNRVSHVKDVWAMYPDLVGRVTVQCMNALYCLQTLQSDAMAHLANIAQTTKLTLDGREDFVVDLSSELVEKDLQELEEANDHLDMHHLEMEANEAGNEGEEAPEELGPAPGANGTTSAMPPSLASSVASTTQG

SEQ ID NO: 66252 - protein, 164 aa, Zea mays
  Coding DNA Sequence Number=SeqID_22877
MYKWVARLGPTRIKDKKALEEKAAKKAQQAAAGGTGTSTDNKNKAGGKNYYHAFKFLREDGKQRRGNPNPKFLRVFLSLPNTRPTLSFNPSDDADNASLWPSLILLAEEALAKSSRSRPAGHSRVFLVSSTTTVGSGGGGGSTGDGRVQLADNLDLDVYVQSKC

SEQ ID NO: 66253 - protein, 170 aa, Zea mays
  Coding DNA Sequence Number=SeqID_22878
  Subcellular localization annotation: CTP_CleavageSite=33; ConfidenceScore=5.46e-01
MPARALASTATMPVPLPPPPLPSRRCALPRDARASVHREIPALPPKPCPAPRAPASARDAPARPTAMTATFASTARSPPFPKPCPAPLHELCHIRGSLESPCVAVVPLRRSRSMVGGWRRERTAEEVKLDTGNVLMALESLKKKKGNKDRAVGPSSRKKHAEAAQQQEPP

SEQ ID NO: 66254 - protein, 385 aa, Zea mays
  Coding DNA Sequence Number=SeqID_22879
MVPIWGGRAAPPVEAVISIDSVAAAGSTAGVSTPVWAAAACALAQTAVGASTPIWAIATRAPMGMRGCPLCRLLSRCFPRQPEHFVCVVVDKSRAAGSTAAQSLELCYRRTCSISRLRCFYFRSRCCQFRRRQPCCPRRCRCSHCCCSLAFLCRGDLGLLLAPRTRMATFGAPAPGSASSPIGASGSDVGGLGACPLALGMRDLDLGGSGAGGPGAGTPTLGQAPTVLHGTSFSDLPFFEDSKPAVVPFIDAAAMLASGFPYGVMTSGAHYLVVGDRTGTAASTYSTPMTVSQRPPTDNATATLVVAQTAATTARRHAQDTAHALEQEQAAADALEHQLSRLTDVTEPPKSLGPPTVVLVQRTSDNPAEMLTNSGSLKIQFYLSG

SEQ ID NO: 66255 - protein, 367 aa, Zea mays
  Coding DNA Sequence Number=SeqID_22880
  Subcellular localization annotation: CTP_CleavageSite=37; ConfidenceScore=5.57e-01
MRGWSAASVVSFSALGSLALARLPVPPPAARAVVTPRALEDRPRRRALLGRRSCSWAVLPLLRYVASARRSMLARPGGFEWGSAGGQMASVVGAEVVAAEEVLITDGITATIRAPGLRLFGFDSLSSPLEWGRGRRARCSSVRPEAIAVVVWPPGAEVVVAAAGAGVGEPPGVLSPHRPSNVGGCSYLRGWNRSSICNGTLSAETLGRSTMSRSRRQRCQHGQRQSWLEKKLRRPEPGRAAHWRDRRRGRVVEAMSRANVLGGQLAEATERPVEPSARARFPEETLAAMAQAWCQQVPSRWRSFDRVAVRGWVGFRRRWSRRRGCCCSPTDKVMSEVSVSRRRRSPSARSALPAYVYSVVFRIPLLK

SEQ ID NO: 66256 - protein, 300 aa, Zea mays
  Coding DNA Sequence Number=SeqID_22881
  Gene Ontology: Mol. function=transporter activity; Cellular component= intracellular; Biological process=transport
  Homolog annotation: Hit_ID=Q7F8U2; Match level="QueryCoverage=66%, HitCoverage=39%, E-value=2e-94, Identity=74%"; Hit description =Putative phosphatidylinositol-phosphatidylcholine transfer protein
  Pfam annotation: Domain name=CRAL_TRIO; Domain location=53-201; Score= 46.6; E_value=8.5e-11; Accession=PF00650.11; Description=CRALTRIO domain
  Pfam annotation: Domain name=CRAL_TRIO_N; Domain location=1-35; Score= 0.3; E_value=0.098; Accession=PF03765.6; Description=CRALTRIO, N -terminus
  Pfam module annotation: Pfam domain module=CRAL_TRIO::CRAL_TRIO_N; Domain location=53-201::1-35
MMLRFLKARKFEADKVMLMWSEMLKWRKEFGTNTILEVDFVFEELDDVLRYYPQGYHGVDREGRPVYIERLGKVDPNKLMQITSVDRYIKYHVQEFERAFRERFPACTLAAKRHIDSTTTILDGFKNFSKTARKLVHRMQKIDSDYYPEVLGSNYQSRLLEVIDSSELPEFLGGSCTCSDEGGCPGSNKGPWNDPYILKDTEPSAAYPSEKGENMLKKRFLYGFSMGGTVVVQLHMNDPFYWDGAVLLAPMCRVLSLTVLNGLSFLPIFPPVSVDRCLAISFYAIALSALIKIYGCFCLK

SEQ ID NO: 66257 - protein, 69 aa, Zea mays
  Coding DNA Sequence Number=SeqID_22882
MAVMGSTSEKMYLCQNPGGELTYARVKCYICRVIGDPQVKKQQIFVAFVPRWCLRKKTKTEAAGGSVLL

SEQ ID NO: 66258 - protein, 60 aa, Zea mays
  Coding DNA Sequence Number=SeqID_22883
  Subcellular localization annotation: CTP_CleavageSite=16; ConfidenceScore=5.13e-01
MTAAPSPLRQQGDVIKDSTAPTAVLPQVVIVFSPLPRVEPKISGSPPTFTHAPSSQPCGT

SEQ ID NO: 66259 - protein, 284 aa, Zea mays
  Coding DNA Sequence Number=SeqID_22884
MQAACNRTKGAHPFDFDASSMEAQAHTSCNLCTGYYVRETTPPLAPVPRLLDCGTVAVTRGDPTHDPTVPTEHIDHGRHLWQAKQATLHLRHDDRVQKGTGKGDTLKGILLREGSGPRAPLLIRGSKAGPSEGFNSRLRALGLRAHYWSEIRRLAPRKGSTAASGHSGSAPTTGQGFVGWPPKGSTAASEHAERGMTLAQSCKGLMGAIKVKAQSTQGTRSRLARAQPWAKAADPGGFTSRPRPPSSNGHSFGSPGAQSSQRSNLGQIATPTDRITGAFNARIA

SEQ ID NO: 66260 - protein, 567 aa, Zea mays
  Coding DNA Sequence Number=SeqID_22885
MDKDRQEAAQKHRAIIRLPEARPKRAWGTAKVAALDGSQPTLAAKSAAPGSSKVPDVVKATGAGEAKSASAGAAKARELPSPGKRIANFGTDISVDDYLTRSGEGQLVVVPPAVATTVSATVPGAKGSALSAGGEISALTAVKDEAGTVSRRLREALQRLSQAADFADRVASGALTAAVSAEVERLRAQHADAVREKSATDSKCRKLTEKVAALEGERTDLRRQLAEERREANQALAKAQSAQAEANLARVEGCLASQRAEEWETRFNALQARMERAEASTRLEVERTRKQLMDSYRELGARTADFEVPDRESSLRCLEWLQEELLALPIIVEGFMSFASLVTCEGAMNALSREGCSHYEVIDRSDEDFEREIYKVEDPVVKESAGALFDRMWGPHGREVVRERPDRARDQVQDFGPAHATATANFLAASTVDAGNESDEFASKFSDFGDSGSLVEWTEESSDEDLDYFAALDVAAAEALPRAADAEVVPGPSAGCRRQRAVAKRRVSEVDGGRLRVGRAGKQELLSSPAVASVGEGELRSLFEGEELRIMLFNYREMGIIPKVEPM

SEQ ID NO: 66261 - protein, 100 aa, Zea mays
  Coding DNA Sequence Number=SeqID_22886
  Gene Ontology: Mol. function=DNA topoisomerase (ATP-hydrolyzing) activity; Cellular component=chromosome; Biological process=DNA unwinding during replication
  Homolog annotation: Hit_ID=A2X1M3; Match level="QueryCoverage=59%, HitCoverage=28%, E-value=2e-16, Identity=65%"; Hit description =Putative uncharacterized protein
MEMNKKIKEDLKAVALGTSKINYLDSRIIVAWCKRHEVPIEKAVEEQIKKRVENKARIFEQNATDSECKVDPKVLSKLYDQWVMPQTKDVEVEYLLCFLD

SEQ ID NO: 66262 - protein, 107 aa, Zea mays
  Coding DNA Sequence Number=SeqID_22887
  Gene Ontology: Cellular component=peroxisome
  Homolog annotation: Hit_ID=Q657X8; Match level="QueryCoverage=72%, HitCoverage=17%, E-value=9e-22, Identity=65%"; Hit description=PEX14- like
  Pfam annotation: Domain name=Pex14_N; Domain location=38-107; Score =3.9; E_value=2.4e-05; Accession=PF04695.4; Description=Peroxisomal membrane anchor protein (Pex14p) conserved region
MASGTGSGQPQPAAAADADPGAGDNKLVFETPLQPQPVREDYVENAVKFLSHPKVRGSPVVYRRSFLEKKGLTTQEIDEALRRVPDPEPITTATASPQQQGLTCPSV

SEQ ID NO: 66263 - protein, 81 aa, Zea mays
  Coding DNA Sequence Number=SeqID_22888
  Subcellular localization annotation: CTP_CleavageSite=29; ConfidenceScore=5.52e-01
MSAQHATFWMVVLPPLSGFSTLTVHRPMVASTMMSENRRRGARRAQPEQQAPQKEAAPQQHLPPPPPMTIEQMFLMQTQAV

SEQ ID NO: 66264 - protein, 133 aa, Zea mays
  Coding DNA Sequence Number=SeqID_22889
MHDFLLGLALLDCSGWLLGQEDGLPDFSDTGIDFLLAGCSDSTAAAAEETASGTTGAGSDVDAGADGHGTFLEGEKLLLPHYHQSLGYMVAMEVVSEFFPSDGFRVGMGGEAHVASGLALEAEAVVAAVAPAA

SEQ ID NO: 66265 - protein, 136 aa, Zea mays
  Coding DNA Sequence Number=SeqID_22890
MLVDYTTVLDGPSLLVEGPTQQGVESVVEGASLAEVQGRAASQTPPPAEVRGKSSAAPGPAPGVCAPAPRAGDDAVSPAFENKSPTLAPTSGELTSTFELMASSNTQAEAASATKPGPFIKSKWSHIPITFSQEDL

SEQ ID NO: 66266 - protein, 113 aa, Zea mays
  Coding DNA Sequence Number=SeqID_22891
MGDGGPLLEFGPGETALRGGARGRDRCAGPDGHGQKKGGRKGVVPATRVPSAMAGRGEEVEELSSLLAARREQQREGGRFLRQEQRKKKAARERKKREERVAAREKWRGGSGK

SEQ ID NO: 66267 - protein, 159 aa, Zea mays
  Coding DNA Sequence Number=SeqID_22892
MATGDDRKDFLFFIDVVTNEIKQWGRGSLGHSGQTTGTRPLILQTGTPGWSSPARRASLLKGRRLGTSRFCFARGSAMSSVFEFSSPIISSKIYVFTNFESNIPSIHSAPAALGSPDPLDGIRRPGASSRFWILSGDVCHDDDLGEEGSQSATCTKALV

SEQ ID NO: 66268 - protein, 126 aa, Zea mays
  Coding DNA Sequence Number=SeqID_22893
  Homolog annotation: Hit_ID=A2YL76; Match level="QueryCoverage=50%, HitCoverage=11%, E-value=2e-08, Identity=48%"; Hit description =Putative uncharacterized protein
MAAAWNLDGQIDMVKVVEPLQAMIMGSPLENARQGPENSCLEAVFLTSFTIDEEFFSCRMTRIASYVSNGMNYFHRINIVHMELKTANLLMDDQEIEVYYHTHFSRKWTLSFGSKYYELYRTTDEV

SEQ ID NO: 66269 - protein, 43 aa, Zea mays
  Coding DNA Sequence Number=SeqID_22894
MAPPRASLCATVAAQFAAAQSQDRDWIALHKIWSVDLVLDGVD

SEQ ID NO: 66270 - protein, 349 aa, Zea mays
  Coding DNA Sequence Number=SeqID_22895
MVALAKYVWAVTSYSGQMSVKVFAKNYCLHWQKRKIGNKIAQFGSCTFTPRTGKTSAEVEEEDEDEGALRHVARLSSGRDLVEEFIAYRVWPLVHGWVLGEVTPCRMPTLGDQLVRCPTFIVDLHGRNTATFVREVEAEVAEIVGKYVSKTKTLRSWDIRGSNVRLNRLPYAGYPGDDYANVVVRRRKKAMTTADEGPSWGTASGTAAKNRKLGTAAEGSRASDCFAMDLMETCVVPGETMSSPELRESSARMLKFTGGRWPRNVPIHRAAGKDMFTSRLAREMKIFPYGRNVGVVVSVVMEKDRQDTPRKHRAFARLGDPRRKGKMARASTKPAAPSASMPPPAAPTH

SEQ ID NO: 66271 - protein, 262 aa, Zea mays
  Coding DNA Sequence Number=SeqID_22896
MKSRTALGSRSSEKSQPKSGSSSSSEPVGPEVETAVSRSQVDHICYPGRSGYALAKVLAEVGSLGGSKLNLKGIGWKTDGTSWLVGGGEVALESECVDISGARLTPDKSFARVLASSVHLGLACCWETTPVVVSGARTTPDMSHAGVPAPSTRSGPTADEVLLSAWPRLLRLLLLRRGGWRGEEYHVVDVVGGHELETPKAEHRPGLKRLLKIVHLELNGKVFVNTQQDPYLARLLSAFWTREDPQPASEFVAACPCPDGLM

SEQ ID NO: 66272 - protein, 192 aa, Zea mays
  Coding DNA Sequence Number=SeqID_22897
  Subcellular localization annotation: CTP_CleavageSite=20; ConfidenceScore=5.03e-01
MWWPSQKSKNFFPVNCVPLSVMMEFGTPNRWMIFVKNATAYSDLMLVREAPGCLLQGTDEVQTPHGKQPSYGYCLQSLSGQGLTLGGRGYLGLGRGLLGFGRVIEFDGWLIYVPGQDIQWNRHPSRGYFSQLIRSLVVPSSHMVEFQPIELVFQARNFVTVGLHFSITAVRVLHDLVNNKLRVATSVEAPNP

SEQ ID NO: 66273 - protein, 368 aa, Zea mays
  Coding DNA Sequence Number=SeqID_22898
  Homolog annotation: Hit_ID=Q6J9V9; Match level="QueryCoverage=16%, HitCoverage=21%, E-value=9e-16, Identity=70%"; Hit description =Putative uncharacterized protein
MMKILEAERSLKSTNPHEVVLLQQQREEGDTGAPHLEARKVERRDECEKCEGMATARGIDPFLKADIPTRAPKHHGQSLPRHAPGFPPYDTGARSHMSYKLTRNAKMANRRKRSMQPHRGCAPFQLRCNRRSSMEAWAHMSCNRRVGYHVQNNRTATCAKAASSRGYRTSATTRGSPAHDPTVPIKCDGHGDRERGYFKKILLGDGNGPRALLLIRGSKVAPHGVRQPPQSTRAPSPLLIRGSKVVPRRDLTAAPEHAESGMTLGTSVTWPRLGLRSRGTLGHFRDQRERFVMESHRSEAPSHWTLSNGSGSSKSPTEARGLLSHQATTTLLTTSTNQLKNSEPGHAPGLRPDRMREQQGQPRNLKKN

SEQ ID NO: 66274 - protein, 447 aa, Zea mays
  Coding DNA Sequence Number=SeqID_22899
MDFSMDDLFDAHTGLDPAGAEFGQLAVVPSTVMAGSIAVATVAKGSSQDPWSKFCAGGEIASVVAAKDVAASFGQQLKHVSVNEAIRDKSVAENRSRNLLEKLTAAEAEKEDLIHRLVVEREDAEKARTEASLALKRATDAESGQRSLRGYMDRTEAATRARVDRAHTLLIDAHFEVFDRVTEDFDHRIFQVGDEVLKQSAGALYDRMWGPQGRDTVRERVDLPLEQKMRGWGLKSNRCHKPTLAETLQRRLCRLAMTLQRRLLLRRSVAAQVPTFGHAQATPTDVDINFVAAANAVPANGNSSGSKTEFWSSDVGDFGSPFSWIEESSDEDLDYFATLDVAAAESLSQPELREGSAPPAGTIAEDHRRRKMVSKHNVTKYLTLAYPEDTLLRVELESCVAHVGKCLCKVGQVVLFAFACDDNVVYISEVVVAHLVFKDLLGEAIKG

SEQ ID NO: 66275 - protein, 134 aa, Zea mays
  Coding DNA Sequence Number=SeqID_22900
MPSRTHAQDGASTSRGREATPNPPPVPPTLAEAIAALVNATTDNTRFLREMAEDPLEADEWIRVIEQKFGRLRCSETQKPCSQLSNCVALPAPCGETLWPFSRPIIRSPGMNSSWPSESITYRKEYSTRNRRNS

SEQ ID NO: 66276 - protein, 72 aa, Zea mays
  Coding DNA Sequence Number=SeqID_22901
MVGTSAVTARRQPGSVEHCMPRRDLRTRTHSMKKHGNNTKDGTEPKLCARELRHGGRKEETDLKRKRLSRPR

SEQ ID NO: 66277 - protein, 78 aa, Zea mays
  Coding DNA Sequence Number=SeqID_22902
MAPKPLGFYTKNVVYHLRHPLENVDTETWTFDRIWHQFCRGVGSSLEEMVAGITWPSTLPPGWTVEWDPASAEEEHEE

SEQ ID NO: 66278 - protein, 278 aa, Zea mays
  Coding DNA Sequence Number=SeqID_22903
MTSHGSSDDGNALTHTDGLAREGFPRILWEVLQGAGYTTPPQYAVQQFEKHRVPRCRVRMTLEPHPLQPGWRSLDSKSFGYRAEDTIEAIALHGLTTFCGFHPLELATHPIGLFPAEKEDDPMWKDRVEHAKDIWAIYPGQTAHLTVMRGEAMSHLMALLEATKITLDNREELVVDLSQEMVEKDLQVEQLSTDIQELEELVGTRENTIEVLEDQLINTQQQLAEANKHLDMHHQEIQDQEANEDVDIEGGDEPASSVDTAGSGRPPSPESSVASFAH

SEQ ID NO: 66279 - protein, 87 aa, Zea mays
  Coding DNA Sequence Number=SeqID_22904
  Subcellular localization annotation: CTP_CleavageSite=52; ConfidenceScore=5.70e-01
MAAGVVAELNPSSLFSVVPIGCSTKCAASSALQQTSRSISTPLVVCRRSRARCAAPSATSSKPVWSTPRFAPCPFDEMPSHVDSPCI

SEQ ID NO: 66280 - protein, 207 aa, Zea mays
  Coding DNA Sequence Number=SeqID_22905
MARTGKGKNEVGDRACVQGASNEPRPWGALGLGDHGLRGVLLRSREKSWAQGGRGRAARLQGASARGKKGALLLLRKGDGSGASSSWRRESSWPSGEKKGRRRGSFNSGAPALRESRALGGRKKAEDATGGASAAMEEKLLLPAPSELDKGRRWRGESQAAGGREVAARGEMENFQFARERAPIYRRKPRVRVSNGPNGLGWAGPER

SEQ ID NO: 66281 - protein, 351 aa, Zea mays
  Coding DNA Sequence Number=SeqID_22906
  Subcellular localization annotation: CTP_CleavageSite=35; ConfidenceScore=5.32e-01
MQAACNRARWTRFSDSQHASMETQAHKSRNRRARCCMQATAPPLAPPPRLFGCGTNTATRGSPAHDPAAPAWRDGQCSRKWAGSDAVAGGLEQRSRRRPDSRPIRGQQENPLSRREDDAPVIRSSDGSRTRNGRPANHSPRRINSAAGQAALLAGEAGDASPSLDRERGIPRKGSFPVKEPGSEPPLLIRGSKAGPPRGSTVASDHVGPTPTTGQRLAPEGFTVASDAERGMTRGLGLGLSPGRWRTPLRPTQGSDSGSALEDDELRFARPQGSDSALASAEQPPPRPTQGLGLGLGHERQTRPRLRRSLHVARPRAQASHVNRKRHHHPTPSRLGPQRTRPVSHLASSAR

SEQ ID NO: 66282 - protein, 57 aa, Zea mays
  Coding DNA Sequence Number=SeqID_22907
MESHDLRAERESRLVGGVENVGFGIDSGNGCQHCNHCSGKDEVVEGDFQEFQDYDEF

SEQ ID NO: 66283 - protein, 102 aa, Zea mays
  Coding DNA Sequence Number=SeqID_22908
MAQHDKREERRGCGISDVVQHAGAVGCGCMGHCKESDVETTPWIHNATTHSGATLMEQRAGEKVDDVVPDTVLHTDISTNTKRGEQGAAQMEEQKSSRAPGP

SEQ ID NO: 66284 - protein, 511 aa, Zea mays
  Coding DNA Sequence Number=SeqID_22909
  Gene Ontology: Mol. function=nucleic acid binding; Cellular component= nucleus; Biological process=biological_process
  Homolog annotation: Hit_ID=Q652Q6; Match level="QueryCoverage=83%, HitCoverage=94%, E-value=1e-135, Identity=61%"; Hit description =Putative uncharacterized protein OJ1003_C09.7-1
MEPAAEDVAAAAPDSWESADIDGPISRLILSARRVSSSPDLADNPDPPQPPPALQPQGPPSVPSAAREDLMAQVDQFLREALEKPRERLSVLRMEQEILKFIGDPRFTEYEFNGLPTSYLRLAAHRLAQHYFLQSIAIPDNSLPDGTGSHIILRKTSSECQLPDVCLADIPVNLPQEENISVAKVAIKQRPQKNLHGMNSSSAHSFRDNHQKSVEERKEEYNKARARIFNNGVSNATDGRSAEEVTSLTTLHRSTSLELNSNNRMGQGAEITLERTLTTTSASSMSNRSKSDKEPAVNRNRQNNRVAIFRDRESERRDPDYDRSYDRYMQRFDPGFGFSGGSYTIRPLYAPAVNYNTEFPQLGSAHQSPVAVEQQPRPIAQHMPVTWSAAQATNAIGYGPDGVMGPYSPGHIRAPQYAIPSRPGVPFVHPQESMGPFAQVEMLKEHILPYLNGLCCRRTDDDDEKLGFAVSGRSGRRAKIGVVQFRSRGISVDTIDGQVYKQTHLVVSVVL

SEQ ID NO: 66285 - protein, 139 aa, Zea mays
  Coding DNA Sequence Number=SeqID_22910
  Subcellular localization annotation: CTP_CleavageSite=34; ConfidenceScore=5.41e-01
MGTAALGLGDGGAWARGRGRGRWRTRRWARRRARARVRGRGRWRTRRWARRRSGSGTGKGTVAHSEMGSAALGLGDGVEGASDDGGARGRGRAPSSETVVVGLGLGDGVEGAHGSETGTGTAAQQPGGVVSAPGENTKP

SEQ ID NO: 66286 - protein, 146 aa, Zea mays
  Coding DNA Sequence Number=SeqID_22911
  Gene Ontology: Mol. function=carboxyl- or carbamoyltransferase activity; Cellular component=ornithine carbamoyltransferase complex; Biological process=amino acid metabolic process
  Homolog annotation: Hit_ID=Q8SA97; Match level="QueryCoverage=100%, HitCoverage=23%, E-value=5e-12, Identity=34%"; Hit description =Ornithine carbamoyltransferase
MAPPVDVAGLRPRLGDVEAPPKPRSSLSSVVEVESEPLGRARRSSSSSRAEPKSEPWVRRSGVRRLLGLSPSPSPGSGGAEFAVFQDLAQVRALGRAERSGAVLLSGRSVERRSEGGHFSSAGWGARVRIKLYADGGYQLRIRSLE

SEQ ID NO: 66287 - protein, 49 aa, Zea mays
  Coding DNA Sequence Number=SeqID_22912
  Homolog annotation: Hit_ID=Q8W0Y1; Match level="QueryCoverage=71%, HitCoverage=4%, E-value=5e-08, Identity=77%"; Hit description =Putative transposase
MAKEVDGLDYDRRTKDIDRDALMRVGGGKRHGRHYPLVLCLSFKLVILM

SEQ ID NO: 66288 - protein, 64 aa, Zea mays
  Coding DNA Sequence Number=SeqID_22913
MEGGGVAGGDGGGGCAAKGAWAAVVRCKMGRGAVVGGRARVWGAHGSSQSEEKLHYPMHAEDWE

SEQ ID NO: 66289 - protein, 241 aa, Zea mays
  Coding DNA Sequence Number=SeqID_22914
  Gene Ontology: Mol. function=protein-tyrosine kinase activity; Cellular component=cytoskeleton; Biological process=protein amino acid phosphorylation
  Homolog annotation: Hit_ID=A2WK63; Match level="QueryCoverage=24%, HitCoverage=9%, E-value=1e-22, Identity=84%"; Hit description =Putative uncharacterized protein
MKDCPSRLRIGLSSLLTYTLIKYDHSRLYGQSLNLNFYGPNPRVMMAGEHREGKEGEYFVRFGHGGGLTPFGIIVKRSRSLIGCYDLMCLLFALCRWDSGSTVSEFDGHSKRVPSCDFKPTRPFRIVICGEAILANFYEGPPFKFKHSIRHQHFSYLVSALAITQRSLLCYLYSGAQKLNRAELEVACEDFSNIVNTFPTCTMFKGILSGGVEIGVVSTIISSSKDWSRSAETCFKKKVYG

SEQ ID NO: 66290 - protein, 111 aa, Zea mays
  Coding DNA Sequence Number=SeqID_22915
MTLAPRCMNCELQSRMGMLRASRDMIRCDVLSSSEKNVLGAAPKFKVLARSCKAIFPYIYFYYSIVLIVGFHTPVLVASVCTTLTHTYCEDAYSLLQNLDIKKLLIFNHRW

SEQ ID NO: 66291 - protein, 154 aa, Zea mays
  Coding DNA Sequence Number=SeqID_22916
  Gene Ontology: Cellular component=membrane
  Homolog annotation: Hit_ID=A2WR14; Match level="QueryCoverage=81%, HitCoverage=18%, E-value=5e-63, Identity=88%"; Hit description =Putative uncharacterized protein
MAYVFTFWTCYVLLREYEVVAKMRLRFLSSEKRRPDQFTVLVRNIPPDPDESISELVEHFFLVNHPGHYLTHQVVYNANKLAKLVKEKAKMHNWLDYYQLRFERNASKRPTTKTGFLGCFGTKVDAIEYYTSEIERIESERTLLERRETRLLGK

SEQ ID NO: 66292 - protein, 25 aa, Zea mays
  Coding DNA Sequence Number=SeqID_22917
ISKLAPIKDYFPNSLVSLLSSSVLY

SEQ ID NO: 66293 - protein, 152 aa, Zea mays
  Coding DNA Sequence Number=SeqID_22918
MGKSNKRKREPTPPSEDFGDSEYSEEEFSSESEGTPAPVSPPASSDDSDDSQGIAAEVWSYIRAVERSGLEGSDESEYSSDEEDSDGGGEDEDDDDDGDDDDGGDGDGSGSGRGSGDDGRDGDGGGSRGSTKGGSSKGSTKGGGGSRGRASG

SEQ ID NO: 66294 - protein, 142 aa, Zea mays
  Coding DNA Sequence Number=SeqID_22919
MGKNNKRKREPTPPSEEFGDSEYSEEEFSSGSEGSPAPVPLCESSDDSQGLAAEVWTYIRAVERSGLEGSDGLEYSSDEEDSDGGGEDEDDDDDGGDDDDDGGGDGDGSGRGSGGGSKDGDGGGSRGSTRGGSGGGSNRASG

SEQ ID NO: 66295 - protein, 85 aa, Zea mays
  Coding DNA Sequence Number=SeqID_22920
MAHAGISRVDDVEAAKSAGSTRSEDHEQSREDASQKPYSPSPGAGPRRRRVPETCSPDRRCTSAVGMKRTRRRLSCEERRKQKLD

SEQ ID NO: 66296 - protein, 95 aa, Zea mays
  Coding DNA Sequence Number=SeqID_22921
  Homolog annotation: Hit_ID=O48967; Match level="QueryCoverage=50%, HitCoverage=10%, E-value=4e-15, Identity=83%"; Hit description =Putative uncharacterized protein
MDESGVKRRSGLSRLSRSGIICCINVFTSLPGLVIVSHLSPRGLGRYITAFCQGVRDEKMLEKLASHDVEMVSTLFAQADKCARAAEGRVWHSAP

SEQ ID NO: 66297 - protein, 154 aa, Zea mays
  Coding DNA Sequence Number=SeqID_22922
MAPHLVAYPAWKGPMTKRWPRPNQTSVKFCICVHQPGEFSDNTFYLTHPHGSHLSSHDDIRIEQPGLQFRTSFTKAGRSDSLGAGSKERELVPWSGPEQCSRLAWSRTIRLHSPPFYDGCLSIGSYSPVGLITWGPAPENGHLYPGVVRSRVAT

SEQ ID NO: 66298 - protein, 682 aa, Zea mays
  Coding DNA Sequence Number=SeqID_22923
MDKDRQGAARKRQSTVRVHEARPKRQRGTAKAEASGGGKPPLPAKVGASAPGKAPEATVGAGGPKLSKVAPSVSGVAEAAKAARSLPPSGKRVADFGTEINVEDYLGGSDEGPLALVVPGAAIATAAPAPKAGVETLGVGGEVSALALVRDEAGVATRRLKGATEALSRATEALSQVADFTSRTASGALTAALSAEVERLRTQHADAVREKSASDSKCRKLAEKVAALEKEKADLRRQLTEERREANEAIAKEQAAQAEARLARAEGNIAKELAGELQRRLAAFESRAEGAEAAARAEAERTRTQLMTSYRELGVRTGDFEVPEREAELRCLEWVQEELQELPTVLAGLMSFTSLVTCEAAMNALSREGCRHYEALDQVDEDFGRDIFEVEDPVVKESAGALYDRMWGSYGREVVRARAEAARAQAERGERVDDLGALNSALPEPETTPAEAATGVAPGLTPVTAEDAPGAPAPAAAGEGLPPRVAEGAPDAPAAAVPSAEDPAEVGAGAATEAAAEAPAAAGPSQVQDFGPAHATATTEFLAASTAEDGNECGGSVSEFFDFTDSGSSVEWTEESSEEDLDYFAALDVAAAEAAPHAADAPGVPGPSTGQRRRRAVAKRRISAEEGARLRVSRVGRQELLSLPAVSGVGEGELRSLFAGEELRIMLFNYREMGIIPKVEPM

SEQ ID NO: 66299 - protein, 722 aa, Zea mays
  Coding DNA Sequence Number=SeqID_22924
MARVCLGLGGRRKHTLQDNPILQARTLTAEGSSSTLGIDDTFGEGQPSLGRRRGPRISTLEDDVITMPGPSPLGSSPGIRPERAARPVTPGPRPVTFRGRQSGPSRRLGRSPWGLGQLPSKDVSPTRGLGWSIPASVPLTDDPARLRPTRPRQPQRTKTPALKVPLQTELRFRPRGYGQPPTTRRKDGGSPPSGGLEGGKTRCIREREDMAALQRGHPPFKDGSPYSRPQPSRAESSPTHSKVLPYGAGAGSHTSCKPTQGRRSRTAARGAYDRPAVTSDPPLLPRPTGERGPGKGDTPKRILPREGTRLRAPLLIRGSKAGPPEGFNSRLRSCGPYTHYWSEVQRPAPRKGSTTALGYSGSAPNTDQGFKGWPPKESHQREASSPWTPSPGDRVWQITRSSSETPCSAPIEGNMALSPLLLVERRRRGRLGGCSRKPGSGRTVDSVNIPARELGTRPYTWATASSHEGTTRPAEALREAVRPRRSETTPPRPRGLHPAGALARTHRNKTQPRKAGPLAKKCDESLQASANTPFEARGLLSGTIIRGTLKAPNSQLEHLMQRWPDTLILARTPRRQSRSDRRHFAAPLTGLTEGQRRIRHTDCSATGQSKTDKQSGPAGGTIGSSASPDQGLGLGPSPGRRRTPPRPRAQTRAKSQKMANSAPARPRGSDLGSALEDDDLRLARPRARTWARPQKTTISASPGAGLGLGLSPRRRRSPHRPT

SEQ ID NO: 66300 - protein, 576 aa, Zea mays
  Coding DNA Sequence Number=SeqID_22925
  Gene Ontology: Mol. function=amylo-alpha-1,6-glucosidase activity; Cellular component=membrane; Biological process=Golgi to plasma membrane transport
  Homolog annotation: Hit_ID=Q5JLH8; Match level="QueryCoverage=75%, HitCoverage=60%, E-value=0.0, Identity=78%"; Hit description =Putative ERD4 protein
  Pfam annotation: Domain name=DUF221; Domain location=142-535; Score =507.5; E_value=1.5e-149; Accession=PF02714.6; Description=Domain of unknown function DUF221
MALLRTVVGGGRSASLEPERRRAKGAAEEKEQQDGGRLGFYGARKAEFKQRRPRPPFIGRARLFGKPAIRQAATLRETRNPTVRRPSTVTSKTPAEPLRARAASPPSSDVFGTRRLRAHASLTQDAGHSDTYKYPRTVPEAEEREKIVKDPKSIVPAAFVSFRSRWGAAVCAQTQQTSNPTVWLTEWAPEPRDVYWDNLSIPFVSLTVRRLIIAVAFFFLNFFYVFPIAFVQSLANLEGIEKAAPFLKPLIEEHTIKSFIQGFLPGIALKIFLILLPSILMFMSKVEGLTSISSLERRSASKYYIFIFFNVFLASIIAGSALEQLKSYIHQSANEIPRTIGEAIPMKATFFITYTMVDGWAGVAGEILRLKPLVIFHLKNFFLVKTEKDREEAMDPGSIGFDSSEPQIQLYFLLGLVYAAVTPFLLPFVLIFFGFAYVVYRHQLLLLGLLSTKGAGQSTPVLLVLPVVTFYFHKYCNNRYKPTFVKCPLQEAMKKDTLERAREPGFDLKGYLMNAYIHPVFKGDGDDDKFSVVDQPEAEQVLVATKRQSRRNTPVPSKYNGSESPSLPEIVNDQRL

SEQ ID NO: 66301 - protein, 273 aa, Zea mays
  Coding DNA Sequence Number=SeqID_22926
MEVHCQTSFCQNEDGFPKLLRACTVRLEIRSQPEYDGREFIEHSTEKCVVTVYIGSSPHHVEWSVTAAGHRFKDTYQVVARKALRALSQARATALESREVIVVEALKQAKDEHVQKLIEAYLVTHNQHRAQQIQESTPSNPVQPMRAEDPHILEGHLVSIRGEKKAWELPEGAIVLERIPVFPQAMNKQEHPKSSQDSPPELFEPLTMKKIPAPSLEVKEEAASTPPAPPPFEELQEPVPLEEEFNPILPSQSPPEEVINISSLLTHPGDVSD

SEQ ID NO: 66302 - protein, 35 aa, Zea mays
  Coding DNA Sequence Number=SeqID_22927
MGSRHSACSAEAECRGKEGVEADLQEFQDIDEFED

SEQ ID NO: 66303 - protein, 37 aa, Zea mays
  Coding DNA Sequence Number=SeqID_22928
  Homolog annotation: Hit_ID=A2WNF2; Match level="QueryCoverage=89%, HitCoverage=10%, E-value=3e-08, Identity=90%"; Hit description =Putative uncharacterized protein
MADLLYHAMVLLRVKDVKMEQVLEVLRKRFSQSASAV

SEQ ID NO: 66304 - protein, 218 aa, Zea mays
  Coding DNA Sequence Number=SeqID_22929
  Gene Ontology: Mol. function=nucleic acid binding
MAGSGGSPAMEGDVVRLDPETEGGVGGNSLVTPPPALMGPEIAEMSIGESAFIPFVSFGDLDNNTFKGLTNVDPRAIDLAMRIAERMFLKMKEDEAKNKIEEENNRWRPNDESTSSQGSSFKSTSHMCFIANGSDSESESEDEEEQESDSEDEEDLQKFFAQLSKKNRMSLLKLMKRAEEQKEMLHKQEDILIEKIKDLEKLTKENEKLKCSHDDLVQ

SEQ ID NO: 66305 - protein, 114 aa, Zea mays
  Coding DNA Sequence Number=SeqID_22930
  Subcellular localization annotation: CTP_CleavageSite=31; ConfidenceScore=5.79e-01
MAAAAPTHAPVSSSACRAGFSSSGVSFPNFRSAAASAPGWRRREPYPAVSVVSSSPQSVAGAITVDTEDQICWGLERTVSHWGGNPFRALSALLGARSATLPHDGYKPWMRIHH

SEQ ID NO: 66306 - protein, 182 aa, Zea mays
  Coding DNA Sequence Number=SeqID_22931
  Gene Ontology: Mol. function=transporter activity; Cellular component= intracellular; Biological process=transport
  Homolog annotation: Hit_ID=A2YWM6; Match level="QueryCoverage=54%, HitCoverage=25%, E-value=2e-39, Identity=60%"; Hit description =Putative uncharacterized protein
MLMWSEMLKWMKEFGTDTILEVVTASQFWTASKTWEILISVCCSWLMEMDCSTREVGQKRGRLLADLEEDEQPKKKGFKNFSKTARELVHRMQKIDSDYYLEVLGSNYQSRLLEVIDSSELPEFLGGSCTCSDKGGCLGSNKGPWNDRYILKWQGLLSDTSNAESGSDVDDFGASFVQFMRK

SEQ ID NO: 66307 - protein, 79 aa, Zea mays
  Coding DNA Sequence Number=SeqID_22932
MADRVWRTTGTVSTVAVGGGGTWGKCHGWGTASASTANREGRDACHGGGVVRASAGGERGPARRPREEGCRQAGPEGRR

SEQ ID NO: 66308 - protein, 282 aa, Zea mays
  Coding DNA Sequence Number=SeqID_22933
  Gene Ontology: Mol. function=cysteine-type peptidase activity; Biological process=proteolysis
  Homolog annotation: Hit_ID=Q8S456; Match level="QueryCoverage=100%, HitCoverage=34%, E-value=1e-119, Identity=78%"; Hit description =Putative uncharacterized protein 163K15.6
MKSVDRPPSNPKRLTIESSQEVFSIDISRRTRSSSSAHQDDIPQNQEQNEPQPAPIHRFRRKALACRLKRKPPTSSTLPDDDFMDAPSLKRQFRSASPSPSEQISAKKLKVPSPQVPDVKRSPKSNIITKKNSPKQKTPRKSQKLNIRCIPYDVIVSSWIMSDRQRDAVARLGFSSIFDLRTDALESRSLIRWLMDKLDPHDMTIRPGASKELKITKDTVHLILGLPCAGGGREFTDWYGEVDAAAKLRRDLNVGKEEFDVVKLQDKIVLGNDDELSIRCFF

SEQ ID NO: 66309 - protein, 295 aa, Zea mays
  Coding DNA Sequence Number=SeqID_22934
  Gene Ontology: Mol. function=carboxyl- or carbamoyltransferase activity; Cellular component=ornithine carbamoyltransferase complex; Biological process=amino acid metabolic process
  Homolog annotation: Hit_ID=Q8SA97; Match level="QueryCoverage=25%, HitCoverage=21%, E-value=6e-14, Identity=47%"; Hit description =Ornithine carbamoyltransferase
MALPIDMASLRPRLGDMEAPPKPRSSLSSMAEAEPEPLGRARRRSFGRGQGGVRALGSGEAEFVIFRDLARVRALGRAERSFLWCLWQGLTACQSHSIKWHCSRSGAGGAVLLSGRSLERRSDDGLLLSEGRASGEPEMCPPLEGGLGRDGNPPGPLQLYADGGYQLRIRSLEAFLGCILFRWETTPPPAECSPRGLRGQHGSSFSLQAEIKSARSCSPVLPLEAPPAPSLGAPASGVSAGGDPDDGGGDDCSSHDIDFSANHEPEGWVARPITRDAAHGCHFHDALDTLLRRAL

SEQ ID NO: 66310 - protein, 51 aa, Zea mays
  Coding DNA Sequence Number=SeqID_22935
MQAACNRTKGTHPFDLDASSMGPRPTHHGPGKGILRKGSISAKEVGPEPSY

SEQ ID NO: 66311 - protein, 142 aa, Zea mays
  Coding DNA Sequence Number=SeqID_22936
MSAHDCPYATTVSVHSELQLTATSGNEDALAIIHRLSGEARTVSAVTRTVRCASGATATSRQRSTATAFNALQYAPESEHAQLARRTVYRTCLVHHWTAQRPQQSELQRSNPNGRVTWLAHRTVSGGASDCRCAKRQQPPPN

SEQ ID NO: 66312 - protein, 51 aa, Zea mays
  Coding DNA Sequence Number=SeqID_22937
  Subcellular localization annotation: CTP_CleavageSite=17; ConfidenceScore=5.05e-01
MGPFNRPGKATQPLPSPADSGSHQVTPPPHVDFADRCLNSSGGATNNNLMS

SEQ ID NO: 66313 - protein, 24 aa, Zea mays
  Coding DNA Sequence Number=SeqID_22938
MAGRIELAGAKGKWLASEENTDDH

SEQ ID NO: 66314 - protein, 24 aa, Zea mays
  Coding DNA Sequence Number=SeqID_22939
MAGGIELAGAKGKWLAGEENTDDH

SEQ ID NO: 66315 - protein, 281 aa, Zea mays
  Coding DNA Sequence Number=SeqID_22940
MNALSREGCQHYEVFDQADEDFERDIFKAARGERVDDFGALNSALPDPESNPTEAVSEAALEPPPETAEGAPDAPAAAAAGGGPPLETAEGAPDAPAAAAPMAEDPVTVAAEATAEAPATAGSSQVQDFGPAHATATTNFLVASTVGDGNKSDGSASKFSDFDDSGSSVEWTEESSDEDLDYFAALDVAAAKASPHAADAEAVSGPSTGRRRRRAVAKRRVSGADGGRLRVSRASRQELLTLPVAVSAGEGELRSLFAGEELRTMLFNYREMGIIPKVEPM

SEQ ID NO: 66316 - protein, 117 aa, Zea mays
  Coding DNA Sequence Number=SeqID_22941
MALLSTVETCSVSNLSWCCLLGAFGLRRHLRTQGGITADQNITKVDTAPKVNSTPVLFTLIWHSLLRHACTFISFKLKCIYEGIFGLKAVSQQTRILRRLIQRRRCEQESFGMIATK

SEQ ID NO: 66317 - protein, 563 aa, Zea mays
  Coding DNA Sequence Number=SeqID_22942
MEVVELVPCARNKWGNWQDFWFYVTEGTVEDHPRLPVSKMCSHFYSAYPPFEVAEEDADKGALRCAAGLSSGRDLVEEFIAYGVWPLAHDWALGEVCPRRMPSHGGKLVRSPVFALDLHSRDPAAFVREAEDGAVRIVGRYVPRTEGQRSWDIRGSNVRLNRVFELNRLPYGGYPGQDDVDRRGKKPVVESGDDPAPAAAPPSKKRKLGTAMGGLGVSDGFARELMRTCAAPGGRMSSPELRESSARMLEVMDKDLQGATQKRQAVVRLHEARSKRQRGAAKATAPGEGQPPLAAKSTVPASSRAPEAVAAAGGSKFAKAASASGRVPEAVKVARGLPPPVKRVADFATDISVEDYLVGSDEGQLVVVPPTTATTAAAIVPKAKGGALSGGGEMPALAASGTRRALPHGVWALTAVVSAEVERLRTQHADAVREKSVTDSKCRKLADKVAALEGEKTNLRRQLAKERREANEALAKAQAALAEANLTRVEGSLARERAEQLEERLSALQSRVERAEAATRAEAERTRKQLMDSYHELGARTADFEVPDREPVLRCLEWVQEEL

SEQ ID NO: 66318 - protein, 279 aa, Zea mays
  Coding DNA Sequence Number=SeqID_22943
MENHDLWAERESRLVGKVAMRLMVLGIDSGNAGDRVCEELLPCASPGGAPAPPLSAPAPGVAAGGDPDDGSGDSSSRHDTDFSADQEPEGWVARPITRDAARGCHFHDALDTLLRRALDRYLFYRVSLCGLPAQSREHYSISKRDSTEAAMQDAARRALSHYYSVLGGVADGLNLKYYPCRPSGSTGGVIVSPVGEDNPRLSSTVNLAAVLNTELDHELNELSRACAEIAQLRAERVECRHLDDGSPAPVGTQHPYRSPRRGHQSYGNPDCKTKIDLEP

SEQ ID NO: 66319 - protein, 91 aa, Zea mays
  Coding DNA Sequence Number=SeqID_22944
  Subcellular localization annotation: CTP_CleavageSite=50; ConfidenceScore=5.36e-01
MLVSHDLPRVQPRAQQGAPPRPTSSLGLSLSLERNRELRLARPQASASASASEESPPRLTPGLGLGGVAASPDLGLGPTTPQGIHHYPTPS

SEQ ID NO: 66320 - protein, 147 aa, Zea mays
  Coding DNA Sequence Number=SeqID_22945
  Homolog annotation: Hit_ID=Q8SA86; Match level="QueryCoverage=59%, HitCoverage=10%, E-value=8e-07, Identity=34%"; Hit description =Putative retrotransposon protein
MKKLGYFGSNTEVRLPSEETIPNPKKNEIVVYRSFFKAGFRLLMYQLIAKILERILELHYQMKARADNLHNNFECYNFAYPRTGWKLLKQVKHKDGELVTLAFEFREQSPYKAPSEGWLKLIEMKCNEICGNYLTREHEDMSSTFGG

SEQ ID NO: 66321 - protein, 52 aa, Zea mays
  Coding DNA Sequence Number=SeqID_22946
MASKVGTMSWRTSEYVGVIILAVERILTICENFMRMLLPKVNVEGWMKLAFG

SEQ ID NO: 66322 - protein, 215 aa, Zea mays
  Coding DNA Sequence Number=SeqID_22947
  Subcellular localization annotation: CTP_CleavageSite=10; ConfidenceScore=5.04e-01
MTRYASRTVRSTSDGPRTPIRNATQSPNPAIKREIQRSGDHLPQLNSTTASPIFTAAPLAGAAPIRRSLNQSPLRLLLRDVRRVVNALGKSLPTVAAPNRVTMRQCSIAVVWVTVKKSDHPDVQCAPNLYPARSNRTVGNPLTAPLPSNGEVGKGRRHELEATRGDLLALLSDFGPQSVDLKSSRCSTRTPHMLVNSSSFRLLGAREGEKRHWRY

SEQ ID NO: 66323 - protein, 223 aa, Zea mays
  Coding DNA Sequence Number=SeqID_22948
MAGKIRRLMNRYASRTVRSRSDGPRYSYPKRYAVTKSGHQKEIQRSGDHLPQLNSTTASPIFTAAPLAGAAPIRRSLNQSPLRLLLRDVRRVVNALGKSLPTVAAPNRVTMRQCSIAVVWVTVKKSDHPDVQCVPNLYPARSNRTVGNPFTAPLPSNGEVGKGRRHELEATRGDLLALLSDFGPQPVDLKSSRCSTRTPHMLVNSSSFRLLGAREGEKRHWRY

SEQ ID NO: 66324 - protein, 70 aa, Zea mays
  Coding DNA Sequence Number=SeqID_22949
MTAVTSPPLLIVLTGKQHYSPRSDYCANPHGKTDDRDVQGLPKRQAEKARVEAKEANSDGSLQGQTLSLS

SEQ ID NO: 66325 - protein, 95 aa, Zea mays
  Coding DNA Sequence Number=SeqID_22950
MRVTNRGIGTHRPLSATQRELAAPEHRTVVLRRRTHCPAPPCSRVEDLRGLRTKIHTDVEETVDTDPPTRKSRAPSVAADAEDETRTGRAFIHRR

SEQ ID NO: 66326 - protein, 65 aa, Zea mays
  Coding DNA Sequence Number=SeqID_22951
MRHDNKGLSTLQDLNGAGYTKPPQYAVQLFEQHRLMGLVEDTKITLDNREDLVVDLSTELVEKDL

SEQ ID NO: 66327 - protein, 25 aa, Zea mays
  Coding DNA Sequence Number=SeqID_22952
MPRRDRKDFPELTPPFAGPSSSPSL

SEQ ID NO: 66328 - protein, 355 aa, Zea mays
  Coding DNA Sequence Number=SeqID_22953
MEPAVLNRERVALDKKNRMPMLFDDYSDEDFYGVQRKYSIVARVEVKFPIEPRYRDRQHYILSDINGAKIEAIATRYEIVKYFNSLLHEKHVYKMHNVWFGLNPGAFNFRHLNGTIELYFTQQTVVEPYAVPVQMPPFPKHIFLNLDDIAELPNRTLVDIMAIVVHLDTIHRTMWGTFRKIVIMDASVSNQLTIQQYTSNRSITTPIILNIRWDIMSVANHSQTSLAISLEVPTYTSEVLHPTAYVSEPDSSSDNACDWVIPEYTSTRFMPASTQTEDVGSPDMSTEPLRRKHYVLRGERQAILARQNKKFEANVARNVATLTEEDISDVGQMDDSTQPGSTIEINNTSNYTNQF

SEQ ID NO: 66329 - protein, 144 aa, Zea mays
  Coding DNA Sequence Number=SeqID_22954
MWLNVVAAARQSRRFWRINHLLQRQRLGHGMQEQVPSRHSLSFPQSRAGQLVMKPLTECITKGPRMREPLLADIVQAEDIKELCKLLVVVSREAAKAYVGSDQPGSRNKCFGAIILQDQISWSWENAINLLGDRAIPADIKGLK

SEQ ID NO: 66330 - protein, 641 aa, Zea mays
  Coding DNA Sequence Number=SeqID_22955
  Gene Ontology: Mol. function=cysteine-type peptidase activity; Biological process=proteolysis
  Homolog annotation: Hit_ID=Q109R5; Match level="QueryCoverage=86%, HitCoverage=48%, E-value=9e-53, Identity=26%"; Hit description=Ulp1 protease family, C-terminal catalytic domain containing protein
  Pfam annotation: Domain name=Peptidase_C48; Domain location=66-274; Score=15.6; E_value=1e-05; Accession=PF02902.10; Description=Ulp1 protease family, C-terminal catalytic domain
MSLSHNKPKKSVTTTIVPKDYICKQGDLALIDWIKEIPCEPRVEVVLIDDAFVERKWMECLFQPDAYLGDEVTDCYINLIKAQEHLKCRSGGRVHIENAFQFNFLKRDGDVETKTDELYPSKDMAQISSAERRVLLYLDHDRVFIPINIREMDWYLAVINARNMEIQVLDSLGTSSGRNDLIDTIKGLQRQIDMVSQRKELKDHRWPDLRVASWPLREIEMEYAKQTDSSSCGLFLLNYIEYWTGDELSDNFTQEKLAAILLSSDINKRKGCPLYKYDKEVDAGCSSDVQILDSPTNPKKRKLLCVSEESEVLMEDDDGPITQADLERWFVHDWDKRTPIKIPTDECTNEFLLSGLSTKDMPVTKADLIDVLCDYIMTIQDDTTLEMTWVRSFNPFKIEISVKDLQNVLRVNLDMTLKCFDMAVRLLAIKESHMSKDEMIKDKKHYMDMRFWRMVGFAKLPKYHQDPTAEELAKTLDCWPSLNYYITSCKYVLMPWKFNGCYALFIIDHGKKHVTFIDFTPTQDWCKHMPYKRFAEAIIMASKKYKIAYNKKHSGWADDIFKWEHTIRSGLPMDLKGVNTSYFVLQAMVMWGSGRRMEFNRDAKILRRNFVIYLLSYEENSCRYAIPPNIQQRLISIAKKD

SEQ ID NO: 66331 - protein, 98 aa, Zea mays
  Coding DNA Sequence Number=SeqID_22956
MAQQMLSLRVPIYMPKRIATWWALHVIDFRYSSEGKTVTGGFNFEIKALACGTGTPAALRSALLTAMWSPSTVSSSSPRGTAAKPRHTVGTPNPNTSD

SEQ ID NO: 66332 - protein, 87 aa, Zea mays
  Coding DNA Sequence Number=SeqID_22957
MANFFRGFRLSVFAGLCLPKVFETQKVEVSSPEVGANVENKSPTLPLAQIRNNQYLRECRSYKEIFLQECRAKNRIKNFTEATKSRS

SEQ ID NO: 66333 - protein, 95 aa, Zea mays
  Coding DNA Sequence Number=SeqID_22958
MAKCANVCKCKDDFCLHTSKDMKPHRTPPRATYDAKNVPGIGCKSNGSIHHCIYLPSSEIWNGTKGVFGLTFGFWLLPPKSQKPTKVLDPGSSFF

SEQ ID NO: 66334 - protein, 98 aa, Zea mays
  Coding DNA Sequence Number=SeqID_22959
MAGGGARFSRRAPVISGSGEARGVEAPTAKASGGIYRRENGTGAQGGATTRGARATVASPHSAGSLEDMVAGVTWPSILPPGWTVEWDPTSAEEEHEE

SEQ ID NO: 66335 - protein, 48 aa, Zea mays
  Coding DNA Sequence Number=SeqID_22960
MAGGRARFSRRAPVISGSGEARENAIDLWKGAEIQISEFLNFPPSALV

SEQ ID NO: 66336 - protein, 465 aa, Zea mays
  Coding DNA Sequence Number=SeqID_22961
MGSAFVAFVLLSLEERNFAEVGTFQPSLGFKDFHQAARLHPLADGHPRRGRGRAEPELYLPYGSVGHLLLHHLGERALAGLAEGADFDNAVPIGRKRRQLQHAWRLLRRAHRGDRPRRRALLGRRSCSWAVLPLLRYDASVRRSVLACPGGPEWGSAGGQMAAVVGAEVVAAEEVLVADEIAATICAPGLRLFGFDSLSSPLEWGRGRGPYRSSICPEVIAAAVWPPGAEIVVAAAGVGGGEPPGILSSRRPSNVGGCSLRNPRPLCDEPEPEAAVSAWTEAELARKEDFVGPGAGPPTVSPSEAGSDSAEGGVDAEGAAAPPTDDLFVGSRIVYPSESYLLRKVMSEKVMSEDPTIEVVEKHERCSGRKTFSEENFDAEGVMELPLDAQSSGRRLDVDERVEQCRAVASVLHVLARSVQVLQMQHLRGIHTYREEAPRTELLGSRRRLGEGERWAAAVSSLVAN

SEQ ID NO: 66337 - protein, 237 aa, Zea mays
  Coding DNA Sequence Number=SeqID_22962
  Homolog annotation: Hit_ID=Q6J9V9; Match level="QueryCoverage=35%, HitCoverage=30%, E-value=3e-08, Identity=43%"; Hit description =Putative uncharacterized protein
MQAACNRNKGVHPFDFDASSLEVQAHTSWAGKGDTPKGILLREGSGPRAPLLIRGSKAGPSEGFNSRLRALGLHAHYWLAPKGFDSRLRARRARDDPGYVRYITKARATLPRKATQGRMKKAESVLDRPLALCGGSGAALANPAPAKPLTTPLKGHDLASPEPSLGQRQPNPKDSRLARGPPQATDTPLARPRPSLRREGRSDRSYFAAPLTDLTGIQRRLPCSDCRATRQSEVDSG

SEQ ID NO: 66338 - protein, 132 aa, Zea mays
  Coding DNA Sequence Number=SeqID_22963
PAAEERAEGLTGGKIAPAGELVGDEESGLSRAKLTNQTGQRASPGIKEVKFCRVRGLGKLHGPMAELTKALARLGGDWSGLATVAEALVVMAGGKELAGAKEGWLAGDEIWSPEIRSVSQLKPEANPEFGRV

SEQ ID NO: 66339 - protein, 184 aa, Zea mays
  Coding DNA Sequence Number=SeqID_22964
MHPLGLFPAEKRDDPMWCNRVRHVKDVWAMHPDQVGRITVQCMSALYRLQALQSDAMAHLTNLAQTTKLTLDSREDFVAFNDLCQYAGYRADYDEKKRDRFHRGLNTKLRERLNNVRADSFNELVNLAISQEDCIVAHQAEKKRKAPMSGPSAPPQRFWIVTNSQSRGFQQQAGRWVIRPPQQP

SEQ ID NO: 66340 - protein, 437 aa, Zea mays
  Coding DNA Sequence Number=SeqID_22965
MSSHSMYRVLPPSEPLDGERSRRFRLAVVGGTQLRGSWYLSAIARLQGFSSGIPAASPRRWSPKTVTTSSMVGRSEPGCGLCPTLSFKDLHHPCWGGGWAEPELYLPHGFVGRPLLQHSGEGVFTGLAEGADSDNAGLVDRERRQLQRVGLAGSAGSGSAPGAPSRRMSGRRATRTGGPPKTSRAARAAFVFLGCPAFAPVRRLLRRGRCSPVREDPSGDLPVGRWLPSSTLRWWRLKKSSLPTRSPPPSALRAPGSLALIACPRPSSGDVGEELVAAASALRSSLLLFGHSERRSLSLLPERASASHLGQRNPRPLCGEPGLEAAVSAWTEAELARKEDFVGRSLAGPSTGGTSAGVGDPSPVLPSEARSDFVEGGVDAEGAAAPPPSTSEPAGSVRLYRIAHLNTSYFSQKAMSETSYVNEVYEWLENILRVEVT

SEQ ID NO: 66341 - protein, 313 aa, Zea mays
  Coding DNA Sequence Number=SeqID_22966
MKKRKLGTVAEGFGVSDHFAVELMGSDAGQLVVVLTPVAATSPTVAAGAKGASQDPWSNFCASDEISSTAAAKDVAGSVSQQLKHLAEERRDVNKAIAEAQAAQAEAKLARAEASLARQRAEELEATLNSLRNHMDKTEVSTRAEVERTHAQFLDTYQELGAWIATFDASGQEVGLHFLEWLQEELGVLSTIMTGLMSFSSLVTCEGGRECFVPRGVEDPVLKRSTGALFDRMWGPHGRETVRERSDQAMDQMAHDKEVEDLSNLDSTLLDITLPETSGGGAGAAIRCGQGPLGDPRANWSWQRPRASPCADG

SEQ ID NO: 66342 - protein, 48 aa, Zea mays
  Coding DNA Sequence Number=SeqID_22967
MTKIGLALEPISAGSLQDMVDGVTWPSTLPPGWTVEWDAAPAGEEQEE

SEQ ID NO: 66343 - protein, 107 aa, Zea mays
  Coding DNA Sequence Number=SeqID_22968
MAIALLIQPLKGTVRGSCEDVGWRDFVVGLRLAVRRTKGGPRREEDEGWAAPVSLPPLGQRVDEGLERRVASSPSPQQQPGVFVLRTFGREEDPNNFVGSLYQTIGF

SEQ ID NO: 66344 - protein, 227 aa, Zea mays
  Coding DNA Sequence Number=SeqID_22969
  Homolog annotation: Hit_ID=Q9ATL1; Match level="QueryCoverage=34%, HitCoverage=29%, E-value=5e-09, Identity=43%"; Hit description=Gag protein
MAPKRASSKAAPSVDEAAKAALLAEKKGKALADNTPLEACEDEALSKRQHNEQPTPEGTLRTCSSEGQPQALPPGFAPLEGEDATEDGEVIGVSAEEQLQLRALRIKNHNLQKQKEILEAKRQRVSVQAKVRQMIRDEEQRARELEQEIALMQHEGQHDLQHGPPLQQRAPAGDLFIPQRGPFIPHTAASQGINYIDERSPLAPQLQASPYPRQLQSRGIPQVQRQH

SEQ ID NO: 66345 - protein, 65 aa, Zea mays
  Coding DNA Sequence Number=SeqID_22970
MAQDTTSQGMGRAAGARERSAGTIEVETEQRMGELGPSWWPSLTSTGEEQVVEEEPPNSEDFDLI

SEQ ID NO: 66346 - protein, 122 aa, Zea mays
  Coding DNA Sequence Number=SeqID_22971
MAPVLRQGNHNMSSSSEEIHGSRRGAGNVEVIFPESHVVGGAPASSVADSTEPVSTSLAAADFSALAEKDIAALSPELHAQATDPKSRQGHRTLDGSLGGDQTLSHCEGLCSVYFLFEDSSF

SEQ ID NO: 66347 - protein, 211 aa, Zea mays
  Coding DNA Sequence Number=SeqID_22972
  Homolog annotation: Hit_ID=Q6J9V9; Match level="QueryCoverage=50%, HitCoverage=27%, E-value=3e-08, Identity=40%"; Hit description =Putative uncharacterized protein
  Subcellular localization annotation: CTP_CleavageSite=44; ConfidenceScore=5.43e-01
MAVAGGRKQQSNRLQAHVPSWDSERALSHGMKTTRPCSVPRTARACTTAAPPTTRPVALTLRQGRRHLWQAKRATLHLRHDDHVKKGTGKGDTLKGILLREGSGPRALLLIRGSKAGPSEGFDSRIKALGLRAHYWSEVRRLAPRKGSTTASGHSGSVPTTDQGFEGWPPEGFDSRLRARRARDDSGYVRFMAEARATLPRYPRHFRDQQE

SEQ ID NO: 66348 - protein, 136 aa, Zea mays
  Coding DNA Sequence Number=SeqID_22973
MFPGRTLPPEGSRSRPHSRDENQILKPKSRSCHHLSTVGGVHLPTNTAPVGAGRPKAHRQVLTPVLATKTRMGPSQNMSTALVAYDVLGDPPAVCNCTKGMHPFHFDASSMGPRPTRHVTDAPVTTCEKLHRHLRQ

SEQ ID NO: 66349 - protein, 289 aa, Zea mays
  Coding DNA Sequence Number=SeqID_22974
  Homolog annotation: Hit_ID=Q8W0Y2; Match level="QueryCoverage=11%, HitCoverage=1%, E-value=3e-07, Identity=81%"; Hit description =Putative gag-pol
MDEGTPLGGLESEDDTKPSHGLHAVLSSLWGQGYLAHRLRIRPCDATTPEGFGPKTSRWATWCFGYDKTPGGRHKLTLPGNGPFIIAKILKPGTYKLANSQGEDQTSVGGAAAPSASTPPSVESDPVSDDDTVGGSPPRRKMSAPRLSHRRQGLLQEPSPSRWPDRPLRSLSQLSPEDISPAHGLGSPTSALVPLVDDSARFQPPLLYLLGLGSHLLLGRRSLLFEPTPPLSMLTPLPPALALRRAAEGFFNWAREASGGKADRAKGLLRLRDTDTSLVTFRIGQLTLG

SEQ ID NO: 66350 - protein, 218 aa, Zea mays
  Coding DNA Sequence Number=SeqID_22975
  Homolog annotation: Hit_ID=Q2QYU1; Match level="QueryCoverage=92%, HitCoverage=33%, E-value=6e-62, Identity=61%"; Hit description =Nodulin-like family protein, expressed
  Pfam annotation: Domain name=Nodulin-like; Domain location=2-156; Score=-13.4; E_value=6.4e-10; Accession=PF06813.4; Description =Nodulin-like
  Subcellular localization annotation: CTP_CleavageSite=27; ConfidenceScore=5.51e-01
MQVFLVCLVAGCSICWFNTVCFVLCIRSFSTSNRSLALSLSISFNGLSAAFYALFANAISPFTPTIYLLLNAVLPLAVSVLALPAILLCHTGDSNNHLRSAPRPQDRRVFLGLYILAVITGVYLVIFGSFTTTGPAAWVILTGAMVLLALPLIIPACSSCSYFDTQHGTGTTDPASQLNQHDDPNKPLLVSDSHQIEPDGVTQKNRSTSCRAVVVKPY

SEQ ID NO: 66351 - protein, 78 aa, Zea mays
  Coding DNA Sequence Number=SeqID_22976
MANDDKDVLIAWHVVGGPNIKVPDTVIVVRLAIELQPELMLFALPKASPTTTVVLATSIGRATPSHLSLDLWSLSLMS

SEQ ID NO: 66352 - protein, 46 aa, Zea mays
  Coding DNA Sequence Number=SeqID_22977
MGKNNKRKREPTLPSEEFGDSEYSEEEFSSESEGSPAPIPLQIAAE

SEQ ID NO: 66353 - protein, 143 aa, Zea mays
  Coding DNA Sequence Number=SeqID_22978
MGKNNKRKREPTPPSEEFGDSEYSEEEFSSESEGSPAPIPLRESSDDSDDSQGLAAEVWTYIRAVERSGLEGSDESEFSSDEEDSDGGEDEDDDDDDDDGGDGDGDGGNGGGGSGGKGSTRGGSSTGSTKGGGGKGSGGKASG

SEQ ID NO: 66354 - protein, 258 aa, Zea mays
  Coding DNA Sequence Number=SeqID_22979
  Subcellular localization annotation: CTP_CleavageSite=55; ConfidenceScore=5.08e-01
MDMGTRIWIVIALWDGHGPFVHLYLRTIMIVLASVSASSFTILPSFLSPLCLRLRATPFSTEGIGAGVSSPYSSDTNPDTDPCGYCTSMRTFHSMRAPSFSPSSDVPFVFLPFALSFLPNLLPPPTVAAASQPRLINAGMGRLGLAPGLSSCVPPMRTRWRLSRLGYLVDEESSGILLMPPPDTQVFVVSFSDNEQRGKVGSLLRFIRSTLWARPGDIYPPQAPDLWVDLERSAFWIVRFWTSLGAPEVHPMGVALDL

SEQ ID NO: 66355 - protein, 64 aa, Zea mays
  Coding DNA Sequence Number=SeqID_22980
MDVDDICDIDNNVSHEDEIHGTGEDANGNNSEHMVEEDHVPAPIGSEGLCDFGDLYYGLSVVLP

SEQ ID NO: 66356 - protein, 33 aa, Zea mays
  Coding DNA Sequence Number=SeqID_22981
MAQLTMTGRAHLGKNLLSYNSAVLQKNPYDLRE

SEQ ID NO: 66357 - protein, 109 aa, Zea mays
  Coding DNA Sequence Number=SeqID_22982
  Subcellular localization annotation: CTP_CleavageSite=86; ConfidenceScore=5.24e-01
MKPWKETSRSSKTTTSSRCGLAATPSRLPVKAAVIYVSFPHLFIVVSIATTAEEKMKLWKETSRSSKTTTSSRRGLAATPSRLPVRAAFIYVSFSHFDYCKDYVDVSDI

SEQ ID NO: 66358 - protein, 1020 aa, Zea mays
  Coding DNA Sequence Number=SeqID_22983
  Gene Ontology: Mol. function=DNA binding; Cellular component=nucleus; Biological process=response to DNA damage stimulus
  Homolog annotation: Hit_ID=A7PE22; Match level="QueryCoverage=61%, HitCoverage=72%, E-value=1e-119, Identity=44%"; Hit description =Chromosome chr11 scaffold_13, whole genome shotgun sequence
MSVSASTRPVAAALGAAAFEEALTLRSPVYFSRGAKAVVKYEPRAFAVSVAASTLDLGKHDVDLTRLLPLSFDDLEDGGDSGFGKWSTSFRLSGPARGARLNVTFSCSLLKHSLSAVQCILPKEWEGIYFGGLGRAVMYLDLDCRFDVLRLAQILRNRIAEGCRLAHLGNGDPENDVTKDEFQCSLQNTLFSDCMQRFLYARCCKSPEFIDALKWVVSGCWRKLITAVPKEMCKGLSSLMILVAWEVWKHRNDSVFENLSPSTQAVLRSVSMEQHMGGEVAGLRRGSMARPVSVQAPTPLPARSRDVRVLHEVLPSLRSARPVPSSVADGVPDARKEELAAPDCTEEGSPEAKHCTSVEVKKGDSVHPDGDWGTVEFNVVEHGVEVASDDPQRLKHVETSNAAGQEEDSGFKIDEEGSFRPLQVSGDVAEDQTVGVKTEVAVSDVAVQRENMEDKQDGIVKAASLPTAALEAEGQFGADAELEDLESILNELSVAEPEEFESPVVEDKHSRRLSCTGVTDSYKSASRKGRSRSMDASTDSVANEFLDMLGIEHSPVGQPSDSDSESPRERLWKQFEKEALASGNAILGLDFDDGIEGPICDNVVEDFDLSAMIHEAELELQNGSQPIDTKFRAKSLEDEETEALMRQFGLNEKSFQSSPPESRSGFGSPISLPPEQSLELPPLAEGLGPFIQTKDGGFLRSMNPALFKNAKNKCSLVMQASSPIVLPAEMGSGIMDILHGLASIGIEKLSMQANKLMPLEDVNGKMMQQIAREAAPALESAERYDALDYHSIGALVEGCGNAPSGKKTGRCADLSSLGGENASEYVSLEDLAPLAMEKIEALSIEGLRIQSGMSEEDAPSNISAKPIGEFSSLQGKCAENTWSLGLEGTAGLQLLDVKQSGEVDGLMGLSITLDEWMRLDSGKDLSSLWNLDMGGKVTGAVQFCGVRLGQLKPYVADQNANANSYAASLHLSSLHDQSVQKSGGLGHDYGISRVDIEKAAALHYNGVMKSWLDLGKHDYK

SEQ ID NO: 66359 - protein, 622 aa, Zea mays
  Coding DNA Sequence Number=SeqID_22984
  Gene Ontology: Mol. function=nucleic acid binding
  Homolog annotation: Hit_ID=A3BNH7; Match level="QueryCoverage=93%, HitCoverage=77%, E-value=2e-88, Identity=37%"; Hit description =Putative uncharacterized protein
  Pfam annotation: Domain name=RRM_1; Domain location=284-352; Score =16.8; E_value=0.0042; Accession=PF00076.13; Description=RNA recognition motif. (a.k.a. RRM, RBD,
  Pfam annotation: Domain name=zf-CCCH; Domain location=154-179; Score =26.2; E_value=0.00012; Accession=PF00642.15; Description=Zinc finger C-x8-C-x5-C-x3-H type (and similar)
  Pfam module annotation: Pfam domain module=RRM_1::zf-CCCH; Domain location=284-352::154-179
MDAWEATKAVFDRVRALDPDNASKIMGLLLIQDNSDKELIRLAFGPDHLLHAFVSAARADLAAKPASPPSPVLGPLHQTWGAPPHPSPTAGSDHQHQAPFAADLALGYDFDGAGAGADAFFPDDYDCWSPAGAAHRRSFSLSDAEATAAAAGGAAWRPCMYFARGFCKNGSSCRFLHGFPEDDDAAAEREMVVMRAKALAAAAARPQQQQQLMASAFPFSPSPPKGVNLNFLLHQHQQQNEPQRAAAAAAMLLQGGDDMHSRFPVRSPRMDRGELMSSPAARQIYLTFPADSTFSEEDVSNYFSMYGPVQDVRIPYQQKRMFGFVTFVYAETVKIILSKGNPHFVCDARVLVKPYKEKGKVPDRFRKLQHPHHGDFAGCTSPTGLLDSRDPFDLQQPQIGPRMMYGNVAGHEAFLRRKLEEQQQAAELQQAIELEGRRFMGLHLLDLKSRGHHHLGSSPAAMATTTLGQGDDGCKGRSANGNDNAVAFHLEDANIQDTPTKMNSNSLAMSGGPAAGAGGEHEEQQQDGDGDGSPKQAVNPGKEEKTESGPVTATPIVACGFQESGVVEHILPDSPFASPSKASTQNGSIISNAASSLFPPPASTMELPPYSSCFFQAPRDYR

SEQ ID NO: 66360 - protein, 640 aa, Zea mays
  Coding DNA Sequence Number=SeqID_22985
  Gene Ontology: Mol. function=aspartic-type endopeptidase activity; Cellular component=extracellular region; Biological process =proteolysis
  Homolog annotation: Hit_ID=A3B6P4; Match level="QueryCoverage=43%, HitCoverage=48%, E-value=2e-77, Identity=57%"; Hit description =Putative uncharacterized protein
  Pfam annotation: Domain name=Asp; Domain location=111-504; Score= -179.4; E_value=0.0054; Accession=PF00026.14; Description=Eukaryotic aspartyl protease
  Subcellular localization annotation: CTP_CleavageSite=49; ConfidenceScore=5.15e-01
MASRGHLLLALLVLASSSAAAASGARHQAHGRRGKPARPRPRPRLELVPAAPGASLPDRARDDARRHAYIRSQLLAASRTRGRRAAEVGASASASAFAMPLSSGAYTGTGQYFVRFRVGTPAQPFVLVADTGSDLTWVKCSGAGDGTGDAPRRVFRAAASRSWAPIACSSDTCTSYVPFSLANCSSPASPCAYDYRTAQRVAAESLLARGWRILALTWWQWRGRYNDGSAARGVVGTDSATIALSGSESRDGGGRRAKLQGVVLGCTASYDGQSFQSSDGVLSLGNSNISFASRAAARFGGRFSYCLVDHLAPRNATSYLTFGPPGPEGGAAASSSSSSAAARTPLLLDRRMSPFYAVAVDAVHVAGEALDIPADVWDVARGGGAILDSGTSLTVLATPAYRAVVAALSERLAGLPRVSMDPFEYCYNWTAAALEIPGLEVRFAGSARLQPPAKSYVVDAAPGVKCIGVQEGAWPGVSVIGNILQQDHLWEFDLRDRWLRGPRAELLSLGNFQKPARYNSPDCPVYTGQCPVLQEDAASELGSLGKSQRLLRYNSPDMPGVHRTVRCICGATATSRQRTPATAINARQSAQASGMPMLAHRTFYSTCPVHHRTSRRAQKSELQRSNHNGFGDVAGAPDMS

SEQ ID NO: 66361 - protein, 80 aa, Zea mays
  Coding DNA Sequence Number=SeqID_22986
MPLIKDYNNDSNTCGLKDSFSRSYFFLQDLRRRSMVPTVLKDGYNVSIKVRYRGDKGKDDDRESITKDAVKEKLSKWRSG

SEQ ID NO: 66362 - protein, 52 aa, Zea mays
  Coding DNA Sequence Number=SeqID_22987
MGSRHSACSAEAECRGSFVLLLLVTLLRGEVAFGCNLCSSKEEGVEADLQEF

SEQ ID NO: 66363 - protein, 73 aa, Zea mays
  Coding DNA Sequence Number=SeqID_22988
MTLMDVYAKTSRLELVLQVLGEMPSRNVVSRTMLAASLVCVSSDAYWIYPRFLKIRDLTPPIFNRIGEDRDKS

SEQ ID NO: 66364 - protein, 82 aa, Zea mays
  Coding DNA Sequence Number=SeqID_22989
MAKPTVADAGAVGAPDMSGAHRTVRCTPDSPVPPSDRWLGHVSRADRAADRWPCRPLAHRTVRCTPDSPRINSPVTTATDYA

SEQ ID NO: 66365 - protein, 765 aa, Zea mays
  Coding DNA Sequence Number=SeqID_22990
MNKTPALKVPLRMELRFRPRGYEQPPHRGACGATSSLRLASDLCSSSYGPRTDAATGRLSFASPLKGREPDIKAKEPEVGPLAAPTASTVGKLLPAATTSTPTAVSASPPTPHRNSSPSPAWLEDASSAELEDGFHHQKLEEEVASRPAWEVEPRLTSLSAPARMMRILEAEGGTKIAARLASPHPRAGGHRLGGSEGGKTRCIREREDMIAFQGGRPPFKSDSPHLRPQPSRAESSPTRSKVLPLRHGGWVPRVMQAGPGQKKPNRRARYQRVKGRTATQSACNRAKWAHPFDSNAPSMEAQAHTSCNRRAGCYVRATAPPLAPLPRLLDYGTSTATRGNPAYDPTVSARRISHRPAGGSSGHVVSQARVPSWESERTLSHGVKTARPCSVPRTARARATAAPRTTRPVALTPRRDRRHLWQEKRATLRLRHNDRIKKGTGKGDTPKGILLREGNGPRAPILIRGSKAGPSEGFNSRLRALGLRAHYWAEVRGPAPRKGSMATSGHSGSTPTTDQSGNDLVTESHQREASSPQTPSKGDRVRQITRSSLETPCSAPSKGNMALPPPPPPCGKATQGPDPGGFTSRPRTPSSNGHAFGSPEAQSSPRSNLGQVATPTDRIAGAFNAKGLDSGSAPEDDELRFARPQGSDSALASADGLHLARPRGSDLTSALEDRLDLDLRGASTSPNPGLGPTTSQEAPSLPYPKLTQATGNKTGVPSGSPRLQRSSDGHDTTRTGCQNLSGCHDGMALLQRVGRAWKDGTALA

SEQ ID NO: 66366 - protein, 133 aa, Zea mays
  Coding DNA Sequence Number=SeqID_22991
  Gene Ontology: Mol. function=copper ion binding; Cellular component =cytoplasm; Biological process=respiratory chain complex IV assembly
  Homolog annotation: Hit_ID=Q8LDT3; Match level="QueryCoverage=73%, HitCoverage=87%, E-value=1e-35, Identity=68%"; Hit description =Putative uncharacterized protein
  Pfam annotation: Domain name=CHCH; Domain location=53-94; Score=38.5; E_value=2.3e-08; Accession=PF06747.4; Description=CHCH domain
MASGSRLRHLPICLSMFIGHSCSDAYSELHAPGGAFGGNRGVRPVPPEKGVFPLDHLHECDLEKKDYLGCLKSTGFQSEKCRQFSKKYLECRMERNLMAKQDMSELGFRIVDEAGTSPDKNSKPESPPNQPKD

SEQ ID NO: 66367 - protein, 452 aa, Zea mays
  Coding DNA Sequence Number=SeqID_22992
  Gene Ontology: Mol. function=transcription factor activity; Cellular component=nucleus; Biological process=regulation of transcription
  Homolog annotation: Hit_ID=Q6I5Z9; Match level="QueryCoverage=100%, HitCoverage=100%, E-value=1e-162, Identity=64%"; Hit description =Putative uncharacterized protein OJ1214_E03.20
MEDYFSRFLNLGWQLRQYLTELIENLVRTINRIPQRLGVQFSASHGGSLTGTTVYFHERASTLSVNTITTTEKQTANGTSEGAIFRKGLSSIYERSSYLLHGFMLVRRLAFSVRDLWNLFSSEVHAKLTRILHRFWTTLQGSCEDIGWLQRTRASLRSVDGTGLFSNHSPLYFTNTKRFFSKMGLACHIAKIHSEASVEKNAWELKQYIEELYWGSGKQVLLLGHSKGGVDAAAALSLYWSELKGKVAGLALVQSPYGGTPVASDILREGQIADKETRRIMELIGDIRALEDLTYAKRKDFISQHKLPIDELPIISFHTEASTAPTALASLTRVAQAELLPWLPLPRFFLSASEFVESMLASLKVPVVAPVSAAMAVTALHLRLRYGERSDGLVTRRDAEVPGSVVVRPERRLDHAWMVYSTLKMGSAEADASEMCEALLAMLVEIGRKKFC

SEQ ID NO: 66368 - protein, 366 aa, Zea mays
  Coding DNA Sequence Number=SeqID_22993
  Gene Ontology: Cellular component=integral to membrane
  Homolog annotation: Hit_ID=A2Y7B4; Match level="QueryCoverage=79%, HitCoverage=77%, E-value=3e-84, Identity=57%"; Hit description =Putative uncharacterized protein
  Pfam annotation: Domain name=DUF6; Domain location=28-159; Score=6.4; E_value=0.029; Accession=PF00892.11; Description=Integral membrane protein DUF6
  Pfam annotation: Domain name=TPT; Domain location=181-326; Score =74.5; E_value=3.4e-19; Accession=PF03151.7; Description=Triose -phosphate Transporter family
  Pfam annotation: Domain name=UAA; Domain location=24-334; Score= -147.5; E_value=0.005; Accession=PF08449.2; Description=UAA transporter family
  Pfam module annotation: Pfam domain module=DUF6::TPT::UAA; Domain location=28-159::181-326::24-334
  Subcellular localization annotation: CTP_CleavageSite=32; ConfidenceScore=5.47e-01
MATAAGGATAGSRRRALLLIANYAALLVGSVSSSLLSRFYFARGGRNRWVVTLVQSAGFPLLVVAVLVAGRPAAAPRPFTWFSRRFLTVCLVIGALMGANNLLFSYSTSFLPVSTSSLLLSTQLAFTLVLAAVIVRHPLTFVNLNAVVLLTVSSVLLALRSGDSGENPDGGGAAAAHYFAGYVVTLGAAGLFAAYLPVMELLYRQAVSGGFVLAVEVQAVMQAMASLVAAIGLAAKGGLGGDVARWKGSAALYWVVVSTLVLTWQACFMGTAGVIYLTSSLHSGVCMTAVLTANVLGGVVVFGDPFGAEKGIATALCAWGLASYLYGEYTKKKKEEEDEAVAVADTSADSVRKSLTGGAGDELEAV

SEQ ID NO: 66369 - protein, 273 aa, Zea mays
  Coding DNA Sequence Number=SeqID_22994
  Homolog annotation: Hit_ID=Q2QLR0; Match level="QueryCoverage=11%, HitCoverage=9%, E-value=4e-07, Identity=87%"; Hit description=Helix -loop-helix DNA-binding domain containing protein
MPAPHIPVMPMDERREMDSVTDAHRVAWLQHGLLVLRQLHPIRPSICLHLHGDATVRHPIMGGARGHGGQLLLPEAASARRFFAGARDRRLFFYDHAMGEGRGPTLPSAAAWPFSGGGPPAASREPPRVHRHLTPHPTAPSTRIPLVCSISAQICNPWSGPRPSLSNRVLHGFCFLGKDRRNPWSLPTCARPLHDHIIAERKRRQKINQRFIELSTVIPGLKKRSARRRRWLPIVGFVGGVACDESVAGDRSPVLEQERDGENPLRGWQGLAL

SEQ ID NO: 66370 - protein, 24 aa, Zea mays
  Coding DNA Sequence Number=SeqID_22995
MEQSGLGYLHKSSNWYLKLFNAFG

SEQ ID NO: 66371 - protein, 790 aa, Zea mays
  Coding DNA Sequence Number=SeqID_22996
  Gene Ontology: Mol. function=nucleoside-triphosphatase activity; Cellular component=integral to membrane; Biological process=transport
  Homolog annotation: Hit_ID=A3BCP6; Match level="QueryCoverage=97%, HitCoverage=66%, E-value=0.0, Identity=70%"; Hit description =Putative uncharacterized protein
  Pfam annotation: Domain name=ABC2_membrane; Domain location=326-539; Score=221.4; E_value=2.1e-63; Accession=PF01061.15; Description=ABC -2 type transporter
  Pfam annotation: Domain name=ABC_tran; Domain location=1-224; Score =36.8; E_value=7.1e-10; Accession=PF00005.18; Description=ABC transporter
  Pfam annotation: Domain name=PDR_assoc; Domain location=544-612; Score=121.6; E_value=2.4e-33; Accession=PF08370.2; Description=Plant PDR ABC transporter associated
  Pfam module annotation: Pfam domain module=ABC2_membrane::ABC _tran::PDR_assoc; Domain location=326-539::1-224::544-612
MTLLLGPPSSGKTTLLLALAGKLDPALVVAGGGEVSYNGFRLGEFVPQKTAAYISQTDVHVGEMTVKETLDFSARCQGVGTKYDLMTELARREKGAGIRPEPEVDLFMKATSMEGVENSLQTDYTLRILGLDICADTIVGDQMQRGISGGQKKRVTTGEMIVGPTKVLFMDEISTGLDSSTTFQIVKCLQQIVHLGEATILMSLLQPAPETFDLFDDIILLSEGQIVYQGPREYVLEFFDSCGFCCPERKGTADFLQEVTSRKDQEQYWADKQMPYRYVSVPEFAQRFKRFHVGLQLENHLSLPFDKSRCHQAALVFSKHSVSTTELLKASFDKEWLLIKRNSFVYIFKTIQLIIVALIASTVFLRTHMHTTNLDDGFVYIGALLFTLIVNMFNGFAELSLTITRLPVFYKHRDLLFYPAWVFTVPNVILRIPFSIIESIVWVLVTYYTIGFAPDADRFFKHLLLVFLIQQMAGGLFRATAGLCRSMIIAQTGGALFLLIFFVLGGFVLPKVFIPNWWIWGYWISPLMYGYNALAVNEFYAPRWMNKFVLDQNGVPKRLGIAMLEGANIFVDKNWYWIGAAGLLGFTIFFNVLFTLSLMYLNPLGKPQAVISEETAKEAEGNGHSKGAIRNGSTKPKDGSHNKEMKEMRLSARLSNCSSNGVSRLMSIGSNEAAPTRGMVLPFNPLAMSFDNVNYYVDMPAEMKHQGVQDDRLQLLREVTGSFRPGVLTALMGVSGAGKTTSLWMFWLEERLGGILKETSELQAIPRTKQHSQGFLDTASKMIYILLRSQ

SEQ ID NO: 66372 - protein, 126 aa, Zea mays
  Coding DNA Sequence Number=SeqID_22997
  Gene Ontology: Mol. function=structural constituent of ribosome; Cellular component=ribonucleoprotein complex; Biological process =translation
  Homolog annotation: Hit_ID=A2ZXD8; Match level="QueryCoverage=91%, HitCoverage=90%, E-value=3e-52, Identity=91%"; Hit description=40S ribosomal protein S24
  Pfam annotation: Domain name=Ribosomal_S24e; Domain location=17-100; Score=90.6; E_value=4.9e-24; Accession=PF01282.10; Description =Ribosomal protein S24e
MADSKAAAAVTLRTRKFMTNRLLSRKQFVLEAELKERLAKIYEVKDPNCIFVFKFRTNFGGGKSTGFGLIYDNLEAAKKFEPKYRLIRNGLATKVEKSRKQMKERKNRAKKIRGVKKTKAGDAKKK

SEQ ID NO: 66373 - protein, 479 aa, Zea mays
  Coding DNA Sequence Number=SeqID_22998
  Gene Ontology: Cellular component=integral to membrane; Biological process=peroxisome organization and biogenesis
  Homolog annotation: Hit_ID=A2YE14; Match level="QueryCoverage=99%, HitCoverage=99%, E-value=1e-180, Identity=63%"; Hit description =Putative uncharacterized protein
  Pfam annotation: Domain name=Aa_trans; Domain location=26-467; Score =407.1; E_value=2.6e-119; Accession=PF01490.9; Description =Transmembrane amino acid transporter protein
MDVDMQARGGGASHGGELDDDGKEKRTGTVWTASAHIITAVIGSGVLSLAWAMAQLGWVAGPVILLLFAAITYYTSCLLTDCYRFGDPVTGKRNYTYTEAVESYLGGRYVWFCGFCQYANMFGTGIGYTITASASAAYVGVSLAPQLMTRALCRAILKSNCFHWHGHDADCTQNTGSYIVGFGVVQVIFSQLSNFHELWWLSVLAAAMSFCYSTIAVGLALGQTISGPTGKTTLYGTQVGVDVGSAEEKIWLTFQALGNIAFAYSYTIVLIEIQDTLRSPPAENKTMRQASVLGVATTTAFYMLCGCLGYSAFGNAAPGDILSGFYEPYWLVDFANVCIVIHLVGGFQVFLQPLFAAVEADVAARWPACSARERRGGVDVFRLLWRTAFVALITLCAVLLPFFNSILGILGSIGFWPLTVFFPVEMYIRQQQIPRFSATWLALQALSIFCFVITVAAGAASVQGVRDSLKTYVPFQTRS

SEQ ID NO: 66374 - protein, 314 aa, Zea mays
  Coding DNA Sequence Number=SeqID_22999
  Gene Ontology: Mol. function=microtubule motor activity; Cellular component=microtubule associated complex; Biological process =microtubule-based movement
  Homolog annotation: Hit_ID=A3BCP5; Match level="QueryCoverage=72%, HitCoverage=21%, E-value=7e-75, Identity=66%"; Hit description =Putative uncharacterized protein
INPDVSSYSETLSTLKFAERVSGVELGASKANKEGKDIREFMEQLSLLKHKMAKKDDEINRLQQLKTQTPRVRTAKRADSPLKHSSSSPGISNLGSKIQHRRTVSSGKAMSIASRAGSDTFSDTSDRHSESGSMQSVDDILPRRGIMGLPKLSIGEMGQNSADPELVCFDYADSEERLSDISDSGLSMGTETDVSVSSIVELTRFQEQENIPSTLKEQESARKIPNDQLSKVATRVQKTTVPKLAQTSLWPKLRDPPALRSPGPCLLDRWASDSVHSEIFSMAFAAYMERENHNTNNICTKDVHDFEEMDISQV

SEQ ID NO: 66375 - protein, 220 aa, Zea mays
  Coding DNA Sequence Number=SeqID_23000
MEHAATRIGSGDVARSRGRQRPAAREEGVAVGEPSRQGEGRLGDQRPTGNEGEEAGGDGGVRACLSRMQGWLLAQPASPNDVRVCSGTAAAAPPAPAHERRWKKQRGRGSGRGKGKGRRRLEGGEGWAGGAGEVALQAAARRRVLRAWDGRGTRKEAGAQERGPGSRRWGGRQREEERRGSREGSAADGWGVGEADGCGWEKRDESGSGTKLENENVNPN

SEQ ID NO: 66376 - protein, 452 aa, Zea mays
  Coding DNA Sequence Number=SeqID_23001
  Homolog annotation: Hit_ID=Q6J9V9; Match level="QueryCoverage=19%, HitCoverage=33%, E-value=3e-07, Identity=40%"; Hit description =Putative uncharacterized protein
MQAACNRTKGAHPFDFDASSMEAQAHTSCNRRVGYYVRETAPPLAPVPRLLDCGTDAATRGNPAHGPTVPTEHIGHGTGDTFGRQSGRRFTSAIMTASKKGPGKGDTPKGILLREGSGPRALLLIRGSKAGPSEGFDSRLRALGLRAHYWLAPEGFDSRLRARRARDDSGYVRYMAEARAMLPRKATQGRMKKVESVLDRPLALCGGSGAALANSAPAKPLTASTYQPKNSEPGYAPGLRPVRMREQPDWPRHRERHQDLEGVKPLLRGLGGYTRWLVTPISTKLQRPDGRDSGLGLHLDLGRRTPPRLTPELGLILDSGRRSPPRPTPELGLILDSGRRSPPRPTPGLRLHLDLGRRTPPRPTPELGLILDSKRRSPPHSTPGLRLNLDLGRRSPPHPTPGARTQPRPRMTVSASPDPRARTQLRPRSSLRLARPRARTDHVTGGPSLPYP

SEQ ID NO: 66377 - protein, 272 aa, Zea mays
  Coding DNA Sequence Number=SeqID_23002
MAERYQLPQSWVPPTIRRKDCGCPPSGGSEGGKIRCIREREDMVAFQGGHPPFKGNSPYMRPQPSWAESSPTRSKVLPLRRGGWVPRVMQADPEREEPNRRARCMQPPSGYEHSSTFAQTSGRKGGQPCRRHAIAPSGSSGHVVSQAHVLSRGSERTLSHGVKKARLCSVPRTARARATAAPRTTRPVALTPRRDRRRLWQGKRAALRLRHNDRVKKAASERVGSTPTTGQRFEGRPLGRVQRPPQATWGSAPTTDQGFEGWPSKGSQQPQT

SEQ ID NO: 66378 - protein, 168 aa, Zea mays
  Coding DNA Sequence Number=SeqID_23003
  Subcellular localization annotation: CTP_CleavageSite=23; ConfidenceScore=5.23e-01
MVVKIHDKTTQSVWTQTGRLGCVASSRTCGVRAYLPSTVRNMPHAFGVGVGSLVEDDGDQRLDVDDSGGLCLDSLMGGFKIGEGCSVEACRFGTELGLGAGFGFLSRRGGGSRVGVIHHGSGRVLVHTRLLPSESLTQPEHGDAGRNGSRLPTDQGNPRRAEQAEFKR

SEQ ID NO: 66379 - protein, 342 aa, Zea mays
  Coding DNA Sequence Number=SeqID_23004
MYQRMASVRRRVLRNTLVSNLVTSSLHPRRGGRYQGDTQQEQAEWTMLHQQESRWKLAPDSPHQQWRPPLHRRITSDSDRLCTSSDNDLRSERLASSSDHLRVSATANRSSPPSSYGGDNEAIKAKEPEVRRRVALTVSPAEATTSAVGSLTSGGDHLSTDDSGHLRTSAVPANGGRPSARKEVLAPVLAAGVRTRPSKNAAAAPTAYDILYNLPGRASTREKPWVWPTCARHDRRPCGGRTATPHPNDRRQRRAWPNKPQSKGRTSARSQNEEDPGVSRGPVLTRGVKVIQQAARLLGLLANSAPVPSGALCYLFYKKLPLHAEDTQISDDRTQGDCPGSK

SEQ ID NO: 66380 - protein, 139 aa, Zea mays
  Coding DNA Sequence Number=SeqID_23005
MAATWARSKLEQQHTDKQGRLANSGLGEWNATQGAGSTANRETGYAQGQRTAHARRAARRRRAGTGSLDRALYGGVRLGLGREETSAGGLARGEADSRGSSRPWRNRGDSAGLGDSAVEQRVRAGNQKPGEWEGEDPGR

SEQ ID NO: 66381 - protein, 61 aa, Zea mays
  Coding DNA Sequence Number=SeqID_23006
MVGSYCKAPCDALFILGNRNNPKDGSFNFVLLLMVLSAGGLGLLISLSNPSILLIKDGHLS

SEQ ID NO: 66382 - protein, 314 aa, Zea mays
  Coding DNA Sequence Number=SeqID_23007
  Gene Ontology: Mol. function=acyltransferase activity; Cellular component=integral to membrane; Biological process=glycerolipid metabolic process
  Homolog annotation: Hit_ID=B0LF77; Match level="QueryCoverage=87%, HitCoverage=61%, E-value=1e-155, Identity=90%"; Hit description =Diacylglycerol acyltransferase
  Pfam annotation: Domain name=MBOAT; Domain location=41-277; Score= -31.2; E_value=0.002; Accession=PF03062.10; Description=MBOAT family
MAEKLITRKLIGEHVVILLHIIITTSAIVYPVVVTLKCDSAVLSGFVLMFLASIMWMKLVSYAHTNYDIRVLSKSTEKGAAYGNYVDPENMKDPTFKSLVYFMLAPTLCYQPTYPQTTCIRKGWVTQQLIKCVVFTGLMGFIIEQYINPIVKNSKHPLKGNFLNAIERVLKLSVPTLYVWLCMFYCFFHLWLNIVAELLCFGDREFYKDWWNAKTVEEGVAILISFLVSAVFHEICIAVPCHIFKFWAFSGIMFQIPLVFLTRYLHATFKHVMLAAGQPENASIPGGRAGMQRVHYQRCNVNGYQARISSARGM

SEQ ID NO: 66383 - protein, 183 aa, Zea mays
  Coding DNA Sequence Number=SeqID_23008
  Homolog annotation: Hit_ID=Q5JMF9; Match level="QueryCoverage=56%, HitCoverage=16%, E-value=2e-20, Identity=56%"; Hit description =Tesmin-like
MEGNEQGCGGLPQRPPVLGASMQPPIKKLVRQLDFNSAALAGNPAMAVAAAAVSRVLQPKASSVGFQHPQHVGAAMPMGVPQQLHQRVLPVMRLHQVVGHVPLAVSVPQLRPVPPQPVQRPPVAVPLRSENTWRLARLGAKVVIPFACSPYRRKNTGRYIHVHRVIVLKAVRRDKAMGHRLDA

SEQ ID NO: 66384 - protein, 640 aa, Zea mays
  Coding DNA Sequence Number=SeqID_23009
  Homolog annotation: Hit_ID=Q6JAD6; Match level="QueryCoverage=90%, HitCoverage=89%, E-value=0.0, Identity=73%"; Hit description =Putative uncharacterized protein
MPRTKNASASGGGDDEDPRRPFRQVKGKTVFLEQQEGRKKRCSDREARAAAAAAAAAAQAALGDQSDVPSDQIAFRARRLASRSRSSTHTSASTPPPTLPAPVTPIAPSTSTAIPTTSTTPASTATPAPASASAPPVPPPRFRERDETEVRPLVSDPRLFDLQRATAARVRRFRYVPVESWLPAQRDPAAGVLFSTRIQESFFRAQMSAQIALRVHRLLDLPAFLLAVGAESEAHLTYLPGLLSFLTISGRYVEEWVRVFYASIWIDSDHHWMRFRFEREDVTITASQIRQLFGFPESTTRLHSLCYGTSDPPCRPHGGVAPGTAHVAALFRPPFTDGSRRSPADFTTAAKYLYELVRRTLLPRMGYREATTHIQLWLLGALVSHSEFDVVDFLICEIEDTVLDGIRARRPRMQHFDSLTPQGTAADDDDDFGIPPPPPPPMPPRSHDHEAGSSSAAPATPQAMDPALASILQTLSQQQAHLAAEQARLSDRMLSMFQNMQDRQDALQQQLLQDRAENRAFMALMLQHSGISAPPVQSAPPSSLHAPVVPSILSAPPAGTSPLRPVTLAFTSPVLSSICPQPPVPPASAVTTTAVAVSVTASVPILDPRLTLTLRRHSLCYLDLDRMRPRRLLLLQMFRF

SEQ ID NO: 66385 - protein, 216 aa, Zea mays
  Coding DNA Sequence Number=SeqID_23010
  Homolog annotation: Hit_ID=Q7XBE0; Match level="QueryCoverage=47%, HitCoverage=10%, E-value=1e-08, Identity=32%"; Hit description =Putative gypsy-type retrotransposon
MASFLVCFLCRSHALGLDTKGFLPHTEVGMPTYLKVPLSSSLCGYEGDWFYVKNLGGIALPFNGLVPVSSAEWHYGAEAKWKSKVGYMLNVIITLKERALTSVRLVRTFMQRSVQPFMARYNPMWAYNGLKDPGRCSPEPLFETKVKARVTDVTTLASVNFMDEDLPFPLSKGILSDLVVASLSEKSRISFPTLKALEIRKYPRHSYYALGACLSP

SEQ ID NO: 66386 - protein, 81 aa, Zea mays
  Coding DNA Sequence Number=SeqID_23011
MTVWELIIAIITLGEEQNAPYNSLPKAADCIYTGGSTNLVPPRDTRHHETSQYQAPVASSIKRSDKYHGRLGIGRLDCEGH

SEQ ID NO: 66387 - protein, 117 aa, Zea mays
  Coding DNA Sequence Number=SeqID_23012
MTRVAALENVTSVFDSWRPHVEATVDGVKDSVEAVRAELSKVSRFLERGAIHDSADPRGILGPHQSAAERVPAAAWSADGPIGHRLDTQPRETGFGGFYSHHPLPAMGGGARGYQTS

SEQ ID NO: 66388 - protein, 71 aa, Zea mays
  Coding DNA Sequence Number=SeqID_23013
MGSRHSACSAEAECRGSFVLLLLVTLLRGERYLIRDGWFTGGDKDDGLTMVMVAFGAIYAQEFQDFDEFED

SEQ ID NO: 66389 - protein, 376 aa, Zea mays
  Coding DNA Sequence Number=SeqID_23014
  Gene Ontology: Mol. function=transcription factor activity; Cellular component=nucleus; Biological process=regulation of transcription, DNA-dependent
  Homolog annotation: Hit_ID=A2YJ97; Match level="QueryCoverage=15%, HitCoverage=19%, E-value=2e-17, Identity=78%"; Hit description =Putative uncharacterized protein
  Pfam annotation: Domain name=AP2; Domain location=84-139; Score=61.5; E_value=3e-15; Accession=PF00847.11; Description=AP2 domain
MTCLVSLGGGRWRTPSPAPEFRPEFVLTPHAKIAHAIFPMELQFHPQQHHSYQQQQQPPPPATKEPKPKPRTRTKCGGGGGGSSKFVGVRQRPSGRWVAEIKDTTQKVRVWLGTFETAEAAARAYDEGRLPPPRRQHAHQLRRRAAARLAAGRPDPRLLDHNNNNGPDAAEEDLTAPPHRRPLLSPQPRPAPLAPAAARPARPAAVLAPASASPPAPTPALPIPTPPGSSESERDRGSFITRRTRPPAAAKSSQLAATTHQYEQQSWALNAASSPLTPPPPPDARDVGSVNARRLAVAAETGRDRMIKLEKKSSSASLSLSPHGVIDRGPDKDLAFDVGNDASDSLWDLPPICPLSSCRSQFRTEECMRNDGQQAE

SEQ ID NO: 66390 - protein, 31 aa, Zea mays
  Coding DNA Sequence Number=SeqID_23015
MAWAIFACGVRTNSGLNSGAGDDLPSAINDG

SEQ ID NO: 66391 - protein, 157 aa, Zea mays
  Coding DNA Sequence Number=SeqID_23016
  Gene Ontology: Mol. function=hydrolase activity, hydrolyzing O -glycosyl compounds; Cellular component=chloroplast; Biological process=carbohydrate metabolic process
  Homolog annotation: Hit_ID=Q08047; Match level="QueryCoverage=78%, HitCoverage=15%, E-value=3e-72, Identity=100%"; Hit description=1,4 -alpha-glucan-branching enzyme 2, chloroplast precursor
MYNSFLHRIGSEGLLCHASSNTLDGLNGFDGTDTHYFHSGPRGHHWMWDSRLFNYGNWEVLRFLLSNARWWLEEYKFDGFRFDGVTSMMYTHHGLQVTFTGNFNEYFGFATDVDAVVYLMLVNDLIHGLYPEAVTIGEDNTRTFGFILSLDYKEDFS

SEQ ID NO: 66392 - protein, 134 aa, Zea mays
  Coding DNA Sequence Number=SeqID_23017
  Subcellular localization annotation: CTP_CleavageSite=63; ConfidenceScore=5.04e-01
MTITPLPETDNIIDDRRTRVEYRRLLRASGPFNGPLTSRRRRLPSSNCSGKPTSTSPPMSELRTSSEEQSWHQQHRDATRISSPISVGRRDLAKKSTPPDHLPLAPEEDLVEANARWTTSSTPSVWGIDVPRVH

SEQ ID NO: 66393 - protein, 127 aa, Zea mays
  Coding DNA Sequence Number=SeqID_23018
MTRISHPRAPQPFACAGFWHRNARAQAYRSGNPMNAASRTHDARHDAERPPPYASGTTAEKLSRAAKRQPRYARANPTPAANAINTRTHARDSPQSQYPRVAPPVHCPASVPLERKDAGEVACPADG

SEQ ID NO: 66394 - protein, 125 aa, Zea mays
  Coding DNA Sequence Number=SeqID_23019
  Gene Ontology: Mol. function=diacylglycerol kinase activity; Biological process=activation of protein kinase C
MAVNGKGTDQDKAHLSNVYTDVMHSISKKEGIPRASSLSSIDYIMTPRRMSLGDVDTSSSTVASTEPSNYNLKKCYTLKHIMDHSDQEPGPKQGLIEIQLEHDSLTCEPLPLWEKKNSISSPLAV

SEQ ID NO: 66395 - protein, 432 aa, Zea mays
  Coding DNA Sequence Number=SeqID_23020
  Homolog annotation: Hit_ID=Q5SN38; Match level="QueryCoverage=58%, HitCoverage=30%, E-value=1e-104, Identity=71%"; Hit description=TA9 protein-like
MTSSSSSPCYRVTKPPIQQPCCRYNLTLHSANYDSIKPTMDEEEEREIGPGQHGHHVFQVRDGEGPALLQPGHRVVLDMSLRPRMLARVAEARLGLLIAILMLIPGLPKMDRAQNLSRIDEAKGIIDKMKVKFPDKIEGWKEVKEVGELRGAREDVRAFCFTILLFMIQHQPLFYWNFLQTSKQGGFPNIQSTQHVPSTSISSGLPLPQQLPVYSQPTLPLGPFTSLVGYPYLPQNYYLPSSPFQQAYSSNGPFHQSAAPAMPGAGMKYPMPQYKSSPPASTLPQPSSLSGYGGFGSANNIPRNFSQNQGAAAAPTTLGFDEALGTQFKHPNHYAALQQSDNSAMWLHGGAGSRTISAVPPGNFYGFQGQSKHGGFRQAHHPSQYGGLGYPSFYQSQTSLPQEHPQSPTEGSLNNPYGVPSQPSHQLWQHIY

SEQ ID NO: 66396 - protein, 301 aa, Zea mays
  Coding DNA Sequence Number=SeqID_23021
  Gene Ontology: Mol. function=zinc ion binding; Biological process =regulation of transcription
  Homolog annotation: Hit_ID=A2Z3S7; Match level="QueryCoverage=99%, HitCoverage=39%, E-value=1e-107, Identity=60%"; Hit description =Putative uncharacterized protein
MEEGGDPQLPSISARTTSEGAGGVDLDLLEQLLSDDNGWLEVVSRSPNSVAFPPLSAFFSADVTATTVTTTATAAPAANASCEQPFTLDHRSDSLLRFREVSTKYQFSANVKSGDSPGLSGRVFIGRLPEWSPDIRYFTSYEYPRVRDAQYLDVHGTMGLPVFEKGSYNCLGVIELIMIRQKINFTSELNTICSALQFSTASYKDALPEILEVLRAACLTHKLPLAQTWVTCAQQGKRGNRHSDENYRYCISTIDEACFVNEAEMRGFHETCSEHHLLRGEGVARKAFTTNQPCFLPDIGS

SEQ ID NO: 66397 - protein, 113 aa, Zea mays
  Coding DNA Sequence Number=SeqID_23022
MGILGRFLCWACVPSDCRVWVEKKLSKDNVKDLSADLQKVIDDYMKKIESIQKQKEQNSAEAQSEDSIQPKRGLQERLSWRCFLSQCMGLCLLGNWNRSTCMSTLLACNLREA

SEQ ID NO: 66398 - protein, 247 aa, Zea mays
  Coding DNA Sequence Number=SeqID_23023
  Gene Ontology: Mol. function=hydrolase activity, hydrolyzing O -glycosyl compounds; Cellular component=chloroplast; Biological process=carbohydrate metabolic process
  Homolog annotation: Hit_ID=Q84JQ6; Match level="QueryCoverage=63%, HitCoverage=99%, E-value=6e-61, Identity=79%"; Hit description =Amylose extender starch-branching enzyme
MAFAVSGAVLGGAVRAPRLTGGGEGSLVFRHTGLFLTRNDPATPPPSLIKCGPDSGGARVGCSGTHGAMRAAAAARKAVMVPEGENDGLASRADSAQFQSDELEVPDISEETTCGAGVADAQALNRVRVVPPPSDGQKIFQIDPMLQGYKYHLEYRCVWLGSHWDGAAPFQFLKIEPFHSVFDKQNGTTSFFVWLKSRIERSRSIYCLVGEPYDCCVEERDESACVRESARIGSFWWSESIPNICYL

SEQ ID NO: 66399 - protein, 311 aa, Zea mays
  Coding DNA Sequence Number=SeqID_23024
MGTEHGVSGELQAGPTRSEATVEPLGGPAFEPLISRGARSPVPSQGRILFGGSRCACASRSRDGSRAPCLHTVRGGSLAAPRRDVSLADDHLARRLRDAWAWASMLACWESVKRVHLARLHATCMAARPFRPLVWAKVGGHFPAAPLHRRSPKMVTSSLMVGESEPGCGLSPSLILKDFHHQGWGGDCSVPGFRTRVASEPLAAPASAAAAGRGSSAGVIAKAGHGPTSNSTAFCPSLPHKFWHGRGPPGSSIRPEVSAAAVRPPRAEVVVVAAAGAGSSSLVKETPWPLFDEPRPGVAISARTEAELARK

SEQ ID NO: 66400 - protein, 57 aa, Zea mays
  Coding DNA Sequence Number=SeqID_23025
  Subcellular localization annotation: CTP_CleavageSite=14; ConfidenceScore=5.30e-01
MSSLSQWGSRVSLRGSHGRTLKLAARSSPFTPDPKFGIITNSGLNMSVHSRPNVEST

SEQ ID NO: 66401 - protein, 122 aa, Zea mays
  Coding DNA Sequence Number=SeqID_23026
  Gene Ontology: Mol. function=hydrolase activity, hydrolyzing O -glycosyl compounds; Cellular component=chloroplast; Biological process=carbohydrate metabolic process
  Homolog annotation: Hit_ID=Q08047; Match level="QueryCoverage=70%, HitCoverage=10%, E-value=5e-46, Identity=98%"; Hit description=1,4 -alpha-glucan-branching enzyme 2, chloroplast precursor
  Pfam annotation: Domain name=Isoamylase_N; Domain location=14-81; Score=43.6; E_value=6.8e-10; Accession=PF02922.9; Description =Isoamylase N-terminal domain
MKEAWKPSPVVMRSLDLIAALVGDFNNWDPNADRMSKNEFGVWEIFLPNNADGTSPIPHGSRVKVRMDTPSGIKDSIPAWIKYSVQAPGEIPYDGIYYDPPEEVFLSHILYLQILNIPLFLL

SEQ ID NO: 66402 - protein, 104 aa, Zea mays
  Coding DNA Sequence Number=SeqID_23027
  Subcellular localization annotation: CTP_CleavageSite=25; ConfidenceScore=5.55e-01
MRQANPQTLQSSSLQAKPQGSWKQRSGTRKRRMVRGLYFNTHKRIKNEDFEVLAKSHQLQANSWWGKLDIRGGEKNIAKAQRKTEARDFKANEGSEYLQRSSTC

SEQ ID NO: 66403 - protein, 181 aa, Zea mays
  Coding DNA Sequence Number=SeqID_23028
  Homolog annotation: Hit_ID=Q6Z8B1; Match level="QueryCoverage=95%, HitCoverage=54%, E-value=1e-70, Identity=70%"; Hit description =Putative pollen specific protein
  Pfam annotation: Domain name=Ndr; Domain location=4-139; Score=-24.7; E_value=2.1e-07; Accession=PF03096.5; Description=Ndr family
MPADLELSPTDKHIFIEEIMSNLLYYYGMGNVVKDILLQRYFGKFLNQRQCINVWRFIQTINERKDLTENLKQLQCRTLIFVGENSQFHAEAVHMTAKLDRRYSALVEVQACGSVVTEEQPHAMLIPMEYFLMGYGLYRPSQINCSPRSPLNPFCISPELLSPESMGVKLKPIKTRANLKA

SEQ ID NO: 66404 - protein, 71 aa, Zea mays
  Coding DNA Sequence Number=SeqID_23029
  Gene Ontology: Mol. function=ion channel activity; Cellular component= integral to membrane; Biological process=ion transport
  Homolog annotation: Hit_ID=Q4VDM4; Match level="QueryCoverage=85%, HitCoverage=11%, E-value=1e-14, Identity=60%"; Hit description =Cyclic nucleotide-gated ion channel 2
MDFGLASAVTTLWTCTDVTHLAHVLLQFRLAWCGKLIRYTRAVATHYVCSVKGLCFDLFIIRGGNRAFNAC

SEQ ID NO: 66405 - protein, 150 aa, Zea mays
  Coding DNA Sequence Number=SeqID_23030
MEGSLGSLSSRVRAATDLCRGSRRHQSRKVADDLCPSLLPMSSMKLRLARPQGSNSASAPEDDELRLARPQGSDSASAPEDDELRLARPQGSDLASAPEDDELRLARPKGSDSTSTSEDRLDLDLGGASASPYPGLGLTTSQEGPSLPYP

SEQ ID NO: 66406 - protein, 45 aa, Zea mays
  Coding DNA Sequence Number=SeqID_23031
MEANSDSSPQGQTLSLSRNAAILKTLVARDNRQFAVTFLEEQRRR

SEQ ID NO: 66407 - protein, 170 aa, Zea mays
  Coding DNA Sequence Number=SeqID_23032
  Gene Ontology: Mol. function=catalytic activity
  Homolog annotation: Hit_ID=A3B342; Match level="QueryCoverage=34%, HitCoverage=18%, E-value=5e-14, Identity=67%"; Hit description =Putative uncharacterized protein
  Subcellular localization annotation: CTP_CleavageSite=72; ConfidenceScore=5.40e-01
MALLERVGRAGTRTRQALARSRSLPSPAWTLVTPYCKRTRPGRGTNTKAAGFPPLSRRSPAASLSPLRARPRARPIWAGARGDTHSSAQGPPGLETPTTGYYLADEPGVHFVWQPNQESSVLVMSRAFDDYYIEDCGVILAPEVTQRRIDNSDQFVILATVRVAFVPACL

SEQ ID NO: 66408 - protein, 520 aa, Zea mays
  Coding DNA Sequence Number=SeqID_23033
  Homolog annotation: Hit_ID=Q5NAA7; Match level="QueryCoverage=66%, HitCoverage=69%, E-value=1e-37, Identity=34%"; Hit description =Putative uncharacterized protein B1008C01.13
  Pfam annotation: Domain name=DUF1618; Domain location=248-385; Score =5.2; E_value=8.1e-06; Accession=PF07762.5; Description=Protein of unknown function (DUF1618)
MSWSGPELAEWSRDGQEAEQEPESVPRRKSWSAPELAQWSRAGKEKEQEEPESSEPQRKWVALVSVAVVLPGNEDERAHEIIPGTDMLMLDINDPPLPSYLVLHPRVAPNPRRTNEPLSAYILAADRSGYILLQVVEGNRPDFFLCNTHTRTVTILPPVSSYTRASHGVDILPELSMGLIADPQRSGQFVVAQLHPTISYHEPNKLLYFSTAKGRWFVRNLTRARQQVLMRNPNSEIGVVAHDGRLWWFAPSYGVFCCDPFTPVLECPELRFIPLPANSEMFGHVAFDPVVRPLVIKRRCVRPSEGKLRFVAIRGLSYKVPVDESNPTVWMWTLDDPEGPNPWTFEYEVAFAEIWEDETYAAAGLQPGKVPDVALVDPNDHYVVYFFQGSKLFGLDLREKKVVACEECLIDRDRLEYQSSRPIVDAWELSPPPPILSGDDDSSTDDKDRSRQAYAEKKKRQVAESVDSWLNQARLEWTRDADVDASNWRTWKMAPPQSDEEDTGGQADDEPEIQLPPSSP

SEQ ID NO: 66409 - protein, 388 aa, Zea mays
  Coding DNA Sequence Number=SeqID_23034
  Gene Ontology: Mol. function=helicase activity; Biological process =proteolysis
  Homolog annotation: Hit_ID=Q1EPC6; Match level="QueryCoverage=20%, HitCoverage=4%, E-value=1e-20, Identity=66%"; Hit description=DNA helicase homolog, putative
  Pfam annotation: Domain name=Peptidase_C48; Domain location=77-211; Score=-30.8; E_value=0.041; Accession=PF02902.10; Description=Ulp1 protease family, C-terminal catalytic domain
MTVNKAQGPTIPNVGVYLPEPVFSHGQLYVALSRATTRSNIKILVIPAVDGRKKSRKGVKKNPTVDCGTYTKNIVYKEGDLTIIDFIKEIPCEPRVEVVLIDDAFVERKWMECLFQPNAYLGDEVFIPINIRETHWYLAMIHARNMEIQVLDSLGTSQDRKDLTDSLLCGLFLLNYIEYWIEDELSDSFTQEKMAAILLSSDLNKRRGCLLYKYEKEVDFGSPSDVEILENPIDSKKRKLLHVLDDSEVVYEDEEGPITQVDLQRWFVDDWDKRAPVKVSTDGCTNDFLMVGLSTKDMSVTKADSIDVLCDYIMAIEDDTTLEYVLMPWKFNGCHALFVIDYVKKHAIFIDFTPTQDWCKHMPYKRFAEVIIMASKKYKIAYSKKRSG

SEQ ID NO: 66410 - protein, 408 aa, Zea mays
  Coding DNA Sequence Number=SeqID_23035
  Gene Ontology: Mol. function=helicase activity; Biological process =viral genome replication
  Homolog annotation: Hit_ID=Q1EPC6; Match level="QueryCoverage=100%, HitCoverage=36%, E-value=1e-138, Identity=67%"; Hit description=DNA helicase homolog, putative
MALVRKFGKPDIFLTMTCNPNWDEIRRELLPGQTPQDRLDLVVRVFHAKLQELKHRLTKHDILGKVRAYVYVVEFQKRGLPHAHFILIMQRKYKLTCPEQYDLLISAKIPSNKYPGLRKMVIKHMMHGPCGSLNPNYPCTKGRKSCKNHYPRPFSDTTLQGKDSYPIYRHRDDDRKGKACGSIKAVKYLFKYIYKGHDRASVVMRDASKADDDVDEIKQYRDARWVTPPEALWRIYSFELSQISPPVMQLQLHLPNMHMVAFHERQMVERVVNYPGVDRSMLTTYFEVNRLHEEARGILYRDFPEWYTWQSGKGKSMGKDIRTFPLPPIIDAYDDAISTSREVYEEESIQPIAGDVALKDSLNEEQRAAYDKIMSAINTDQGGLFFVDGPAGTGKTYLYRVLLAMLHN

SEQ ID NO: 66411 - protein, 209 aa, Zea mays
  Coding DNA Sequence Number=SeqID_23036
  Gene Ontology: Mol. function=carboxyl- or carbamoyltransferase activity; Cellular component=ornithine carbamoyltransferase complex; Biological process=amino acid metabolic process
  Homolog annotation: Hit_ID=Q8SA97; Match level="QueryCoverage=60%, HitCoverage=21%, E-value=1e-13, Identity=42%"; Hit description =Ornithine carbamoyltransferase
MDSAVQLLWTASKRRLHESLSVMMVPPVDVAGLRPRLGDVEAPAKPRSSLSSVAEAESEPWVGWSGGRRLRPGQSPSPGVGRSGVHRFLGLSPSPSPRSGGAEAEPESEPWVRRSGVRRLPGLSPSPSPGSGGAEFAVFQDLARVRALGRAKRSFLWCLLQGLTACQSHSVKWHCSRSGAGGAVLLSGRSVERRSDGGHFGSAGGRASG

SEQ ID NO: 66412 - protein, 245 aa, Zea mays
  Coding DNA Sequence Number=SeqID_23037
  Subcellular localization annotation: CTP_CleavageSite=66; ConfidenceScore=5.44e-01
MAAQGAGRAVSSSLAKSLGLRKPKREAGSGAKNRHQTLSRGPGKGDTQKRILPREGTRLRASLLIRGSKASPPEGFDSRLRSRGPYTHYSSEVRRPAPRKGTTAASGYSGYAPITDQGGNDLVTESHRREASSPRTPSPGDRVWQITRSSPETPCSAPIEGNMALSPLLLAERRRRGVCKKAESVPDRPLALCRGSGAALANPAPAEPLTASTYQPENLGPDRTPGLRPVRMRERPDQPKHYARH

SEQ ID NO: 66413 - protein, 154 aa, Zea mays
  Coding DNA Sequence Number=SeqID_23038
MGKSNKRKREPTPPSEDFSDSEYSEEEFSSESEGSPAPVSPPASSDDSDDSQGIAAEVWTYIRAVERSGLEGSDESEYSSDEEDSDGGEGEDDDDDDGDDDDGGDSDGDGSGSGGGDGSKGSTRGGSSTGSTRGGSSKGSTKGGGGGSSSKASG

SEQ ID NO: 66414 - protein, 408 aa, Zea mays
  Coding DNA Sequence Number=SeqID_23039
  Gene Ontology: Mol. function=histone deacetylase activity; Cellular component=nucleus; Biological process=histone deacetylation
  Homolog annotation: Hit_ID=Q0Z9W2; Match level="QueryCoverage=94%, HitCoverage=74%, E-value=0.0, Identity=86%"; Hit description=Histone deacetylase HDAC3
  Pfam annotation: Domain name=Hist_deacetyl; Domain location=24-334; Score=620.2; E_value=1.8e-183; Accession=PF00850.10; Description =Histone deacetylase family
MDPSSSGSGGNSLPSVGPDGQKRRVCYYYDPDVGNYYYGQGHPMKPHRIRMTHSLLARYGLLNQMHVYRPSLASQRDLCRFHADDYIKFLRSVTPDTQQEQTRLLKRFNVGEDCPVFDGLYSFCQTYAGASVGGAFRLNHGHDIAINWSGGLHHAKKSEASGYCYVNDIVLAILELLKYHERVLYVDIDIHHGDGVEEAFYTTDRVMTVSFHKFGDYFPGTGDIRDIGHSKGKYYSLNAPLDDGIDDESYQSLFKPIMSKVMEVFRPGAVVLQCGADSLSGDRLGCFNLSIRGHAECVRYMRSFNVPLLLLGGGGYTIRNVARCWCYETGVALGQELEDKMPANEYYGYFAPYYTLHVTPSNMENKNTRHQLDDIRSKLLDNLRKLQHAPSVQFQERVPDTEVPDVSN

SEQ ID NO: 66415 - protein, 476 aa, Zea mays
  Coding DNA Sequence Number=SeqID_23040
MKSRMALGLTSPEKSQPESDSSSSSEPGGPHEISARRVPRWGAGVIDSLDRRRGAASCLATVAPPPPPAARKATGQTRMLLFRHGGKTSPSPPPPGGLTTVVVAVALRGKEYHVVAAVEGHELETPKTEQRPGLKRLLETTHLELDGKLFVNTQQALAWRANCRRFDPGGSLDRRVNCRCVPQPRWVGARRNTKGGKHWLVLSCARVGALAVGVTSVREGERESRATNFLYEGPGPSFYRFKERVQGNDVPPAAWSVRAQGRARRRLLLRPRPGSGEDAIPLEVEVEAGPWGRARRRPPSEVKVEAEPWGRTRRRPPSEAEAGAEPWGRARRRLLLRPRPRRVSRRLHRAAARCGCWSLASVDVQLPVPPMQQDVQPPICAVGPSTAGLSSSRSTRDTFEDVAHDDEDEDDEDDDEHNDDTGTGAAGQEEIGPSQLQDAPTTQPSQLTPRRRHPRDPYTPGTDALGAKGKGKTRRK

SEQ ID NO: 66416 - protein, 38 aa, Zea mays
  Coding DNA Sequence Number=SeqID_23041
MEAGEDVAHQDHINMAHPQQGLNMASTVVRAPRGGVNR

SEQ ID NO: 66417 - protein, 392 aa, Zea mays
  Coding DNA Sequence Number=SeqID_23042
  Gene Ontology: Mol. function=methylcrotonoyl-CoA carboxylase activity; Cellular component=mitochondrial matrix; Biological process=leucine catabolic process
  Homolog annotation: Hit_ID=A2YVC8; Match level="QueryCoverage=89%, HitCoverage=57%, E-value=1e-157, Identity=81%"; Hit description =Putative uncharacterized protein
  Pfam annotation: Domain name=Carboxyl_trans; Domain location=83-392; Score=45.9; E_value=3.4e-19; Accession=PF01039.13; Description =Carboxyl transferase domain
  Subcellular localization annotation: CTP_CleavageSite=24; ConfidenceScore=5.00e-01
MLSRLAAARRQLLLSPAVAYRSSSAAATASAVHERAAPASASVLPDTLERGSDAYQRNTAAVGGLLSDLRARVSQVLRGGGAEAVRRNAARGKLLPRDRIDRLLDPGASFLELSQVSLAAPARTLVFLALIWPHCEVNSIACSDVYDEALPSAGIITGIGPVHGRLCMFVANDPTTKGGTYYPLTVKKHLRAQEIASECKLPCIYLVDSGGANLPRQADVFPDRDNFGRIFYNQAKMSSDGIPQIAVVLGSCTAGGAYIPAMADESVIVKGNGTIFLAGPPLVKAATGEEISAEDLGGASVHCKVSGVSDHFAQDEIHGLELGRNIVKNLHLAAKGTNIQSSACGYQEPLYDVEELRSIAPADVKQSFDIRSIIARIVDGSEFDEFKKLSGS

SEQ ID NO: 66418 - protein, 113 aa, Zea mays
  Coding DNA Sequence Number=SeqID_23043
  Subcellular localization annotation: CTP_CleavageSite=26; ConfidenceScore=5.16e-01
MTRSWAQAGALLGGRASGGRSRRASRAGRGSVHTIAAWQGSWVTGARGGSCQGHSAGRPDALLGGAGRGGCARARSWHCAWERTGEKRVTDGEQGALETSARARVRRAQLGCA

SEQ ID NO: 66419 - protein, 37 aa, Zea mays
  Coding DNA Sequence Number=SeqID_23044
MASAECGLVVEDGPDRLAPPSSGTGACVHPAQKVEDV

SEQ ID NO: 66420 - protein, 99 aa, Zea mays
  Coding DNA Sequence Number=SeqID_23045
MGRRAVRVLSPNRGRGTILLMEALRALSTQFRNLRPSLAQLVKGVVQLCVEHGDQVYYSAQSGIALTNREKDEPILKIRVKKLRLSSGKSNRLKEENAI

SEQ ID NO: 66421 - protein, 183 aa, Zea mays
  Coding DNA Sequence Number=SeqID_23046
MAVMGSTSEKMYLCQVILLNWTNKTGFLRMHFSKHFCKTESLIIEKPYLDSLNQHTLESLFFSRKMPPRTRRTARKHTGPIGVPCHQLAPRHDNSSSGSNDPIGDLEAEVSRLQAELRRRTAIWVVDGDRINELRRDVRHLRDQLADRDLALDWVVQSRSLAWAKEEKAQARVAELNLAVDNL

SEQ ID NO: 66422 - protein, 63 aa, Zea mays
  Coding DNA Sequence Number=SeqID_23047
MLVSNLNTSSLHLRWGPGMNYLHTSKGRGMASSERLACGGNHISTDGGEREMCPWAISKYFGD

SEQ ID NO: 66423 - protein, 109 aa, Zea mays
  Coding DNA Sequence Number=SeqID_23048
MAGGIKLAGAKERWLAGEEIWSQEIWSVSLPKPEANPRLGTGSCSVAKVPVSECLVPRSNCAKTVSNEFGLSSNFSRMCSREFGTTLIFGSPGFEFRKTENADDLWEEV

SEQ ID NO: 66424 - protein, 117 aa, Zea mays
  Coding DNA Sequence Number=SeqID_23049
MSNEFGLSSNFSRMCSREFGTTLIFGSPGFEFRKTENTDDLWEEPSGCNAAAPGTEAFFDGMTKLKGDMHKGEASCRRDDEHCAPLGTGALFANRLLRHAVCWVNLTPSAGGLDRTH

SEQ ID NO: 66425 - protein, 183 aa, Zea mays
  Coding DNA Sequence Number=SeqID_23050
MPPRELRARAHRGPVLLCGGPDPTVLPGTYHPSSPRGALRPAHVVGSGAALRVTRRCRMGAAPSYCRRGGVQPHGSWHPSSIARLQGFSSCSSAATPHRWSSRGMTTSLVVERSEPGCGLPPALSFKDVHHPCWGGGRDELGLRLSHGLAARFFLQHSGEKGVRQPCEGGKLWLRGAGRLRRR

SEQ ID NO: 66426 - protein, 37 aa, Zea mays
  Coding DNA Sequence Number=SeqID_23051
MEQWPQRKEGVEGLTGGETALAEMLAGGEESGLTRAR

SEQ ID NO: 66427 - protein, 199 aa, Zea mays
  Coding DNA Sequence Number=SeqID_23052
MALHKLYDDGGPQLSYGSRTTSAGTRPLQQLSLRQAPPHLRQPRHHASRHSATPPIVHLDPLLTTIKGRTRAFLEKVGRAGLRTGQALSWGRSLPSPAWTLVTPLLQAHLTWARDEHEGRGTSTSLTLDSGHLASPPFALAHALDPSGLGHAAHSLVGLGTPCLETPTVSASKCVPLSTVMSFGTPKRQTIFCQKNLWT

SEQ ID NO: 66428 - protein, 120 aa, Zea mays
  Coding DNA Sequence Number=SeqID_23053
MGSGEAEVVRPRPGQSPSPGVGRGGSRSAEARAESEPWGRARRSFVVFQPESEPWGRAEREFAVFPGLSPEFEPWGSGRSGVRRLPGLSPSPSPGGRGGAEFAVFRVLAPSPSPGGLAES

SEQ ID NO: 66429 - protein, 84 aa, Zea mays
  Coding DNA Sequence Number=SeqID_23054
MPGSSCPRRGLACARRCHTGPPCQRRGSRIAPAQGPGTPHPSARRGHARAEAEAGAAICWIHHTSAARGGAMAGRRHVEQLGLL

SEQ ID NO: 66430 - protein, 94 aa, Zea mays
  Coding DNA Sequence Number=SeqID_23055
MTHFFSGLINLLLKIGEMKHLFLFPLDLLMNGFEVPDFLVQLLLLRCRTAPSPEDFFGGMTKVTAYRRWSNEFAGGTGSSLGKITSMSLTFTID

SEQ ID NO: 66431 - protein, 57 aa, Zea mays
  Coding DNA Sequence Number=SeqID_23056
MESHDLRAERESRLVGDNEIDGSGYDYGAGCQHCNHCSGEDEVVEGDFQEFQDYDEF

SEQ ID NO: 66432 - protein, 153 aa, Zea mays
  Coding DNA Sequence Number=SeqID_23057
  Subcellular localization annotation: CTP_CleavageSite=35; ConfidenceScore=5.11e-01
MARARAYKTLPDLDCTLPRTLKPHRSRARRRLPVRSESAAAHSLCHRRPANRAIPNPVQPSEKTVHTFVRLPEQGIGEYFAGEASPRSPELSPPPEYVDQDRENRKYCNLADGEYILVPEQGAAQEVAPDPAPEPAPEDLPATALEGKPRFYA

SEQ ID NO: 66433 - protein, 65 aa, Zea mays
  Coding DNA Sequence Number=SeqID_23058
MYLRTCHCGSSRDHPRFDHSRFQGCAGSRRGPFFHEGYPLSFIYMTEEISLYILEYLSMFIRYSR

SEQ ID NO: 66434 - protein, 168 aa, Zea mays
  Coding DNA Sequence Number=SeqID_23059
MGKLSLGWTNTRKAGPRWEWRDGESIVYPPGKRLDGGVLSSRLAWTRSGLEKPVGSTISKLFCKIESLKFGKLYLDSQQTSISLKVFSLVRMAPPKQTPRMRVRARGVPKHQMAPRTVEVGSSSRTPSTQVEQLHQSLDVSFNERCLDSAHILELLAEKKHVQKELAE

SEQ ID NO: 66435 - protein, 276 aa, Zea mays
  Coding DNA Sequence Number=SeqID_23060
  Pfam annotation: Domain name=SlyX; Domain location=186-254; Score= -7.6; E_value=0.05; Accession=PF04102.3; Description=SlyX
MTSHGSSNEGNTQSHTDGLAREGFPRILWEVLQGAGYTTPPQYAVRLFEKHQVPRCRVRMTLEPHPLQPGWRSLDSKSFGYRAEDTIEAIALHGLTTFCGFHPLELSTHPIGLFPAEKEDDPMWKDRVEHAKDIWALYPGQTAHLMVLCMDALCRLQATKITLDNREELVVDLSIEMVEKDLQVEQLSNEIQELEELVGTRENTIEVLEDQLINTQQQLAKANQHLDMHHQEIQDMEANEDVDIEGGEEPEPASSLDTAGSGRPPSPESSVASFAH

SEQ ID NO: 66436 - protein, 248 aa, Zea mays
  Coding DNA Sequence Number=SeqID_23061
  Homolog annotation: Hit_ID=A3BMY9; Match level="QueryCoverage=42%, HitCoverage=6%, E-value=3e-10, Identity=42%"; Hit description =Putative uncharacterized protein
MEGNQIRYRLPHHRHHSILLVPKAVSLLSQHHIMGITIIGLQPHQCLMRDIICNQHPLHRLQINSLLCHQNTNIGRITGVITVHRVLRDIGTMDMIEVITDMIEGIMRTTDNTIMMIEDTAMMIEDITMMIEAITLMIEDISLMTEGITSMRELLGGQCTMRLLTGQDILFHQDLLRFLTILKLHQAQCTMGDHQILHQGIVQAGLGRLGYLITILPQDILWSLQFPMQLELEMLIFFSISWVKLKTV

SEQ ID NO: 66437 - protein, 725 aa, Zea mays
  Coding DNA Sequence Number=SeqID_23062
  Homolog annotation: Hit_ID=Q10L59; Match level="QueryCoverage=99%, HitCoverage=61%, E-value=1e-141, Identity=55%"; Hit description=PWWP domain containing protein, expressed
MRRVFGRDKLRKAFLHKCGEAASNLRFVDEIIEVYDSLKEKGSNKDDLAAEVKPGVEKFADNNVCMDTENMVSSSYIQNHQEIDDHYVTTKGHDMIKSDRLSVTIMSDERCVINSAPDEPTENVSVLDEMREISLRTNSFSNKQRDAQPQNCYTRSRVPSLRKSRSSISVESRKAQGSGNFFDHTNLSSIGSVPNENKERSSRHRHADDKANSGSVSILDNVWLHSGRGTSNQPVTLGTTCNGSKMLNPPVKADSTCNSEASENGTSETELKSNGTSNLPMNTEVIFRRIRKSDRKPVPHYEDCTTPNKDELRAEYSEILSDSPNSKNEVCKSDGDEHLPLVKRARVRMGRSHLEDSPVDEVDVSNKKPELTTTSDQCDRNGKPASPVNDYSADQVSTVVSSASNPSCKSDMPILSKEGHLPWKNKEYHPKILALDVEAALPPSKRLHRALEAMSANVAENVKNIPEVTGPNEMALNGSLLTANNHSNKSADAVVTVSNKPVIVQCSEPSLDTQFKHTQSVNNVGDTASNSSMATKSSSIQSDADTRTSEVHTFSSLALKELNHRKIKDRSTSPDSMPMKELIAVAQARRFSRLTSFPDIFLNAKYIPERATNTPPKEGSHRQLSPSNRIFRSTSGNDNVHSRSPFDIIQQKKLAGHVEANAARRSFKDFLSTLTRTKESISRATRLAIECAKFGIAGEAVLPRILYAAAPPGNSAWENRKQCLK

SEQ ID NO: 66438 - protein, 258 aa, Zea mays
  Coding DNA Sequence Number=SeqID_23063
  Gene Ontology: Cellular component=spliceosome; Biological process=RNA splicing
  Homolog annotation: Hit_ID=A2YMU9; Match level="QueryCoverage=26%, HitCoverage=15%, E-value=1e-26, Identity=88%"; Hit description =Putative uncharacterized protein
  Pfam annotation: Domain name=Prp18; Domain location=138-253; Score= -24.0; E_value=0.00059; Accession=PF02840.6; Description=Prp18 domain
  Subcellular localization annotation: CTP_CleavageSite=75; ConfidenceScore=5.22e-01
MATALPSRSTVDEPCSAPPEFAPTCCTPTLPHAPQQLPVTTSVASTSSTSHGTRWCGASACCASPSRCSGRTTTPASRASSSCSSPALQARVDGGDGGAAEGSADDGDAKGSGDDADADKDSKRMTTKFEELCNEDKILVFFKKLLNEWNQELDEMTELEKRTVKEKSMVATFKQCARYLSRLFEFCRKKVRNFGMLHLASRDRTEDGLNTPPDIPAAVNSKLAMAPKTSCTATQKSELPMCSQVQTFQVPTSLPKHL

SEQ ID NO: 66439 - protein, 203 aa, Zea mays
  Coding DNA Sequence Number=SeqID_23064
  Homolog annotation: Hit_ID=Q6JAD6; Match level="QueryCoverage=99%, HitCoverage=26%, E-value=2e-24, Identity=38%"; Hit description =Putative uncharacterized protein
MVRTKNVTPSGGGDDEDPPRPFRQVKGNTVYLEQQEGRKKRRMDRAARAALAAAAAVDQAERGGQLQISSNQIAYRVCRLMSRPRSTGPPTPSTTVSTPPPTSPALVAPEPSTTPAVSTTSTTPTSTALALASAPPIPPPRFREHDEIEVRPLAADQRLLDLQRATTARLEGKQKYQREAKANAQCVIKGERVNSTGVLFTYL

SEQ ID NO: 66440 - protein, 203 aa, Zea mays
  Coding DNA Sequence Number=SeqID_23065
PLKGHDLASPEPSLEQRQPTRRILVSPEGPLKRRTHLRLVRGPVFAEKQPWPDRHANRPKNSAACPAPTVVPLDRVRLIAAKSSLGRHGKLRLVRPRARTQPRPRKTDSASPDPRARTQPRPRKMVSASPDQGSDSASASEDGLRLARPRAQTRPRPRRSLRLARPRARTRHVTGKAIITLPLASSGCGEQDRRPIWLAPVNK

SEQ ID NO: 66441 - protein, 214 aa, Zea mays
  Coding DNA Sequence Number=SeqID_23066
  Subcellular localization annotation: CTP_CleavageSite=19; ConfidenceScore=5.09e-01
MAGMRVRTAKSCMDVRDPTASTIRAVGPNRSGVPRLCGELSSEARARSQQRFRGLGKDLGALRATQRTQPWAQRSRGGTRGRKMRRSGPTAVQTCSGEQSREEEGNKWRNRGMGDCSPREETLEYQGNDGDARIPRVDGGGLRLHGENAGELGPGEIERLEANQKVSRVVGEGAELTEAMDAADARRWPQNGDRPSAGFHGRVRRVRQRAREFS

SEQ ID NO: 66442 - protein, 51 aa, Zea mays
  Coding DNA Sequence Number=SeqID_23067
MAVMGSTSENMYLCQNPSGELTYARVKCYICHVIGDPQLSINIRIAVTSWT

SEQ ID NO: 66443 - protein, 63 aa, Zea mays
  Coding DNA Sequence Number=SeqID_23068
MDSDTCDHVGLLLEVELTVAKLLLVIDERRQRECLLLMVFVRGFKHGLYGGMRIGMGFAGREE

SEQ ID NO: 66444 - protein, 289 aa, Zea mays
  Coding DNA Sequence Number=SeqID_23069
MAMVVHGLEYDSRMEDIDREVLVPVAGGMGGTRFGDVTIDSPSSCTLSQAQLEDERRQHVEFEARMRANREAERVTRFARQQIMMEILQYMHFTGCKSYLDQGIEESNTSREDMKSKRSPRNKGSVACGLSGLEHRTVQWHIGLSGATRRTVRCTRNSGTMERRPPNYLHLGASLIEIPEIIKKYGSTSCFDLTDDSNPYNQVPVENIVVETCSDEVAKENEQLRQEVARLGKDLYDKKGKAKQIQPPQDNTTVGVNMPVKGETVICRLCHKKGYNSFQCKAMTGDKQR

SEQ ID NO: 66445 - protein, 115 aa, Zea mays
  Coding DNA Sequence Number=SeqID_23070
MEWSWGSLVEIRASALAVSLLRIYTSSGKTEANTAFVPIELQNSRKSWFSNYFILSIVSSDGTPNRHMMFCQKNFRVVLEVIADTVLASIHLVKYSTATKLHCGQMGGSGPEAIG

SEQ ID NO: 66446 - protein, 179 aa, Zea mays
  Coding DNA Sequence Number=SeqID_23071
MASACGALRRSTSLASKVGEGLVRCGIIVGGTAGGALLSGILLTKSYVSGGVWVGDGVDLLLVAGWALECDDERFGHGGVVPSGGCNSNLVAHDVLGWVYAIVVLGVDEAWRGCMWYPLRTVGACSALRRRQVVLALPFAVDCIIIEGLVRDVIYNGILAFLFSQKGRLRCIVDGSDGL

SEQ ID NO: 66447 - protein, 207 aa, Zea mays
  Coding DNA Sequence Number=SeqID_23072
  Subcellular localization annotation: CTP_CleavageSite=35; ConfidenceScore=5.09e-01
MAFEVFSLESSDTGLSSKGGVTPSPQHLPSEGPVRLSQLVPKSVRSGLHQADRSPPPTFKVVERGQDEEALRYIAHLGSGCDLVEEFITCEVWSLVHGWDLGEIIPRRMLTLGDKLVRSPAFTVDLCGRNAATFVPEVESEAVKIVRKYALKTEMLRSWDIRGSNIRLKCVFELNKLPYGPYPEGDSADAGDDRGKQVKPQADEGSL

SEQ ID NO: 66448 - protein, 79 aa, Zea mays
  Coding DNA Sequence Number=SeqID_23073
MKKSEKDIHDAREAAKEAKKAVELEKRIAELSPPPKLFDPLADPEMKEAIDIINVAESIVDEVVNKLLNEVAEKVLRED

SEQ ID NO: 66449 - protein, 146 aa, Zea mays
  Coding DNA Sequence Number=SeqID_23074
MARMLRWSSPLGRLPGAEVVAAAGEAARCRGGCLYWRAARRQGSHRCWRTVGAETSIPKKELAMAPRRVVERAGPRYGTRLSGYTGSGPPQETNVNSLAPDPRPTGRAYEGGPHWVGVHPFLHGLVGGLDPWGVQEGFRGKAGFDP

SEQ ID NO: 66450 - protein, 1706 aa, Zea mays
  Coding DNA Sequence Number=SeqID_23075
  Gene Ontology: Mol. function=heat shock protein binding; Biological process=protein folding
  Homolog annotation: Hit_ID=Q108V8; Match level="QueryCoverage=100%, HitCoverage=67%, E-value=0.0, Identity=82%"; Hit description=DNAJ heat shock N-terminal domain-containing protein, putative, expressed
  Pfam annotation: Domain name=DnaJ; Domain location=843-924; Score =40.2; E_value=7.4e-09; Accession=PF00226.22; Description=DnaJ domain
ESVRETISVIMRTIAEEDAIAAESMRDAALKDGALLRHLLNAFFFPAGERRDVSRQLVALWADSYQPALDLLSRILPPGLVAYLHTRSDEDSRSQYDEAPLSRRQRRILQQRRVHGTKTMAVQEQGIPPNGVEDGEPFRHTSAGTYGGADVHQRHVGLYSSTHSPSPGINIDPSHTVSVPHGSVPEALSENNQQIEAPQLDSHVYSVDSNANGNLVSSLHSDFSVPAQVVVENTPVGSGRLLCNWYGFWRAFSLDHNRADLIWNERTRGELRAALQAEVHNLDVEKERTDDIVLGSSVTEDAAGSDNLPRISWNYAEFSVSYPSLFKEVCVGQYYLRLLLESGSNYRAQDFPLRDPVAFFRALYHRFLCDADIGLTVDGAVPDELGSSDDWCDMGRLDGFGGGGGSSVRELCSRAMAIVYEQHYKVIGPFDGTAHITVLLDRTDDRVLRHRLLLLLKALMNDLSNVEACVLVGGCVLAVDLLTVAHETSERTAIPLQSNLIAATAFMEPSKEWMYIDKDGTQVGPLEKDAIRRLWSKKSIDWTIKCWASGMSDWKRLRDIRELRWALSVRVPVLTPTQIGDTALSILHSMASARSDLDDAGEIVTPTPRVKHILSSPRCLPHVAQAMLTGEPSIVEAAASLLKAIVTRNPKAMIRLYSTGAFYFALAYPGSNLLSIAQLFSATHTHQAFHGGEEAALSSSLPLAKRSVLGGLLPESLLYVLERSGPSAFAGAMVSDSDTPEIIWTHKMRAENLIRQVLQHLGDFPQKLAQHCHSLYDYAPMPPVTYPNLKDEMWCHRYYLRNLCDEIRFPNWPIVEHVEFLQSLLVMWREELTRRPMDLSEEEACKILEISLDDLVLVENGSSKRPSDLSSANSGNKTENIDEEKLKRQYRKLAIKYHPDKNPEGREKFVAVQKAYERLQASMQGLQGPQVWRLLLLLKAQCILYKRYGDVLEPFKYAGYPMLLNAVTVDKDDSNFLSSDRAPLLIAASELIWLTCASSSLNGEELIRDGGIPLLATLLSRCMCIVQPTTPANEPAARIVTNIMHTFSVLSQFESGRVEVLKFGGLVEDIVHCTELEFVPSAVDAALLTAANVSVSSELQNALLRAGFLWYVLPLLLQYDSTAEENEICEAHGVGARVQIAKNLHAVHATQALSKLSGLSSDDILPHSCGSYQPTSTSSVLNIIWNSSTRGELLKFVDQQRASQGPDGSYDLTESQSFTYEALSKELIVGNVYLRVYNNQPDFEISDQEEFCIALLKFIAELVQQWNSVNLEETIHQHGSVIEASISENDQVSDSTIEGKMDNSSGKQSTDGDSEVIINLQCGLTSLQNLLTSNPGLAAVFATKERLILHCNPPCRDGALAVLYSLASTPELAWAAAKHGGVVYILELMLPLQEEISMQQRAAAASLLGKLVGQPMHGPRVAITLARFLPDGLVSAIKDGPGEAVVSSLEQTTETPELVWTPAMAASLSAQLATMASDLYQEQMKGRVVDWDVPEQASGQHVMKDEPQVGGIYVRLFLKDPKFPLRNPKRFLEGLLDQYVSSVAATHYEAIATDPELPLLLSAALVSLLRVHPALADHVGYLGYVPKLVAAMAYEGRRETMASGQATSASKAEPSEHDNSAHSEATVQTPQERVRLSCLRVLHQLASSTTCAEAMAATSAGTPQVVPLLMKAIGWQGGSILALETLKRVVGAGNRARDALVAQGLK

SEQ ID NO: 66451 - protein, 107 aa, Zea mays
  Coding DNA Sequence Number=SeqID_23076
  Subcellular localization annotation: CTP_CleavageSite=56; ConfidenceScore=5.30e-01
MPDPRFTLGPPRLVASATLPSLLPLPTHLVPSWNMWSSGWDQLPFGSSFSTMTVIPAVTDWVTNFDASYHTTMDVVILSSSHPHLPSYPSSIIVSNKNILSVPSRTP

SEQ ID NO: 66452 - protein, 664 aa, Zea mays
  Coding DNA Sequence Number=SeqID_23077
  Gene Ontology: Mol. function=transcription regulator activity; Cellular component=nucleus; Biological process=regulation of transcription
  Homolog annotation: Hit_ID=Q9ZPN6; Match level="QueryCoverage=99%, HitCoverage=99%, E-value=0.0, Identity=71%"; Hit description =Transcription factor MYC7E
  Pfam annotation: Domain name=HLH; Domain location=524-573; Score =50.7; E_value=5.2e-12; Accession=PF00010.17; Description=Helix-loop -helix DNA-binding domain
  Subcellular localization annotation: CTP_CleavageSite=65; ConfidenceScore=5.06e-01
MNLWTDDNASMMEAFMASADLPTFPWGAPAGGGNSSAAAASPPPPQMPAATAPGFNQDTLQQRLQAMIEGSRETWTYAIFWQSSLDSATGASLLGWGDGYYKGCDEDKRKQKPLTPSAQAEQEHRKRVLRELNSLISGAAAAPDEAVEEEVTDTEWFFLVSMTQSFLNGSGLPGQALFAGQPTWIASGLSSAPCERARQAYNFGLRTMVCFPVGTGVLELGSTDVVFKTAESMAKIRSLFGGGAGGGSWPPVQPQAPSSQQPAAGADHAETDPSMLWLADAPVMDIKDSLSHPSAEISVSKPPPHPPQIHFENGSTSTLTENPSPSVHAPPPPPAPAAPQQRQHQHQNQAHQGPFRRELNFSDFASTPSLAATPPFFKPESGEILSFGADSNARRNPSPVPPAATASLTTAPGSLFSQHTATMTAAAANDAKNNNKRSMEATSRASNTNHHPAATANEGMLSFSSAPTTRPSTGTGAPAKSESDHSDLDASVREVESSRVVAPPPEAEKRPRKRGRKPANGREEPLNHVEAERQRREKLNQRFYALRAVVPNVSKMDKASLLGDAISYINELRGKLTSLETDKETLQTQAMIRVQCHKRNHPSARLMTALRELDLDVYHASVSVVKDLMIQQVAVKMASRVYTQDQLSAALYSRLAEPGSAMGR

SEQ ID NO: 66453 - protein, 395 aa, Zea mays
  Coding DNA Sequence Number=SeqID_23078
  Gene Ontology: Mol. function=catalytic activity; Biological process =metabolic process
  Homolog annotation: Hit_ID=Q850X1; Match level="QueryCoverage=14%, HitCoverage=28%, E-value=3e-16, Identity=75%"; Hit description =Putative isomerase
  Pfam annotation: Domain name=FAA_hydrolase; Domain location=142-261; Score=-53.1; E_value=0.00027; Accession=PF01557.9; Description =Fumarylacetoacetate (FAA) hydrolase family
MVGGDWERERAKGKAKEMVQNADSVGLWRKPENARAKDGRLSRFLSGWARANTGTCRRPGSGRDQVKRVIPQVDLGGQTYIPGPAAAPSTPTIAARRSALGLHDAPYMQWRGANFLATGEHNGHGGGRPSLRPAAGPRRKAANDTVEPILFLKPTSSFLHAGVATVAVEIPEPLKSLDHKAELVVVISWRGRDVPEASAMYFVREVVHYFALSKNDSYVMSASGGKISLFNMMTFKVGFILHSFQQFFAHASIVITLYIFVACQLPISKLVFKGNREPTQDNLRLPEIKGKFDPSKAAALGLRPGPKYRELQVGNSIQSDQFDEMHRESSMSFKTMDDGQVLYVSLYEIVVVGSKVKKYSTYGPIHLYQQVLNAGDDMIGVECLEEDSDGKVLFV

SEQ ID NO: 66454 - protein, 158 aa, Zea mays
  Coding DNA Sequence Number=SeqID_23079
MAATARRVPRADDGGAIPRCRWCIGVGHESGQRGGVSYLHLLQSRAKPPDRSGQPFLQSPPAPTTNGGGAPQTRFVHLLVAAAGAMVDPTQVLHPAPRVRRDVVCLVEVEPVEHNPCASVPDGDAAVAVPHGEAERTAVVVVVVSLRDGVSGASNERR

SEQ ID NO: 66455 - protein, 448 aa, Zea mays
  Coding DNA Sequence Number=SeqID_23080
  Gene Ontology: Mol. function=heat shock protein binding
  Homolog annotation: Hit_ID=Q108V8; Match level="QueryCoverage=15%, HitCoverage=2%, E-value=1e-18, Identity=70%"; Hit description=DNAJ heat shock N-terminal domain-containing protein, putative, expressed
  Pfam annotation: Domain name=IQ; Domain location=357-377; Score=24.4; E_value=0.00041; Accession=PF00612.18; Description=IQ calmodulin -binding motif
  Pfam annotation: Domain name=IQ; Domain location=399-419; Score=18.6; E_value=0.024; Accession=PF00612.18; Description=IQ calmodulin -binding motif
  Pfam module annotation: Pfam domain module=IQ::IQ; Domain location =357-377::399-419
MEAVGAAETRHGEWSVTRLRSAARGTANIESLSLGVGPRGGLGEQGDSVSRLLVLTSTSLVERRPENYEGAGWKQLDPRRAGLVQRWSCVDGSWLEAGGTWRIWLEAAKSWRFPPRSGAEESCAEAGGRGGRRGRKPRTSCGRGGLDGSLRRSGSSLDDGLRRRGRGGRDDAEEAWCDGGLRQPETAQKWPADVQTRRRDNDGNLRQAEKAGRDGGRKKRRLGPNPNLLWYHAAIVRPLSAVSALVRFAEEPQMYMQALPVIIYLQQFLTFYKPRTKPATEGYNLAGEDSYPHGPTPGISSRLSSPPPAAAPSAAATPSPTPDAFTRLEESFGRFAEKWDQFVVMFHRYKEKTEKELQAAVRLQAASRGFLARRQVQSLRREKHLAVASRATPWPSSHEQAMVRLQAAVRGFLVRQAKSRSGYAAPLHGQRGSSPSFGQLPWCWTDPT

SEQ ID NO: 66456 - protein, 256 aa, Zea mays
  Coding DNA Sequence Number=SeqID_23081
  Pfam annotation: Domain name=zf-CCHC; Domain location=117-134; Score =19.8; E_value=0.0015; Accession=PF00098.14; Description=Zinc knuckle
MEILSIHNNELTTKLESIGSTPGASLVEIPEVIKKDASTSCLDLIDVNSNPCNQVLVKNVIVETCSDEIAMENEQLKQEVARLGKTLYDKKGKAKQTQPPQDNTTAGVKKPMEGQTMVCWLCHKEGHKSYQCKVKTGGKQKQKPTSKISNTYINKVDKKAATPYFDQEEKEWKGDSDQGQQASQQRKGGQTHLGAKGDYLNHEKHQEGLGPEREGAREDSTEALRMQCNTPGVYFMFDIDYGLKYGMSMNITVTKF

SEQ ID NO: 66457 - protein, 146 aa, Zea mays
  Coding DNA Sequence Number=SeqID_23082
  Subcellular localization annotation: CTP_CleavageSite=85; ConfidenceScore=5.01e-01
MELTVAPFCIFYLGNNLTVVPSQEIILCIHGKQGATASLLPNPTAGSSTVTSFASLFRSRSLSRLEAAVGAEQGDLGSGGETTVGAEHGGGRIVGACTGVIAGVEREGADGPPVHRIGRHRRGGPTTRTLWCAGGRRRAETARTRV

SEQ ID NO: 66458 - protein, 155 aa, Zea mays
  Coding DNA Sequence Number=SeqID_23083
  Subcellular localization annotation: CTP_CleavageSite=18; ConfidenceScore=5.35e-01
MKLWKETSSSSKTTTSSRCGLAATPSRLPVKAAVIYVSFSHFDLFCARPEFYIMSSEFARPFGCSPYCLPVAKYVPYREPGNYYDFVVVEVVAQLSCSQEHSIQQLLDLGISDLGGSEDLADEVHWMLNWMCMSFFLSLDYQRGAYHVSRARKVQ

SEQ ID NO: 66459 - protein, 166 aa, Zea mays
  Coding DNA Sequence Number=SeqID_23084
  Gene Ontology: Mol. function=caffeoyl-CoA O-methyltransferase activity; Biological process=lignin biosynthetic process
  Homolog annotation: Hit_ID=Q9XGD5; Match level="QueryCoverage=51%, HitCoverage=33%, E-value=2e-33, Identity=79%"; Hit description =Caffeoyl-CoA O-methyltransferase 2
  Pfam annotation: Domain name=Methyltransf_3; Domain location=1-126; Score=-19.6; E_value=7.2e-11; Accession=PF01596.8; Description=O -methyltransferase
MDGEWWNREGRCHPQDRHQRWPRAPSPVRLESIRLPAQEKNHASFDFIFMDADKDNYPERLLKLVRPGGLIGYDNMLWNGSIVLLDDAPMRKYIRFYRDFVLALNMALAADERAEICQLPRSCEKAKFRESNVSAIRGYLKIRKYYDALAAFGCLLEINNPQWMYR

SEQ ID NO: 66460 - protein, 41 aa, Zea mays
  Coding DNA Sequence Number=SeqID_23085
MGAGRGVEGAGSGRDNAAEVEVLDRDAADTDVEEDGPEGTQ

SEQ ID NO: 66461 - protein, 217 aa, Zea mays
  Coding DNA Sequence Number=SeqID_23086
MALKNQLDSFLRQVVPLTIFLPIMFFNVTYSCIAALENHEVIAVEALEQAKDEHIQKLIEAYLVTHNQRRALRIQKPASSNPVQPMRAEEPQILEGLPVSIKGERKAWEPPEGAIVLEGIPVSPQAMDKQEHPEPSQDPPLEMFELLTIKKIPSPSLESKEEAASTPPAPPPSEVTIELQEPFPLGEEFDSILPSQSAPEEVINVISLLTHPRDVSD

SEQ ID NO: 66462 - protein, 682 aa, Zea mays
  Coding DNA Sequence Number=SeqID_23087
  Gene Ontology: Mol. function=catalytic activity
  Homolog annotation: Hit_ID=A2WV50; Match level="QueryCoverage=13%, HitCoverage=18%, E-value=4e-13, Identity=44%"; Hit description =Putative uncharacterized protein
MKVRASPVSTSTKKGFPRLLRDSMSRLGIPGYLEYRGMEFMEHRKKKYMVIVYIGVKSKDTCHLVAREALRTLCSVYREEVGTTPMRFFPPLHKTHQEWKTRVQALREQRHSGDPTTAYLALYLLALDEKCDKIVAQLRKTTMRVEKAEALLLQCQKDLVDARSQNAATRNLELMALADVTRSLRETPVVTSIQGLAFTAGMAYQVLGESAESSSAQARVSRQPLNDQEKKEMGIGLGRFTGPRIEPRECSPTWPGVSVASISLPRTSLSTKRRSSEQSSLPVLLASFSTMVTTAGHYKLCVGRWLVLPASPATSRGQQPYYHGAYAESGSDRFHYAYQRAGSSTASALRLRMRGAMSNRNITLSVSAHTNLLAGNEEGNGEVEIVAGSSEEDEAKEWRRRTSSLSGAMRGSPSQAAQQVSPQQQYRRWWLCGPRHWPRQAKEVGLQAVAAAELLLALLVPVANSSDSPVENKRTARSKPKANQKDTNANIHPHVNAPNQVNAPNAYQATPQVNQMTLMNGNVVYGPHLPHSEDVIYGPHLPHGYSAEGSSFFWNTSSGEKIWQEAMATGGSDSAFFPNYLLPENAVVLLHVRPTSVLYSVDWGSIATVVVPFLGSIFVLSELLLSACGGVWPTSLAPRAATFSEDDSEGRDGLLWWRDLTRCHTGDVAVAQANQVLLDLFS

SEQ ID NO: 66463 - protein, 256 aa, Zea mays
  Coding DNA Sequence Number=SeqID_23088
MRRVGRFASRQAAHDEKRHDEPRVFTTPPELLHARQLRTGPSLETALRPGEHRLWATPHGSVPGDRAPIRQAPPMGNSARVRPWRPRPAPASTAYGQLHTGPSLETTLRSGEHRPWETHMGPPLETTSHSGERRPFATPCGSVPGDYAPLRRTTQRTKVLLGTKVNPQEILTDYSGARGLHHTDALGRTKGFDPEKASARLQEVARRLGGCCRVPRNGVPEGEACDPFLAHLPSKSARDLRIGVSTVTRTLEGDGA

SEQ ID NO: 66464 - protein, 149 aa, Zea mays
  Coding DNA Sequence Number=SeqID_23089
MAGYSAFTGGESFAPRSKITFGSLDFLAEKTGELRLVSPSMASATGPGPRHSTKTKAEKQRLRRRATAQKRRLNKLAAAARQQAEVIHHRLWWPSSVAGLHPSSTSSRTARATLSDSDEAQERACSASARASDRTRRRWESEPSGQGPA

SEQ ID NO: 66465 - protein, 171 aa, Zea mays
  Coding DNA Sequence Number=SeqID_23090
  Subcellular localization annotation: CTP_CleavageSite=38; ConfidenceScore=5.34e-01
MPSLLTSPSSAVLGRRARRPSSLRRPPSFPWQELRSAPADLGTRRGSKQRLLPQDRLTVSRELLSLTSPTDKQVRPSPNPLSSARMDSSLLTPACAVSPVSSSHSNSALRRLAVLSSPVDSSNPDVFTSCAPPRFAQPLRDVVHPVRHPTVPLHCAFFVLDEIAKLVNSGD

SEQ ID NO: 66466 - protein, 54 aa, Zea mays
  Coding DNA Sequence Number=SeqID_23091
MAILVRFVGVRSRHRHTGSTGAGGGIVSRKREKLFPPQLATTWGHHGASSPAGG

SEQ ID NO: 66467 - protein, 153 aa, Zea mays
  Coding DNA Sequence Number=SeqID_23092
MAGKKDGKGKRGKSSEWKRPPTLPSEDFGDSKFSEEILSSEDEKSLPPPPRSSSSEDSMGLSHGERAYIRSVERAGLEGSDDSDDGSEESFEEEDQDDDDDSKGGGGEDGDKGDGGEGGDGNGGSSKGSNSGGGGSDDDKGKGSNGGGKAPPA

SEQ ID NO: 66468 - protein, 33 aa, Zea mays
  Coding DNA Sequence Number=SeqID_23093
MTTDRPLELLHMDLFDPIAYISIGGRKSQTQRP

SEQ ID NO: 66469 - protein, 197 aa, Zea mays
  Coding DNA Sequence Number=SeqID_23094
MARRRLTAHKSTGGRVPRHQLAERVSRRHSTFLSEYGMPTLLWRTLFALGYPEGKEPRYFWDREPAPDGEGIWVTAVVKPRGDDPAWGGWHFGSSGRTPMEGAGKAAYLILRDLMDNFPEELAIAMPGIFPRDDPSNSKWEQPEGSALAGGASEQQHSDTAAMSAMFAVMQLYDRSERNLGMVTSSLAVADSRLEGG

SEQ ID NO: 66470 - protein, 94 aa, Zea mays
  Coding DNA Sequence Number=SeqID_23095
MDTEVVPALAVVDVQFCAAGTTTLAEAKVLSMSGSEGTTGMMEVDVSARRVNHRLTEKEIAVVLSSASTTSIERSVAIVDRLTSLISHFHDLKS

SEQ ID NO: 66471 - protein, 56 aa, Zea mays
  Coding DNA Sequence Number=SeqID_23096
MGGGMVLLAVMVVGALQRGCGAVVVHMEAGTRAGARLIPGFKGKLPGIFLGKVLFS

SEQ ID NO: 66472 - protein, 495 aa, Zea mays
  Coding DNA Sequence Number=SeqID_23097
  Gene Ontology: Cellular component=cytosol; Biological process =regulation of signal transduction
  Homolog annotation: Hit_ID=Q2QY04; Match level="QueryCoverage=100%, HitCoverage=100%, E-value=1e-141, Identity=58%"; Hit description =TAP42-like family protein, expressed
  Pfam annotation: Domain name=TAP42; Domain location=69-483; Score =433.1; E_value=4e-127; Accession=PF04177.3; Description=TAP42-like family
MVDVEEVGNKMQSQMRLHAEPDDAAADLPLPALFDRASRLHALASSSALDQVPLRLPYPGNRDGLALLPLTKRQRSGERCLRACFFFPFPAAQDGIRTGVELLRRCDEMVGRLGLFSPNETKDDVSTANLKYLLVPYYLAEMTEKMAQEDRIPVLKASQDHLKEFIALCEVLELIPEDELELSRQKQSDTMANRRAQKVARFKRQKAAETKLQEIRERKERRGRSLRATALSAPVEAGEEDDLEDDGEEEREVLRQLQAVGYIPCNASFSAYQAHKDLLFSLAWLATISLAICKAFDLLDMLKKEEEMLLAVKERKAKDGNAFAREMLDERTKKAEAWHHKAASRVAYSKPADPITCATFAQDVIEGRASVSQAHEHKHQPLIFGPASLVGGGLTSERERMAAQVFQPSYRMPTMSIEEAGLREMKMMERWQERTAEMMREANSAWHKGGDSSSSSMPQGEGGDEDAEEAKARAWDDWKDDNPRGAGNKKLTPCG

SEQ ID NO: 66473 - protein, 360 aa, Zea mays
  Coding DNA Sequence Number=SeqID_23098
  Gene Ontology: Cellular component=nucleus; Biological process =regulation of transcription
  Homolog annotation: Hit_ID=Q2QXZ5; Match level="QueryCoverage=81%, HitCoverage=66%, E-value=9e-45, Identity=39%"; Hit description=GRAS family transcription factor containing protein
  Pfam annotation: Domain name=GRAS; Domain location=1-272; Score=-0.3; E_value=2.7e-08; Accession=PF03514.5; Description=GRAS family transcription factor
PRTGSAARRTFFELCPFPRAAVAVANRAILEAMENEKVLGSVLVLLHDFSRRPGGPPHLRLTIVHDDRDLLAAISARLTEEAEELDVPFQVHRVVGKIEALDPSDLHGVLRLRSGEARAVACTLQLHRLLAVADDDDHPAGGGATLSAGHRSSRTASVAVSRLQRMASTSCPPSDVDDSGSPATPLGFVSPPPSTPPPPQQQRQTPPALASFLAAVARALAPAVVVVTEQEAGHGGVSFRERFGEALGYYAAVYDCLDAAAEAYRRPAAERAEVERAVLGEEIRDVLLRAGAHGAGRVQERGAELRRDEGGERRAGQVRPQRVRGDGEQGAGRLPALVLELVATLLGVGVAAGRIRLVGS

SEQ ID NO: 66474 - protein, 489 aa, Zea mays
  Coding DNA Sequence Number=SeqID_23099
  Gene Ontology: Cellular component=nucleus; Biological process =regulation of transcription
  Homolog annotation: Hit_ID=Q2RAQ8; Match level="QueryCoverage=34%, HitCoverage=67%, E-value=6e-38, Identity=47%"; Hit description=GRAS family transcription factor containing protein, expressed
  Pfam annotation: Domain name=GRAS; Domain location=1-318; Score=13.7; E_value=6.1e-09; Accession=PF03514.5; Description=GRAS family transcription factor
MADGLVRRLIGSFTGRGISGALIDSCGDYFDRQSVRAARCAFFKLLPALRVAFVAINRAILDAMENEKFVHVIDLSGPAAHPWQWLKLMRAFHGRPGGAPQLRITMVHDDEAFLAHTAALLRREAEALDMAFSFHPVLGRLETLDLGDLHHALAMRSGDARAFSCALQMHRLLAVDDTDTQQQLAAAAVGTGPSVGPRAASSCSCYPPGDVACYYCPPETAKTSLPDPSPTTPFAAQASSSSSPHPQWTAVPRPALLPPLAGFLSAARAASPKVVCVMEQDAGDNVAGGLAARFEEALQHYAAVFEAPGRRGGFCGKRAGGGGARPALGGGPGRAGAGRARAARAARAAAPVGRAHGRRRVRRRAAQLRGQDGGGRGAAQVRAAGVRDQRCRRLPPPVPPRAPSLLGLRVAAVAFPGLCLCFFFWEWEQEQQAATARGGAGADAVAAPTASSGLPHSLTHTTQYIYTRKNRHLHRIHSNNPSLWTCSSY

SEQ ID NO: 66475 - protein, 240 aa, Zea mays
  Coding DNA Sequence Number=SeqID_23100
  Homolog annotation: Hit_ID=Q8TXA4; Match level="QueryCoverage=63%, HitCoverage=21%, E-value=2e-08, Identity=30%"; Hit description =Uncharacterized protein
MARGERKVQDDIDITNDSDSDSDEEFASPSYDGLADLLKEYIQIIRKSKAKCDKLKNENESLNAKYDIVMKASDEMKEENKTMSSTVNDLTSSLKDAKDKCDKLNEANRELKDRLVKIKEDYNKIKFDHDNLLVENELLSCNTHEAINHVVKIDVATSCDDLSQGEQTSIHDELTEKVEVLTLDNQKLKRYLTDATTIGKVAIENNDFNNELAVVGVLGPTAHPGLPLKVFLGVGRCRRL

SEQ ID NO: 66476 - protein, 149 aa, Zea mays
  Coding DNA Sequence Number=SeqID_23101
MGKNNKRKREPTPPSEDFGDSEYSEEEFSSESEGSPAPIPMRESSDDSDDSQGLAAEVWTYIRAVERSGLEGSNESEYSSDEEDSDGGGEDEDGDNDDDEGGDDGDGDGSSKGGGGGSKDGGGGGRGSNRGGSSRGNNHGGCWGLVLKC

SEQ ID NO: 66477 - protein, 824 aa, Zea mays
  Coding DNA Sequence Number=SeqID_23102
MPFHGGRVVRSPAFALTLRNRDPAAFVRDAEDLAVRLVGRYVPRTEGQRSFDIRGSNDCLNRVFELNQLPYDGYPGQDEADRRGKKPAVETGGDPALAAAPSSKKRKLGTAMGGLGVSDSFARELMRTCAAPGERMSSPELRESSARMMRVTGGCWPRNVPIPCAAEEDCFISRMVHQWRVFPYGRNIGAVVWAVMDKDRQGAAQKRQATVRIHEARPKSGVAEASKAARALPLAGKRVADFGTDITVDDYLGGPDEGQLAIVAPGSAIATAAIVPKARGEALGAGGEVSALALVRDEAGVATRRLKGVTEALSQATKALSQVADFTSRTASGALTAALSAEVERLRTQHADAVREKSASDSKCRKLADRVAALEKEKADLRRQLAGERREANEAIAKEQAAQAEAKLARAEGNIAKELAGHLQERLTALESRAKGAEAAIRAEAERTRTQLMATYRELGARTGDFEVPEREPGLRCLEWVQEELQELPTVLGLMSFTSLVTCEGAMNALSREGCRHFEAFDQADEDFGQDIYKVEDPVVKESAGALYDRMWGLYGREVVRERAEAARAQAERGERVDDFGALNSALPGLEPTPAEAATGVALEPTPETTEDAPGAPTSAAAGEDLPPKVAEGTPDAPAAAVSSAEDSAAVVAEAAAEPTAEAPAGGVVQDFGPAHATATAEFLAASTAEGGNEYGGSVSEFFDFTDSGSSVEWTEESSEEDLDYFAALDVAAAEASPHAADAPDVPGPSTGRQQRRAVAKRRVSAEEGARLRVSRAGRQELLSLPAAAGAGEGELRSLFAGEELRIMLFNYREMGIIPKVEPM

SEQ ID NO: 66478 - protein, 294 aa, Zea mays
  Coding DNA Sequence Number=SeqID_23103
MDEGCTQSLSSDPMINLNTTTFFLIVFFPFARNLHKLEPLALTRLITKNAQEGPFYSPKAARSRSRPTWKAKLAFYRVPYYPNMVQDSKRRKKKKMTMKRSKILKKWSKATLSHTLEEILQAAPEVVTLSAMEEASLIVAALETLEAKAKEVTVPKVQGVAALDPLSKSEAKEYEERIAPVMSSFFSDYDEDEDGKEEDPATTTLAMKDAALHVVVVARLESPKAGLALPVKTPSTIIVTEENTCSTNPVMVKDKGKGPTKTEEGKKLLRMTRCLAKGLLIKSLGPKIQGSSSS

SEQ ID NO: 66479 - protein, 215 aa, Zea mays
  Coding DNA Sequence Number=SeqID_23104
MNRSLKKRRVIKGEHKMSKMLKKKHHGPLQLKFGRRFKGIIPLSHPGFGTPRPGREHNHQGIPRMTAIAAKSSQGPPYTDHSPTALAPFGYQDDSSDPRDLTANRSNTNKHGGAAVDSARLVAVELGFVAKFTAWEKQLTRQDHHASAACRTGFCCAHLGEEVEEGAAGLDHQAVSHPKHAGEDGRADHAREKDERANRARTMDSVVTAPIRAGR

SEQ ID NO: 66480 - protein, 273 aa, Zea mays
  Coding DNA Sequence Number=SeqID_23105
  Homolog annotation: Hit_ID=Q6JAD6; Match level="QueryCoverage=50%, HitCoverage=19%, E-value=8e-55, Identity=76%"; Hit description =Putative uncharacterized protein
MTRILLAPSGRSRERPCIWSSRKAARSGVWTEQPEQRQPLSRQSKELSCRFLLIRLPTEFVVTPLVLAPPLLPLPPLPPLHHPLRPLPSLLRHPPPQPYPPPPLLQLPLLLPLPFLLHLSHLLASGSVMRLRCDHLLRIPGCFDLQRAIASRVRRFRYVPVESWLPAQRDPATADPFSTRIQESFYRAQLSAQIALRAHRLLDLPAFLLVVGADSKVHLSYLPGLLTLLTTSGRYVEEWVRVFYATVWIDPDHHWMRFRFEREDVTIHDSQIR

SEQ ID NO: 66481 - protein, 256 aa, Zea mays
  Coding DNA Sequence Number=SeqID_23106
MSSVVYQFYTLQRWYPLPTSHVTHLPRDRNFPYTSTEEARQGFLPNRHRSKINQGPPYTDHSPTALAPFGAAARAHRAAQGTPVNPHRRFRAPIVNPGLAGRIVEHNEHGRGSHTNTAATQPPVHALERLLRVVVAPASNSRRAKDSQAPIPPPTGSTHLAEAPRRIRMTGSAARLSLIFPRVRSIPHRPAVIVPASSAEVSVKPLRMGLASGGHRQRVESTKRSQHGGVSARHETDVSGPLVGAATLLGRAEAGV

SEQ ID NO: 66482 - protein, 98 aa, Zea mays
  Coding DNA Sequence Number=SeqID_23107
MRLILWYLFLTCGGCETARVSSHTFIAQQVVGNNVHELAKEVVPFTPQVMLPICQRDRDFPYTSTEEARQGFLPDCHRSKINQGPPYTDHSPTALAPF

SEQ ID NO: 66483 - protein, 156 aa, Zea mays
  Coding DNA Sequence Number=SeqID_23108
  Gene Ontology: Mol. function=kinase activity
  Homolog annotation: Hit_ID=Q6QP54; Match level="QueryCoverage=53%, HitCoverage=29%, E-value=3e-11, Identity=47%"; Hit description =Putative kinase
MGRRETEREGGRQPEGDGRERWNPAAFVFVSRPGRPESAWGRVMMAPPVDVVGPCPRLGDVEAPPRSRSSLSSEAEVESEPPDRARRRLSAEARAESEPWGQAKRSSSFFGAEPESEPWGRAERSSSSSGAEPESEPWGRAERSSSSSEAEPESEP

SEQ ID NO: 66484 - protein, 299 aa, Zea mays
  Coding DNA Sequence Number=SeqID_23109
MATDRIKYHNLTRCDRTCTHHNRNGRPRLRSREGQSLRALGLPIYNISRIRGIDYGGEAYRRQKSSGGVVSDVREVTTVTSVCGSASEVVGATLATNTGGGGRRRLLFRPNHDGSYLRAWIERRRKGKGLATVVALGRVAGRSLELRADSGRSAEVRRRQRGRQLSTGAGFIAVARAWSWAAAGARGFAHRRALSALPDVSSRRTRGSSLLPWFNGGFEHHSMMLQVGWDVFKNKTGWWIHHGRDGLNIGKDVPLTDYYQNKTTRNGSGEMARVACTLRGKRLDGGVSVLSVGVNLIWS

SEQ ID NO: 66485 - protein, 323 aa, Zea mays
  Coding DNA Sequence Number=SeqID_23110
  Subcellular localization annotation: CTP_CleavageSite=63; ConfidenceScore=5.18e-01
MGTPLADYLPSAVRQTLGKGNSFAECRLGHSAKTLSPSPVAVSNGVITDAAALLMPWSQLMPRVAPTTSDADPHTDVTVVTSRTSLTTPPELFCRRNPVEVNTSWRSLDSESFGYRAEDTIEAIALHGLTTFCGFHPLELATHPIGLFPAKREDDPMWKDRVEHAKDIWAIYPGQTTHLTVRCMNALYRLQVMRGEAMSHLMALLEATKITLDNREELVVDLSTEMVEKDLQVEQLSTDIQELEELVGTRENTIEVLEDQLINTQQQLAEANEHLDMHHQEIQDLEANEDVDIEGGDEPASSVDTAGSGRPPSPESSVASFAH

SEQ ID NO: 66486 - protein, 24 aa, Zea mays
  Coding DNA Sequence Number=SeqID_23111
MAGEAGAPRPGRHGQGKAGAVDVA

SEQ ID NO: 66487 - protein, 42 aa, Zea mays
  Coding DNA Sequence Number=SeqID_23112
MAGGIKLAGAKEWWLAGEEIWSKETWSVSLPKPEANPRFCHV

SEQ ID NO: 66488 - protein, 142 aa, Zea mays
  Coding DNA Sequence Number=SeqID_23113
MAGGIKLAGAKEWWLAGEEIRSQETWSVSLPNPRQIQGFVMSRARVPMPSSGTRQRDYNLADGEYVLVPEQRAAQEVAPDPAPEPAPEDLPATALEGKPRNPVEVNTSSLEDMVAGVTWPSILPPGWTVEWDPTSAEEEHEE

SEQ ID NO: 66489 - protein, 264 aa, Zea mays
  Coding DNA Sequence Number=SeqID_23114
MEARRRQQGPSSRDSCASTGLKRSSDGHDTARVPGVAQPATSVIMVHDFVSFPDFEVREKDPDEMVLCRARVMSGGRDLVEDSATKDAVEERFFGKDVMVVSPAFAVELGGCDGPAFVSEVEAEAVNIFGKYSAKTQMTKSLEIHDGNIHLTRVFEMNELGYRRYPEDVERGEEEDSIVTVKEKKAKGSKYPDEAKAAFEDFASLRTMATDFAEEKVETTGESTSPESLLAAHAMSATVTGVVMEKDQKSKFKKPKEVIHIMDS

SEQ ID NO: 66490 - protein, 64 aa, Zea mays
  Coding DNA Sequence Number=SeqID_23115
MDVLMITNLGENQQGLGKGIGVEEEEQGRHNRKEIKQELALVVRSITQCTVDNQRRSGATIARF

SEQ ID NO: 66491 - protein, 266 aa, Zea mays
  Coding DNA Sequence Number=SeqID_23116
  Subcellular localization annotation: CTP_CleavageSite=42; ConfidenceScore=5.06e-01
MARVACTLRGKRLDGGVSVLSVRKQQTFVAFVLRWCQKRKLRNEASGGCCPPFKNTLLLSGRGFCLPSFPPYGDMPPRTRKTPRKSTRPIGVPQHQLAPRHEESSSGSNDPIGDLEAQVEQIQTEICHKNRVWVEDGQRINELRADVRHLQDELAERDLAIDWVVNSRSLAWDREAKAHARVAELSTTIDNSQTYLPTLLEWEPDLLEQQMPSRTRAHDGAGTSRGREDTPNPPPVPPMLAEAIAALVNTTTDNTRFLREMAGNQF

SEQ ID NO: 66492 - protein, 60 aa, Zea mays
  Coding DNA Sequence Number=SeqID_23117
MAMHLALFLKAGCDRQEDEVPADSASGTDLLLTDCSGDSDTGAEDTVFGTTAAEVDAGSA

SEQ ID NO: 66493 - protein, 744 aa, Zea mays
  Coding DNA Sequence Number=SeqID_23118
  Gene Ontology: Mol. function=binding; Cellular component=nucleus; Biological process=mRNA modification
  Homolog annotation: Hit_ID=A1YKE0; Match level="QueryCoverage=72%, HitCoverage=93%, E-value=0.0, Identity=73%"; Hit description =Putative uncharacterized protein
  Pfam annotation: Domain name=PMSR; Domain location=682-741; Score= -66.9; E_value=0.0092; Accession=PF01625.12; Description=Peptide methionine sulfoxide reductase
  Pfam annotation: Domain name=PPR; Domain location=130-164; Score =38.8; E_value=1.9e-08; Accession=PF01535.11; Description=PPR repeat
  Pfam annotation: Domain name=PPR; Domain location=192-226; Score =27.0; E_value=7.1e-05; Accession=PF01535.11; Description=PPR repeat
  Pfam annotation: Domain name=PPR; Domain location=254-288; Score =34.7; E_value=3.3e-07; Accession=PF01535.11; Description=PPR repeat
  Pfam annotation: Domain name=PPR; Domain location=316-350; Score =37.5; E_value=4.8e-08; Accession=PF01535.11; Description=PPR repeat
  Pfam annotation: Domain name=PPR; Domain location=417-451; Score =34.2; E_value=4.8e-07; Accession=PF01535.11; Description=PPR repeat
  Pfam annotation: Domain name=PPR; Domain location=452-486; Score =23.0; E_value=0.0011; Accession=PF01535.11; Description=PPR repeat
  Pfam annotation: Domain name=PPR; Domain location=488-522; Score =15.2; E_value=0.12; Accession=PF01535.11; Description=PPR repeat
  Pfam annotation: Domain name=TPR_4; Domain location=131-154; Score =2.6; E_value=19; Accession=PF07721.5; Description=Tetratricopeptide repeat
  Pfam annotation: Domain name=TPR_4; Domain location=160-185; Score =4.1; E_value=12; Accession=PF07721.5; Description=Tetratricopeptide repeat
  Pfam annotation: Domain name=TPR_4; Domain location=97-122; Score =11.4; E_value=1.7; Accession=PF07721.5; Description=Tetratricopeptide repeat
  Pfam module annotation: Pfam domain module=PMSR::PPR::PPR::PPR::PPR::P PR::PPR::PPR::TPR_4::TPR_4::TPR_4; Domain location=682-741::130 -164::192-226::254-288::316-350::417-451::452-486::488-522::131 -154::160-185::97-122
MASGLQAYPASGMVGGGPMRSGAMHIEVDQRALRRVRSSPHLRHAVAYVSYGSAAATSAAVGLERAQDPNRLIVDLAAAGRVWDARKLFDGTPERDVVSWTALVSAYARRGMLRDARSLFDRSDARRNVVTWTALLSGYARAGLVDEAEVLFQRMPQRNVVSWNTMLEAYAVAGRAGDACALFDRMPVRDAGSWNILLAMLVRSGSVDKARELFGRMPERDVMAWTTMVDGVARSGNVDEARLLFDSMPERNVVSWNAMISGYTRNHRLDEALDLFTKMPHRDIASCNIMITGFIQNKDLKRARKLFDEMPERNVVTWTTMMNGYLKGKQSELSLGLFRGMLMSGIRPNQVTFLGALDACSDLATLCEGKQVHQMICKTAFQVDTFVGSALMNVYAKCGEVGLARKLFDLSREKDLISWNGIIAAYAHHGVGIEAIHLYEKMQGNGYRPNDVTYVVLLSACSHSGLVDEGLKIFESMVNDRSIAVRDEHYTCLIDLCSRAGRLDDAKRLIHYLKIKPASGSVWSALLGGCNAHGNESIGNLAARNLIQAEPDNAGTYTLLSNIYASAARDKSHSESDLIYGLLQNIHYMMRIVGTVPSDLVHVDEELMMATLPSSKPTSPPAGWSRSSPIPNSRSPADAMAAPSAAVIGVLVLLVVGASGARLPGRGSTTRGAALPRGGAPATAVFALGSFWRSEAAFGCLHGVIRTSVGYAGGSKSNPEYRNLADHAECVKVPFNCSNSLMSS

SEQ ID NO: 66494 - protein, 233 aa, Zea mays
  Coding DNA Sequence Number=SeqID_23119
MARQGRNLFQAGLTLVAPQRAVVLVGDRVTFKNLGIFSSPGLNWVGRSGFLDSHDSTLVMGYQVGLHQLLDVLIFGLFQGFNNNDFTTFQGSYTGLSCGEIHMELTIALLCIFCSGNHLTVVPSLEIILGIQGEQGPQCLAGDDLAVVFESVPSSSDTPFHMVQTGSNVYSHDTLLCAMLNKFTTIILWLAPDSEADCACSQQLGETIFILAKAGLAVNLHLTSERRKGGKHF

SEQ ID NO: 66495 - protein, 124 aa, Zea mays
  Coding DNA Sequence Number=SeqID_23120
MVLNPVYQVKNTIYLMPVAVNHRFETVYHRFGAWLLAGHRFGVVNQLEKLVYRLNEAIYRQLAWLTKGTRKRRPHVGEAGGKPVALTGNFGKQCGLLPVTTGFVKLGPEAKASASVVSAIHSNK

SEQ ID NO: 66496 - protein, 31 aa, Zea mays
  Coding DNA Sequence Number=SeqID_23121
MKLFNLEDDGNLFDQRKYLFGWLTNVEGEAK

SEQ ID NO: 66497 - protein, 320 aa, Zea mays
  Coding DNA Sequence Number=SeqID_23122
MEYGGLGNTTWNHLSIWHIILQHLGLAALAPLVTSYDARILHKIHVPVSDNVSYTDTSWILPDTYHRIRLHTGYLFDLAGGLPVIVVFSSEFNSVKFTARLLVEALQSISALEEVYTLQRHLFCQLKQDISHPCCHLEADVTNTGQTICYRVILQWLFKGSSVLSNQYTSKEDEVLVTSTGNWMDPWAWIPYNSLVTKPALSVHPTLHFVGKKAQRVYSSQFKKFRCSRETPESLPNGWHRQLELSASSAVKLGGPPATASATPIEDMVLFRDCGTDVLADRAFDMGRAWRTTAVGHCDSASLPSALPPFTFRATYLCLL

SEQ ID NO: 66498 - protein, 98 aa, Zea mays
  Coding DNA Sequence Number=SeqID_23123
MSGAPEDSNANSSPSGISGGDSAIIHRTVRCTPDSVRCAKEGKRHQSCGGPCGNFVFQVIEKKKLNRSVDRLREGRVERDPAFVASSMGSRFARTEPQ

SEQ ID NO: 66499 - protein, 230 aa, Zea mays
  Coding DNA Sequence Number=SeqID_23124
  Gene Ontology: Cellular component=chloroplast; Biological process =rRNA processing
  Homolog annotation: Hit_ID=Q5VPH3; Match level="QueryCoverage=56%, HitCoverage=62%, E-value=5e-63, Identity=97%"; Hit description =Ribosome-binding factor A protein-like
  Pfam annotation: Domain name=RBFA; Domain location=44-161; Score =88.7; E_value=1.8e-23; Accession=PF02033.9; Description=Ribosome -binding factor A
  Subcellular localization annotation: CTP_CleavageSite=37; ConfidenceScore=5.67e-01
MFPCRPLAPPHLPRAPSLARLPLSSLRPPSSSLRVVRCMAKERRVRMVAKQIQRELADMLTRDPVLQRAVLPEAALGADRYLSSLTTIADVELSNDLQVCKVYVSVFGDERGKKVAIEGLKAKTKYVRSQIGRRMKLRLTPEIRFIEDESMERGSRILAILDKLKEEREQQEGKDGEEDDDSYISEEDDGDWDADEPDEEDIIYFLVSGPVRAQGCCGKERMSNDKKISC

SEQ ID NO: 66500 - protein, 239 aa, Zea mays
  Coding DNA Sequence Number=SeqID_23125
  Subcellular localization annotation: CTP_CleavageSite=56; ConfidenceScore=5.58e-01
MAHKSQSYAALLLQLPTLGSISSACPLSAQIRRPSSTTPAARSSIPEISSSSLTIAASIRGARIPPTGDSLACGSYTGFTLTVAPSCHRHMDPTLLESSSSSIRCNRMRGGRQESRIKHDLATCASYNLPLHIHRNSNLRISRLPRFPLRGHRPWRIKAKATRPSSCSSPTLGSISSACPLSAQIRRPSSTTPAARSSIPEISSSSLTIAASIGGSAAGEFRACAAIEGKITPLSIGHQ

SEQ ID NO: 66501 - protein, 172 aa, Zea mays
  Coding DNA Sequence Number=SeqID_23126
MGAGTYNPDLQLFLPPISIFCYKIWALIGGLGVAQVTCQPPLAMSYGWHGVDETRGGITLSWSWILCVPPLLRADCDDAAAMARPRLRLRLLFRGQPMSTASSFLVGGRGRLWHHWGAPMAASREICYLGKSNCSPKLSFCAGTAICRGRAFSRLHRWYDRVPAICLFLHIA

SEQ ID NO: 66502 - protein, 178 aa, Zea mays
  Coding DNA Sequence Number=SeqID_23127
MKKWQQELEDKANNISLAEENLKEKGTSLDRRETDLAGREKDLAFREEMLERWGMLLAEHELKVEEKERKLEERIRWFEPTQAAPGPQVTKATKKALEDLQAEHRAGVQRIAEWAGEASTALVPLRISPIPVSELPASIFDALSVLDSTAERLRRLDQILGARLEAEGSRLCRWWIMC

SEQ ID NO: 66503 - protein, 308 aa, Zea mays
  Coding DNA Sequence Number=SeqID_23128
MSFASLVTCEGAVNALSREGCSHYEGFDGSDEDFGREIFKVEDPMVKDAAGALFDRMWGPHGREAVRERADRARDQMARAEDVEDFGRLNSALPGAEVNPVVAEAEVDPAPLPETGEGSHAAPASTVSGGGSSSATVPMAEDPPKVATEPAAEVQDFGPTHAIATANFVAASTVVAGNESDESTSKFSEFDDSGSSIVWTKESSDEGLDYFAALDVAEAEASPCVTDAEVLPGPSVGRRRRRAVAKRRVSELDGGRLRVGRAGRRELLSSPVGASIGEGELRSLFEGEELRIMLFNYREMGIIPKVEP

SEQ ID NO: 66504 - protein, 35 aa, Zea mays
  Coding DNA Sequence Number=SeqID_23129
MGGSGTTTCPEKVIYSKASTVSPDPHGKGLSNAIP

SEQ ID NO: 66505 - protein, 203 aa, Zea mays
  Coding DNA Sequence Number=SeqID_23130
  Homolog annotation: Hit_ID=A3CB05; Match level="QueryCoverage=18%, HitCoverage=8%, E-value=2e-09, Identity=78%"; Hit description=Serine hydroxymethyltransferase
MTPYGKSSTVLQQPAIGTGCSTIYQALEMQDKENVDTNKHLDCLHTNEKDVPQNQSTSDMDPDLFIGEDSAFESYRVLGYSNHTEDPYDYVYQNLPATHHLLRKFTEFTADVLTAKTFHQAVTICLSIQAEHGKILKDFKKGLMKNKDIENLRAEPRRSRSSPLHLRCLDSGCLTRSTQIRLLTLVQTLAPILLQRKENRFSC

SEQ ID NO: 66506 - protein, 281 aa, Zea mays
  Coding DNA Sequence Number=SeqID_23131
  Gene Ontology: Mol. function=transporter activity; Cellular component= mitochondrial inner membrane; Biological process=transport
  Homolog annotation: Hit_ID=Q8LKU9; Match level="QueryCoverage=86%, HitCoverage=92%, E-value=1e-126, Identity=64%"; Hit description =Putative mitochondrial carrier protein
  Pfam annotation: Domain name=Mito_carr; Domain location=110-202; Score=81.4; E_value=3e-21; Accession=PF00153.18; Description =Mitochondrial carrier protein
  Pfam annotation: Domain name=Mito_carr; Domain location=12-99; Score =54.9; E_value=2.7e-13; Accession=PF00153.18; Description =Mitochondrial carrier protein
  Pfam module annotation: Pfam domain module=Mito_carr::Mito_carr; Domain location=110-202::12-99
  Subcellular localization annotation: CTP_CleavageSite=37; ConfidenceScore=5.16e-01
MVVLISSLDKTKLYVVGAGMFSGVTVALYPVSVVKTRMQVASGDAMGRNALATFKNILKVDGVPGLYRGFPTVIIGAVPTRIIFLTALETTKAASLKLVEPFKLSEPVQAAFANGLAGLSASTCSQAIFVPIDVISQKLMVQGYSGNVRYKGGIDVARKVIKADGIRGLYRGFGLSVMTYAPSSAVWWASYGSSQRIIWSALGHLHNKEEAPSQLKIVGVQASGGIFAGAVTSFVTTPIDTIKTRLQLFLLLTNQDQFVMVSVIRLWIMKISQKLGKLLKD

SEQ ID NO: 66507 - protein, 162 aa, Zea mays
  Coding DNA Sequence Number=SeqID_23132
MAPKRTTSKADEAAKAALLAEKKGKALVDTTHQEPCEDDANSKRQRNEQPTTEGSLHTCSSGGQPQLPPGFAPPEGADATEDGEIIGVSAEEQLQLRALRIKNRNLQKQKEILEAKRQRVSAQAKVRQMIRDEEQKAQELEQEIALMQSEGQFGLQHDPPLQ

SEQ ID NO: 66508 - protein, 60 aa, Zea mays
  Coding DNA Sequence Number=SeqID_23133
MAKVFNDWIKDHKDLPVCDIADKVKNKTTQLLIIMDLRLLKHYLHMVIMLVRRRHGTQPG

SEQ ID NO: 66509 - protein, 82 aa, Zea mays
  Coding DNA Sequence Number=SeqID_23134
MARRPSPPSSYGGDDKTIQAKELEARRQAALAVWPVPRSRSLPPTFTRLVIILSSECWRKRRVTSSCGGRSRIPTRSPPPQG

SEQ ID NO: 66510 - protein, 132 aa, Zea mays
  Coding DNA Sequence Number=SeqID_23135
MAYRRARSMRGGGRPKSGEGDLGLPVMFCQVRGLGKLHGLMAKLIEGLAWLGRDWRELATAAEARKAWRGGGAACSGQIPVISGLGKTCRVAAEHGVALLAADYDPRQVLAVVMVAAGPRKLENGLPKRQKS

SEQ ID NO: 66511 - protein, 96 aa, Zea mays
  Coding DNA Sequence Number=SeqID_23136
MGKRRTPVYTDWTSRRSLDAATWQGARDVSQRAEPDVRPLGRAAAAFIANKARRLSIPLADNEDSCTLVLLRNQGEDKKGKGFEQARFGLQKNTNL

SEQ ID NO: 66512 - protein, 282 aa, Zea mays
  Coding DNA Sequence Number=SeqID_23137
  Gene Ontology: Mol. function=nucleoside-triphosphatase activity; Cellular component=protein complex; Biological process=protein catabolic process
  Homolog annotation: Hit_ID=A2X465; Match level="QueryCoverage=96%, HitCoverage=65%, E-value=1e-139, Identity=86%"; Hit description =Putative uncharacterized protein
  Pfam annotation: Domain name=AAA; Domain location=51-252; Score =271.1; E_value=2.2e-78; Accession=PF00004.20; Description=ATPase family associated with various cellular activities (AAA)
  Pfam annotation: Domain name=AAA_2; Domain location=47-179; Score= -21.3; E_value=0.00045; Accession=PF07724.5; Description=ATPase family associated with various
  Pfam annotation: Domain name=AAA_5; Domain location=51-184; Score =15.8; E_value=0.00018; Accession=PF07728.5; Description=ATPase family associated with various
  Pfam module annotation: Pfam domain module=AAA::AAA_2::AAA_5; Domain location=51-252::47-179::51-184
MAEDRTDSWPPAISRDIGGCDIQKQEIREAVELPLTHHELYKQIGIDPPRGVLLYGPPGTGKTMLAKAVAHHTTAAFIRVVGSEFVQKYLGEGPRMVRDVFRLAKENAPAIIFIDEVDAIATARFDAQTGADREVQRILMELLNQMDGFDQTVNVKVIMATNRADTLDPALLRPGRLDRKIEFPLPDRRQKRLVFQVCTAKMNLSDEVDLEDYVSRPDKISAADIIEFKCGVKDYRFKIAAICQEAGMHAVRKNRYVILPKDFEKGYRTNVKKPETDFDFYK

SEQ ID NO: 66513 - protein, 101 aa, Zea mays
  Coding DNA Sequence Number=SeqID_23138
  Homolog annotation: Hit_ID=Q8SAB2; Match level="QueryCoverage=61%, HitCoverage=13%, E-value=6e-07, Identity=41%"; Hit description =Putative gypsy-type retrotransposon RIRE2 protein
MDAFPTCSLTQSRLEDLERKGFLHLKLIFGWQLEKGGGAPAPHEGEVVVLASFYECGLRLPVHPFMRGLLLQVAASESPPKHHPSHSVLHHAMRGLSQHGP

SEQ ID NO: 66514 - protein, 118 aa, Zea mays
  Coding DNA Sequence Number=SeqID_23139
MTRGRTVGAGHGRGAGRGLESGRWARRASGLRGVLGATGLGVWEVGAASGAGEAGVDAAAARCAGHLGGAVASGPPGSAGGVTAGNLYKRAEILLGEILIFFGALGLSGLFRDFAKPF

SEQ ID NO: 66515 - protein, 129 aa, Zea mays
  Coding DNA Sequence Number=SeqID_23140
MRASSCTFGTWRGVCLRSQAASQWRRPHRNGVGDSDCHSTVNLMKEEVVARVLAIIANVTLDFMNDSGPLSFNQARLSNLGLGNIMVSLPPLPEDDDIKVKKKREVEEAAVAAHKKCRHKRKRRRSRHV

SEQ ID NO: 66516 - protein, 278 aa, Zea mays
  Coding DNA Sequence Number=SeqID_23141
MELATSTMPTETLEGTSGAVGPSSTPTALAVREGCGERCDILAPGMRVRVGQDDEGCDPRSEGRRIGLPSSRPTDIYWGDPPGRPSRLVRGRGVHYSRCGHIINLGRPRGTEVPITDVPPPGVWASSPDLEVIPVDTIVAAGAPLTADMAVASLPPPLALLPLGVAVATGVSGAAALATATAEPLAPLLPPLVVSSSSPVVVLSVLAAPRRDLENLPPFILEGSEGEEMEAEEWHLIKAASDRAYKSLEVVECFLRNFGEAVSIFRTSMKWDIIPMAR

SEQ ID NO: 66517 - protein, 210 aa, Zea mays
  Coding DNA Sequence Number=SeqID_23142
MTSISKGETVLMPGVPRRPAIATRREEPTRDGEDRVPHTESQNGGDDELRRQRHSADPMAKYRTQEGRASQREGMVCTGASGVPSRDLLQVMRRGSTARELEPEQRGMADGAAFRWQSKGAAGLFIPSQARDSRSDSCRRDLHQQIPLMHATSQEEDDGGCCDFIAPGKLSGGGFWVLGSVSNQSANRDTHTNWRRGREGYGGIGNLPPR

SEQ ID NO: 66518 - protein, 263 aa, Zea mays
  Coding DNA Sequence Number=SeqID_23143
  Gene Ontology: Mol. function=transcription regulator activity; Cellular component=nucleus; Biological process=regulation of transcription
  Homolog annotation: Hit_ID=A7QDV9; Match level="QueryCoverage=38%, HitCoverage=13%, E-value=1e-22, Identity=57%"; Hit description =Chromosome chr4 scaffold_83, whole genome shotgun sequence
MDVVEPPVTARPPAQRTPGRDPASAGNSGAGATADAAARSEGATPPEARPPPFARFFRYPQYAWRHAVAREDGVVAVEDEASCASAVANVEVGLVVDAHASLRVMAPRRPRQLLRLVAGVQALGLAVLHLNVATAPDATTLYTLSRQQWRSTHSSASFPGSAQERLDFLYESGLAVGKSSDGFQALQQSAPGAAAASTSAQESAADSSKAATPGALFEDKPQSANDTWRKLHSDPLLLIRQRGQDAISRIKNNPIKMAEIKKS

SEQ ID NO: 66519 - protein, 1061 aa, Zea mays
  Coding DNA Sequence Number=SeqID_23144
  Gene Ontology: Mol. function=ATPase activity, coupled to transmembrane movement of substances; Cellular component=integral to membrane; Biological process=transport
  Homolog annotation: Hit_ID=Q7FMW2; Match level="QueryCoverage=98%, HitCoverage=96%, E-value=0.0, Identity=57%"; Hit description=MDR -like ABC transporter
  Pfam annotation: Domain name=ABC_membrane; Domain location=495-773; Score=164.3; E_value=3.3e-46; Accession=PF00664.14; Description=ABC transporter transmembrane region
  Pfam annotation: Domain name=ABC_tran; Domain location=203-387; Score= 203.6; E_value=4.6e-58; Accession=PF00005.18; Description=ABC transporter
  Pfam annotation: Domain name=ABC_tran; Domain location=845-1031; Score=227.9; E_value=2.3e-65; Accession=PF00005.18; Description=ABC transporter
  Pfam module annotation: Pfam domain module=ABC_membrane::ABC _tran::ABC_tran; Domain location=495-773::203-387::845-1031
MATGEDEKAAGRVALHRLFVFADRTDAALMAVGAVAAVANGMVQPIMAFIFGDVIDAFGSGATDGVVRRVVQVSCWTIAGERQAARIRAMYLKAILRQDIAFFDMEMSAGQAVERMAGDTFLIQDAIGEKATRSVTAFAEGQGAAHRMFKIIERKPDIDIDDNTGIILEDVKGDVQLKDVYFSYPTRPEHLIFDGFSLQVQSGTTMALVGDSGSGKSTVISLVERFYDPQAGEVLIDGVDIRGMKLGWMRGKIGLVNQEPVLFSTTIRENIAYGTEKPTLEDINRAIQLANAAIFIDKLPNGLDTMVGEHGTQLSGGQKQRIAIARAIIKNPKILLLDEATSALDMESERVVQEALVRIMVERTTIVVAHRLSTVRNADVISVLQHGKMVEQGSHVDLMKLPGGAYTQLIRLHETQQEAEDVHPDMEISRRSTSKGSSSFGQSIPAPLGSPDPTEVSGAPDTEEGATDRVKVGRSQKKASIARLFKLNKPETLVLALGSIAAVAHGTIFPIYGTLISTAIKVFYEPPQELLKGSRFWAGMFALLGACAFVLIPVQYFLFGLAGGKLVERVRSMTFRSIMRQEISWFDKPEHSSGSICARLSTDALNVKRLVGDNLALNVQTASTIMSGFTIAMVANWKLALVITVVIPFVAFQAYAQMLFLKGLNRNAKLRYEEASQVATDAVGGIRTVASFCAESKVMDAYENKCESPRRQGMKEGVVGGLGFGFSFVVFYLTYALCFYVGARFVHQGTATFPEVFRVFFVLALATSGVSQTSAAGADSAKANDSAVSIFAILDRESKIDYSSEEGVTIASVRGDVDFQKVCFKYPLRPNVQIFKDFSLRIPSGKTVALVGESGSGKSTVIALLERFYDPESGKIFIDGVELGTLKVSWLRQQAGLVAQEPVLFNDTIRANIAYGKQGGVVSEEEVVAAAEAANAHGFIAALPDGYDTVVGERGSRLSGGQKQRVAIARAVVKDPRLLLLDEATSALDVESERVVQEALDRVMVGRTTVVVAHRLSTIRGADVIAVLKDGAVLEKGRHEELMQVKDGAYASLLELSSSSA

SEQ ID NO: 66520 - protein, 177 aa, Zea mays
  Coding DNA Sequence Number=SeqID_23145
MGAHAHASCDRRAGRYVQATTPPLAPLPCLLDCGTSTAGGSSGHVVGQAYVPSWGSERTLSHGVKTEKRATLRLRHNDRVKKGNRLRASLLIRGSKAGPSEGFNNRLRARGLHTHYWLALERFTAASDTERGMTKAPEDDELRSVRPQGSDSGSAPEDDELRSARPQGSDSGSAPED

SEQ ID NO: 66521 - protein, 37 aa, Zea mays
  Coding DNA Sequence Number=SeqID_23146
MALVDLVVKTQGLFLSVEEPQAFNKQGKWTSPSAYSV

SEQ ID NO: 66522 - protein, 251 aa, Zea mays
  Coding DNA Sequence Number=SeqID_23147
  Gene Ontology: Mol. function=transcription regulator activity; Cellular component=nucleus; Biological process=transcription
  Homolog annotation: Hit_ID=Q10C08; Match level="QueryCoverage=24%, HitCoverage=18%, E-value=2e-13, Identity=66%"; Hit description =Targeting protein for Xklp2 containing protein, expressed
  Pfam annotation: Domain name=TPX2; Domain location=8-52; Score=45.8; E_value=1.5e-10; Accession=PF06886.2; Description=Targeting protein for Xklp2 (TPX2)
DSVVITQFYTKLEEKHKALEVEKDEAEARKKEDHDVALKQLRKSLVIRAKPMPCFYQEGPLPNAELKKEEHDVALKQLRKSLVIRAKPMPSFYQEGPLPNAELKKVVQVRTVQKIPVATLSSSKFLTGKPGDTDAEAKLNPGVSTLSNSQHVHLNRIRYFLFCSLYIYYSHMKNLKVVQVRTVQKIPVATLSSSKFLTGKPGDTDAGAKLNPGVSTLSNSQHVQPTNVTTNLKDQPCKSTGGTGPKLLTVK

SEQ ID NO: 66523 - protein, 232 aa, Zea mays
  Coding DNA Sequence Number=SeqID_23148
PTSPWGTTFLHDICSSDDHEDDMLVCAAATTPFASSPKSPPRPFSTAIKYVSTPQIRYTCVCLILQHLDSPENKSAMWEFSGANMKKSPVAVVAVASATTAYAVITTTDEKPRDIVVTDDFDIKRTQPTSNSKKIVAETDVLTGQNAGNPISTKLQRPDGRDSGQGSVHSRDTVSPRPSPASGKGSRHRRIHVSPEGPLKQRTHLRLARGPGFAEKQPWPDRHANRPYRRSI

SEQ ID NO: 66524 - protein, 56 aa, Zea mays
  Coding DNA Sequence Number=SeqID_23149
MADASYARVACSYETRRRRRLASARGNRVLPMQGKPMILITTLFRLCLGKSDEKDN

SEQ ID NO: 66525 - protein, 50 aa, Zea mays
  Coding DNA Sequence Number=SeqID_23150
MAARPGQAATTGAHFFQRLWFFLAPGLCFSSSKLLRSIISLQVWCLLKIN

SEQ ID NO: 66526 - protein, 697 aa, Zea mays
  Coding DNA Sequence Number=SeqID_23151
MSSPELRESSARMLKVTGGCWPRNVPIPRAASGDVFTSRLVRKWRVFPYGRNIAAVVSAVMDKDRQGAAQKRQAAIRIVEARPKRQKRESAKAAAPGGGKPPLAAKSGVPASSKAPEAAAGAGGSKPAKAVPPLSGVAEAAKAARALPSAGKRVADFATNICVEDYLGGKSLGWTRASLLWLRPAAAIATAGIVPKARGEALGSGGEVSALAVVRDEAGAATRRLKGVTEALSQATEALSQVADFASRAASEALTAAVSAEVERLRTQHADAVREKSASDSKCRKLTDKVAVLEKEKADLRRQLAAERREANEAIAKEQAAQAEAKLARAEGNLAKELAEHLQERLTALESRAKGAEAVVRAEAERTRTQLMDTYRELGARTGDFEVPDREPGLRCLQWVQEELQELPAVVGGFMSYASLVTCEGTMNALSREGCRHFEADEDFDRDVYKVEDLVVKDSAGALYDRMWGPHGREVVRERAETAMAQALRGERVDDLGALNSALPDPEPTPAEAASGVALEPTPETAAIATVAPTSATAGENLPPKVAEGAPDAPAAAVPSAEDPAAEMAKTTAGAAAEPAAEAPAASGPSQVQDFGPAHATATAKFWAASAAEGSNECGGSGSEFSEFFDLADSGSSVEWTEESSEEDLDYFAALDVAAAETSPHAADAQDGWSAGTVVFAGCREYRGRGTAESFCG

SEQ ID NO: 66527 - protein, 377 aa, Zea mays
  Coding DNA Sequence Number=SeqID_23152
  Homolog annotation: Hit_ID=Q6JAD6; Match level="QueryCoverage=92%, HitCoverage=69%, E-value=2e-47, Identity=67%"; Hit description =Putative uncharacterized protein
VRMLRTKNVSAPGGGDDEDPRRPFRQVKGKTVYLEQQEGRKKRRMDRAARAAAVAAAAAEQAELGDQPQTPSDQIAYRVRRLASQSRSSTTTTASASTPPPTLPALVTPIAPSTTSTTPASTAPPLALVSAPPIPPARYRERDETERDPAAVDLFSTRIQESFFRAQIFASSLDFTSRRLDFTAYAMAPLTLLVALTTVWLRLMRQILLSRMGYREATTHIQLWLLGALVSHSEFDVVDYLICEIEDTILDGLRARRQLPYAHYLCHIFAQLIRPPQFQGTLEASRLVFGSYRPAPEAPVPASAPVFDTRAEDTALHQFEAQDAAVDDDDDFGIPPPPPPPMPPRSHDHEAGSSSATPAAPPAIDPALASILQTLSQ

SEQ ID NO: 66528 - protein, 165 aa, Zea mays
  Coding DNA Sequence Number=SeqID_23153
MLSMFHTIQDRQDSLQQQLLQDRAESRAFMTLMLQHSGVSILLVQSAPPPPIQAPVVPAILPIVGPSSSTLRPVTLAFTSPVLSSVCPQPPVPPASVVPTTAVVVSVTTSVLAASAAQPQSESVPAPASTADPGSETDSDPQLAFALLPRPRQDAPPSPPPASDV

SEQ ID NO: 66529 - protein, 196 aa, Zea mays
  Coding DNA Sequence Number=SeqID_23154
  Gene Ontology: Mol. function=zinc ion binding; Cellular component =intracellular
  Homolog annotation: Hit_ID=Q10L76; Match level="QueryCoverage=32%, HitCoverage=29%, E-value=1e-26, Identity=79%"; Hit description=TRAF -type zinc finger, putative, expressed
  Pfam annotation: Domain name=zf-TRAF; Domain location=10-62; Score =25.0; E_value=9.6e-05; Accession=PF02176.9; Description=TRAF-type zinc finger
MIPRKLMDEHYDENHAPINCSLCKETIERESWDLHKGEKCPQRIVACEYCEFELPAVDLHEHQLRSTSCRLERSVWFDCCELHETLIKSIYLCRTRLWLGFTPVTMFSGEVTPYMCTAWPWPQATNWCKGDGPETGRPFCWTYDSLVQRLTRQKLLLPRQQAKIGCDDEPPWPWHEGCSLHVMLYCYDCLSVETGP

SEQ ID NO: 66530 - protein, 45 aa, Zea mays
  Coding DNA Sequence Number=SeqID_23155
MALSVFPLPPSPLSLSLSLSLSLPRPDVVNRIVMGYLSSGNGYRL

SEQ ID NO: 66531 - protein, 697 aa, Zea mays
  Coding DNA Sequence Number=SeqID_23156
  Gene Ontology: Cellular component=intracellular; Biological process =signal transduction
  Homolog annotation: Hit_ID=Q10L77; Match level="QueryCoverage=92%, HitCoverage=73%, E-value=0.0, Identity=71%"; Hit description =Pleckstriny domain-containing protein, putative, expressed
  Pfam annotation: Domain name=RhoGAP; Domain location=43-161; Score =60.9; E_value=4.3e-15; Accession=PF00620.18; Description=RhoGAP domain
MESDKEEQQCCMREGYMDLVFGAALKGECRNIGGGTGRHRVKYDYGIMGVDGLGRTEFSADEDAHVVGDCVKHVLRELPSSPVPASCCTALLEAFRLETKDARINAMRSAISETFPEPNRRLLQRILKMMHTVASHTSENRMTASAVAACMAPLLLRPLLAGECEMDEVFDMDGDDSAQLLAAANAANSAQGIVATLLEEYEGIFHDEHLRCSLSPESQIEDSENDVDQEMDDDNGVERILSGKLSESSGYAGSDLYDYKAVNAEESDAERPVKMLEGNLNLSKVQNSLSTENGSANVDSLLSENNPSNPTVGHETLSMGEILSSFDPGISVPTHSPEYSVERQTNKTNGSHPHVKRSNFWGRNNARKGQNSESVDSSGEEELAIQRLEIAKNDLQNRIAKEVGEECIYVFINLDLVVSFSLIVYSPLSLEHVIQTLKSFYYELATDCLGDVMIEVSRLQEQLQAERDLRAALEVGLSMSSGQFSSARSMDVKTKAELEEIALAEADVARLKQKVAELHLQLNQQRQHQYGSVVDANDRHHRLPGHFSQQNFVQQGFDMNLAFCNQEKQRNEESSVESSQWRNIKQHVLPYGSSRPLTRKLSFDASSSESRGTEPSTSMSTENTSVSINVPKLAEGIEFGRQPMVTSSTLVELTTRLDFFKERRSQLMEQLHSLDLGRGSAPQGFPFKPPSPWNHPR

SEQ ID NO: 66532 - protein, 131 aa, Zea mays
  Coding DNA Sequence Number=SeqID_23157
  Gene Ontology: Mol. function=phosphatidylinositol phosphate kinase activity; Cellular component=plasma membrane; Biological process =phosphatidylinositol metabolic process
  Homolog annotation: Hit_ID=A3AI25; Match level="QueryCoverage=94%, HitCoverage=34%, E-value=6e-58, Identity=85%"; Hit description =Putative uncharacterized protein
  Pfam annotation: Domain name=PIP5K; Domain location=2-124; Score= -86.4; E_value=1.2e-05; Accession=PF01504.9; Description =Phosphatidylinositol-4-phosphate 5-Kinase
CCRINELLEGSFDSDCSRGSSPHLSRGDTDPNRLAKIKLGSNMPTRAERTIRKGDCEVQIMGEPTGELYDVILYFGIIDILQDYDISKKLEHAYKSFQYDPTSISAVDPKQYSRRFRDFVFKAFQEDRFDL

SEQ ID NO: 66533 - protein, 175 aa, Zea mays
  Coding DNA Sequence Number=SeqID_23158
MADLEVGSIWSEDVGRGLPAGRWRSFAAGLPPVSSGRAVEVGGRGVLRSRQGEEAARLTQLLGGLTEREREEGEGLTGEGEDGGASDLGSAEGRKRREGRYGGAVLARTPVKGRRTERCQTFLCGEETAVKDGGEGTAGASYAGEDDEAADRWGRSASGSERVRESGWQVGLACQ

SEQ ID NO: 66534 - protein, 145 aa, Zea mays
  Coding DNA Sequence Number=SeqID_23159
MNKNTGIQGAITNGTPVPPPQVRTTPLHGGGPAEQQKTDERLAAARSDYGDNHPRPGRRSTFGSGFGAGVTTGGPSPAEDENQPFRPGDGDPGLLAELAISSVEKPPPAADASKRAGRSSPWSEPPRAWAPPSRDAAQPSSGRRA

SEQ ID NO: 66535 - protein, 934 aa, Zea mays
  Coding DNA Sequence Number=SeqID_23160
  Gene Ontology: Mol. function=phosphatidylinositol phosphate kinase activity; Cellular component=plasma membrane; Biological process =phosphatidylinositol metabolic process
  Homolog annotation: Hit_ID=Q10L79; Match level="QueryCoverage=63%, HitCoverage=94%, E-value=0.0, Identity=64%"; Hit description =Phosphatidylinositol-4-phosphate 5-kinase 4, putative, expressed
  Pfam annotation: Domain name=MORN; Domain location=157-179; Score =30.1; E_value=8.2e-06; Accession=PF02493.11; Description=MORN repeat
  Pfam annotation: Domain name=MORN; Domain location=180-202; Score =35.4; E_value=2.1e-07; Accession=PF02493.11; Description=MORN repeat
  Pfam annotation: Domain name=MORN; Domain location=203-225; Score =34.0; E_value=5.6e-07; Accession=PF02493.11; Description=MORN repeat
  Pfam annotation: Domain name=MORN; Domain location=226-248; Score =20.8; E_value=0.0053; Accession=PF02493.11; Description=MORN repeat
  Pfam annotation: Domain name=MORN; Domain location=249-271; Score =33.5; E_value=7.9e-07; Accession=PF02493.11; Description=MORN repeat
  Pfam annotation: Domain name=MORN; Domain location=272-294; Score =38.2; E_value=2.9e-08; Accession=PF02493.11; Description=MORN repeat
  Pfam annotation: Domain name=MORN; Domain location=295-317; Score =29.7; E_value=1.1e-05; Accession=PF02493.11; Description=MORN repeat
  Pfam annotation: Domain name=PIP5K; Domain location=495-723; Score =213.5; E_value=4.9e-61; Accession=PF01504.9; Description =Phosphatidylinositol-4-phosphate 5-Kinase
  Pfam module annotation: Pfam domain module=MORN::MORN::MORN::MORN::MOR N::MORN::MORN::PIP5K; Domain location=157-179::180-202::203-225::226 -248::249-271::272-294::295-317::495-723
MSYDKSNRSGDDRKYEGARIENLKNHGENRKHEGTSLHVPPSLPSSTPDPPTFPPWKWAASRSPHTDNAAAPRAGARAPALLGSSRDPAPRRREPRPLPGGARATQCASAPGTRPGCHRCRRPRVGEDPEADAAPSCSGSADEADPHEQVLPNGDIYTGQWRGAVPHGAGKYLWADGCMYEGEWRRGKATGRGRFSWPSGATYEGEFLDGFMHGAGTYVGASGDTYRGVWAKNLEHGAGEKRYANGDCYDGEWRAGLPDGCGRYAWRDGTEYAGGWRAGLIHGRGTLVWANGNRYDGGWEGGRPRGQGTFRWADGSLYVGFWGREAPSGAVHQKGVYYPSPAAMGNSPRARDPREVFARDLPECVRSGTEAQSALTSLRSLKWLMRSVSGRGSSSSGWSNGSGGSLVHFWGSDGEVKCDLGDDWRRRSVREGRGLPPPSPALVPYLPNGAPLRLSKKQGVTIAKGHKNYELMLNLQLGIRTLRKLFKVDPADYMLSLCGDDALRELSSPGKSGSFFYLTNDDRYMIKTMKKGEVKMLLRMLQAYYNHVRAFEDTLVTKFFGLHCVKSGSHQKKKQWYQEFQRQVDKDCEFLEQEKIMDYSLLVGVHFRGAIDIDGDKPATPRVSRWDRDHFRSDPNRWSKIKLGANMLSRAELTIRKNDSDVFGEPTGEYCDVILYFGIIDILQDYDIGKRLEHAYKSFQYDSTSISAVDPKQNSAASLGKGVRVIGVAGAPGGPTVSRKQIGRHLLGSFWPPEAEAGAKRPTRRSSAVVNPSRRRRSVSSPHRGFALRGRSLLPVAKEPLPPSSLSQCNQADSIADKAIGRMQEIADKIYSVARETIRLGRGLTSFDATKLRVALKDIAFMMEQDSLVFQKYLDKVNNVTHQPDSNYEPSELSSPPPGEDNLSPDWDFAEHFERFWGIEYDSDQMPSFSDNEV

SEQ ID NO: 66536 - protein, 63 aa, Zea mays
  Coding DNA Sequence Number=SeqID_23161
MALKPTNDGSQYVEEKMQENVARTRAKPRKTANSAPPDPGLGLGLSPGRRRTPLRPTQGSDSG

SEQ ID NO: 66537 - protein, 62 aa, Zea mays
  Coding DNA Sequence Number=SeqID_23162
MATCTHRCDRSIKRYVKKERIYAGRCAKNGRRYVKREGRNSNKHHCLRHHHQFYRGTSIGSS

SEQ ID NO: 66538 - protein, 54 aa, Zea mays
  Coding DNA Sequence Number=SeqID_23163
MQATCNRAKWTHFSDSRHASMEAQAHASRKRDRERGIPRKGSFPVKEPGSEPPY

SEQ ID NO: 66539 - protein, 570 aa, Zea mays
  Coding DNA Sequence Number=SeqID_23164
  Gene Ontology: Mol. function=DNA binding; Cellular component=nucleus; Biological process=embryonic development ending in seed dormancy
  Homolog annotation: Hit_ID=Q2L3A9; Match level="QueryCoverage=93%, HitCoverage=93%, E-value=0.0, Identity=69%"; Hit description=Jumonji family protein
  Pfam annotation: Domain name=JmjC; Domain location=269-398; Score =182.5; E_value=1.1e-51; Accession=PF02373.13; Description=JmjC domain
  Pfam annotation: Domain name=JmjN; Domain location=46-90; Score=94.7; E_value=2.8e-25; Accession=PF02375.8; Description=jmjN domain
  Pfam annotation: Domain name=zf-C5HC2; Domain location=500-553; Score= 85.4; E_value=1.9e-22; Accession=PF02928.7; Description=C5HC2 zinc finger
  Pfam module annotation: Pfam domain module=JmjC::JmjN::zf-C5HC2; Domain location=269-398::46-90::500-553
MKKKKRMRRGPVASPGPSAVTVAVASQTCGKWRPDESQRPEIDDAPVFAPTEEEFKDPIGYIASIRPQAERYGICRIIPPSSWRPPCPLKEKSFWETAEFNTRVQQVDKLQNREPTKKTTQSQVQRKRKRRKRLRFGMTRRRPGSSVGSEEKFGFQSGSDFTLAEFQEYANGFKQEYFGMKGSDEISISSIRNRIKIWEPSVEEIEGEYWRIVVGSTDEVEVDYGADLDTATFGSGFATLSSLDGNKQDPYGSVTSFEDEDIPGVVVPWLYVGMCFSSFCWRILIYPFYITSLQHVEDHFLYSLNYMHFGEPKVWYGVPSGEAVKLEESMRKNLPKLFEEQPDLLHELVTQLSPSVLKSEGLSVYRAVQKSGEFVLTLPRAYHCGFNCGFNCAEAVNVSPVDWLPHGQCAVELYREQRRKTSISHDKLLLKAAKEAARQLWMNHRGGKVEYRWMNTCGKDGVLTSAIKTRVKMEGAAWEVNAHLESKRMDEDYDSTDRECFSCFYDLHLSAVSCQCRPNRFACLNHTNLLCSCGMDRKTVFFRYSMEELDTLVAALEGDPAAFYWWGHNH

SEQ ID NO: 66540 - protein, 105 aa, Zea mays
  Coding DNA Sequence Number=SeqID_23165
  Homolog annotation: Hit_ID=O48967; Match level="QueryCoverage=99%, HitCoverage=22%, E-value=7e-24, Identity=58%"; Hit description =Putative uncharacterized protein
MVHIVEHHDFIPKDFMVEEVAASSTPRATNLPAPGAAAVHSARQHTPAQTSRASRAAPGALSAARELLCHPPSSTASPGAMKQWRDDVDRLLGMAHSGSTRPRPL

SEQ ID NO: 66541 - protein, 475 aa, Zea mays
  Coding DNA Sequence Number=SeqID_23166
  Gene Ontology: Mol. function=oxidoreductase activity; Cellular component=intrinsic to endoplasmic reticulum membrane; Biological process=electron transport
  Homolog annotation: Hit_ID=A2YHH5; Match level="QueryCoverage=87%, HitCoverage=91%, E-value=1e-141, Identity=59%"; Hit description =Putative uncharacterized protein
  Pfam annotation: Domain name=DAO; Domain location=15-350; Score= -26.6; E_value=0.00061; Accession=PF01266.15; Description=FAD dependent oxidoreductase
  Pfam annotation: Domain name=FMO-like; Domain location=13-422; Score=- 225.3; E_value=1.2e-15; Accession=PF00743.10; Description=Flavin -binding monooxygenase-like
  Pfam annotation: Domain name=Pyr_redox_2; Domain location=15-286; Score=-15.5; E_value=0.00035; Accession=PF07992.5; Description =Pyridine nucleotide-disulphide oxidore
  Pfam module annotation: Pfam domain module=DAO::FMO-like::Pyr_redox _2; Domain location=15-350::13-422::15-286
MASSTEEELEMNKKKVCVVGAGVSGLVSARELRREGHDVTVMEQSGGVGGQWLYDPRTDASDPLGAAGVHSSVYASLRLTSPRDIMGFSDFPFFPRSNDDGDSRRYPGHAEFLRYIRDYCDTFGLMDAVRLNTKVLHVGRPLLDDDGVVTRWTVRYCSSGHGVSEHEAVAEEEFDAVVVASGHYSQPRLPAINGMDKWTRRQLHSHSYRVPDSFHAEVVVLVGFHQSGVDIALELCKVARDVHVVSVKSLEGLTPGIECLCEDGKVMFADGSCVVADSIIYCTGYDFSFPFLDTGGLVTVDDNRVGPLFEHTFPPALAPSLSFVGVPSQVQTPLFYEVQARWVAQALSGRRLLPPAEEMLRAAEEYHRAREKAGVPRRMSHAIFFDFDYCDEFGEKHVGLPRPPEWKKELMRAAVARLLQDTETFRDDYRDGDLVLESLRLEGWSSAPSPGTLNDKENGIAMHDMMHDRDGETLE

SEQ ID NO: 66542 - protein, 277 aa, Zea mays
  Coding DNA Sequence Number=SeqID_23167
MLLVHWLKRHRPDLARAEDRPVLGRAGSPGEGDYRASSPSAPKVVPPLPPAAGAETASPSSHAPAGGSAAAATTSSGIAAAEGVPAAPTAAAAPTTVTLSSTPSASAEEAPTAPAPAIEVNAGGASSSVPPPTPEETEVIFGRRLRSSAEPEAAPIPLPRVLSRAHQALHETEAAILREWESLGAEHQRLSNCRTQLEERTKAASCQFTFERSKLERDRKDYKKDLQKVYARELEVAQKEKRLAKKEEHLDHREEVVTELQAKLGAFNKILEEQRVQ

SEQ ID NO: 66543 - protein, 348 aa, Zea mays
  Coding DNA Sequence Number=SeqID_23168
  Subcellular localization annotation: CTP_CleavageSite=37; ConfidenceScore=5.57e-01
MASSASSALVHRALTGSDVGQLAVVPTLVAATSPTVVVGAKGAPRDPWSTFCASGKISSTAAAKDVAGSVSQQLRQASQQLKHATQTEAKLAWAEGSLARQRTEELEARLNSLRNRVDKAEASTRAEVERTHAQFVDAYRELGARTAVFEALCQEVGLRFMEWLQEELGVLPTIVTGLMSFASLVTCEGAVNALSSEGCGHFELFDQSDENFEREIFQVEDLVLKQSAGALFDRMWGPHGRETVRERSDRAMDKMAHAEEVEDLGNMDSTLPMTSGVEVASPSDAGEGPSTAPSLTASAGAGEDSALAPGQTGGNTSKAMAKPAVEDPRDGGRAFAGSDVWACASNRC

SEQ ID NO: 66544 - protein, 199 aa, Zea mays
  Coding DNA Sequence Number=SeqID_23169
  Gene Ontology: Mol. function=nucleic acid binding
  Homolog annotation: Hit_ID=Q7XBD1; Match level="QueryCoverage=82%, HitCoverage=43%, E-value=4e-10, Identity=26%"; Hit description =Putative retrotransposon protein
  Pfam annotation: Domain name=Transposase_28; Domain location=1-154; Score=-52.4; E_value=0.0093; Accession=PF04195.3; Description =Putative gypsy type transposon
MSSSSSSAANTPLGESSSEDTMSDLAAVELHPGHTVEFDVSRISSVLQRYDVQIHQLTPNAVVALAKYVWAVTSYGGQPSVEVFAKNYCLHWQKRKIGSKIAQFGSCTFTSRTRKTSAEVVELVPYARNKWGNWYDYWFYVAGGEVEDLPGLSAAMMCSHCYVAFPPFEVAEDDRDEVALRCATRMSSWHSLVEEFICY

SEQ ID NO: 66545 - protein, 115 aa, Zea mays
  Coding DNA Sequence Number=SeqID_23170
MPSLGKQQVRSPAFALDLRGRDPAAFVREVEDRAVRIVGRYVPRTEALRSRDICGSNVRLNRFFELNRLPYDGYPGDDAAVAVDRRGKKPVAVAEEGPSQEAAPDTKKRKIVKVA

SEQ ID NO: 66546 - protein, 73 aa, Zea mays
  Coding DNA Sequence Number=SeqID_23171
METMEMTVKGVMKEHDDLLKWWLKVETRVQKMTEAMKTLQSTIDRLPLKQKVEEPLIEFKDASTFAHVEVSPM

SEQ ID NO: 66547 - protein, 99 aa, Zea mays
  Coding DNA Sequence Number=SeqID_23172
MAPKRASSKAAPSIDEAGKATLLAEKKGKALADNTHQEACEDDTLSKRQRNDQPTPEGTLRTCSSGGQPHEPPLGFAPLEGEDATEDGEVIDISAEEQL

SEQ ID NO: 66548 - protein, 136 aa, Zea mays
  Coding DNA Sequence Number=SeqID_23173
  Subcellular localization annotation: CTP_CleavageSite=72; ConfidenceScore=5.51e-01
MARTRAYKAPPGVDYTLPRTLKPHRSSAHRRLPVRDMSAASRTTATVDRPAQPFPTLSNPLRRVCTPSEAPRARNRSLLRRRGQSTVAGVRNPAGVKKNRKGDLNNEPEGTPIFVKDNLEKPYKNNPKVKTPQPLG

SEQ ID NO: 66549 - protein, 41 aa, Zea mays
  Coding DNA Sequence Number=SeqID_23174
MVDTSAITARRQPGSVGHYIPRRYLLDLVDGVTWPSSLPPG

SEQ ID NO: 66550 - protein, 244 aa, Zea mays
  Coding DNA Sequence Number=SeqID_23175
MALMGSTSEKMYLCQIFKDPLLVSIFANRVLILDKPYLDSQKASISLRVFYFDSILVSPMCCNICMTGETLLGKLALRHEDSSSGSNDPIGDLEAQVEQLGTKLRHRNNVWVEDAQRINELRTDIRHLQDELAERDLALDWAVNSRSIAWDREARARARVEELSTVVDNLQVYCNTLHEEVHELYSHLHPDVPADPVEMGAGPSGTAGEALGGELDLFKPPPSMNLADEWTPTLDNEAAKDDKY

SEQ ID NO: 66551 - protein, 53 aa, Zea mays
  Coding DNA Sequence Number=SeqID_23176
MASSFEVEILPLASPSEARANLTEGGDGAEGGDEAEENEVYEQLENILRVKET

SEQ ID NO: 66552 - protein, 108 aa, Zea mays
  Coding DNA Sequence Number=SeqID_23177
MAARQLGVVQRQDRDWGCSPGNPEFESATVIEATTVDLGYQGDLGSMEQCWNAKAAFCARHHGVLVGHWLDSSCTLRKRHWRWNERLRNDIRAVPMRVDVGDDARLRL

SEQ ID NO: 66553 - protein, 151 aa, Zea mays
  Coding DNA Sequence Number=SeqID_23178
  Homolog annotation: Hit_ID=Q6QP51; Match level="QueryCoverage=47%, HitCoverage=30%, E-value=9e-14, Identity=54%"; Hit description =Putative growth-regulating factor 1
  Subcellular localization annotation: CTP_CleavageSite=20; ConfidenceScore=5.28e-01
MALSPLLLAERRRRRRSPPRSTSGLGPRLGLGRRSPPRPTSGLGPRLGLGRWSPPRPTPGLGLNPDLRARPPPRPRKEVSASPDLRARPPPRPRKVVSTSPDPRSRPQPGPQKESRPHPTPASASGGVSASPDLGLGLSTPQGVHHYPTPS

SEQ ID NO: 66554 - protein, 157 aa, Zea mays
  Coding DNA Sequence Number=SeqID_23179
MLIRFAAIFSLLSIDRFLHRGEEAQPRSSEASGDLTSSEQQQENNIVRPTLATVPTTRVKLTTAGLDLPRVQPRAQQGAPPRPTLGLGEGLRLARPQASASGEGPCLARPRASATASASGGVTSSPDPNLGLRRSLRLARPRPRTDYATGDTSLPYR

SEQ ID NO: 66555 - protein, 207 aa, Zea mays
  Coding DNA Sequence Number=SeqID_23180
MGRRGARRRKGALDWKRMRKGSPVYDTGGRVHESCSVGARFRVRESSNVVAHLLIAAARDNNPVYDTGLGPTSHTPWVPDPGGNKAPRAWPDETTRRGGHGSVSRGDRYGSWRDLRLASSPEMGPGATVGTLKLGYPLLLYKDAVPTRLSLSRVDLHVCKPDPWNGIRTPPYGVQVAHNGVPRSQDRIYSGLEQDPGWGPVPTRVWT

SEQ ID NO: 66556 - protein, 189 aa, Zea mays
  Coding DNA Sequence Number=SeqID_23181
MARKDDILQGGDSGSGPPRENAGPLDAQPGPPGEVRNLHKYKSGPWDGSRTPQEGSGLLTVGSRDSKSKKTRALIKARRGFGADTCPDHTAGAPTPRSGRDPMLPRGLLPVTDVPPQYLMCPFHSADGRRPDHLAGGVPVRSGGRQYACAAAYTVFIITRTLPVKLSLHANATKAVDIRAQGEGTGDQH

SEQ ID NO: 66557 - protein, 399 aa, Zea mays
  Coding DNA Sequence Number=SeqID_23182
  Gene Ontology: Mol. function=nucleotide binding; Cellular component =Golgi apparatus; Biological process=regulation of transcription, DNA- dependent
  Homolog annotation: Hit_ID=Q10M06; Match level="QueryCoverage=99%, HitCoverage=79%, E-value=1e-174, Identity=77%"; Hit description=Axi 1 protein, putative, expressed
  Pfam annotation: Domain name=DUF246; Domain location=101-399; Score =555.5; E_value=5.5e-164; Accession=PF03138.5; Description=Plant protein family
MAKHKASPPAAVRRRIGGAGASAIRWALRVATSIVAWTLLLHLFTFLGIPRPPLPIARPSCLGGRSNSTAADSVVAAGDAGHLALPALPPRRLYKSNGYLLVSCNGGLNQMRAAICDMVTVARYLNLTMVIPELDKQSFWADPSDFGDIFDVNHFIDSLRNEVKIVKELPQKFKEKVPLSMQPISWSSEKYYLRQILPLVRKHKVVRFSKTDSRLANNGLPLKLQKLRCHVNYNALRFAPSIEALGNKMISTLRRTGSFVVLHLRYEMDMLAFSGCTHGCSDEETEELTTMRYAYPWWKEKEIDSEKKRLEGLCPLTPEETTLVLRALGFPKDTRIYIASGEIYGGEKRLAILKTEFPNIVRKEILLSDDELRPFQKHSTQMAALDYLVSVASDIFYSQ

SEQ ID NO: 66558 - protein, 46 aa, Zea mays
  Coding DNA Sequence Number=SeqID_23183
  Subcellular localization annotation: CTP_CleavageSite=38; ConfidenceScore=5.05e-01
MRVFHSMHAPSFSLSSDVPFVFPVFAMFFVPNLLLVPTVAAIACIF

SEQ ID NO: 66559 - protein, 277 aa, Zea mays
  Coding DNA Sequence Number=SeqID_23184
MGGEREGIGHGGEGEAASHAQAAGDFVEAWEVSGSRRENGGHLGAAAGRGSSTATREQEPSWGGLPEDQGRWGHGWGGIRRSDARAGSGGWAQPREGAGPRRLGTRASRRAAAWLSTAPCAGAQLRRREGRIGGRGRGRRRAGMACLRPIDAILEDLFDVWVRTHTRFRYTTLILLVDVGRIVFIERGWRLPTGQVQEERLQIEKVQDKHRGKDRGMTRVKVITGKHTTRNVFEARPTRCQKRGAVNYEIDEALSSNRDGKEEALKGKFEVSMKVRV

SEQ ID NO: 66560 - protein, 32 aa, Zea mays
  Coding DNA Sequence Number=SeqID_23185
MRLMVLGIDSGNGKEGVEANLQEFQDVDEFED

SEQ ID NO: 66561 - protein, 110 aa, Zea mays
  Coding DNA Sequence Number=SeqID_23186
MPCGGTENQVRNPLTPDASTHWNDASMPQTTANLPGYPPRPKRRRTCRTTMAPQDEAMVGRWALQFPPSSNLNRSICREDQEEGSRRWLTSNSRRRDVAPGGTRIRGDGT

SEQ ID NO: 66562 - protein, 32 aa, Zea mays
  Coding DNA Sequence Number=SeqID_23187
MRLMVLGIDSGNGKEGVEADLQEFQDVDEFED

SEQ ID NO: 66563 - protein, 132 aa, Zea mays
  Coding DNA Sequence Number=SeqID_23188
MTHCLSRSPRCDPGKEEKIETSGCERAKDVHLEEAVLGLIVDKQDDARADILDEVGVKGAYVGGRGGAVILSPAPSVGCETMPGRPQEPDGTFGPSRHRGGGGITVVYGPSSLPLSTSRLVDLYLSSHSRDA

SEQ ID NO: 66564 - protein, 203 aa, Zea mays
  Coding DNA Sequence Number=SeqID_23189
  Gene Ontology: Mol. function=endonuclease activity
  Homolog annotation: Hit_ID=Q2HUP4; Match level="QueryCoverage=52%, HitCoverage=36%, E-value=1e-24, Identity=49%"; Hit description =Endonuclease/exonuclease/phosphatase
MKPQRKSLGRNPLSDAPYRNPGFKLWYTGTATNKNGVGVLIDKSLKDGVVDVKRVGDRIILVKLVIGDLVLNVISAYAPQVGLNENSKREFWEGLEDMVSSVPVGEKLFIGGDLNGHVGTSSTSFEGLAVARIVGATILKHADVLAPLRTISTDPCTTWSYVAASGITGRFAVVCGIDASFQCVLASRVRGLRTWFSVPPHGM

SEQ ID NO: 66565 - protein, 151 aa, Zea mays
  Coding DNA Sequence Number=SeqID_23190
MIRGADEKGPPASDNPRDADAEGVTIGEEEAFVDGDVGGILVGGGVSGALVGVPFPTHVGIAAVVGLCLPKVLKNMTNIFSSIIYTVTGGFGFEMKHLRTSDQHWRPPPVNSLDHLQQPSSFVMPPNKSSGPGTALQLLDVNQETLREARS

SEQ ID NO: 66566 - protein, 213 aa, Zea mays
  Coding DNA Sequence Number=SeqID_23191
  Gene Ontology: Mol. function=nucleic acid binding; Cellular component= commitment complex; Biological process=positive regulation of nuclear mRNA splicing via U2-type spliceosome
  Homolog annotation: Hit_ID=A3AXL8; Match level="QueryCoverage=34%, HitCoverage=12%, E-value=1e-23, Identity=73%"; Hit description =Putative uncharacterized protein
  Pfam annotation: Domain name=RRM_1; Domain location=37-98; Score =38.3; E_value=2.7e-08; Accession=PF00076.13; Description=RNA recognition motif. (a.k.a. RRM, RBD,
MAVGPGPLFLLPNTCQEWKVPNFQGASSENDPNNTTIFVGGLDPNVTENVLKQAFSPYGEVIHVKIPVGKRHGFVQFVTSLSMNPCNGVRVWLLVLVITMVAMDKVMRLMAVGLHNLRTLTCMVMALMLVIPISNGNQLHISHNNNRYTMFANVIDSSQVKVQRGATSTGPRDTHLGAPTSRSLSLVFTSTYTYISIYRTSVVDIFVMLWNVV

SEQ ID NO: 66567 - protein, 180 aa, Zea mays
  Coding DNA Sequence Number=SeqID_23192
MDDKKKQLKTGFLDSLTISQARYKEVARRHGEEYEDLDDAEFEKAVKQNQRKKMKVMAAYIGRAMYNHVQHGKDLIILRTTLMHTVFIGKILAANIQRTSLICQYHYFHMVINNLPVPKSKINAEWLERDMVSVGMAKVVKDLLYFMRREVLHQQGLFYNTNGNLQQFTELSLYTISHSV

SEQ ID NO: 66568 - protein, 139 aa, Zea mays
  Coding DNA Sequence Number=SeqID_23193
MNRSKDLSVVWSGAPDCPVCHQTVSGAPCSYEDEPTTLGKTEPPDCPVCQQSNDYSLQRSTATAADRGTVKNSVRRVRVAESEAHQTVSGNVVAHRTVYSACLVAHRTVRVFPPALNFKNASAICKAKFPLDVALDGSN

SEQ ID NO: 66569 - protein, 264 aa, Zea mays
  Coding DNA Sequence Number=SeqID_23194
MGVPDVCALWRALIAVAGDRWREPRQIPEAAKFQSRDLLEHRTLSEKCGKASKRVPTFPLRLGGSYRVKASSTQGARSRLARAQPWAGTVVPDEVTSHPRAFSGSGGTLGTPEAQLEQASSRSNLGPNRLSNRPYRRRIQCEDRLTPYPDTRASVGKVELTDLTGKQRRSPRSDCCATHQGEADNSQVQPRAQQGAPPRPTLGLGLGRRSPPRPTLGLSLNLSLGRWSPARPTLGLGLNLGLRRNRVLARPRLDLWRSLRLARP

SEQ ID NO: 66570 - protein, 86 aa, Zea mays
  Coding DNA Sequence Number=SeqID_23195
MMLVDYTTGASLAEVQGKAASQTPHPTEARGNSPAALAPGVGAPAPRAGNDAVSPCDWTDLSPCDAVDTPPGEKAKRGSQTYVQCT

SEQ ID NO: 66571 - protein, 102 aa, Zea mays
  Coding DNA Sequence Number=SeqID_23196
MDADAKCAQQARNGVIPPPRRDLVLHSGNVLGLLLALGSSDCSDWLLGQEGEVSGCSASDTDFLLVGCAGGTAAAATEGTASRTIVDADAGSGVDIPEGDTA

SEQ ID NO: 66572 - protein, 159 aa, Zea mays
  Coding DNA Sequence Number=SeqID_23197
MSSRIGSAEAHQSQESAPFPPRSKRTVEPDRGGRILVDPSRSPCAYRCSSRDPLSISVHATIVDHNRRRGISSKLQGFGVKQLCKKIRWWVKIAFVRDLKLVRTRWLGDFSPEVLSTADSPPLSRSVLVGALSPGGVAPGRFAGVRGPGLCAAALRRER

SEQ ID NO: 66573 - protein, 64 aa, Zea mays
  Coding DNA Sequence Number=SeqID_23198
MTRALNAWLDGHAAHGAPAAQHAKGRGRRGEGGRRRDSPARGDRRRQDELSAATARWRATSDVV

SEQ ID NO: 66574 - protein, 487 aa, Zea mays
  Coding DNA Sequence Number=SeqID_23199
MHRVLPPSEPPDGERPRCFRLAVVGGTQLRGSWYLSTIARLQGFSSGSPAASPCRWSPKTVTTSLMVGRSNPGCDLCPALSFKDLHHPCWGGGRAEPELYLPHGFVGHLLLQHSGEKALTGLAEGADFDNAGPSGRKRRQLQHAWFAGSAGSGTTSGATSHHWAECGYLPAVRAAVALRASGDRPRRRALLGRRSCSWAVLPLLRHDAFARWSVLAHSGGLEWGSAGGQVTTVVGAEVVAAGEVLVADEIAATVRAPGLGSLALIACPRPSSGDVGEGLIAAASALRSSLLLFGRSERRSLSLLPEWAVASHLGFCRPAGPPINPRPLCDEPELAAAVSARIEAELARKEDFVGPGADPPTVSPSEAGSDSAEDGVDAEGAAAPPIDDLFVSNRIVYPSESYLLRKVMSEDSAIDIVEKARKIVSAEKLSSVKTCSASGIAYPSVSYLSQKVMSEDPTIEVVEKHERCSDRKVFSEENFDAEGVSPF

SEQ ID NO: 66575 - protein, 1796 aa, Zea mays
  Coding DNA Sequence Number=SeqID_23200
  Gene Ontology: Mol. function=phosphatidylinositol phosphate kinase activity; Cellular component=mitochondrion; Biological process =phosphatidylinositol metabolic process
  Homolog annotation: Hit_ID=Q6ZLF2; Match level="QueryCoverage=97%, HitCoverage=97%, E-value=0.0, Identity=74%"; Hit description=1 -phosphatidylinositol-3-phosphate 5-kinase-like
  Pfam annotation: Domain name=Cpn60_TCP1; Domain location=288-753; Score=-239.0; E_value=0.00084; Accession=PF00118.15; Description=TCP- 1cpn60 chaperonin family
  Pfam annotation: Domain name=FYVE; Domain location=49-119; Score =58.0; E_value=3.2e-14; Accession=PF01363.12; Description=FYVE zinc finger
  Pfam annotation: Domain name=PIP5K; Domain location=1529-1764; Score =186.1; E_value=9e-53; Accession=PF01504.9; Description =Phosphatidylinositol-4-phosphate 5-Kinase
  Pfam module annotation: Pfam domain module=Cpn60_TCP1::FYVE::PIP5K; Domain location=288-753::49-119::1529-1764
MMGSPDGRLVELFGAVKSWMPRRGDHSPPPALQSDAAAGQPLPHDLSRDFWMPDQSCRVCYDCDAQFTILNRRHHCRHCGRVFCARCTANSVPRSPGDAAREDGERIRVCNYCFKRWMEEEPAARGAAAGQQPSSPSLSAASVCSDKSSFTGTNGQMSSYANISYSEFPVHGEGNCGEDDGYREEQQPAMDPAPTMEPAAYADNSSDRFNFCLQRSDDEDDDYTVFRSDLEEQHMQNSDKYYGPMYFDGHHVSCSDDAKESTSPRKKLTTLVDSLGADKNEDHNVDECCNARSSSMYSMEVLDNEPVDFENNSLLWVAPEPEDGEDDHDGEHDDDEGVDATGEWGYLRTNSFGSGHCRSRDKSAEEHKKAMKDIVDGHFRALVSQLLQAEKVPLVDGSGKESWLDIVTSLSWEAASLLKPDTTSKGGQMDPGGYVKVKCLACGHPSESFVVKGVVCKKNVAHRRMSSKKEKPPILILGGALEYQRVSNLLSSFDTLLQQETDYLKMAVAKIKAHQPSVVLVEKSVSRYAQDLFLEKNISLVLNIKRPLLERISRCTGAHIVPSIDCLSSEKLGRCDLFHVEKYVEEHGTAGEGGKKMLKNLMFFEGCPKPFGCTILLKGANGDELKKVKHVLQYGVFAAYHLALETSFLVDEGATLPELPLKSPIIVAFPDKPSSADRSISTIPIIPIPSASPPNSCLQAFGLQNDDLTFDGTKRMEQTALGVPYEQTASVQINSQNGHITGFLDMVPQSSVGPLFQQSDIHCPDGTGGVNRKMNLQGSLPGTTRNVLVNDFSHSVSTAHPTNLVSAKGDGSLAKNPEIGDKIADKPAAPLNVQISHDDESIKNNSVAKTDEIPASPAENQSILVSLSSRCVWKESLCERPHLLRIKYYGNFDRPLGRFLRDQLFDQSKLCQSCELPPEAHVYCYVHPQGSLTISVRKLSIKLPGNGENDGRIWMWHRCLRCPRVNGLPPATKRVVMSDAAWGLSFGKFLELSFSNHAAASRVASCGHSLHRDCLRFYGFGEMVACFRYASIRVHSVYLPPPKLDFTSEHQEWVEEEAKEVDDSAELLFSEVLNALHKISGGRPITGSFDGNLKILELRRNIGELEEILVAEKTDFMESLKNLLKTDMRKEQPFIDILDVNKLRRHLLFLCYLWDQRLKFIANSGGKYCDALAGLRIGSGNSDFNGKPVGAAPKLEKGSKATVLSIAKEGSLQQSSCPSHGEDEGFNQANEYNENISRNAAELSGTEDSIAKINHATSADVKDRLDNQESRTGVRRVVSDGQFPVATDIPDTLDAKWRGQNEPAPDSNLAKPPLSVEDTTVDVKSQAKAVHTFTFTVRSGDAAEELLRWIKMPYMTSNSSLNTTSSSPLRFTSLAEYIPKYVELFCDLSQKGGARLFLPTGANDIVIPVFDDEPTSVISYALVSPMYCFQLSDDSSKNRDKESSLPLPVYDSGNFNPFHLFEEFGSHYDVTSSVSGVRGSFAPDQVHLSVSFEDGGPLGKVKYNVTCYYAKKFEALRRSCCPSELDFFRSISRCKKWGAQGGKSNVFFAKSLDDRFIIKQVTKTELESFLKFGTEYFKYLSESISTGSPTCLAKILGIYQVTSKHVKGGKESKMDLLVMENLLFGRNITRLYDLKGSSRSRYNADSNGSNKVLLDQNLIEAMPTSPIFVGNKAKRLLERAVWNDTSFLAGIDVMDYSLLVGVDEEKHELVLGIIDFMRQYTWDKHLETWVKSSGILGGPKNASPTVISPMQYKKRFRKAMSAYFIVIPEQWMPAIINPSKSSSNICQEDSQNGSQE

SEQ ID NO: 66576 - protein, 20 aa, Zea mays
  Coding DNA Sequence Number=SeqID_23201
MASSVTPIPVGVWLLGQALP

SEQ ID NO: 66577 - protein, 686 aa, Zea mays
  Coding DNA Sequence Number=SeqID_23202
MDKDRQGAAQKRQAVVRLHEARPKRQRGAAKAVAPGGGKPPLAAKAGAAAPSKAPEATAGAGGDKSTKVVPPASGVAEASKAARALPLSGKRVADFGTDITVDDYLGGPDEGQLAIAAPGVAITTAVIVPKARGEALGAGGEVSALALVRDEAGAATRRLKGVTEALSQATDALSQVADFASRTASGALTAAVSAEVERLRTQHADAVREKSASNSKCRKLTDRVAALEREKADLRRQLAAERREANEAIAKEQAAQAEAKLARAEGNLAKELAEHLQERITALESRAKGAEAAMRAEAERTRAQLMDTYRELGARTGDFEVPDRESGLRCLQWVQEELLELPAVVGGLMSYASLVTCEGAMNALSREGCRHFEAFDQADEDFERDIYKVEDPVVKESAGALYDRMWGLYGREVVRERAETARAQAERGERVDDFGALNSALPDPEPTLAEAVTGVALEPTPETAATATAAPTSVVAGEDLPPKVAEGAPDAPAAAVPSAEDPAAVAAETTAEAAAEPTAEAPATSGPSQVQDFGLAHATAATEFLAASTAEGGNEYGGFASEFFYFTDSGSSVEWTEESSEEDLDYFAALDVAAAEASPHAADAPDVPGPSTGRRRRRAVAKCRVSAEEGARLRVSRAGRQELLSLPAAASTGEGELRSLFAGEELRIMLFNYREMGIIPKVEPM

SEQ ID NO: 66578 - protein, 53 aa, Zea mays
  Coding DNA Sequence Number=SeqID_23203
  Subcellular localization annotation: CTP_CleavageSite=37; ConfidenceScore=5.12e-01
MTSSPSSLGLPPSKLILCPKPVLAIARIFVNAVFEFRVTEATTPCSVTNCVER

SEQ ID NO: 66579 - protein, 204 aa, Zea mays
  Coding DNA Sequence Number=SeqID_23204
MAEKETDLKMKNQIRPRRIIIELFINVKGINVISHGLRPVPINRNRVTFCILFEYSSFFTIIMKMVCTIQTTRTNTNYIPLPRQVPVYPVVVEEVPMDLPRICVENGVILEDSSEEFLPTPTPLVESLAFAAGSSSSAPPALAVQAPAPGGDNPDDSSDDDEDKEEEEEEEENINEEVNGEQYDHFVGIWPVTEHYTSMFETGH

SEQ ID NO: 66580 - protein, 33 aa, Zea mays
  Coding DNA Sequence Number=SeqID_23205
MGTLSGGFFAECPRWHSAKVDSLPSAVGQTLGK

SEQ ID NO: 66581 - protein, 132 aa, Zea mays
  Coding DNA Sequence Number=SeqID_23206
  Subcellular localization annotation: CTP_CleavageSite=62; ConfidenceScore=5.28e-01
MAAHVNMGSYSWLRYFTQGATTIVFRNLSGLLRIKMVRTLQTTRINTSYAPQPRQVPVYPVVVEEAPADLPPIQVENVINLEDSSEEQLPTPTPLAESLAYAAGSSMSASSAPAFQAPAPGGDDPDDSRRRR

SEQ ID NO: 66582 - protein, 344 aa, Zea mays
  Coding DNA Sequence Number=SeqID_23207
  Homolog annotation: Hit_ID=A2XFR6; Match level="QueryCoverage=47%, HitCoverage=52%, E-value=1e-25, Identity=38%"; Hit description =Putative uncharacterized protein
  Subcellular localization annotation: CTP_CleavageSite=56; ConfidenceScore=5.20e-01
MGSYSWLRYFTQGATTIVFRNLSGLLRIKMVRTLQTTRINTSYAPQPRQVPVYPVVVEEAPADLPPIQVENVINLEDSSEEQLPTPTPLAESLAYAAGSSMSASSAPAFQAPAPGGDDPDDSGDGDDEDDDEDDGEDGHINEEADYAQQDHFMGIGPVVEHYTSMFETGRFPNLLQAVLYELGAYARPLYETRRVSEPPRACYYITRIHVRVMDAGDRGLRTLSAHESLIPLSTYAASVSDAARRTLWSLSHTYRQQLQNTRFRHLPQRLRAGVVAGLNTDLDSATLDLYSVHLELENAHARISALEAQLQGLDPPEAQVPAVALSPPRKRMRYGEPGSVTRLL

SEQ ID NO: 66583 - protein, 141 aa, Zea mays
  Coding DNA Sequence Number=SeqID_23208
MSERNWAETHWIAWSTRGGGRPKSGEVDLGPPVKSGRVRGLGKLHGLLAELAEALACPEDGWGGLATVAEALAAMAGGIKLAGAKGKWLAGEAEVELVFPLPLPLFKRRLGANLREFGQDHCKGFVHQTKLCLLCMDDVRF

SEQ ID NO: 66584 - protein, 266 aa, Zea mays
  Coding DNA Sequence Number=SeqID_23209
MGDIRRLSASSLEDATPWEWVPFSHHSASRIFISQPGCTPRRRSPKTVTTSPWVGRSKSGCDLGPTLSFKDVHHPRWGGGRAEPELYLPRGFVGHPLLRRSRERALAGPTGGSDFDNAGPVDGRRRLPQRIGLVGLAPSAPSCWKAAAAPCAREDRPRCRALLGRRSCSGAVLPLHRYGASAGRSVPCSSGRIRVGICRRADGPCCRCRGGGGSRSPRRRRDHRHHPRFGPPALCTCPRPSSVGVGKGKVAAAFALRPSPLQFGHP

SEQ ID NO: 66585 - protein, 68 aa, Zea mays
  Coding DNA Sequence Number=SeqID_23210
MKVEACQSPSVRSSVGVSTQGNVVPVGCSGFDTSPLSSDLGLLLELDLKPYDLPHNHRYYLIGCKSHP

SEQ ID NO: 66586 - protein, 31 aa, Zea mays
  Coding DNA Sequence Number=SeqID_23211
MAPCILCDDGGSQPPYGMGERHYRKLVKERG

SEQ ID NO: 66587 - protein, 181 aa, Zea mays
  Coding DNA Sequence Number=SeqID_23212
MANGCVGCAVRRLEMKHAGGRLTQRLGTSSLVEASFLGGAQGVVAASSSARACSFLSGSAARSWWRGGSAGSAQSVVAASSSARACSSLGGGAAYRRWLGLALCALCNDLNWITNSPVMTNSPVMTNSWMMTNSPMTNSIDQLCDTDQMTNSPLMTNSLVMTNSPVMNNSQMTTNYTRWTR

SEQ ID NO: 66588 - protein, 57 aa, Zea mays
  Coding DNA Sequence Number=SeqID_23213
MESHDLRAEWESRLVGGYEIDGFGYDYDAGCQHCNHCSGEDEAVEGDFQEFQDYDEF

SEQ ID NO: 66589 - protein, 652 aa, Zea mays
  Coding DNA Sequence Number=SeqID_23214
  Homolog annotation: Hit_ID=Q5Z6U3; Match level="QueryCoverage=95%, HitCoverage=54%, E-value=1e-126, Identity=39%"; Hit description =Putative uncharacterized protein P0551A03.32
MEELGLRDVDARNNSIEELEVVEEDARSKSLNECEAVDVDLDAMDININDRETINGDTRSKSLNESEAVDLDPDAMENNIDEMETVNEDARTKSLDEFEAVDVAPDAMDNNIDEMGVVNEDARSKGLNESEAVDAINNNIVELDAVNEDARCKSLNDESELVEEEFKSPSFDDMNTVDEHVNGTDTDGLCLGFVEVEAVPAVHEAMPDNNEETTEEAPAGGADVAGSDNVAVPTDVDCEEHYVEAVVVTQEVVAVAEELGDEEAKRDEEKDVMGLSLGFNSTNGYGAMDVEKETNVESLDEDESDSGNEEAEESEDGAFDVNDGEDMNWRIGDVNGGEGMTHSLQRCNTFGGMEFENLNKGEDEMRDELRFDDFPARASLERMTSSNLLQAMNSIPSSYNVSENVHDLPSGDFLAMGADAHKSGVDLGPGSSYLFGNNGKRNIDDIDGYNGNMQVQEGFPRSNQQKRMRHSNSSNISPGSGFFNASFSVPIQNLMVEASRLYEQNEQKLQSLQFEKQHWSDMLQQKEAIIQSLNSARFEQHNKYQAELRRFEHDLNVMAQLVTTYKKALKQTRASFDEYRKKFPCNVPLYGDVACGGGLVLSVRELEKRRCEEQQQNIAMKSKICYPSYRGIYPSYRRIYSSYRGMSSLTIR

SEQ ID NO: 66590 - protein, 290 aa, Zea mays
  Coding DNA Sequence Number=SeqID_23215
  Subcellular localization annotation: CTP_CleavageSite=42; ConfidenceScore=5.38e-01
MTSRSTTSSSAAPSPRRSIATISDFLFLPTSSCLRCHPHPVVERQGRATGEIWGCGRRGVAHNGGRRGGGEEVGEAVAEEVRMEVDGTGSGGGGRQARCSLVSQETGVSGVRHSDVAMGREGSSGDAVSASGGRTKAPLYNWRRCRDGRRVRVQGAEPTEVCCNVRWQGHGGLVSGGGGVGVERGDDDEAKVTTGVERGAAMEGGGRDGQRDDGGSDGRPTTGGRLGKTGNRDIAWADVGAGRRGGRDGQHDDGGSDGRPMTGGRLGKTGGRDIAWADAGARGSVAPRQD

SEQ ID NO: 66591 - protein, 266 aa, Zea mays
  Coding DNA Sequence Number=SeqID_23216
  Gene Ontology: Mol. function=protein transporter activity; Cellular component=cytoplasmic vesicle; Biological process=retrograde vesicle- mediated transport, Golgi to ER
  Homolog annotation: Hit_ID=A2XY73; Match level="QueryCoverage=58%, HitCoverage=49%, E-value=2e-64, Identity=79%"; Hit description =Coatomer subunit epsilon-2
  Pfam annotation: Domain name=Cas1p; Domain location=64-224; Score= -118.8; E_value=0.044; Accession=PF07779.3; Description=Cas1p-like protein
  Pfam annotation: Domain name=Coatomer_E; Domain location=27-266; Score=150.1; E_value=5.9e-42; Accession=PF04733.5; Description =Coatomer epsilon subunit
  Pfam module annotation: Pfam domain module=Cas1p::Coatomer_E; Domain location=64-224::27-266
MDDSSVKAEDQTMLLEEGGQAMAAKPAYTSLTSQILRLIFMDQLLLENRLTLRAISEFGGYLLYFYICDRTNLLGESAKNYSRDLFLFLYFLLIIVAAMTSFKDIKQRDEFICVQREIRRQPQHWTDHAKKQLRVMQQLDEDHTLTQLTNAWVDLVLGGSKIQEARLIFQDLSDKYPTTCTILNGKALCSTHMGNFEDAEGLLLESLNKDAKDTKTLANLTVCSLNLGKPTTRYLNQLKLAHPDHALVKRMSSAVESFDRACQAMA

SEQ ID NO: 66592 - protein, 35 aa, Zea mays
  Coding DNA Sequence Number=SeqID_23217
MAVEEEEAFDGALTDEQLREPRNKAYEFITSYNII

SEQ ID NO: 66593 - protein, 237 aa, Zea mays
  Coding DNA Sequence Number=SeqID_23218
MCLILQYLFLTCGGCETARVSSHTFIAQQVVGNNVHELAKGGSSREVGCTSLPTSHVTHLLRDRDFPYTSTEEARQGFLPDRHRSKINQGPPYTDHSPTALAPFGVSYAKVARRRGIEKFGPFDQNRGPRLHPLTLNRGGASIPAVEDLPESAKPPPQSHAPPIRLVLHGLQRETNQLRRSLPGFVKQIRVTTPMYEAAMMCLSSEQFMAPHGSSFPRDARNPPRDQEKHPEPKTSP

SEQ ID NO: 66594 - protein, 114 aa, Zea mays
  Coding DNA Sequence Number=SeqID_23219
MQIIERRCEAQKGAGIRSQSRLPPRACCQLFLGMLVSSLDTSSLHPRGARYDLLDISRVALEARDRHLHDILYDLLGGVFSSGPAVTVGGGTEAIKAKEMEPQLGSLPTRQSWS

SEQ ID NO: 66595 - protein, 615 aa, Zea mays
  Coding DNA Sequence Number=SeqID_23220
MVRSPAFALNLRNRDPAAFVREAEDEAVRLVGRYVPRTEGQRSWEIRGSNDRLNRVFELNQLPYDGYPGQDDADRRGKKPVVETKDDSARAAAPSSKKRKLGTAMGGLGVSDGFARELMRTCAAPGERMSSPELRESSARMLKVTGGCWPRNVPIPRAASGDVFTSRMVRKWRVFPYGRNIAAVVSAVMDKDRQGAAQKRQAALRIVEARPKRQKRGSAKDAAPSGGKPPLAAKSGVPASSKAPEAAAGAGGSKPSKAVPPLSRVAEAAKASRALPSAGKRVADFTTDICVEDYLGGSDESQLAMVAPAAAIATAGVVPNTRGEALGSGGEVAEFASRTASGALTASVSAEVERLRTQHADAVREKSASDSKCQKLTDKVAMLEREKADLQRQLAAERREANEAIAKEQAAQAEAKMARAEGNLAKELAEHLQERLTALESRAKGPRPQCVWRQNGRAHSLWLHIWVQEELQELPAVVGGFMSYASLVTCEGAMNALSREGCRHFEVFDQADEDFDRDVYKVEDLVVKDSAGALYDRMWGPHCREVVRERAETTMAQALRGERVDDLGALNSALPDPEPTPAEAVSGVALEPTPETAATATAAPSVAAGEDLPPK

SEQ ID NO: 66596 - protein, 173 aa, Zea mays
  Coding DNA Sequence Number=SeqID_23221
  Subcellular localization annotation: CTP_CleavageSite=23; ConfidenceScore=5.16e-01
MSIRGVLGGLPIPRQSLRSLLPDGALLGARSRRCRRTPPPLRTRELFGHQAWTVRLVRQDPRPCARSRPLASGRGPSAPLQRAPPSVLIAVIGTRIGANTLFGTPLGTPHVDLSDRPSMVGSKDSSNVSTSNIIESTWETLLAEEQLQFEEHKEQLIHEAKSKIPGQLQCGQE

SEQ ID NO: 66597 - protein, 83 aa, Zea mays
  Coding DNA Sequence Number=SeqID_23222
  Subcellular localization annotation: CTP_CleavageSite=47; ConfidenceScore=5.14e-01
MARRASAAGVWAAAGVWEAFAARRRAGVWAATRLGAATRRGARGAPRTAGGGAVRGGACGRQRGSFDFGMKACVIWRYNPRAG

SEQ ID NO: 66598 - protein, 178 aa, Zea mays
  Coding DNA Sequence Number=SeqID_23223
METVPEGKPIVRRGGDGVRGQARHRAGQSFAPVARVGMRIKCECSPLAFRCALSSSSKTSSGETDMAVSRRGALGRGRDLPEAEILEGPRGVVSVMMAFLWGRPSWWALDEECEFARVALEASRRAKGRSRSTLTSFIYTPLREEEEGECVKPPSMGNEHAISVELLTGNPSGGPSSI

SEQ ID NO: 66599 - protein, 70 aa, Zea mays
  Coding DNA Sequence Number=SeqID_23224
  Homolog annotation: Hit_ID=Q7XBD4; Match level="QueryCoverage=80%, HitCoverage=5%, E-value=3e-08, Identity=62%"; Hit description =Cinful1 polyprotein
MARSMGFPKLEAGLYAMTKDDLADSLAYNSLKAKAAFSIDDTKDPSAEARSIDIIFFTDIWENGGRGMAP

SEQ ID NO: 66600 - protein, 136 aa, Zea mays
  Coding DNA Sequence Number=SeqID_23225
MEHRPGLERLPENSHLELDGKLFVNTQQAPTWRANYRRFDPGGSLDRRVNCRRVPQPRWVAGEVLAPCSCDVVAVRGALEPGERTAVRAIESLLTSPCFRKRAESPPSSWSMWGAIITCLPGRARWDAGLVPRSLS

SEQ ID NO: 66601 - protein, 147 aa, Zea mays
  Coding DNA Sequence Number=SeqID_23226
MNKTPALKVPLQMELRFHLRRYEQPHMIGGPAEQQKADRWLTVARSNSDDDDFCSKGPNSSSDDLRADAAAIRPSPTSSLERRGRAEGRRIGGQFAGGTDYLVSGETSSGCHGGRWHRKRRRSHPDRRAGHAAAASTANDEHPSPDR

SEQ ID NO: 66602 - protein, 265 aa, Zea mays
  Coding DNA Sequence Number=SeqID_23227
MDRGRVGSERRLCRPEPGRAVHWRDQRRSRVVEATNRADILGGQLAEALGWPAEPSARAGFLEKTPAAMAPGVVLMSSFGVEILRPRCRPRLGRTSPKLLLTLRVLLLPSTVKCLDLFVGNRIVCPSESYFSRKVMSEVSVSRRRRSPSARSALPLTRTLTRPWDFAIDIVKKPRKIVSAEEFSSVKTCSVRRVTYPSVSYLSQKVMSEDPTFEVVEKHERRSGRKDLFLRKILTQRGFPPSSPRGRVGLCRGKADPSLMTRLCV

SEQ ID NO: 66603 - protein, 380 aa, Zea mays
  Coding DNA Sequence Number=SeqID_23228
  Gene Ontology: Mol. function=DNA-directed RNA polymerase activity; Cellular component=DNA-directed RNA polymerase III complex; Biological process=transcription
  Homolog annotation: Hit_ID=A2XUZ9; Match level="QueryCoverage=81%, HitCoverage=28%, E-value=1e-153, Identity=89%"; Hit description=DNA -directed RNA polymerase
  Pfam annotation: Domain name=RNA_pol_Rpb1_2; Domain location=114-280; Score=370.0; E_value=3.8e-108; Accession=PF00623.11; Description=RNA polymerase Rpb1, domain 2
  Pfam annotation: Domain name=RNA_pol_Rpb1_3; Domain location=283-380; Score=6.5; E_value=5.5e-05; Accession=PF04983.9; Description=RNA polymerase Rpb1, domain 3
  Pfam module annotation: Pfam domain module=RNA_pol_Rpb1_2::RNA_pol _Rpb1_3; Domain location=114-280::283-380
MVGSLMSAGCGAKALEDCGDGGGLGWWAEAVEEWVGADFGIGIGIGKVEFQRLDVHGIRNWKSIPIPLDCWQYLQLQVVEYVNSDAPSLPESQHRGLVQRLKGKTGRFRGNLSGKRTEYTGRTVISPDPNLKITEVAIPVLMARVLTYPERVSNYNIEKLRQCIRNGPFKYPGANFVTQPDGMKQSLKYGDRRITARDLKCGCIVERHLEDGDVVLFNRQPSLHRMSIMCHRARIMPWRTLRFNESVCNPYNADFDGDEMNLHVPQTEEARTEALMLMGVQNNLCTPKNGEILVASTQDFLTSSFLVTRKDTFYDRSSFTLLCSYLGDGMENIDLPTPALIKPVELWTGNGNKDGLYSVLLRDYNSHAAASCMNRLAKFR

SEQ ID NO: 66604 - protein, 53 aa, Zea mays
  Coding DNA Sequence Number=SeqID_23229
MVRDGNGYPRPDTRWVFTPLGCLIFVGTSDPMGDPYPRGYGYGGKSIPTSVYG

SEQ ID NO: 66605 - protein, 300 aa, Zea mays
  Coding DNA Sequence Number=SeqID_23230
  Gene Ontology: Mol. function=DNA-directed RNA polymerase activity; Cellular component=DNA-directed RNA polymerase III complex; Biological process=transcription
  Homolog annotation: Hit_ID=A3AV59; Match level="QueryCoverage=25%, HitCoverage=6%, E-value=8e-35, Identity=96%"; Hit description=DNA -directed RNA polymerase
MDDVFPTVHVLYYMLKDLHPFYLCEFPEQGEILGITRYGIAKMKSSVLMLASFEKTAEHLFNASYSGRQDQIEGVSECIIMGIPMQLGTGILKVRQRLDHVPEFKMFREFEEHDFARTGCTAADTVELKEGPLEQFTHEMEPFLRKQGLPVRLNKGDLALIDWIKELALRLLMVVIGSSIRSIPITGKDVTQFIHQLLKVASSAFLLTVERHYSTCLDNEKAPPEHVNELLWACMNYRDLEMGKEVAKKLFVIEPGNTGNYVLLANIYASHGRLEEAKEVRRWMMFQELRKEKGCSLINN

SEQ ID NO: 66606 - protein, 50 aa, Zea mays
  Coding DNA Sequence Number=SeqID_23231
MASVGACVSALLRGNVMKWKSPKKGHHHPRILRQATASTLIFVDLSQTHL

SEQ ID NO: 66607 - protein, 120 aa, Zea mays
  Coding DNA Sequence Number=SeqID_23232
MGKNNKRKREPTPPSEDFGDSEYSEEEFSSESEGSPAPTYIRAVEHSGLEGSDESEYSSDEEDSDGGDEGEDDDDDDDDDGDGDGSGSGRGGGDGSRDSTKGSSRGSTKGGGGGRGRASG

SEQ ID NO: 66608 - protein, 170 aa, Zea mays
  Coding DNA Sequence Number=SeqID_23233
MALSPLLLVERRHRGTSEESNHSSEASGATPGGARTRAKPRKTANSAPPDPGLGLGLSPRRRRIPLRPTQGSDLGSAPEDDELRVRPTPGLELRPGPQPTASALPDLGARTRPRPRRSLRIAQPRARAGPRQREAPSLPYSKLTQATGNKTGVPSSSLRQMGNDGAPHAP

SEQ ID NO: 66609 - protein, 289 aa, Zea mays
  Coding DNA Sequence Number=SeqID_23234
MRATAQRLQAAPHFCPDQRAKGRAVMQAACNRAKWAHFSDSQHAQHGGPGPRVMQPARRMLRACNCTATCATAAPPRLRNQYRDSRRPRTRPSGASLTVNVTKNGPAVMAVAGGQEQRSRRQPSLRPIQERRENPLSRREDDAPVFRSSNGPRKRNGRPANHSPRRINSVAGQAAPLVSKIQQKTNRKNKTGFKTKEQKETEVLPGLAHRTVRCTREDCLRTLHLRVSQAQPTIIHRTVRCITGQCPVLQSEAALNWPASGKWKAAPLKFTGLSGAPAEQRLPRANSRL

SEQ ID NO: 66610 - protein, 201 aa, Zea mays
  Coding DNA Sequence Number=SeqID_23235
MEGRSAKIHRTVRCTPDCPMRQRSNGYLAPMVDSDSKQCATVHAAESQSRWTEGHRTVRCAPDCPVPHEDKASNGRPAPTPTDRMTWLAHRTLSGFAYPPPSRRLSPGKGDTPKRILPREGTRLRASLLIRGLKAGPSEGFNSRLRACGLHTHYWSEVRRLAPRKGSTAASGYSGSAPTTDQGFEGWPPKGSQPPQTRSEG

SEQ ID NO: 66611 - protein, 149 aa, Zea mays
  Coding DNA Sequence Number=SeqID_23236
  Gene Ontology: Mol. function=carboxyl- or carbamoyltransferase activity; Cellular component=ornithine carbamoyltransferase complex; Biological process=amino acid metabolic process
  Homolog annotation: Hit_ID=Q8SA97; Match level="QueryCoverage=92%, HitCoverage=21%, E-value=4e-19, Identity=47%"; Hit description =Ornithine carbamoyltransferase
MAPPVDVAGLHPRLGDVEAPPKPRSSLSSVAEVESEPLPESEPLVGRSGVRRLLGLSPSPSPGSGGAEFVVFWDLARVRALGRAERSLPSSGAEPKSEPWVGRSGVRRLPGLSPSPSPGSGGAEFAVFRGLARVRALGQAKRSSPSSGA

SEQ ID NO: 66612 - protein, 29 aa, Zea mays
  Coding DNA Sequence Number=SeqID_23237
MGNADIKATFGNGNKHELNVSTYQIGSIY

SEQ ID NO: 66613 - protein, 273 aa, Zea mays
  Coding DNA Sequence Number=SeqID_23238
  Gene Ontology: Mol. function=translation initiation factor activity
  Homolog annotation: Hit_ID=Q6ZI51; Match level="QueryCoverage=51%, HitCoverage=29%, E-value=2e-44, Identity=68%"; Hit description =Putative eukaryotic translation initiation factor
  Pfam annotation: Domain name=eIF-4B; Domain location=1-271; Score= -226.8; E_value=0.00021; Accession=PF06273.2; Description=Plant specific eukaryotic initiation factor
MNGFIRFIEKSVIFIVLLSDDHPRLRSPDLRKPRRDSNRNPPRLRKTFARAVSTANPASFTPSPADSGSRSRYGGLGSGAPASVDRADDDWSRGKKPLPSGPSRYPSLGSTGGGFRDSPVSTDSSDRWSRAAPSNDDRERPRIVLDPPKRDALATPTPPAEVGRSRPSPFGAARPREDVLADKGLDWKMETEIDQKRTSRPTSSQSSRSVGQRVLDHHVLGAPGHRYQPPGCLKILVCVGSGSDPSTGSDINTDDHLDEPPSTRIKINNEWSA

SEQ ID NO: 66614 - protein, 1761 aa, Zea mays
  Coding DNA Sequence Number=SeqID_23239
  Gene Ontology: Mol. function=ARF guanyl-nucleotide exchange factor activity; Cellular component=intracellular; Biological process =regulation of ARF protein signal transduction
  Homolog annotation: Hit_ID=Q8S565; Match level="QueryCoverage=99%, HitCoverage=99%, E-value=0.0, Identity=83%"; Hit description=Guanine nucleotide-exchange protein GEP2
  Pfam annotation: Domain name=DUF1981; Domain location=1144-1229; Score=166.5; E_value=7e-47; Accession=PF09324.1; Description=Domain of unknown function (DUF1981)
  Pfam annotation: Domain name=Sec7; Domain location=602-787; Score =322.8; E_value=6.2e-94; Accession=PF01369.11; Description=Sec7 domain
  Pfam module annotation: Pfam domain module=DUF1981::Sec7; Domain location=1144-1229::602-787
MASAVAAPPPTPPESDPRLVEIFSPFLEKLIKNASWRNKAHSKLSHTAKSILDRLQKPPPPPAAEAQAPSTPTSSPSTPTSSSAQPGPLRSLSLADSELLLAPVISALGSGSAKLAEAALELLHRLIAHSYIHGEADPSADPSAQLVASLLDAACNALGLDDEHIELLLLKTLLSAVTSTSVRLHGDCLLRAVRACYDMYLGSRSAVNQATAKASLVQMLVIVFRRMEADSSTVPVQPIVVADVIELPDAISGSSPTADPNVVQGFISKIIGDFDGALTPLARTTSSAGAGPTVAHDGAFETTAAAEEGANPADLLDSTDKDMLDAKYWEISMYKTAIEGRKDELGVEGAVVGTLDDDADVRIGNKLRRDAFLVFRALCKLSMKTPPKDAPADPIVMRGKILALELLKILLENAGAVFRTSESLVARFRPGLKAEIGVFFPMIILRVLENIAQPNYQAKMIVLRFLEKLCGDSQILVDIFLNYDCDVHSSNIFERMVNGLLKTAQGPPAGVPTTLVPPQDTTMKSEAMKCLVAILRSMGDWMNKQLRIPDPASPNVESEKNDNDDGNELPQADNNGDESSEASDSHSELSNGISEAASLEQRRAYKIELQEGIYLFNRKPKKGIEFLVNASKVGETPEEIAAFLKSASGLNKTMIGDYLGEREDLSLKVMHAYVDSFDFQRLEFDEAIRAFLQGFRLPGEAQKIDRIMEKFAERYCKCNPKAFSSADTAYVLAYSVIMLNTDAHNPMVKNKMSPEDFIRNNRGIDDGKDLPEEFMRSLYERIWKKEIKMKEDEFVPQQQQSTSSNKILGLDNILNIVVRKRGSSMETSDDLIKHMQEQFKEKARMSESVFYPATDVVVLKFMVEVCWAPMLAAFSVPLDQSDDEIVVSQCLEGFRSAIHVTAAMSMKTQRDAFITSLAKFTSLHSAADIKQKNVEAIKAILLIADEDGNYLQEAWEHILTCVSRFENLHLVGEGAPPDATFFALQQPDLDKSKQAKSSILPVLKKKAPNATSASKRGSYDSAGVGGKASGVDQMNNEVTSLLEQVGMAEMNRVFVRSQKLNSEGIIDFVKALCKVSMEELRSASDPRVFSLTKIVEIAHYNMNRIRLVWSSIWHVLSDFFVTIGCSENLSIAIFAMDSLRQLSMKFLEREELTNYNFQNEFMKPFVVVMRKSRAVEIRELIIRCVSQMVLARVSHVKSGWKSMFMVFATASYDDHKNIVLLAFEIIEKILREYFPYITETETTTFNDCVNCLIAFTNSRFNKDISLNAIGFLRFCAAKLAEGDIGSSRLKDNPSNSNPPSPHLTNDGKQECTVLVDKEDHIHFWFPLLAGLSELTFDLRPEIRKSALQVLFDTLRNHGHLFSLPLWEKVFDSVLFPIFDYVRHAIDPSGNPPQGQSVENDPAELDQDAWLYETCTLALQLVVDLFVKFYDTVNPLLKKVLLLLTSFIKRPHQSLAGIGIAAFVRLMSSAGSMFVDEKWLEVVLSLKEAATETLPDFTYVSSGAYLENVPTENGVSADNREDESEPVADDNEESSRSRNLYFTIGDAKCRAAVQLLLIQAVMEVYNMYRGQLSAQNTVILFEALHTVAAHAHKINSDSDLRSKLQELGSMTQMQDPPLLRLENESYQLCLSILQNIFLDSSPDHGSTEVVESHLIGLCKEVLEVYLSTARPSQPSSGTQPLGHWLIPVGSSKRRELAARAPLVVSTLQAISGLGDSAFEKNLRQFFPLLAGLISCEHGSSEVQVALSDMFSTWVGPLVLQSC

SEQ ID NO: 66615 - protein, 870 aa, Zea mays
  Coding DNA Sequence Number=SeqID_23240
  Gene Ontology: Mol. function=hydrolase activity; Cellular component =membrane; Biological process=proton transport
  Homolog annotation: Hit_ID=Q10P12; Match level="QueryCoverage=100%, HitCoverage=100%, E-value=0.0, Identity=76%"; Hit description=V-type ATPase 116kDa subunit family protein, expressed
  Pfam annotation: Domain name=V_ATPase_I; Domain location=37-863; Score=872.3; E_value=2.4e-259; Accession=PF01496.10; Description=V -type ATPase 116kDa subunit family
MARGGGGGCCPPMDLMRSEAMQLVQVIIPAESAHLTVSYLGDLGLLQFKDVWLLAPARPFDYGGGAIQLAPELNPFRSKIVLNIDKSPFQRTYAAQIKRCSEMARKLRFFKEQMSKADITASPTQLNGTHMDFDELEIKLGELEAELTEVNANNEKLQRTYNELLEYHTVLQKAGEFFYSAQRTAAAQQMEMEANQSGQTSLESPLLEQEMTTDPSKQVKLGSLSGLVPKEKAMAFERILFRATRGNIFLRQEPVDEPVTDPVSREKVTKNAFVIFYSGERAKTKILKICDAFNANRYPFPEDVGKQLHAVQEEFKLENSACEEQCPFGNVSGKISELKTTIDMGLAHRDSILKNIASDFEQWNHLVKKEKAIYHTLNMLSVDVTKKCLVAEGWSPIFASIQIQDALQRATLDSKSQVGSIFQVLNTKESPPTYFQTNKFTSAFQEIVDAYGVAKYQEANPGVFTIVTFPFLFAVMFGDWGHGICLLLATLYLIIREKKLASQKLGDIMEMMFGGRYVIMMMAVFSIYTGLIYNEFFSVPFGLFGKSAYACRDSSCSDATTEGLLKVRDAYPFGVDPVWHGSRSELPFLNSLKMKMSILLGVAQMNLGIVISYFNAKFFRNSINVWYQFIPQLIFLNSLFGYLSLLIIIKWCTGSKADLYHVMIYMFLSPTDDLSENQLFSGQKTVQLVLLLLALVSVPWMLIPKPLLLKKQHQQRHQGHQYAMLQGIDESVGAELGEHHEDAHDHEEFEFGEVFVHQLIHTIEFVLGAVSNTASYLRLWALSLAHSELSTVFYEKVLMTAYGFNNVFILIIGVVIFIFATIGVLLVMETLSAFLHALRLHWVEFQNKFYEGDGYKFAPFSFALIREEED

SEQ ID NO: 66616 - protein, 68 aa, Zea mays
  Coding DNA Sequence Number=SeqID_23241
MAIEMYNGSISNVLNWCSVPGYKGLSKHYTPCDLMAFVVYATSISSLAITFKGKFVFLCCVPCHVKCM

SEQ ID NO: 66617 - protein, 20 aa, Zea mays
  Coding DNA Sequence Number=SeqID_23242
MAVRLLFLFFYLIGLVFTYT

SEQ ID NO: 66618 - protein, 110 aa, Zea mays
  Coding DNA Sequence Number=SeqID_23243
MGRGCCGKLGTEVWCALGDGAREKNRGVKRRLTRKTLRLLLPPKVQILLASSSPNPISPVADMSFAVSFLKMDSNLDVIIIGVELTQSGATNIGAKPPNMPTWQADVAEV

SEQ ID NO: 66619 - protein, 932 aa, Zea mays
  Coding DNA Sequence Number=SeqID_23244
  Gene Ontology: Mol. function=oxidoreductase activity; Cellular component=integral to membrane; Biological process=electron transport
  Homolog annotation: Hit_ID=Q2R351; Match level="QueryCoverage=99%, HitCoverage=98%, E-value=0.0, Identity=82%"; Hit description =Respiratory burst oxidase protein D, putative, expressed
  Pfam annotation: Domain name=FAD_binding_6; Domain location=618-708; Score=-22.5; E_value=0.1; Accession=PF00970.15; Description =Oxidoreductase FAD-binding domain
  Pfam annotation: Domain name=FAD_binding_8; Domain location=616-738; Score=208.1; E_value=2e-59; Accession=PF08022.3; Description=FAD -binding domain
  Pfam annotation: Domain name=Ferric_reduct; Domain location=416-575; Score=160.2; E_value=5.6e-45; Accession=PF01794.10; Description =Ferric reductase like transmembrane component
  Pfam annotation: Domain name=NADPH_Ox; Domain location=158-255; Score= 209.6; E_value=7.7e-60; Accession=PF08414.1; Description=Respiratory burst NADPH oxidase
  Pfam annotation: Domain name=NAD_binding_6; Domain location=744-915; Score=263.9; E_value=3.3e-76; Accession=PF08030.3; Description =Ferric reductase NAD binding domain
  Pfam annotation: Domain name=efhand; Domain location=256-284; Score =28.0; E_value=3.4e-05; Accession=PF00036.23; Description=EF hand
  Pfam module annotation: Pfam domain module=FAD_binding_6::FAD_binding_ 8::Ferric_reduct::NADPH_Ox::NAD_binding_6::efhand; Domain location =618-708::616-738::416-575::158-255::744-915::256-284
  Subcellular localization annotation: CTP_CleavageSite=57; ConfidenceScore=5.10e-01
MHNPRPGGGDIVEMSSSATAEGRVIPHSGPLSKKSGARKSARFAESVSAPLSAPPPRASANNNNNNDDDDYVEITLDVRDDSVAVHSVKPAHGGGAGAGAGAGGDDPDVTLLARTLESRRSSSYGHSVIRNASSRIKQVSQELRRIASINRRGAAGPRIDRSKSAAAHALKGLKFISKAEGAAGWEAVERRFDKLAENGLLHRSKFGQCIGMKEPEFAGELFDALSRRRNISGDSISKAELLEFWDQISDTSFDGRLQTFFDMVDKDADGRITEEEVKEIITLSASANKLSKITDQAEEYARLIMEELDPGNLGYIELYNLEMLLLQAPSQSVRIGTTNSRNLSQMLSQSLRPTAEPNPLRRWYRRAQYFLEDNWRRVWVMLLWLCICAGLFAWKFIQYRQRYVFQVMGYCVCVAKGGAETLKFNMALILLPVCRNTITWIRNRTAGVGRVVPFDDNLNFHKVVAVGIAVGAGLHIISHLTCDFPRLLHATDAEYAPLGQYFGVPRPPNYWWFVRGTEGWTGLVMLVLMAVAFTLATPWFRRGRIALPGPLRRLTGFNAFWYSHHCFVVVYALLIVHGHYLYLTHKWYKKSTWMYLAVPMVLYACERLTRALRSSVRPVRILKVAVYPGNVLSLHFSKPQGFRYKSGQYIFVNCAAVSPFQWHPFSITSAPQDDYVSVHIRTLGDWTRELKNVFSRVCRPPTEGKSGLLRAEYDRDGSAVANPSFPKVLIDGPYGAPAQDYKQYDIVLLVGLGIGATPMISIIKDIINNMRQLDGGGDLEASDASASSSSMASFRTRRAYFYWVTREQGSFEWFRGVMDEVAETDRKGVIELHNYCTSVYEEGDARSALIAMLQSLNHAKHGVDVVSGTRVKTHFARPNWRNVYKRIALNHQNQRVGVFYCGAPVLTKELRELAQDFSRKTNTKFEFHKENF

SEQ ID NO: 66620 - protein, 126 aa, Zea mays
  Coding DNA Sequence Number=SeqID_23245
MAELDRGSHEMQVSAFRDRRVPKPTSECAACPSPDGSSAWASAKGGEARWPEMGVREVEVSRPSCSSRAQVGCACSRGVTSVHAGEGSERPQESACLKGKCALGPFLSILVIECQLKCLNVNLCNG

SEQ ID NO: 66621 - protein, 57 aa, Zea mays
  Coding DNA Sequence Number=SeqID_23246
MESLHKSYSYAARSQQGTEVTMPTYNFVKRLNFTLNMVEGAWQVFNRRFKFFRTGSH

SEQ ID NO: 66622 - protein, 99 aa, Zea mays
  Coding DNA Sequence Number=SeqID_23247
  Subcellular localization annotation: CTP_CleavageSite=67; ConfidenceScore=5.64e-01
MGAFVRSAFRFPRASSASGVQVKHSAFIKRRYRGRPLSPRREMKRLRAARHPMTLSPTTKSGHWEAVCSMAHRTVRCTPDMSGAPATSSLPLDSDRWSF

SEQ ID NO: 66623 - protein, 237 aa, Zea mays
  Coding DNA Sequence Number=SeqID_23248
MVSCSACFCSRSWAWRRSRRRELWRSRSTLPLGVPLLQKPHPGRRVDLDHVPRLHGNGAHCGAYSGVGVHRARGLLPSTVGSSSEMGVPSTLPWMKRTFEKKELGVVVCTPSISFEGGAVGMTTCGASRVVLGPEAFASLYRVIHVHTWVGEKKTLRGSRATGGILVGATRGFLGVAFGVPSEGFFLDGSAMRCKAASWSAMQEMGLKWKTSLGLKDDVVDRGSMVRAVTRWGDTQT

SEQ ID NO: 66624 - protein, 61 aa, Zea mays
  Coding DNA Sequence Number=SeqID_23249
MAYRASPMQKAIDRTIDVIIAGRTGDVWSLCPYPPTLSDPTTPNSKVSNIDKYEPKKDPSG

SEQ ID NO: 66625 - protein, 87 aa, Zea mays
  Coding DNA Sequence Number=SeqID_23250
MGPGQYWLPLGPTDRCRLRTLEEVLGSLVSSDVDVCLPERLFRGGGCLLEDSPDEGQVIGPSVEVLDYDCLCDIGDAISHRLEMSEE

SEQ ID NO: 66626 - protein, 296 aa, Zea mays
  Coding DNA Sequence Number=SeqID_23251
  Gene Ontology: Mol. function=hydrolase activity, acting on glycosyl bonds; Cellular component=extracellular region; Biological process =polysaccharide catabolic process
  Homolog annotation: Hit_ID=P29023; Match level="QueryCoverage=95%, HitCoverage=99%, E-value=1e-145, Identity=87%"; Hit description =Endochitinase B precursor
  Pfam annotation: Domain name=Chitin_bind_1; Domain location=33-66; Score=53.0; E_value=1e-12; Accession=PF00187.10; Description=Chitin recognition protein
  Pfam annotation: Domain name=Glyco_hydro_19; Domain location=84-296; Score=409.9; E_value=3.7e-120; Accession=PF00182.10; Description =Chitinase class I
  Pfam module annotation: Pfam domain module=Chitin_bind_1::Glyco_hydro_ 19; Domain location=33-66::84-296
MAMAKAGAPRVSAAQLVTLGLSLLCAVAGPAAAQNCGCQPNVCCSKFGYCGTTDEYCGDGCQSGPCRSGGGGSSGGGGANVASVVTGSFFNGIKSQAGSGCEGKNFYTRSAFLSAVKAYPGFAHGGSQVQGKREIAAFFAHATHETGRKLALSINLALQRGADFCYISEINKSNAYCDPTKRQWPCAAGQKYYGRGPLQISWNYNYGPAGRAIGFDGLGDPGRVARDAVVAFKAALWFWMNSVHGVVPQGFGATTRAINGALECGGNNPAQMNARVGYYRQYCRQLGVDPGPNLTC

SEQ ID NO: 66627 - protein, 75 aa, Zea mays
  Coding DNA Sequence Number=SeqID_23252
MAAPRVARPVALTPRQGKRHLWQAKRVSFHLCHDDRVKKGNEKGDISKRILLSEGNGPPSPPTNQGFEGWPLGRV

SEQ ID NO: 66628 - protein, 373 aa, Zea mays
  Coding DNA Sequence Number=SeqID_23253
  Homolog annotation: Hit_ID=Q8H6I5; Match level="QueryCoverage=18%, HitCoverage=6%, E-value=6e-07, Identity=53%"; Hit description =Putative RIRE2 orf3
  Pfam annotation: Domain name=TGF_beta; Domain location=45-140; Score=- 35.0; E_value=0.083; Accession=PF00019.11; Description=Transforming growth factor beta like
MPWEKALLPLQEGTRACRRFDRYLRPSAAAITAGMITILVVGRSKSGCGLCPTLSFKDVHHPGWGGGRTELGPASAWASDPLLPPAFGGEGHPPALRRRHPPAMRGKANCCCQDMVQLSVFHLGDGGRLHRGVAQHVVCREGGTRVLGRSRSRSCGESGSEDLPVRFGASAARWCGVGGQVAAVVVAEVVVAIVEAASAEAVASADETVSATCAPDLQLFGFNGWFSSPNLRPLCDELKPEEAVSAWTKAESARKEASSAREHVASQAEEVQQRRLELDQVVRGRDQPRSHAAEAVSRAEVLGGQLAEATERPAEASARAGTLAESLADLFGSRIPRPSVSYFLRKVMGEDLAIEAVEKRERRSGKRLFRGKF

SEQ ID NO: 66629 - protein, 213 aa, Zea mays
  Coding DNA Sequence Number=SeqID_23254
  Gene Ontology: Mol. function=transcription regulator activity; Cellular component=nucleus; Biological process=regulation of transcription
  Homolog annotation: Hit_ID=A5BSP9; Match level="QueryCoverage=58%, HitCoverage=88%, E-value=3e-30, Identity=54%"; Hit description =Putative uncharacterized protein
MACALPAYEMMRPLVFSSLITPNQFVLCWQREPSGRKNRARSYFEPETELKKMMMAEVANHSKRNHTDSYFSGKAVAVPAAAATSSEEFGSMSSKKPRNASPRLAPVSPKEKKDKIGERVAALQQLVSPFGKTDTASVLQEASGYIKFLHQQLEVLSSPYMRAPPAAGAAPEDPQRYSLRSRGLCLVPVDLTLQLTQSNGADLWAPAHTARRR

SEQ ID NO: 66630 - protein, 405 aa, Zea mays
  Coding DNA Sequence Number=SeqID_23255
  Gene Ontology: Mol. function=methyltransferase activity; Cellular component=cytoplasm; Biological process=protein amino acid methylation
  Homolog annotation: Hit_ID=A7QM55; Match level="QueryCoverage=83%, HitCoverage=96%, E-value=1e-106, Identity=60%"; Hit description =Chromosome chr5 scaffold_124, whole genome shotgun sequence
MKAPSLLVRCFPGLLPSKDTSCVPIVSEKDLQLPSLAVEIIPSKSAHPYKYAGEKVDVQGFDIFKGKVSVADMISFSPSEVASSKYDGALKSWENSITLVNIIRNEIRDGQLSFRGKRVLELGCGSGVSGIFSCLKGASTVHFQDMNAETIRCRTIPNVLANLEQARDRQNRPSEESPVTPSRQLLDPNVHFYAGEWDELPTVLSAVPPPAAPADLSFSEDDFMDGGSSSHDGSSVVVGQDYCPRRSRKLSGSRRAWERANNETDQADGGYDVILVSDVPYAANSLKKLHALISKCLRPPYGVMYYVASKKSSVGSNGGARQLRALMEEGGVLGGHLLTEHGKGFLEKELDTVLLSWNNIPNKLRSKSQENCGAVDLACYRGAVDKNRLRPQTPSKAAVRFCRPS

SEQ ID NO: 66631 - protein, 51 aa, Zea mays
  Coding DNA Sequence Number=SeqID_23256
MEWLYVQWTTSAGTAEAGMREIRGTDARTVPITDSRWGRLLVPLAVLSRVL

SEQ ID NO: 66632 - protein, 409 aa, Zea mays
  Coding DNA Sequence Number=SeqID_23257
  Gene Ontology: Mol. function=nucleic acid binding; Cellular component= intracellular; Biological process=proteasomal ubiquitin-dependent protein catabolic process
  Homolog annotation: Hit_ID=A2XUZ7; Match level="QueryCoverage=88%, HitCoverage=55%, E-value=1e-118, Identity=59%"; Hit description =Putative uncharacterized protein
  Pfam annotation: Domain name=IBR; Domain location=283-345; Score =87.1; E_value=5.7e-23; Accession=PF01485.12; Description=IBR domain
  Pfam annotation: Domain name=zf-C3HC4; Domain location=214-254; Score= -0.2; E_value=0.096; Accession=PF00097.16; Description=Zinc finger, C3HC4 type (RING finger)
  Pfam annotation: Domain name=zf-CCHC; Domain location=330-347; Score =8.0; E_value=0.094; Accession=PF00098.14; Description=Zinc knuckle
  Pfam module annotation: Pfam domain module=IBR::zf-C3HC4::zf-CCHC; Domain location=283-345::214-254::330-347
MESEDDMHDANDSAEDDFYSGGEAGLAASDDGDADYDFADHDSDDSAELLSHRQQVISGSRSWVVCLVLPNMYMLFLLDLVHHQFDWVGGGKVKQNYSILSEVDIKRRQEDDINRVSTVLSISKPEACVLLRNYNWLSKLELCKSVSKVHDEWFADEERVRKVVGLPEKHIEMPNDREWTIIKLATIYVRIHNYQLLLLGNKVFAMLVWLEVTCGICFESCPLGSMSAAACGHPFCGTCWRGYISTAISDGPGCLMLRCPDPSCAAAVGQDMINSLADVEDTEKYGRYLRRSYIEDNRKTKWCPAPGCEYAAEFVMGSGSYDVNCNCSYGFCWNCTEEAHRPVDCATVSKWILKNSAESENMNWYRRIKHKFFNSADCLEFLLWISLRNTKVVFGYGANWDGAASSGRF

SEQ ID NO: 66633 - protein, 108 aa, Zea mays
  Coding DNA Sequence Number=SeqID_23258
  Homolog annotation: Hit_ID=UPI00005A9633; Match level="QueryCoverage =36%, HitCoverage=7%, E-value=3e-09, Identity=79%"; Hit description =PREDICTED: similar to Copia protein (Gag-int-pol protein)
MRIRLKMMKMKIKKMSHLKKRTMIKGEMPIIKTRKMNKTKDRHTQESTRRFKEIIPVEDALKDSDWVLAMQEELNNFTRNEDAKPIKTPMGTNGHLDLDTGGKSVDQK

SEQ ID NO: 66634 - protein, 17 aa, Zea mays
  Coding DNA Sequence Number=SeqID_23259
MASTCAHRREPFIIAQK

SEQ ID NO: 66635 - protein, 84 aa, Zea mays
  Coding DNA Sequence Number=SeqID_23260
  Subcellular localization annotation: CTP_CleavageSite=46; ConfidenceScore=5.06e-01
DSPVQQQGNGYFGANGYLRRIKCARCARRGQARPCWRTGQSTVHVRCATGHQGGPRSQNSNGRNPTALVTWLSHRTCPVCTGLS

SEQ ID NO: 66636 - protein, 135 aa, Zea mays
  Coding DNA Sequence Number=SeqID_23261
  Subcellular localization annotation: CTP_CleavageSite=30; ConfidenceScore=5.42e-01
MPFARLRLTLGWGKWSLTQGTQRSATRGAVGNAGPARRPRFLILRFAYMNQGKATMSLLVQGNKESLEVGFRLQNFPNLPRSPWLHTDFDFGVLALHGNLMKSTFQKKTGHESISSRDKCHHGWLYLLHKIASNH

SEQ ID NO: 66637 - protein, 51 aa, Zea mays
  Coding DNA Sequence Number=SeqID_23262
MGDRRDWMYEGFKKGYKVWYLHGEDAKRAAEVEVDDGEDAERASGRSRPLE

SEQ ID NO: 66638 - protein, 67 aa, Zea mays
  Coding DNA Sequence Number=SeqID_23263
MGVDWEHTYYHAGGLLNCFSLQVEDEVLADSASETDLLTDCSDGSGTDAEDTAFGTADAAEVDAGSA

SEQ ID NO: 66639 - protein, 590 aa, Zea mays
  Coding DNA Sequence Number=SeqID_23264
  Gene Ontology: Mol. function=transferase activity; Cellular component= cytoplasm
  Homolog annotation: Hit_ID=A2XB41; Match level="QueryCoverage=73%, HitCoverage=98%, E-value=1e-100, Identity=46%"; Hit description =Putative uncharacterized protein
  Pfam annotation: Domain name=Transferase; Domain location=11-449; Score=62.4; E_value=1.5e-15; Accession=PF02458.6; Description =Transferase family
MAPPSPQPPLVRVLDRIRVSPPPADSEQEPALPLTFFDVAWLFTGPVERLFFFRHPEPASTLPLLRSSLSLALRRFYPLAGTIRPHAPFLCSYTHGTDALTMVVAESNSPDDFDSLVARSRRDLDRIRPLVPQLPPPGEDGAFALAAVQATVFRGRGLCLGVSVHHAACDDASTMHFVRTWAATCRLGLENDDGSEDAVLPPRPVLDRSVVADPDDLRGKTLAGMARLAPPPSPPPPQQEEKTPMVMASFLLGREQIDRIKEGAAAKASSFVAASALAWVCLLKCGSVGVAGARRSHMLFSAECRSRLTPPLPAEYFGNCLRPCFVEAATADLLSGETEDGVAAAASAIGSAIQEMEQGVLEGAEGWLGRVLSVLPERPMSVGGSPRHGVYETTDFGWGRPARVEMVSVEKTPGTVALADSPEGDGGIELGVVLPPDAMDAFASCFAHAVGANPTGINAFMGRRSSRAAHFLSPLSLSKPRTPPPPGETPAPDAARRPHPASRPRSAPVARHRLGSAARHRHRPGALSTAPPPAPVAPPAARRPPPERRSLLEQRTPPAAPPALERCPPPAPGASPAAAATNAAAAPDRY

SEQ ID NO: 66640 - protein, 531 aa, Zea mays
  Coding DNA Sequence Number=SeqID_23265
  Gene Ontology: Mol. function=triacylglycerol lipase activity; Cellular component=integral to membrane; Biological process=lipid metabolic process
  Homolog annotation: Hit_ID=A2Z499; Match level="QueryCoverage=96%, HitCoverage=97%, E-value=1e-152, Identity=59%"; Hit description =Putative uncharacterized protein
  Pfam annotation: Domain name=Lipase_3; Domain location=236-373; Score= 96.7; E_value=7e-26; Accession=PF01764.16; Description=Lipase (class 3)
MARRLLSRGRLIKLDRPILPAALTRLLSRGPPTPTTSEPEDKGKKAAAVLVEAVATNHKKDAEVGRDGSEEDDEDTSPPWRSWRPDVAWLSKALEPALDLYKQYSWKPFASSGRVENIPASTRTFSEILSDLQRSKISIKDWSLSDLTIGLYLIYLSQASSKNSEAFKGVQISSNKMVQELIYHLELARGCYKGNAAGLARYSMLRKRNVVKFVKDSSILRPGYYIGIDPRAKLVILGIRGTHTVYDLVTDLIALSDKKVSPKGFSTHFGTYEAARWYLRHELGIIRKCLEKHKDYELRLVGHSLGGASAALLAIMLRKKSKEELGFSPDIISAVGFGTPPCISKEAAESCASYVSTVVLQDDIIPRLSAASLARLRNEILKTDWVSVLEKEDLKHIVDIVTNAKLVVSSIQDVARKLGDYAKIVSPSTNSGVTKDPTNSTEMATSISRNDVFVPEDLFLPGTLYYLQRDIEDINDVEEESYTLWKGDPGENFQRILLSGALICSGWMPAFRSFLMAVPLVFLLACECCTV

SEQ ID NO: 66641 - protein, 21 aa, Zea mays
  Coding DNA Sequence Number=SeqID_23266
MSQVILVCYYQKRLRSLKTSV

SEQ ID NO: 66642 - protein, 42 aa, Zea mays
  Coding DNA Sequence Number=SeqID_23267
MTDMPLELLHMDVFGPIAYISIVRRKISNPRDLKEILKTGSK

SEQ ID NO: 66643 - protein, 162 aa, Zea mays
  Coding DNA Sequence Number=SeqID_23268
  Subcellular localization annotation: CTP_CleavageSite=55; ConfidenceScore=5.30e-01
MAAPPPPPSVGKVTGQTRMLLFRHVGKTSSIPPPASGLTAAIVVVARRRKKYHVVAAVEGHELKAPEMEHRFGLERLRKTTHLELDGKLFVNTQQAPTWCANCRRFDPGGSLDRRVNCRCVSQPRWVGARRNTRGKTVRETAASCCPAPRADALAIGGYKRS

SEQ ID NO: 66644 - protein, 251 aa, Zea mays
  Coding DNA Sequence Number=SeqID_23269
  Gene Ontology: Mol. function=kinase activity; Cellular component =ornithine carbamoyltransferase complex; Biological process=amino acid metabolic process
  Homolog annotation: Hit_ID=Q6QP54; Match level="QueryCoverage=17%, HitCoverage=15%, E-value=3e-10, Identity=79%"; Hit description =Putative kinase
MAIPVDVAGLCPRQGDVGAPPKPRLSLSSVAEAEPEPWGRARRKSFGRGQGGVRALGSGEAEFRRLPGLSPSPSPGVGRSGVRRLPGLSPSPSPGVGRSGVRRLPGLSPSPSPGVGRSGVHRLPGLSPSPSPGVGRSGVRRLPGLSPSTSPGVGRSGVRRGAFVGVAQAALSFCQTGQWSGGVTAVTSALPGARVRIKVSGHLCVKCSCNLLYADGGYQLRIRRLEGTPNYGPRQQRNKDIHPQEDDRGYH

SEQ ID NO: 66645 - protein, 140 aa, Zea mays
  Coding DNA Sequence Number=SeqID_23270
MGKGNKRKHEPTPLSEDFGDSEYSEEEFSSESEGSPAPVSPPASSDDSDDSQGIAAEVWTYIRAVERSGLEGSDESEYSSDEEDSPEVDGDGDDDDDDGGDGGGDGGGRGGNGDGKGGNGASSRGSNGGGNSKGINKASG

SEQ ID NO: 66646 - protein, 343 aa, Zea mays
  Coding DNA Sequence Number=SeqID_23271
  Homolog annotation: Hit_ID=A2XFR6; Match level="QueryCoverage=97%, HitCoverage=93%, E-value=6e-32, Identity=33%"; Hit description =Putative uncharacterized protein
MDPGTHMMVRTLQTTRINTSYAPQPRQISVYPVVVEEVPADLPPIRVENVINLEDNSEEQLPTPTPLAESLAFAAGSSTSALSAPAFQAPAPGGDDPDDSGNDDDEDDDDEDDGEGEHVNEEADYAQQDNFMGIGPVVEHYTSMFETGHFPNLLQEVLHVLGTYVRPLYETRRVSEPPRACYYITRIHVRVMDAGDRGFRTLSAHESLTPLSTYAASVSDAARRTLWSLSHTYRQQLQNTRFRHLPQRLRGESQTNIVPGEAGEDRLNTLAGVVAGLNTDLDSATLDLYRVHLELENAHARIAALEAQLQGLDPPEAQDPAMALSPPRKRLRYGEPESVTRLL

SEQ ID NO: 66647 - protein, 72 aa, Zea mays
  Coding DNA Sequence Number=SeqID_23272
MPSTLILTDLEELEIAKWTGVRGKNSEKRQDLHGVKEGEAVNDEIDEALSSNRYGKEEVSKGRFTVSRKARA

SEQ ID NO: 66648 - protein, 123 aa, Zea mays
  Coding DNA Sequence Number=SeqID_23273
  Gene Ontology: Mol. function=sugar:hydrogen symporter activity; Biological process=carbohydrate transport
  Homolog annotation: Hit_ID=Q69XD4; Match level="QueryCoverage=77%, HitCoverage=30%, E-value=2e-38, Identity=73%"; Hit description =Putative UDP-galactose/UDP-glucose transporter
MAAARRGRGDGANGVVRPRPRDRGIGGGSMAGRVAVLAFCVAGIWSAYIYQGVLQETLSTKRFGPDARRFEHLAFLNFAQNVICFVCSNGSAPIWKYWGVSVTNTIGPTMGIEALKYISYPAQ

SEQ ID NO: 66649 - protein, 248 aa, Zea mays
  Coding DNA Sequence Number=SeqID_23274
  Homolog annotation: Hit_ID=A2YGC2; Match level="QueryCoverage=55%, HitCoverage=60%, E-value=4e-10, Identity=30%"; Hit description =Putative uncharacterized protein
MTGDPDGDREDDDAGGSSSHITELLEEEEPEGWIARPITCDAACGCPFHDALDTLLRRAFDRHTWSIEYRCVVYQHHRGLYPDQWEATCFVRRPDDDLRGAEAFLEHYSITERDTAEAAMQDVARRALSQYCSFFSGVADGLDLKYYPHRSTGSAGGMIVSPVGEGNPRLNSMVNLVAVLNTEMDHALDELGKVRAEVVELRAARAVRHYQDGGSPAPVGIQHPYRSPHHGRFDYGTPDCRTKIDLEP

SEQ ID NO: 66650 - protein, 219 aa, Zea mays
  Coding DNA Sequence Number=SeqID_23275
  Subcellular localization annotation: CTP_CleavageSite=85; ConfidenceScore=5.02e-01
MSSRSLMCRVFPPSEPPDGEHPQSFRLVVGGTQLRGSWYLSAIVRLQGFSSGSPTASPRRWSPKTVTTSPWVGRSKPGCDLGPALSSKDVHHPCWSGGRAEPELYLPRGFVGQPLLQYSRERALTGPARGADFDNAGLVDGGCRQLQRVGLAGLAPGAPSCRKGGCRAARTGGPPKTSRAARAAFVFWGYPAFAPVRRLRAEVGAPLVREDPSGDLPMG

SEQ ID NO: 66651 - protein, 40 aa, Zea mays
  Coding DNA Sequence Number=SeqID_23276
MVVAPWVRYLSQEYDPMLTWAASTYRSPSCPYFRLNKEYR

SEQ ID NO: 66652 - protein, 111 aa, Zea mays
  Coding DNA Sequence Number=SeqID_23277
MVGHRGIGRPGTKLYSAGLYTKRENGEFDADGGGGIAWVLYPQRAESAHERSPIDPNNPNGNGGIARSPSPASQAAPNGAARPREGEDPSDQRGHGSEEGDGISDTQGPHD

SEQ ID NO: 66653 - protein, 240 aa, Zea mays
  Coding DNA Sequence Number=SeqID_23278
MTLEPHPLQPGWRSLDSESFGYRAEDTIEAIALHGLTTFYGFHPLELSTHPIGLFPAEKEDGPMWKDRVEHAKDIWAINPGQTVHLTVRCMNALYRLQVMRGEAMSHLMALLEATKITLDNKEELVVDLSTEMVEKDLQVEQLSNEIQELEELVGTRENTIEVLEDQLINTQQQLAEANQHLDLHHQEIQDMEANEDVDIEGGEEPASSLDTAGSGRPPSPESSVASFCSLGRRDRVRSL

SEQ ID NO: 66654 - protein, 124 aa, Zea mays
  Coding DNA Sequence Number=SeqID_23279
MELAEWQYRKYCTSETKKALVGITDVTEGEKQGSSVDSIIERRCEAPKGARIRRKKTLDKLTNQPGNLIPLDIAEVPDLSASRDNSDMAKDDPCDPTTTSKPEVPMQSLNQLPVVTDLADARSA

SEQ ID NO: 66655 - protein, 73 aa, Zea mays
  Coding DNA Sequence Number=SeqID_23280
MAPFEALYGRRCRTPLNWSQAGERLEHASPTSPAVRARDQPYFGHHRRRSAPRRDRQELPDLTEPSTGPLLSL

SEQ ID NO: 66656 - protein, 70 aa, Zea mays
  Coding DNA Sequence Number=SeqID_23281
MSKTGGSRLSKTVAILAKGRYLRNQESGCGYTEAWSRRSLTRMVITTKDKMITKLYAEELRHHGGKGKPT

SEQ ID NO: 66657 - protein, 308 aa, Zea mays
  Coding DNA Sequence Number=SeqID_23282
MAEPMGGVPDPVSPPVLEEPEVVLGRRLQTGAGPDTAPPPLPQVVITEFHEKLKAYNAVLEKQRDKQTVTEAALQKLQQELDDKAGKISFAEENLRAKDASMEKRATDLIQQEKDLAWREEMWERRDKLLAEHELEAEKKEKNLEERVRWFQAAQVAQMAQAALVSQAAETMKKTLEDLQAKHHIGVQRIAAWADEASSALVPLGVSPIPVSKQLVSISDALPVLDSAANRLRCLDQILGARLEAEGSRLCRVVIEYILTCFRSHDPAISLGPMIAGPVADAEDAARGSVQDVVDVVAKRFQRDPSDE

SEQ ID NO: 66658 - protein, 401 aa, Zea mays
  Coding DNA Sequence Number=SeqID_23283
  Gene Ontology: Mol. function=nucleotide binding; Cellular component =Golgi apparatus
  Homolog annotation: Hit_ID=A2YXZ2; Match level="QueryCoverage=77%, HitCoverage=26%, E-value=1e-150, Identity=81%"; Hit description =Putative uncharacterized protein
  Pfam annotation: Domain name=DUF246; Domain location=6-288; Score =418.2; E_value=1.2e-122; Accession=PF03138.5; Description=Plant protein family
MPGRRGASARGAREQGKKGEREKGRGGEKLTFGDPNSGDLDSKPLGHHGEREVIRLTKFDYRLANRLQTDLQKLRCRVNYHALRFTAPIQEMGEKLIQRMRERSMYFIALHLRFEPDMLAFSGCYYGGGEKERRELGAIRKRWKGLHPNPEKGRRQGRCPLTPEEVGLMLRALGYRKDVHIYVASGEIYGGARTLAPLKALFPNLHTKETISSKEELAPFSKYSSRMAALDFIVCDESDAFVANNNGNMAKILAGRRRYFGHKRTIRPNAKRLYPLFLNRGNMSWDAFSSKVHMVQKGFMGEPKELRPGRGEFHENPSTCICERTDGKAVARAKSQDDQVLNSVADQGKGIGEPAVPNHTDEEAGEPDDDEDVPADKEVVDAEMVDDVLAGDPELEQILSD

SEQ ID NO: 66659 - protein, 87 aa, Zea mays
  Coding DNA Sequence Number=SeqID_23284
MRKFHGISSQVYVDELLDIIKKLYQYYVVAAPSTMRPTNKNVGSIVGDLEVIEAIVSNLEIEDDEVIDSDEGDIDGLNADGQNYFDM

SEQ ID NO: 66660 - protein, 442 aa, Zea mays
  Coding DNA Sequence Number=SeqID_23285
  Subcellular localization annotation: CTP_CleavageSite=27; ConfidenceScore=5.13e-01
MQETWRTLRSSRTTMSSSCVSDKPPVSCLTVEPPGETAPPPTRGARALTLGAGAAGLLPLASAGGGVWEAALACTSARDAPYTTTGHPTAGEDPDGDDDDDGGNLGHNTELSEEQELEGWIARPVTRDAARGCHFHDALDTLLRQAFDRHTWSIEYRCVVYQHRRGLYLDQLEATFLVRRSHDDLQGAEAFSEHYSITQRDTAEVAMQDAARRTRGVIISPVAEGNPRLNSMVNLVTVLNTELDHALDELGKARVEIAKLHAERAERRHQKDGSLAPVGIQHPYRSPPRGHYAYGTPDSPTALHGDKTVEPPGETALPPARGAGAGAAGLFPLASAGGGVWEVALPCTSARDATYTTTGHPTAGGDPDGDDDDCGSSGHNTKLSEEQELEGWIARPVTRDAARGCHFHDALDTLLRRAFDRHTWSIEYCCIVYQHHRGLYPA

SEQ ID NO: 66661 - protein, 156 aa, Zea mays
  Coding DNA Sequence Number=SeqID_23286
MASASVEGIGGGFGVASLPREAADVASQFIDSVAIRDPYVSPALEFCLKPINFCFEIPDRIITPTTAILVSWGKLMTWHTNWAKKGFAPIPAVTEPPKSLGPPTVVLVQRTSYNPAGVPESLDKFGICFSYFSQERFTHHADITDHQRYENAEAIT

SEQ ID NO: 66662 - protein, 36 aa, Zea mays
  Coding DNA Sequence Number=SeqID_23287
MTMMGSTSEKMYLCQDHVDVGLLTEDPLTGHMPRHG

SEQ ID NO: 66663 - protein, 215 aa, Zea mays
  Coding DNA Sequence Number=SeqID_23288
MAPEAGLGCCQPHPGGWRSSRSSTGGTVFLSGQSVEGRSDCGHFGLVDWKARVRIMCQAILALNAPAIRSILGFLPLGPPWNRNNKTLSLLHLKTIGNKTLSMELLSKTYPTKEKTFKGMLVIRESRAILSIVKTFYKTGIQRKKKPSGSISLHDEVPDGASSKGQSSGELDWPEGAKTGDPERLTLNWTFPDQFPQLNFMVGNLSSFVHADHGR

SEQ ID NO: 66664 - protein, 310 aa, Zea mays
  Coding DNA Sequence Number=SeqID_23289
  Subcellular localization annotation: CTP_CleavageSite=51; ConfidenceScore=5.56e-01
MGAIPVKAPSTQGTRSRLARAQPRAGTEDQGRFTPRPRVSSSNGCTFDSPEAQLGQASRRSNLGQIASPSRPDRRSIQCKDRLTPYPDACFPVDKVEESPPRPTPGLGLDLASDDDLRLARHQGSDSTSPRTMISASPDPRARTRPRLGRRSPPRPTPGLGLDLALDDDLRLARPPGSDSASTLDDGLRLARPPGSDSTSTPEDGLRLARPPGLGLSLDLGGVTTSLGPTTPQGEAIITLPLASPGYREQDRCPIWLAPLKQVMMAPHVLHDNGGSHPPTKARIRQQGSDSPDSCASTGLKRSSDSHDAT

SEQ ID NO: 66665 - protein, 214 aa, Zea mays
  Coding DNA Sequence Number=SeqID_23290
  Gene Ontology: Mol. function=catalytic activity; Cellular component =cytoplasm; Biological process=metabolic process
  Homolog annotation: Hit_ID=Q7G3D3; Match level="QueryCoverage=30%, HitCoverage=2%, E-value=1e-27, Identity=90%"; Hit description=Acetyl- coenzyme A carboxylase ACC1A, putative, expressed
  Pfam annotation: Domain name=Biotin_carb_C; Domain location=7-56; Score=-43.6; E_value=0.0083; Accession=PF02785.10; Description =Biotin carboxylase C-terminal domain
MVLSAFSNEHRPPVNMVLGLKEIQIRGEIRTNVDYIVDLLNATEYHKNKIHTGWLDNIIAMRVRAERPPWYLSVVGGALYVCLFDYNHDFLPASELGNVSDSDEEEEDDDRSDASADDKPTTKNPTSSPPVYGGITTQPDVQERGWLLDGYPRSFSQAQCLENLKIRPDIFIVLEEEKEGVILLEVEEDEVVIDFKPTPSAMPTSASAPCTHPS

SEQ ID NO: 66666 - protein, 92 aa, Zea mays
  Coding DNA Sequence Number=SeqID_23291
ACEDVDGQVLLSPRAKETLKRDKETNDLARLECVKEKLGGRVEEERVWASLKALHEKFDAAKENFVQVQLCLEKLEREKICLSEVVDVARAI

SEQ ID NO: 66667 - protein, 145 aa, Zea mays
  Coding DNA Sequence Number=SeqID_23292
MQPVLKSTDRKAQTTKIHDDKHDSNKEKGCPEKTNNRDIDSVERVPERFHSLTSQRSGFPLTPPRANAVEQGIYQFPSERFRSFDNFDELLVTPGIIITFAQGLQVEVRHGDGEGLADPSAEGFRFELSNPVKRSKLKIKDLGPD

SEQ ID NO: 66668 - protein, 66 aa, Zea mays
  Coding DNA Sequence Number=SeqID_23293
MSKNTRDIRFIPRFGHTTKVPYFLVEAPTKSLVSSNPNPPFADHKAGVEKAQLQLKKLNSAKVHLS

SEQ ID NO: 66669 - protein, 105 aa, Zea mays
  Coding DNA Sequence Number=SeqID_23294
MSCVRKVVSKKRKMVYALDGDNRTSALLRSFQPLTLVKFTWVDTPAISRRNSSKVHNIEEMILSMDAQYDVTQEWLDRVKIARKGLRELSEGEGQAIACGFPYRG

SEQ ID NO: 66670 - protein, 274 aa, Zea mays
  Coding DNA Sequence Number=SeqID_23295
MEAEEWHLIEEPSTEMIKPRGGRAFPSTLRGGSFDRLFVEDARHHPARLRAPPCPLFFVWVFLVVVKLDHQAIFSTSLLLVVGPEGGATSHTTGGGEAVGGSRPFGGEGPELSALRAKAECIENLQKKFPEAHDAMKADEEAKKVVQVQTSLKEHDAKLHELHLATSEVWDNLAPPSSAHVPLLDRLRALLGHVEHAVFEGAFHGGSLALGQMVSHFVEIDIGMIVEGFATGRSDEELDNIKEHVRPHARSLASRVNVKMLLKGPLSPKPPPNA

SEQ ID NO: 66671 - protein, 45 aa, Zea mays
  Coding DNA Sequence Number=SeqID_23296
MAAGLRGDVRVDVGKLRLVVRISHKSCGSPALPDSLVRLRGAMFV

SEQ ID NO: 66672 - protein, 79 aa, Zea mays
  Coding DNA Sequence Number=SeqID_23297
METKVFLSKNFDMDLGEADVILNIKLIKEARKEMAAGLRGNVRVDAGKLRLVLQFEEPKEQLIQEAKAKFLANFKVKST

SEQ ID NO: 66673 - protein, 83 aa, Zea mays
  Coding DNA Sequence Number=SeqID_23298
MTRNKEKKFFKRKDGKHKIFHKNGKAYIVGDWLTDFESSSGSSSVKKKMTKTSLLSLGTSLHHHHPLIDFSICLMAKVNGGYN

SEQ ID NO: 66674 - protein, 537 aa, Zea mays
  Coding DNA Sequence Number=SeqID_23299
  Gene Ontology: Mol. function=aspartic-type endopeptidase activity; Cellular component=extracellular region; Biological process =proteolysis
  Homolog annotation: Hit_ID=Q94D20; Match level="QueryCoverage=59%, HitCoverage=72%, E-value=2e-76, Identity=68%"; Hit description =Nucleoid DNA-binding protein cnd41-like
  Pfam annotation: Domain name=Asp; Domain location=128-517; Score= -165.1; E_value=0.00077; Accession=PF00026.14; Description=Eukaryotic aspartyl protease
MTTLAALLLLVAASNVVKAVEYHSFVATPLSPHLYTAPSLDADEDVFGGSLAVAEEAAAASDSAVHFRVVHRDTFAVNATAGELLKHRLQRDKRRAARISEAAGAGGGNGRKGVAAPVVSGLAQGSGEYFTKIGVGTPATQALMVLDTGSDVVWVQCAPCRRCYEQSGPVFDPRRSSSYGAVGCGAALCRRLDSGGCDLRRGACMYQVAYGDGSVTAGDFVTETLTFAGGARVARVALGCGHDNEGLFVAAAAGSARAVVPTDLRATRSFSTASSTALSARRRAGSTGPPHLVGISVGGARVPGVAESDLRLDPSTGRGGVIVDSGTSVTRLARASYSALRDAFRAAAAGGLRLSPRRVLAVRHVLRPGRAQGGEGADRVDALRGRRRGRTAPPRTTSSPWTPGAPSASRSRAPTAACPSSATSSSRGSAWCSTATASAWGSRPKAAESPQAGVVRCSAVQGGDNGVLAGCVIRHSGMERLRSTWLFKCWVKRCRPGATTCGWGQAAGHLHASSAPLHPATCIHSDTSQVERRGPCR

SEQ ID NO: 66675 - protein, 275 aa, Zea mays
  Coding DNA Sequence Number=SeqID_23300
  Gene Ontology: Mol. function=calcium ion binding; Cellular component =plasma membrane; Biological process=abscisic acid mediated signaling
  Homolog annotation: Hit_ID=Q3HRP2; Match level="QueryCoverage=71%, HitCoverage=84%, E-value=2e-82, Identity=79%"; Hit description =Calcineurin B-like protein 5
  Pfam annotation: Domain name=efhand; Domain location=120-148; Score =21.5; E_value=0.0032; Accession=PF00036.23; Description=EF hand
  Pfam annotation: Domain name=efhand; Domain location=157-185; Score =3.7; E_value=7.4; Accession=PF00036.23; Description=EF hand
  Pfam annotation: Domain name=efhand; Domain location=212-240; Score =24.7; E_value=0.00034; Accession=PF00036.23; Description=EF hand
  Pfam module annotation: Pfam domain module=efhand::efhand::efhand; Domain location=120-148::157-185::212-240
ADPRDSSDVSPSNIIEPTWETLSAEEQLEFEEHQEQLIKEAKAKLLANFKVDRNNKVVRQRATDLASLRPTVVTWPQVSEVEALHDLFRKISNSVIRDNLIHKEEFQLALFRGKKQQNLFVDRVFDLFDQKRNGVIEFGEFVRSLGVFHPDAPEDQKVAFAFKLYDLKQTGFIERHEEYFSLSSVTSQLKEMVLALLDESDLDIASDAVEMIVDRTFDQADTKGDGKIDQEEWTEYAKDNPYVLRNMTLPYLKDITMVFPSFVMHSEISETDMAV

SEQ ID NO: 66676 - protein, 51 aa, Zea mays
  Coding DNA Sequence Number=SeqID_23301
  Pfam annotation: Domain name=PAM2; Domain location=12-29; Score=15.8; E_value=0.031; Accession=PF07145.6; Description=Ataxin-2 C-terminal region
MSIEERKRSMIGKSTALNPNAEEFVLCPLDLLVIIPICERQKGLGQWIVID

SEQ ID NO: 66677 - protein, 51 aa, Zea mays
  Coding DNA Sequence Number=SeqID_23302
MGKPVPSLLMLLLNRVTALVPSITGIGDHVSGRVRGKVYCQVQSEFSNNYA

SEQ ID NO: 66678 - protein, 227 aa, Zea mays
  Coding DNA Sequence Number=SeqID_23303
MRKAQENNEHRMQIFFLVHLSNEEPRKNKRYPSPEQIQDCNLADGEYVLIPEQGAVHEEDQEQAPETAIEDLPAAPAIEGKPRCMKSGFLFDMDTGMLGREVLNSASYPMPPLYTVQIYEEHRVPRYRVWLTLEAHPLQPGWRSLDSETNGFRMDDTTEVAAMKTLTTFCGYHPLEMVMHPLGLFPAEKKDDPKWCNRVTHVKDVWVMYPDLVGRVTVQYMSALYRL

SEQ ID NO: 66679 - protein, 159 aa, Zea mays
  Coding DNA Sequence Number=SeqID_23304
MGLHERVSPVSCGRYFRELVTRRLPSWRLLDSESFGYRAEDTIEPIAHHRLTTFCGFHPLELSTHPIGQTAHWTVRCMNSLYRLQVMRGEAMSHLMALLEATKITLDNREELVVDLSTEMVEKDLQVEQLSNEIQELEELVGTRENTIEVLKDQLINTQ

SEQ ID NO: 66680 - protein, 54 aa, Zea mays
  Coding DNA Sequence Number=SeqID_23305
MAEELVSSVMTSWGDKMTGGSHLSSTDAVAGGLPASPRSSRELDTALRNRLNYK

SEQ ID NO: 66681 - protein, 56 aa, Zea mays
  Coding DNA Sequence Number=SeqID_23306
MAGSVARTLGLAVGCARAAVLAAVRKKMGAGAPLSLGKRTNSVHDWAGSVSGTHLR

SEQ ID NO: 66682 - protein, 175 aa, Zea mays
  Coding DNA Sequence Number=SeqID_23307
MAGAHLGTQDYDHMWKNLRSKSRICPGVSQLSDSPRCQEEVCAGLLQRFARLRPLATFEHWKKQTATCSTPSAAPEHARARARAAPKPSQCPAIPNPVQPSEKTVHVSVKLPERGIGLCFTGEAGPRSPDFNRPPATVDRGSLEEMVAGITWPTTLPPGWTVEWDPASAEEEHEE

SEQ ID NO: 66683 - protein, 155 aa, Zea mays
  Coding DNA Sequence Number=SeqID_23308
MGKSKNGGGSSHHSGDKRKREPTPPSEDFGDSEYSEEEFSSESEGSPAPASPPASSDDSDDSQGIAAEVWTYIRAIECVGLEGSDESEYSSDEENPSDSSEEGSGDDGGYGDDDEGDGDGGGDSVKGGDDSGKGGSGDGGDGSKGSSKGSNKASG

SEQ ID NO: 66684 - protein, 45 aa, Zea mays
  Coding DNA Sequence Number=SeqID_23309
MARGQHQLVGGASLEMRRVGGLRLPKKSFGMTAEKGNRLKDEKPN

SEQ ID NO: 66685 - protein, 247 aa, Zea mays
  Coding DNA Sequence Number=SeqID_23310
  Homolog annotation: Hit_ID=A6MZI2; Match level="QueryCoverage=10%, HitCoverage=100%, E-value=3e-07, Identity=100%"; Hit description =Putative uncharacterized protein
MAVRPCVWAENEGFAMARGPKTTNSPKSWEGVSSAEPRTPSRPSRGRSAPYRAQLRLALLAAWPAVRLRWRMSCLGPVTAWRTPAAVRPTPGARVPSLVRASCACCVEKCLRAATRPTGSRARYTLPSSSSPPGVRLVGSRAPAAFASCRRRPMAGGTEDTSLALLVSDVAHAEGRRRVGVTRPRIGPPERTTSSPARRLRAEAGAGPSARTCYLVDPASSHMLVSKIKPCMCKYELIRTVKLRMAH

SEQ ID NO: 66686 - protein, 59 aa, Zea mays
  Coding DNA Sequence Number=SeqID_23311
  Subcellular localization annotation: CTP_CleavageSite=42; ConfidenceScore=5.12e-01
MASARATTAPPTTRPVALTPRRDRRRFWQEKRATLCLRRNNRAKKGTGKGGYPEKDPSP

SEQ ID NO: 66687 - protein, 152 aa, Zea mays
  Coding DNA Sequence Number=SeqID_23312
  Subcellular localization annotation: CTP_CleavageSite=51; ConfidenceScore=5.25e-01
MCAPALGHARSRPRTRLHLAQPCPPTPACVPPQSSLVPSPAGVFRAPALVLCALPHSPTPIIIEFFVPRRALPSLPVARSPPRPPPSPRVRLPRAHRCHPSTSLVLPTVVPACGNLTHPLVPPAAGSCLGSLFLQADQQLGGAPPTTRAAPP

SEQ ID NO: 66688 - protein, 132 aa, Zea mays
  Coding DNA Sequence Number=SeqID_23313
MRARWGKVALHGGPHAQVSEHHLHDRKSLSAGPRQSACLQKRGQKRILLREGNRLRASLLIRGSKAGPSEGFNSRLRARGLHTHYWSEVRRSAPRKGSTAASGHSGSAPTTDQGFVAWPSKGSQPPRTQSEG

SEQ ID NO: 66689 - protein, 151 aa, Zea mays
  Coding DNA Sequence Number=SeqID_23314
  Subcellular localization annotation: CTP_CleavageSite=48; ConfidenceScore=5.16e-01
MAGESKPGCGLFPSLSLKDFHHQCWGGHCRVPGSRTRVASEPLPAPPSATAAGRGSSADEIDGAAHGPTSNSTAFCPSLPHEFWYGRGPHGSSIRPEVIAAAVRPPGAEVVVVAAAGAGDGEPFVGLPLLRRPPNRVGMFVPAEVEPEFRL

SEQ ID NO: 66690 - protein, 138 aa, Zea mays
  Coding DNA Sequence Number=SeqID_23315
  Gene Ontology: Mol. function=kinase activity; Cellular component =ornithine carbamoyltransferase complex; Biological process=amino acid metabolic process
  Homolog annotation: Hit_ID=Q6QP54; Match level="QueryCoverage=68%, HitCoverage=36%, E-value=2e-20, Identity=54%"; Hit description =Putative kinase
MGRRETEREGGKKKAAGARERGGNPAAFVFVPRPGRTESAWGRVMMAPPVDVVGPRPRLGDVEAPPRSRSTLSSMVEVESELLGRARRRPSAEARAESEPWGRAKRSSSSSGAEPESVPWGRANQSSPSSGTEPKSEP

SEQ ID NO: 66691 - protein, 124 aa, Zea mays
  Coding DNA Sequence Number=SeqID_23316
MRRPPSEVKVEAEPWGRARRRSSSEAEVGAEPLGRARRRPPVAPEESPQLGASRPYTFDVHKESRSKGGMSNSHKTHKSEQQHAHKSQQELATQPNEFTTPQELYMLSQRNKCAESMTWCLGIL

SEQ ID NO: 66692 - protein, 280 aa, Zea mays
  Coding DNA Sequence Number=SeqID_23317
  Homolog annotation: Hit_ID=Q6JAD6; Match level="QueryCoverage=100%, HitCoverage=45%, E-value=1e-112, Identity=65%"; Hit description =Putative uncharacterized protein
RNETEVRPLAADPRLFDLQRATAAQESFFRAQMSAQIALRVHRLLDLPAFLLAADADSEVHLSYLPGLLTLLTTSGRYVEEWVRVFYASVWIDPDHQWMRFRFEREDVTIHASQICQLFGFNESSTRLHNLCYGTSDPPRRPHGGVAPGTTHVAALFRHPSQMGCDVLWQTSPQEAATHIQLWLLGALVSHSEFDVVDFLICEIEDTVLDGLHACRQLPYAHYLCHIFAQLIRPPQFQGTLEASRLLFGSYRPALEDPVPAPAPVIDTQAEDTTFHQFET

SEQ ID NO: 66693 - protein, 147 aa, Zea mays
  Coding DNA Sequence Number=SeqID_23318
MEFRSSRIYSSHVHEMQRLGYFGMELGGHRGLKMSPRWRKKIGGLIAQFGSCTFTPRTGKTSVEVVEIVPCAKNKWDRMVQSPAFTIDLRGWDAVAFVKEVELEAVKIVGIDGDMRWAWGGYDFARTPGNIFTNVKAVMDKDRQEAM

SEQ ID NO: 66694 - protein, 148 aa, Zea mays
  Coding DNA Sequence Number=SeqID_23319
  Homolog annotation: Hit_ID=Q5VR92; Match level="QueryCoverage=46%, HitCoverage=9%, E-value=6e-15, Identity=58%"; Hit description =Putative adaptor protein kanadaptin
MMSDKTRESKRYERVWMLALACPTYLRLVACSFGSTLNNSMPTQDEKNTGTQLHLANQILHQCLASQYIGWFRNDGKVFLFDLGSTHGSFINKNLIKKKLYTEIHVGDVIRFGQDLVSIFFFYLPFHIQKFLRKLQHCGVHLFPMLSL

SEQ ID NO: 66695 - protein, 385 aa, Zea mays
  Coding DNA Sequence Number=SeqID_23320
MPSSSSSAPNTPPAGASSEDTLSNMAAEELHPGDTVEFGVSRISSVRIQDMQQLGYFGSGVGRVPGAEEVLRRFEVQVHQLTPNAVVALAKYVWATTSYGGQPSVEDDEDEGALRCAACMSSGRDLVEEFIGYGVWPLAHGWALGEVCPREMPFRGGQRVRSPAFALDLHGRDPTAFVREAEDGAARIVGCYVPKTEGLRSWDIRGANDRLNRVFELNRLPYAGYPGEDAADHHGEKPDGCDRGRAFAVDGDVRSPRGKDVFARAPGVFGADAGGYRGSMAQERSDPPRGWRRLFTSRMARDLKVFPYGRNIAAVVSAVMNKDRQDTAQKRRAVVRIADPRHEAKRARGSTKAAASGSSQPMPAVKPAAPGPSKASAGAKTAAFG

SEQ ID NO: 66696 - protein, 238 aa, Zea mays
  Coding DNA Sequence Number=SeqID_23321
  Homolog annotation: Hit_ID=A2YNJ6; Match level="QueryCoverage=69%, HitCoverage=96%, E-value=6e-19, Identity=40%"; Hit description =Putative uncharacterized protein
LGRPRSSHVGEESMTGGWQGSWRGNQAGGWRGSRPAEIVAARRVEVAERIGDGEGLVGEGESDAGIVGGLHKMNQLSLLHRAFHLHLLSPERGHGLTAAVIRVRLPSSQHTPRQHAKRLLAVAPHESIAAATEESSRPRQELAAAGNKNDGGGGGGRTCALPTWALIGGITAGVAVALALSAGAGPALALGPEGPLVEEFWDNMRRYSLYVVTVSTGVAGFLVSQVLNAMVGNSDFIY

SEQ ID NO: 66697 - protein, 31 aa, Zea mays
  Coding DNA Sequence Number=SeqID_23322
MQLHILRGGKAEVILAFADICTHEVLDTCWE

SEQ ID NO: 66698 - protein, 97 aa, Zea mays
  Coding DNA Sequence Number=SeqID_23323
  Homolog annotation: Hit_ID=Q5VR92; Match level="QueryCoverage=87%, HitCoverage=11%, E-value=4e-27, Identity=71%"; Hit description =Putative adaptor protein kanadaptin
METHMNEEKDLQKLRDARIQQDMLDREASILRAKTQAALAEGISWGMTDDAIEESAEDDADEITWQTYKGQLTDRQEKTRSKIVKRMEKSPETWVDE

SEQ ID NO: 66699 - protein, 192 aa, Zea mays
  Coding DNA Sequence Number=SeqID_23324
MAASIGVVHGDRDVVNEDDVTKFGIVPGDGHADVQDVLTKLAGDAAHGDGDVGCQDGVTKVACGAAHADGDVDCQDSVTKVACGTFHGDGDAGCQDAAAKLAAEAMRSDRNPSYLIPDVMVARSMRDWRGNSMDGAAGGGGVGPWLLLPQPLRGPPRALTPREGQRADTTSTAMTAATIVVVATDATGLQRA

SEQ ID NO: 66700 - protein, 163 aa, Zea mays
  Coding DNA Sequence Number=SeqID_23325
MSTMSKVTYSLRAFGAVPNDSGSLILPIGKIPSYYSVVYHHCIGMGCTAEIDVSGIEVVVTADLDAMVVVEAVELGSLGVAGIYCGFAGEYGNVHYGIGAGCTDGDARRATFAVSSMEAVAFKVAFLESTKGGRQMLELTDTWSSKSKQWENGNALMLNNMVD

SEQ ID NO: 66701 - protein, 101 aa, Zea mays
  Coding DNA Sequence Number=SeqID_23326
MDVLMIRNLGEDQQGLGKGQGVEEEEQGRPQQEGDQSGFAHVGECLCEVGKMVFFVLARNDYVVNISENVATHLTFENAFAHSGTNAQSVFNDGAADADEV

SEQ ID NO: 66702 - protein, 183 aa, Zea mays
  Coding DNA Sequence Number=SeqID_23327
  Gene Ontology: Mol. function=phosphoprotein phosphatase activity; Cellular component=cytoplasm; Biological process=negative regulation of tyrosine phosphorylation of Stat3 protein
  Homolog annotation: Hit_ID=Q6VUQ5; Match level="QueryCoverage=56%, HitCoverage=29%, E-value=4e-24, Identity=54%"; Hit description =Serine/threonine protein phosphatase
MSDHQISQLRDCKFMLAVEVNALCEQAKEILMEEWKVQPVRCPVTVCGDIHGQFYDPIELFHIGSNASNTNHHFMCDYIGQSLPSSHEEPYADRGRSSLSPVQLYVKATSVPWETSWRRAACSRSKSSRRDCGSIARGPTGASRTAAPPWPTLRACTCSGRGSHPLPHTTHFMLKYTWVASSF

SEQ ID NO: 66703 - protein, 104 aa, Zea mays
  Coding DNA Sequence Number=SeqID_23328
  Gene Ontology: Mol. function=protein kinase activity; Biological process=protein amino acid phosphorylation
  Homolog annotation: Hit_ID=Q7XIR5; Match level="QueryCoverage=87%, HitCoverage=27%, E-value=8e-23, Identity=57%"; Hit description =Serine/threonine-protein kinase bub1,checkpoint-associated-like protein
VDTYDLYVIVHMMLHELGMSVEKVPKIGGGYNYQPKQPFIRYWNVDLWQKLFSNDSVVAALQSLRGVFLGYMCSNRELVGKLIELLAKQKASYTVAMSCDSPNV

SEQ ID NO: 66704 - protein, 215 aa, Zea mays
  Coding DNA Sequence Number=SeqID_23329
  Pfam annotation: Domain name=MAP7; Domain location=2-155; Score= -80.8; E_value=0.063; Accession=PF05672.2; Description=MAP7 (E-MAP -115) family
MAPKRASSKAAPSIDEAAKAALLAEKKGKALVDTTHQEACEDDALSKRQRNEQPTPEGTLRTCSSRGQPQPPPGFAPLEGEDATEDGEVIGVSAEEQLQLRALRIKNRNLQKQKEILEAKRQRVSAQAKVRQMIRDEEQRAQELEQEIALMQREGQPDLQHGPPLQQRAPIRDLFIPQRGPVIPHATAFQGIWIGGHDPARRANGPTCYLKQSGR

SEQ ID NO: 66705 - protein, 102 aa, Zea mays
  Coding DNA Sequence Number=SeqID_23330
MSRVFDDYYIEDCGVILAPETVRHKVMSDTDIRDFNPFWSGVPFHFHSLASPAARRHHPPTLNSARARPFPANVSDVVGVAPSQPAPAPNVIGARFTGSTSG

SEQ ID NO: 66706 - protein, 148 aa, Zea mays
  Coding DNA Sequence Number=SeqID_23331
MDIIAKFRIFSCCCWWWRRLLAKLRPEAADVVCTERIEMAAGRRSRICRLPDEAHLGVGARGVVVFVAGRGVDVAALVGGDDHAGVLGEPLHPLLHPAVVLRAPVVAPACNAASTSYHAGVPKMNLEREGECSAELASFLGGLLRLLC

SEQ ID NO: 66707 - protein, 269 aa, Zea mays
  Coding DNA Sequence Number=SeqID_23332
  Gene Ontology: Mol. function=sequence-specific DNA binding; Cellular component=nucleus; Biological process=regulation of transcription, DNA-dependent
  Homolog annotation: Hit_ID=Q5VR71; Match level="QueryCoverage=34%, HitCoverage=33%, E-value=9e-40, Identity=84%"; Hit description =Putative WRKY DNA-binding protein
  Pfam annotation: Domain name=WRKY; Domain location=191-250; Score =142.4; E_value=1.3e-39; Accession=PF03106.6; Description=WRKY DNA -binding domain
  Subcellular localization annotation: CTP_CleavageSite=59; ConfidenceScore=5.69e-01
MALGHGGQHMTASSTAGGMAASSSSTPTITFAFQQPSPPPPPTATSSLALAHPHHHGVLASSRPPPSTTTSMAMQQERRTFPFPLPRGRRLLLIIHACVTVTVILSSVSIRSTAAACEEEPEPHHDHRQQAGQGGRPPRGKGAAVSEGSAAALGVGAVRMKKAGGGGGGKARRKVREPRFCFKTMSDVDVLDDGYKWRKYGQKVVKNTQHPRSYYRCTQDNCRVKKRVERLAEDPRMVITTYEGRHVHSPSRDEDDDAARANAEMSFIW

SEQ ID NO: 66708 - protein, 79 aa, Zea mays
  Coding DNA Sequence Number=SeqID_23333
MKRASTSKGVKDSTKTNRKNKTGFKTKEQKETEVLPGLAHRTVRCGTGQCPVHHRTMSGAPGRIAFKLFTFGFLRRSPL

SEQ ID NO: 66709 - protein, 173 aa, Zea mays
  Coding DNA Sequence Number=SeqID_23334
MEDRKGSPERKSTSCHPRMRSPEGAHHQQKNQMQKTYPDDDEEEDGDGNRSQKASNHQEWVPDLGRKEEESDWSRMAWGHQEWVPDLNREEEEEPRSNEWYTKLLLVPLIKVGREGGGQRRRGPRRQGMTCGGSITTKVLMQLVSLALVHGLLDRPVAAHGEGAKNALSQTNE

SEQ ID NO: 66710 - protein, 708 aa, Zea mays
  Coding DNA Sequence Number=SeqID_23335
  Gene Ontology: Mol. function=oxidoreductase activity; Cellular component=endoplasmic reticulum; Biological process=electron transport
  Homolog annotation: Hit_ID=A3AMW9; Match level="QueryCoverage=28%, HitCoverage=33%, E-value=3e-56, Identity=51%"; Hit description =Putative uncharacterized protein
  Pfam annotation: Domain name=p450; Domain location=240-630; Score= -123.6; E_value=1.2e-06; Accession=PF00067.13; Description=Cytochrome P450
MELSDATARRLFDELQQMETRLSERIAGRCDGLELRIGERCDEPHTHFTSRCDGIQQQVASLFDSFNGTATSSATAPRYDDVFGSSTGTAYDDAFATSASAAAPSPSYDDDEPVFDAWPIFDEESIDSTASQALFSDGADHCFGDELDTGRTMEFCYNDDNHIGVDVDIDILPTFEFDIKQTVVVASSTKDSLELTGADQRSSNPGHSTSTMDAMMQLLLDEMALMEARITDVIEGRSSLSDTEATVGSRARNIPDSVVADLAADHLFGGAFGLDNLTPMAAQAPSAEEIPQPQAEVVASSESEPATYAELAAALTKCSMVALNGGTYSVPNPTASLTTCVFLSAHRVACMFPIICAEINTFRCEACAADTDVSQEASELTRISEKVMLYLGTTNLWDYLPFLRWFDVFLWLLIDGERRRMDDDGNGEKKSMTVVLLSLQRLKLEQYTDIMVMALCWDLFGAGTETTSVTTEWAPSLLLNHPEALKKAQAELDAVVGSSHLITTDDMCCLGYLHCIINETLHMYSAAMLLLPHESIVDCKVDGYDSTLSKDDGLVDGLRKCEQWKWQDIFASKETKTSSWFHEFIGRAKKPELRCPPFGCGCGWDVVPYKQPWPPPMQFMLLGDGVQVRPMAWPSFYCYAALVRWIKSLVVANILTKHPWLAIDRGSLFKVDCSYSTTGVARNSDEQFPESQRLISPATQRRTFPQAW

SEQ ID NO: 66711 - protein, 166 aa, Zea mays
  Coding DNA Sequence Number=SeqID_23336
MQSLQRKINADTAEVEGKEAPKGGLQRKINADSAEVEGEEAPKGGLQRKVSADTPKNKQEGRCFDYEDKASEKNRKKKFSCFIVYEKKGSFIILYILKRNEKSVEFKEKPVFRKAVAVPREANRAQKSACPAITSSSASTSPSIYSKVPGRSSTEGVNFSELAPIE

SEQ ID NO: 66712 - protein, 389 aa, Zea mays
  Coding DNA Sequence Number=SeqID_23337
MDICVDDYRVGGVMMFDARTGRGLVGSDAGKLAAVPAPVAAEAKGASQDPWSKFCASGEITLAAAAKDVAGSVAQQLKHATQQLKHATAFADHVASGALTSEFAAERQRLEGRIERLWTQHIEAVRDKSAAENKSRRLMEKLAVAEAEKEDLSRQLAVENKDANRACTEAQAARAEAKHARAEANLARQRAEEAETSHSSLRDCLDKAEASTRVEVDQAHAQLADAYRQLGAWTAPFDASGKEVGLRFHGWLQEELEVLPTIVTGLMSFASLITCEGAVNALSREGCRHFEVFDRSNEDFERGIFQVEDLVLKRSAEALYDRMWDPHDRDTVRERSDRAMEQMAHNEEVEDFGDLESMLPEASGVKEGTEGELAPPSDVGEGPVMTPPR

SEQ ID NO: 66713 - protein, 42 aa, Zea mays
  Coding DNA Sequence Number=SeqID_23338
MEVQPGHMVEFGTSRISSAFFIAGLRLPAHCFVAEVLQRFDV

SEQ ID NO: 66714 - protein, 147 aa, Zea mays
  Coding DNA Sequence Number=SeqID_23339
MPERAEGAGAIGFIAAPNCPTLIHLPPHSTHTVPPPRASLSAYTTIGGVRHHILAQIRLRPCPLRAYPGADHQLPVRTLSPSGLAQPPATDDPSTPSPPPDHAHATSTPYKLPVTAPHTISVFVEKVFLSIPRFILASNNLISKCPS

SEQ ID NO: 66715 - protein, 55 aa, Zea mays
  Coding DNA Sequence Number=SeqID_23340
MALPPLVCVPPCLLERSCGVSAPSDANWTITIRLRVPVRAVEQTPLIDDPTVQFL

SEQ ID NO: 66716 - protein, 640 aa, Zea mays
  Coding DNA Sequence Number=SeqID_23341
MGGCRRLRNASFLELRSAGARVVIAFHRRRVLSLTERQLRHDEMTPKAFVETVAWLPYRLTSGSGGRDRQRGTSAERRRGRATARGLSQAPSTEDGGGAGARNVPVRAAGVSRAGSCPLAVEEAGVVEVGRLPTSGAIVEPAEVAGGGLDHHPASGTLSEAFKGEGCCPTAVAHGGASGAEEPETKVGRRAPFRLEGRGCRRVHHPASYLRGWRRPRPRWPDLSILGGPTLTWMSTNGNPYFVLNVTEEREMWAKNRRCTSTEAGEGDVRGQRSCRRRRARGQGLPKSTSSCLLSQGLAATSSALAGPLDIGRADPNVDGCPPRATPTSSSTSRRSGRCGRRIGAALARRQAKVTSGLSVESTSILISGLTTLLMLPTIGVAMRLMDLPGRRRPEAAAVDDPGADRVAGGGKRGDDGGARGASWCTCAAVLLRDGVQAHPQHPVHRDLPDAGSASPSAPWVRLVCYLALHVPETKGLPLEEVALPLLQSIGRSWPIYLQSKSPSSFRDPDGTPRLSPSSVIQDSVLEWVHLEGSWKRTLLKSVICRRGGGGLISMRMWGISASKWEISPTVEELVVFRETLRPALKVFDRGPQEFPVPNSTPLLHSGYSIPSGSSDSSAVHFNRSDGFGSVMTLNPPLVT

SEQ ID NO: 66717 - protein, 57 aa, Zea mays
  Coding DNA Sequence Number=SeqID_23342
  Homolog annotation: Hit_ID=A2XBD0; Match level="QueryCoverage=49%, HitCoverage=10%, E-value=4e-08, Identity=82%"; Hit description =Putative uncharacterized protein
MGQNGPAKDMIAFVEVVFSCKGYMRRETWTVPYFQLRENGWTLNAYMDGKWDVRFEM

SEQ ID NO: 66718 - protein, 106 aa, Zea mays
  Coding DNA Sequence Number=SeqID_23343
MVALLSQVVTPQTGPYRELLRKQPEPPKGVSEPGRADQPGLGAGERVRGKREGRLDLDRRAAIRSALGGLADSDMGITPTREHQRALHTARRVNGGAGQLQRTIAR

SEQ ID NO: 66719 - protein, 168 aa, Zea mays
  Coding DNA Sequence Number=SeqID_23344
  Homolog annotation: Hit_ID=Q6YZC6; Match level="QueryCoverage=50%, HitCoverage=36%, E-value=3e-09, Identity=48%"; Hit description =Cation exchanger-like protein
MKNCAAIEENRAAQNLAPNRRRPTIDAHLGVRLIVLFKSARCCDKPADERGDPAGAVHHARASGLYESQHILSTSVLLWSISKAKLSEYSGKIEALASRLVASLPENEKPITESEDEISYEGAKAKSPISMKEINRDLTSLEQKADELASSEMAVAYGSSNWALLVEG

SEQ ID NO: 66720 - protein, 190 aa, Zea mays
  Coding DNA Sequence Number=SeqID_23345
MAACYESKYQHLAPTVHATKNNPRWPPSELVRRQPHPSTKQRRQRYWRRKKGKALADNTPQEAFEDEAVIKRQRQDHPTLEGTLRTCSSGGVPQAPPPGFAPPEGEDAIENDEVIGISAEDQLQLRALRIKNHNLHKQKEILEAKRQRVTAQAKVRQMIQDEEQRARELEQEIALMQGEGQYNLQHGLPF

SEQ ID NO: 66721 - protein, 275 aa, Zea mays
  Coding DNA Sequence Number=SeqID_23346
  Homolog annotation: Hit_ID=Q6K965; Match level="QueryCoverage=49%, HitCoverage=85%, E-value=6e-32, Identity=49%"; Hit description =Putative chloroplast channel forming outer membrane protein
METSLRLRSGGGLRIHAKEKLPLGHSSLLQAHAELDLHTSPAGVTTPSYLALFVRHFYSQLHNGDDLAYSFRAKKAVLFKPDNGFLGLNLKGRLLTDKELKPTKTTGSVELAWTILDLKQGQDVRLKVGYELCDKAAITTSTRHRRGLYSPLSRRLLPALSGDRPPSSSNAGSASPPVRRAGFHRIRATTSPLRRIRGLLRWIRASNQPCLCQIDVRPSSQPCLCQIDVRSARSAKTCLPGLLSALLHWIYDYLQLAQSTVFARPARLGSACRLF

SEQ ID NO: 66722 - protein, 177 aa, Zea mays
  Coding DNA Sequence Number=SeqID_23347
MQAACNRAKWTRFSDPRHASVEAQAHASRNRHAGCCMQATAPPLAPPPRLLDCGTSGREQRSRRQPGSHPIRGQQENPLSRREDDAPEKRATLRLRRNNRAKKGTGKGDTPKRILPREGTRLRASLLIRGSKAGPPKGSTAASDRVGPTPTTGQRFEGRPPEGFHGRLRLPGLRAHY

SEQ ID NO: 66723 - protein, 137 aa, Zea mays
  Coding DNA Sequence Number=SeqID_23348
  Subcellular localization annotation: CTP_CleavageSite=65; ConfidenceScore=5.67e-01
MAPITRGGGAIASKPPPCPRAPNNNPARATSRGDQGRVRVRNFTRENGGRKAVRGGLLQRRGRTQSSTGAGAGHSLRRAGTGYRRGESQTVGSETMIPRAQAGQLVGKKGWGEGRAAAARHMWERRQASCGTEGNPG

SEQ ID NO: 66724 - protein, 113 aa, Zea mays
  Coding DNA Sequence Number=SeqID_23349
MALRSDGGSRHRAGREEFGRGHQNAGERWVCGEEGPRGTLTIPRSPGDRGIRGEADRSADHARMADSVARQRSMRGFPGGAHGVLVKEMELSPRSHVTAKEFYTQSSLRQRSG

SEQ ID NO: 66725 - protein, 48 aa, Zea mays
  Coding DNA Sequence Number=SeqID_23350
MAPPPLVTGTTMARLGWGKHPGRPILIERPLMVDPSAYNAQRFVVVGF

SEQ ID NO: 66726 - protein, 208 aa, Zea mays
  Coding DNA Sequence Number=SeqID_23351
MPPRTRKTARKSTNGIPRHQLAPRHEDSSSGSNDPIEDLEAQVDQLQTELHRRNDIWVADGERINELRADICYMQDQLAERDLALDWAVNSRSLAWAKEAKARARVEELSSAVDNLQVYCNTLHEEVHVLYFQLHPNVPADPVGIEEGPSGVAGEALGGELDLFKPPPSMKLLYEWSPTPDSEATKSDKKALRWHPLKLYMGDGVVLR

SEQ ID NO: 66727 - protein, 284 aa, Zea mays
  Coding DNA Sequence Number=SeqID_23352
  Gene Ontology: Mol. function=binding; Cellular component=cellular _component; Biological process=signal transduction
  Homolog annotation: Hit_ID=A2XE28; Match level="QueryCoverage=70%, HitCoverage=29%, E-value=9e-95, Identity=90%"; Hit description =Putative uncharacterized protein
  Pfam annotation: Domain name=GTP_EFTU_D3; Domain location=229-282; Score=17.8; E_value=1.6e-05; Accession=PF03143.8; Description =Elongation factor Tu C-terminal domain
  Pfam annotation: Domain name=HEAT; Domain location=113-149; Score =22.6; E_value=0.0014; Accession=PF02985.13; Description=HEAT repeat
  Pfam annotation: Domain name=HEAT; Domain location=31-66; Score=8.7; E_value=1.4; Accession=PF02985.13; Description=HEAT repeat
  Pfam annotation: Domain name=HEAT; Domain location=72-108; Score=1.9; E_value=14; Accession=PF02985.13; Description=HEAT repeat
  Pfam module annotation: Pfam domain module=GTP_EFTU_D3::HEAT::HEAT::HE AT; Domain location=229-282::113-149::31-66::72-108
MLAYCKSLDELSQNGATIVHWIKKVVRGDFIIYFNKIFDALCKLSADSDANVQSAAHLLDRLVKDIITESDQFSIEEFMPLLRERMNVLNPYVRQFLVGWITVLDIVPDIDMLGFLPDFLDGLFNMLSDSSHEIRQQADAALSEFLQEINNSPINEFVKLGGEQLVPYYADILCAILPCISDEEEKIRVVARETNEELCAIKADPTEGFDIGAILSIAKRFSIKSFGNEITYKKFEAEIYVLTKDEGGRHTAFVTNYSPQFYFRTADVTGRVELLGEMKMVLPG

SEQ ID NO: 66728 - protein, 125 aa, Zea mays
  Coding DNA Sequence Number=SeqID_23353
MASSIVNTPEVRRFTCDSETLDEIVSFVRQILSICVTPCGSKVGKMDIGGGPEAIPTLPINLEDVARSEADFEKAELLKTVTKFQWIKVDSVRFEDEKLKDTSYWANITIPMALLPFHVSNALRV

SEQ ID NO: 66729 - protein, 114 aa, Zea mays
  Coding DNA Sequence Number=SeqID_23354
MEGSACSWVEEISGFHGGIYAQLEGGTRRSGRLPWMARTRGAVGRWGAQIRNGFHGGWGALIRGGFLGFSFHGRVDATGQQERRGEGERDGEVISEENSLEFGTDKIEMHVGAV

SEQ ID NO: 66730 - protein, 194 aa, Zea mays
  Coding DNA Sequence Number=SeqID_23355
  Gene Ontology: Mol. function=drug transporter activity; Cellular component=membrane; Biological process=multidrug transport
  Homolog annotation: Hit_ID=A3AFI1; Match level="QueryCoverage=48%, HitCoverage=16%, E-value=2e-24, Identity=63%"; Hit description =Putative uncharacterized protein
MTGPRTDWLSCSVSKVINGAYEEALFSAAVCQLQADRPLKKPTLLAIEDGDIVVVALLQLRLPVDRLHRPPSRHHVIYAQAVLASAFAKNDNKKVTAATSRVLQLSIVLGMGLTVVLGLAMRFGAGIFTSDVLMIQFVTGTQTINSLAFMFDGINFGASDYRYSAYSMRGDHGRFSGTNDGFGLEDDLRHTADR

SEQ ID NO: 66731 - protein, 100 aa, Zea mays
  Coding DNA Sequence Number=SeqID_23356
MSSVLRKWARPSPLLLMLLSCRSNIPLDRPTRWQGGRPSHTINHFLHGTCKNGATSKAEYTNTQLDLTGINRNIIELQVYLQLEGDDSTSVTQKANAKSA

SEQ ID NO: 66732 - protein, 92 aa, Zea mays
  Coding DNA Sequence Number=SeqID_23357
MADEVIRKNGKESHDTQEEAKRAEEAVERVRLISELSPPSEPYNPEADPAMKETLDIIRIANEAVDEAVDRLLNETAEKVLKEDQIFVCLKV

SEQ ID NO: 66733 - protein, 495 aa, Zea mays
  Coding DNA Sequence Number=SeqID_23358
  Gene Ontology: Mol. function=sequence-specific DNA binding; Cellular component=intracellular; Biological process=regulation of transcription, DNA-dependent
  Homolog annotation: Hit_ID=Q05KQ3; Match level="QueryCoverage=30%, HitCoverage=51%, E-value=2e-54, Identity=75%"; Hit description =Heading date 5
  Pfam annotation: Domain name=CBFD_NFYB_HMF; Domain location=58-123; Score=126.6; E_value=7.4e-35; Accession=PF00808.14; Description =Histone-like transcription factor (CBFNF-Y) and archaeal histone
MKNRKGYGHQGHLLSPVGSPLSDNESGAAAAAGGGGCGSSVGYCGGGGGESPAKEQDRFLPIANVSRIMKRSLPANAKISKEAKETVQECVSEFISFVTGEASDKCQREKRKTINGDDLLWAMTTLGFEAYVAPLKSYLNRYREAEGEKAAVLGGGARHGEGGGAADDAGPLAAGGGAGGRVGFGSGGGAAPSYYAAASRKAYGAGEGSKVKGGVAITRCDEKRYLHGAESPKLAEEMRVVRVHVPRDTDGRLDRWTPPRAGTALPLNENHLPVVVHGDHGGRSCRTGVWSTRRTPTATATKLGGATASCAPESLAKRSFRRHNCDAETPWRPANGAPRTDVVDTLNVEGSGSALSALLLHQPPRGNFRVLLPRAGDCIFRGRALDPARFAAGIEAGGREAAVRRRLCRRRARTPSNRGRATHRNPRSKPASPCSSPQSRHRQKASSSADFVEGSRQKEEKLVAVVVFLFDSVHRGRSAKSEVDIDAMYISTVYS

SEQ ID NO: 66734 - protein, 106 aa, Zea mays
  Coding DNA Sequence Number=SeqID_23359
MSASLAIRPRQDNLQYRIQKLQAKLEEERREQVGMEVRMRVERKAEQASLAWRMKVMKDIPSSSQYMLIKGETYEIKMEMILNYKCTFGLTEGKNTSVTHEKIYED

SEQ ID NO: 66735 - protein, 118 aa, Zea mays
  Coding DNA Sequence Number=SeqID_23360
MEDESIAPSAIQYISIDVLDPLASSDPHEDISIDVLDPRNVIWHMNLLCHGSVLIEAAIDGGVAIRHGPDFRVVGDVGRRLALMGHSIRREDQASHHVTPATRKLTRWLEIMPNRKLD

SEQ ID NO: 66736 - protein, 640 aa, Zea mays
  Coding DNA Sequence Number=SeqID_23361
  Gene Ontology: Mol. function=RNA-directed DNA polymerase activity
  Homolog annotation: Hit_ID=A2XS22; Match level="QueryCoverage=17%, HitCoverage=13%, E-value=2e-13, Identity=38%"; Hit description =Putative uncharacterized protein
MAGSKDSSEVSASNIIERTWETLPADEQLQFEEHKEQLIQEAKAKFLANLKVDRNNKVVRQRATDLASLRPTIDTPNVPSLLTLLALPCPWSSRFFKHGPRSPGLSVGCIFKLNPDSVGHLLQAALGGFASGFEVLQLADRVFRFSVSSMAVGFHIYNSRCIDRKEFRAFFNLWNHGGRNWKHEFKNFSDEEAASWQKVRGKKSLSFADIVKLPLTSANAIPIRSNIKFSDGHECQDWPRISVFNRMGSPPSNLAPVRSDRRFPAGGFHQSHLRISVFNRLGLPSSSSWRRVVSPWFSSSDPIGEVHGGGIHDCSNFQNSNFNRSRLRNIHWRPVRARGPVGLLGPSGFRCLFCKAILVGNQKSSDHSTWFRSPVVSLTGGPPSYSCFEEFAREDYAKANIAGGQAQDEDPVPAALEDGQQLPLEFFGLGQPVPAAGWDLNFPPEGNVPNGQILADLDVVGPVLPFNAPALPAVGDVPLNGLQEIDGPPIQGDLQDWRPDPVLLSHLERKRNAQFYRIWANYFAPAGNPELSVQIPKKWAPFFMSNLLHKDSFSWSKSFLSSDIPSALLEPESETHPFAIPMKCPDGKFLESVLPEESTGNVSATSDSASLTSKPAVVESDLRRSKRLRDARAGFRQGSC

SEQ ID NO: 66737 - protein, 77 aa, Zea mays
  Coding DNA Sequence Number=SeqID_23362
  Subcellular localization annotation: CTP_CleavageSite=40; ConfidenceScore=5.37e-01
MSLISWSNSSSWSVGLLPFLFWLRASRRERVSWFGSNGCSAAAPGAEAFFGSMTKKNGNDIELQMYLRLDRRKIYED

SEQ ID NO: 66738 - protein, 128 aa, Zea mays
  Coding DNA Sequence Number=SeqID_23363
MARAREERTPSLWAHTSARAEGGNDVTVRRHGRTGRPWGKKPSRRWARRRFAAGGPVLGQRRGALARGGAGEPRGGLNLAIGGREGAVRGEVAELHGRDRCRWASGKGLGRGSGVLSLRQCDEAGRPT

SEQ ID NO: 66739 - protein, 224 aa, Zea mays
  Coding DNA Sequence Number=SeqID_23364
MHALEEQQLLEDDPTVVYLTAYLLTLDAQYNFLARHHRQMIARVEDAEKLNRKLHVDLTSAQARVAALESREAIAVEALKALRIQEPASSNPIQPMKAEDPQILEGHPVSTRGEKKAWELPERAIVLEGIPVFPQAMNKQEHPESSQDPPPELFEPLTMKKILAPSLEVKEEAASTPPASPPSEELQEPVQLEEEFDPVLPSQSLPEEVINISSLLTHPGDVSY

SEQ ID NO: 66740 - protein, 151 aa, Zea mays
  Coding DNA Sequence Number=SeqID_23365
  Homolog annotation: Hit_ID=Q6QP51; Match level="QueryCoverage=29%, HitCoverage=20%, E-value=2e-14, Identity=84%"; Hit description =Putative growth-regulating factor 1
MQVACNRTAEAHPFDLNASSMEAQAHTSCNRRAGYYVRETAPPLAPMPRLLDCGTDVTTRGNPAHGPTVPIEHIDHGDRERGYFERDPSPRRKRAPSPPTDQGFEGWPLGRVRQPPQSIRASSSLLIRGSKAGPSEGFDSRLRALGLCAHY

SEQ ID NO: 66741 - protein, 169 aa, Zea mays
  Coding DNA Sequence Number=SeqID_23366
  Gene Ontology: Mol. function=ubiquitin protein ligase binding; Cellular component=cullin-RING ubiquitin ligase complex; Biological process=ubiquitin-dependent protein catabolic process
  Homolog annotation: Hit_ID=A2YRN6; Match level="QueryCoverage=28%, HitCoverage=7%, E-value=4e-17, Identity=77%"; Hit description =Putative uncharacterized protein
MAVGEASIVWRTGQSGAPATSPGRWVPTVGASDNGATGQSGDDRWRCLAVTPLAHRTVRCYTRQSGHHLAGTRRLDRARDHRPPSAAAAEERCKMLNGGGGGQKKRNTKIEPYRHRVETDPKFFDKSWRKLHDAIREIYNHNASGLSFEELYSLQAIVSVVFWVSALND

SEQ ID NO: 66742 - protein, 740 aa, Zea mays
  Coding DNA Sequence Number=SeqID_23367
  Gene Ontology: Mol. function=ubiquitin protein ligase binding; Cellular component=cullin-RING ubiquitin ligase complex; Biological process=ubiquitin-dependent protein catabolic process
  Homolog annotation: Hit_ID=Q6YYL1; Match level="QueryCoverage=87%, HitCoverage=92%, E-value=0.0, Identity=79%"; Hit description =Putative cullin 3B
  Pfam annotation: Domain name=Cullin; Domain location=4-567; Score =664.8; E_value=7.2e-197; Accession=PF00888.13; Description=Cullin family
MTTLGLLRPLPRKYIGVTAYNMVLNKFAPQLYEKLTENMKGHLEEMRTCIEAAQGGLFLEELQRKWNDHNKALTMIRDILMYMDRTYIPTNKKTPVFEHGLELWRDTIVRSPMIQGRLFDTLLELIHRERTGDVINRGLMRTTTKMLMDLGLSVYQDDFERPFLEVSASFYSGESQQFIECCTCGEYLKQAERRLHEESERVSQYLDAKTNEKITAVVVKEMLANHMQRLILMENSGLVNMLVEDRYEDLTRMYTLFNHVPDGLATIRSVMVSHIKDTGKSLVTDPERLKDPVDFVQRLLNMKDKYDNIINVSFSNDKSFLNALNSSFENFIKLKQTDHLSSYHCFVDDKLRKGVKEANEEDLETVLDKAASDDSERSMLVKLKTECGYQFTSKLEGMFTDLKTSQDTTQGFYASTSSELPADAPTMSVQILTTGSWPTQTCNTCNLPPEIVSVSEKFRSYYLGTHNGRRLTWQTNMGTADIKVTFGNGSKHELNVSTYQMCVLMLFNSADVLTYREIEQSTAIPAADLKRCLQSLALVKGKQVLRKEPMSRDIADDDSFCVNDKFTSKLFKVKIGTVVAQKETDPEKLETRQRVEEDRKPQIEAAIVRIMKSRRVLDHNSIMTEVTKQLQPRFMPNPVVIKKRIESLIERDFLERDKTDRKMWYQTVTTLDVVKAWLAGATRGHALKSNALTEQFCVIFESYLAAEIAYHLVTTVDHCWNREVENIESIPGKVSQVLIL

SEQ ID NO: 66743 - protein, 158 aa, Zea mays
  Coding DNA Sequence Number=SeqID_23368
MAFGSLLLLFLLATRAYGLGRQDMQLHTAHLPMNTKVNSQKEIPADFKWQLRPPAGTLDSRRNGLGGSTTPPEHRRLATTTGRAAAAKEEDGGGEVKKTMWRTHRREVAAPRFIHQDYAGPSGKAAQATACGAWVGLFPSIVSGQASLVGDKVIPVGG

SEQ ID NO: 66744 - protein, 134 aa, Zea mays
  Coding DNA Sequence Number=SeqID_23369
MKHRALIPIESRLEGVNRANLKFINLSTTTNWVSVRNINESEREGAKQIPQPPQSGRWKCAVAWHTGQSGAPPDTVRCASHVSQPLGFDRWSSDLWGLWAVWWCTGQEATSGQKPSDIEVYQEGHKGPDPNNPD

SEQ ID NO: 66745 - protein, 57 aa, Zea mays
  Coding DNA Sequence Number=SeqID_23370
MPRVPRELVEHKLKVYPQAKTIQQMLCRFEREMCPWAISIMFWRLLKAREINLEKDG

SEQ ID NO: 66746 - protein, 501 aa, Zea mays
  Coding DNA Sequence Number=SeqID_23371
  Homolog annotation: Hit_ID=Q5GAU8; Match level="QueryCoverage=24%, HitCoverage=95%, E-value=2e-50, Identity=73%"; Hit description =Putative uncharacterized protein
MIEHEHEHARSYLFRVSSAATEQNPGLILLEMKNMYREALWQKRGRPRELYPDVSSKDAPVPPELPVPNCDCGRLAWGHQKCFFFQWIDGPDKFDPRYLLFVNWLSGKTSHERFKRWVPPPPNPPPMTDAEKEVATERRMDSPPRCDCGDRAVIDEDCDKQFCCPNIDYPYGWRKCRFREWLYGPLSHWTEPEVKEKRYMGWAAEEVKFDPVLCKCGIEAKYGLVPSELGVGYFCGHMVDYDEETRKCSWESYDDKGEVMRTIESKRIMGQKMRCGSRLVDSYINDRIRDMRREAKSAFYDSPKRAEYRRLKAADEKRAQDAREWEAAQAEKKMLDNLADRLKGKIGSGVNYLADEAHARYVQDKMATVELMEEDDDTSRLSELIALAEAGLHEEEEDDMSRLSELIALAEAGLRAQEEEDEFMSQAAAEVEAAYYKKKSDEAEAEDELFSQAADEAEANYYKRTGDKCDAGQCSKWNEVVVEDCATDDSEDELLIDCDSD

SEQ ID NO: 66747 - protein, 547 aa, Zea mays
  Coding DNA Sequence Number=SeqID_23372
  Gene Ontology: Mol. function=hydrolase activity, hydrolyzing O -glycosyl compounds; Cellular component=extracellular region; Biological process=carbohydrate metabolic process
  Homolog annotation: Hit_ID=A7P896; Match level="QueryCoverage=86%, HitCoverage=97%, E-value=1e-152, Identity=52%"; Hit description =Chromosome chr3 scaffold_8, whole genome shotgun sequence
  Pfam annotation: Domain name=Glyco_hydro_10; Domain location=194-484; Score=79.0; E_value=1.5e-20; Accession=PF00331.11; Description =Glycosyl hydrolase family 10
MEVAETGRELGGGRRAASSAGELGGWRAGDSMEAAAATTAAALLPPARKVFILPLLLLLAASSLVPRASSDGAQYDYRAYTECKPHPEPALYNGGVLRWASKITDFRTEDEGNYSPAFVLYNMSAATAYSFSCWVKIDGPESAHVKAKILTVENAASQCVGTAIARNDCWSFLKDCEPKCFYDLNQKPLLAAILTRSVESAQGGAKSILGNGPYQDWFNARFNAAVFENELKWYATEPSPGKEEYGAADQLLRFVQSNDVTARGHNIFWEDPRYTPAWVKNLTGPELRAAVAGRVQSLLSRYKGDFVHWDVSNEMLHFDFYEDRLGGNATADFFSTARRADPLATLFLNDFNVVEACDDLSSSADSYVSRLRQLADDAGVTFEGIGLEGHFAKPNVPYVRAVLDKLGTLRLPVWLTEVDVSAAFDHATQAAYLEDVLREGFAHPAVDGIVLWTAMGANATCYQMCLTDADFTNLPAGDVVDRLLGEWQTKEVLGATDDRGSFNFSAFYGEYRLSVTYLNRTADATFSLPRSDDTKHINIRLPPGPAA

SEQ ID NO: 66748 - protein, 93 aa, Zea mays
  Coding DNA Sequence Number=SeqID_23373
  Pfam annotation: Domain name=zf-CCHC; Domain location=12-29; Score =20.8; E_value=0.0011; Accession=PF00098.14; Description=Zinc knuckle
  Subcellular localization annotation: CTP_CleavageSite=36; ConfidenceScore=5.12e-01
MGPVAPNASTTRTCFKCGQSRHYANCCPNKAAYTTLAPMKQGQVSGGKCQALSVNQGQVNHVEAEAEPEGPKNQEEVPREAEEANEEGNEQQD

SEQ ID NO: 66749 - protein, 423 aa, Zea mays
  Coding DNA Sequence Number=SeqID_23374
  Homolog annotation: Hit_ID=A2YGC2; Match level="QueryCoverage=43%, HitCoverage=76%, E-value=1e-10, Identity=28%"; Hit description =Putative uncharacterized protein
  Subcellular localization annotation: CTP_CleavageSite=22; ConfidenceScore=5.10e-01
MASDAAQRPTQPPPTRGRSPAQCAALPGAAYLRDSPAACSLLTAAPDAACWLGPARGFLASVARLHSETLPTHLGSVQGSVQPEAKRESRLMGKVTMRLMVLGFDSGNASACRPVAGQSSHLERLHHRVHEEQERRRQEQQGSSFSLQQEIESVRSCSPVLPLEAPPAPPLGAPAPRVVAGGDPDDGGGDDSSSHDTDFSADQEPEGWVARPITHDAARGCHFHDALDTLLRRALNRRTWSIEYRCVVYQHSRGVYPDRWEATCLVRRPENSLQGAEACSEHYSISERDSAEAAMQDAARHALSHYCSVLGGVADSLNLKYYPCRPSGSTGGMIVSPVGEDNPRLSSTVNLAVVLNTELDHALDELSRARAEITQLRAERAERRHLDDGSPTPVGTQHPYHSPWRGHQPYGNPDCKTKIDLEP

SEQ ID NO: 66750 - protein, 317 aa, Zea mays
  Coding DNA Sequence Number=SeqID_23375
MGSDAIHGPTAQQTTGPGTRDGVAADSNLISFLLWTPLLLLLNTLAFLKSLLVLSKKKEIGSQMEVRCQTSFCQNEDGFPKLLRACTVCLGIRSQPEYDGREFVEHGTEKCVVTVYIGSSPHHVEWSVTAVGHRFKDTCQVIARKALRVLCQIYEEEVADTPLRFFPPFQRDHPVWMTRMRALEGQQLLEDDPTVVYLTAYLLTLDAEYDFLARHHRQMIARAEDGEKRNRQLHVDLTTAQARVAALESREVIAVEALKQAKDEHVQKLMEAYLVTHNQRRSATLFNPSELKTPRFLKVTQSLSEERRRLENSQKEP

SEQ ID NO: 66751 - protein, 112 aa, Zea mays
  Coding DNA Sequence Number=SeqID_23376
  Subcellular localization annotation: CTP_CleavageSite=25; ConfidenceScore=5.20e-01
MGSVPAQPACGPATPAGPPALPRVERAAVGEAAAASLCGPHPSAVPSPKLPPPFSLLLSTPSARFFLPLRLVVGWTRPDGTRPRHHRPSVVSPGFPFFLPTPLPHISPARAV

SEQ ID NO: 66752 - protein, 54 aa, Zea mays
  Coding DNA Sequence Number=SeqID_23377
  Homolog annotation: Hit_ID=A7PFS0; Match level="QueryCoverage=79%, HitCoverage=26%, E-value=2e-12, Identity=76%"; Hit description =Chromosome chr11 scaffold_14, whole genome shotgun sequence
MTLNLHEGEQPSESPNSWEKRRDICVSVITSYSPTILCTQQALACTNLLGSKTS

SEQ ID NO: 66753 - protein, 110 aa, Zea mays
  Coding DNA Sequence Number=SeqID_23378
MDNIGYMKLEVDLSALTKDQLADNLAYNSLKVDLHRSEVQGLEKKLDEVTKNFNVEQTKPELSPPPEPYDPEADPSLKGALDIIRIANKAVDEAVNRLLNKAADKVLKDD

SEQ ID NO: 66754 - protein, 124 aa, Zea mays
  Coding DNA Sequence Number=SeqID_23379
MDKAVQAGHILMKRPDVVVPDDIVADVLTVSRSVTKAPSSEYVSYRETCNHYDFVIVKIVTQLSRCEEHCIQQLLDLRVSDLGGLEDFTDEVKFPAVAPQAVENLLEIVDEVFQVHGFDHHIVN

SEQ ID NO: 66755 - protein, 175 aa, Zea mays
  Coding DNA Sequence Number=SeqID_23380
  Homolog annotation: Hit_ID=Q6ZVQ4; Match level="QueryCoverage=38%, HitCoverage=45%, E-value=9e-10, Identity=51%"; Hit description=cDNA FLJ42218 fis, clone THYMU2037965
MAPTCYSQALWQCNARWITWSSAVPNPVWPTWQNSGSTKNQESSWVWWYMPVVPATWEAEAGKLPGEALEARRLSWQCGELVCSVVPCAPGERSVSRFGAGRTPGAAGRWRSRWRVALALSLASRGERPGHGALLQPMVGATDGDAVRARRLAWGRRPLEGRRERAATERQGAGR

SEQ ID NO: 66756 - protein, 24 aa, Zea mays
  Coding DNA Sequence Number=SeqID_23381
MGQSGTAVHKVVERLYEEITLVSV

SEQ ID NO: 66757 - protein, 107 aa, Zea mays
  Coding DNA Sequence Number=SeqID_23382
MDKVAPNYLRHARVKFDTESRPFDTPWHEISPTSSAAWIRGQTSSGLQGRQPVPRRDRQRLPILARPFVGTLPMPVNEVLFEVGIVSEDDVVLYSQRCLLLIKGSGK

SEQ ID NO: 66758 - protein, 69 aa, Zea mays
  Coding DNA Sequence Number=SeqID_23383
MKDAKPTKTPMGTDGHLDLDKGDSVRCVRLVSGELATLEKTSAVYDYNSPDCPGERLQVVEIPREREKA

SEQ ID NO: 66759 - protein, 74 aa, Zea mays
  Coding DNA Sequence Number=SeqID_23384
MATTTTMEQLDAPNRCEPFSSSLRPFPLPDATTVPAPAESKGIPSSPPMPQFCSRWPDLGMRNPRFHDLLSVEA

SEQ ID NO: 66760 - protein, 117 aa, Zea mays
  Coding DNA Sequence Number=SeqID_23385
  Homolog annotation: Hit_ID=A2WUV4; Match level="QueryCoverage=31%, HitCoverage=31%, E-value=5e-09, Identity=83%"; Hit description =Putative uncharacterized protein
  Subcellular localization annotation: CTP_CleavageSite=29; ConfidenceScore=5.71e-01
MAAAAGGVRRALAALRSGSPSTISATLSRQAAARSLELAAASLPRASRRRLAISRVPVAALGGVQASLMPMHNATASALLTSMLGLKPGSWGLALRRPSTLDLLVLCLLGDNFTVEK

SEQ ID NO: 66761 - protein, 759 aa, Zea mays
  Coding DNA Sequence Number=SeqID_23386
  Gene Ontology: Mol. function=binding; Cellular component=nucleus; Biological process=metabolic process
  Homolog annotation: Hit_ID=Q8S2J3; Match level="QueryCoverage=100%, HitCoverage=100%, E-value=0.0, Identity=56%"; Hit description =Selenium-binding protein-like
  Pfam annotation: Domain name=PPR; Domain location=466-500; Score =32.0; E_value=2.2e-06; Accession=PF01535.11; Description=PPR repeat
  Pfam annotation: Domain name=PPR; Domain location=537-570; Score=1.9; E_value=4.6; Accession=PF01535.11; Description=PPR repeat
  Pfam module annotation: Pfam domain module=PPR::PPR; Domain location =466-500::537-570
MAAMVGARRALLAARFSPRGTIAASAAPAPLYRPMDSPLRVILKAWFFYLAGFQLKEFVYSLGFHIEGLVPLHLKGLMKIISVSGDKTKQRDVTSAGSTTGTHKNKGVDGVGGSSEQHYRSGGSYGFQNNHQPYTGTRANNERYNASQPYRGSGPYSQQGLDGHFSNDRQQYNGTEANSTYSSGYYTQSKQKIYEGEGANNGQYGYGPSGQPCPNPVGNSQRVQKQQYVDHRSGGSYPDRSGHHPSQYVNPTHSRKEHVAGFQQGNNSNFGYNASQAYQSPYFTRQADTHSTSQGYSMYLNTDVQRLSHGVHQEKHSHAQSAGSFGNHVNSAPHEYGKYHQSLQGNPSNVGSPYEVPSEAGSKHKCTVEELEKFCDDGNVKEALEVLAMLKENRIVLHAPQYFRLMQACGDATALSEARLIHSQISESSLTVDTDFQNKIMEMYARCGSMEDAKKIFSSMDHHNLTSWNTMISGFVHNVLGEEAIDFFERFKQTGDKPDHGMFRHVFLACGILGSVNEGMLHFESMQKDFGIHPTTEHYASIVTMLGQSGYIVEAYEFVERMPVEPSIEVWENLMNMCRLNGFLELGDRCAQIIECLDSSRLNEQSKMGLFPVDVSDLAKEKERKKASVAEARSKVHEYRAGDRSHPDTPKIYEELRYLLAHMKEAGYIADTRFVLHDVDQETKEDALLAHSERLAISYGLITSAPRSPIRVIKNLRSCGDCHTAFKIISKLVGRQIIARDAKRFHHFENGVCSCKDYW

SEQ ID NO: 66762 - protein, 183 aa, Zea mays
  Coding DNA Sequence Number=SeqID_23387
FRRSSDSHDIKQLESQDLSGCHIGMAFLEKVGRAGPRTGQALSWGRSLPSPAWTLVTPLLQAHPTWARDEHEGRGTSTSLTPDSGHLASPPFALAHALDPSGLGHAAHSLVGLGTPLSRNADKFALDYKFYRCQRLFGVPPDSVRCTREPNSELATFGNSGSRSAIIHRTVRCSTGLSGVPVE

SEQ ID NO: 66763 - protein, 176 aa, Zea mays
  Coding DNA Sequence Number=SeqID_23388
  Gene Ontology: Mol. function=hydrolase activity, acting on acid anhydrides, catalyzing transmembrane movement of substances; Cellular component=integral to membrane; Biological process=metal ion transport
  Homolog annotation: Hit_ID=Q10QZ3; Match level="QueryCoverage=59%, HitCoverage=11%, E-value=2e-35, Identity=74%"; Hit description =Copper-translocating P-type ATPase family protein, expressed
MRLSPARMNPGMERKPFSRKTETVYGPVTRRCYISRLPLLRADPLSSATARLLFPRVEMAAVNLLAESAAVRLRAPAPPSAGEELAARLTECGFPATARRGGAVAGVGESARKWREMAARKEELLLRSRGRVAWTIVALCCGSHASHILHSLGIHVGHGINRLVLKGIEQTGSSVM

SEQ ID NO: 66764 - protein, 359 aa, Zea mays
  Coding DNA Sequence Number=SeqID_23389
LHDMRDPTPESQGRALERVGEDSARGVWGRTYGELPLKGGRLLSEGNHVFFLPYASCLSIFQAPGWGYPPPFRLLVGGTQLHGSWYLSAIVWLQGFSSCSPAGLRPLPLPQPQGFSSPGLGRGVRRVEVGPRVGGGPLLHSVMGGGAVVVRGAGSCSVPGLQTRVASEPLAAPASATAAGRGSSAGAIAGTGHGLTSNSTAFCPSLPHEFWRGRGPPGSSIRPEVSAAAVRPPGAEVVVVAAAGTGDGAPFAGLPLLCRPSPSEWGCSYPRKGNRSSVCNGISNAASLVDYLNRFTKRESPRVKVTSEYEQRRSWLENGNLVGRSLARLPVSVADAGVDQPRPRVGPAPLEDAWPRPQG

SEQ ID NO: 66765 - protein, 95 aa, Zea mays
  Coding DNA Sequence Number=SeqID_23390
MVLQQQYRNNKSQQHLSRTCTIEKYLIDIYHEWKKSQNSEAHFIQAPVDATTREHLELPQPAAQFEHAAINVNATTKSYTSLGKVDFDFDIDDLL

SEQ ID NO: 66766 - protein, 93 aa, Zea mays
  Coding DNA Sequence Number=SeqID_23391
MDSSMESVAELCAQKFSATVVAARDTFTASTAACVVAGDLCATASASATVVCAQEALAKYYEKICPKTVALSSAGFRLLAPRSSQLDPWHMTV

SEQ ID NO: 66767 - protein, 348 aa, Zea mays
  Coding DNA Sequence Number=SeqID_23392
  Gene Ontology: Mol. function=zinc ion binding; Cellular component =nucleus; Biological process=transcription from RNA polymerase II promoter
  Homolog annotation: Hit_ID=A2WUU8; Match level="QueryCoverage=92%, HitCoverage=83%, E-value=1e-107, Identity=54%"; Hit description =Putative uncharacterized protein
  Pfam annotation: Domain name=PNK3P; Domain location=234-346; Score =10.3; E_value=2.7e-10; Accession=PF08645.2; Description =Polynucleotide kinase 3 phosphatase
  Pfam annotation: Domain name=zf-PARP; Domain location=47-123; Score =66.5; E_value=8.9e-17; Accession=PF00645.9; Description=Poly(ADP -ribose) polymerase and DNA-Ligase Zn-finger region
  Pfam module annotation: Pfam domain module=PNK3P::zf-PARP; Domain location=234-346::47-123
MRTTHFQNHKRDNTAVSPPEEQRPKKARIQMFSPAEGVPDNVTVSVEYAKSGRSTCKGCSENIAKGALRLGASFPDPRGYENTKWYHVVCFPTSSYPLFPMSNLKGFDSIEDHDRDKLHKLVENHKSDGKAADVLNESNLKREMAHSMDDSNEGAEKDLEGIKIHCMGEFEEGAEKNLEEAKLPAGNKMIGPSISFSLSDIKKEYKNATLPAHWKVFDTVIFREKEDGLHASSKIAAFDFDGCLANTSMKRVGADQWSLQHKSIPEKLQRLYDDGYKLVIFTNESNIERWKNKRQQAVDSKVGRLDNFIECVKAPIQAKYILLECHYKRGGHNSDTSVAEVGSCRFRL

SEQ ID NO: 66768 - protein, 99 aa, Zea mays
  Coding DNA Sequence Number=SeqID_23393
RICPGVSQLSDSPRCQEEPSEKTVHVSVKLPERGIGLCFTGEAGPRSPDFNRPPATVDREYILVPEQGAAQEVAPDPAPEPAPKDLPATALEGKPRFYA

SEQ ID NO: 66769 - protein, 190 aa, Zea mays
  Coding DNA Sequence Number=SeqID_23394
RICPGVSQLSDSPRCQEEEPWPYPSARAQASPELSSPPFAHTRRARGHPSPCHRRPASPAIPNPVQPSEKTVHVSVKLPERGIGLCFTGEAGPRSPDFNRPPATVDRGTPCASLRFLARLDSLDLHEAPYALGLNYAAVDRPEHSPPTSSPACSRGPGDSGHPRRRAVPRRDRQTLPEPTLPFAGPPSPP

SEQ ID NO: 66770 - protein, 55 aa, Zea mays
  Coding DNA Sequence Number=SeqID_23395
MAKARKQKGDGASTGGGATVLHQKLCLSIDMENQLIYGVGNISGAQRGTLLTCTF

SEQ ID NO: 66771 - protein, 190 aa, Zea mays
  Coding DNA Sequence Number=SeqID_23396
  Gene Ontology: Mol. function=protein serine/threonine kinase activity; Cellular component=integral to membrane; Biological process=protein amino acid phosphorylation
  Homolog annotation: Hit_ID=A7P3R6; Match level="QueryCoverage=66%, HitCoverage=31%, E-value=1e-46, Identity=71%"; Hit description =Chromosome chr1 scaffold_5, whole genome shotgun sequence
MAPEYLMHGDLSTKADVFSFGVVVLEIVSGRKNSAFVPPLDAEADSLLEYAWRLYKKGRSLELLDPAVKSSAVPEQVELCVRIGLLCVQADPRLRPDMKRVVIILSKKQSTLEEPTRPGVPGSRYRRRPHGLRGSHYSVGSSSGTSSPSTSATSHASASASASASHAMTTSSTHTMRSRGLPSHREEEQE

SEQ ID NO: 66772 - protein, 204 aa, Zea mays
  Coding DNA Sequence Number=SeqID_23397
MESSAKTRLPLHSIDIIYPSLSLRTVLHFGIIFTLITSTNGEKVHKFIYNYSKSTVWNIVDYSGQEKLFGKTDQARTVRALAADHPRHQSEPRTGTLHKRKSTLRTVQWKSKHRPRPGADRLVGTELKNPKLLMYRADRPDQERGPSAVGRNEATTRKWLRAINTTPTTSIHYTQAFQSPTFNTRASNSFQDIIKVSNLSKFHN

SEQ ID NO: 66773 - protein, 894 aa, Zea mays
  Coding DNA Sequence Number=SeqID_23398
MEVVELVPYARNKWGNWWDYWFYVSEAEVEDHLGLPAAIMCSHYYVAYPSFEVAEDDENEVALRIAACSSSGRDLVEEFIGYGVWPLAHGWALGEVCPREMPSLGGRKDPASVVREAEDGVVRIVGRYVPKTEAQRSWDIPGSNDRLNRVFELNSLPYGGYPGEDVIDRREKKLAAVTEDDPAPEAALATKKRKLGTAVGELGVSDSFAMELMGTCAAPGGRMSSPELQESSARMLEEAAQKRRVVIRLPEARPKRARGTAKATAPGGSQPALAVKPAAPGSSKVPESVKAAGAGGTKSAPDGATKARELPSPGKRVADFGTNISVDDYLVGSGEGQLVVVLPAVATTVSAVVPGVKGSALSAGGEISAVAAVKDEAGTVSRRLREASQHLSQAADFADRVASGGLTADVSAEVERLRAQHADTVREKSAADSKCRKLAEKVAALVGERTDLRRQLVEERREANQAIAKAQAEAKLARVEGSLASQRAEEWEVQFNALQARMERVEASTRSEVERTRKQLVDSYRELGARTADFEVPDREAGLHFLEWLQEELLALPTIVEGFMSFASLVTCEGALNALSREGCSHYEVFDRSDEDFGHEIYKVEDPMVKDSAGALFDRMWGPFGREVVRERSDQARDQMAHAEDVEDFGPLNSVQPEAEANPVVAEAEVDPAPPPETGEGSLAAPAAAVSGGGSSPVTAPMVENPPKAATELAAEDPPKAATEPTAKDPMAAAGSSQAQDFGPAHATATVNFVAASTVVAGNESDEYAFKFSDFDDSGSSVEWMEESSDEDLDYFAALDMAAAEASPHVTDAEVLPGPSAGRRRRRAVAKRRVSEVDGGRLRVGRAGKRELLSSPVGASVGEGELRSLFEGEELRIMLFNYREMGIIPKVEPM

SEQ ID NO: 66774 - protein, 176 aa, Zea mays
  Coding DNA Sequence Number=SeqID_23399
MPNGGGGGSSKSMGGGYAGVERLELSQRVTGTVEPFPTTIEGGCGGCGGWWWDSNGSGRSGVGRGSRVDHQLVVEGRDGKGMGCVETGQRRCSDMATKRGGGQRRLDYQGSDHGTDEDSGFGHVTADLGVELDAVIENKVHGLIGGHENTSYKVPVVKEDAHNDHGRTGRSRRHPG

SEQ ID NO: 66775 - protein, 250 aa, Zea mays
  Coding DNA Sequence Number=SeqID_23400
  Pfam annotation: Domain name=SPT2; Domain location=138-239; Score= -27.8; E_value=0.1; Accession=PF08243.2; Description=SPT2 chromatin protein
  Subcellular localization annotation: CTP_CleavageSite=28; ConfidenceScore=5.31e-01
MPSNFVGFGKNGLTAQNFGKGSRSLQARSLTVSGVHHCETTDQAKDGGKKSFEVPSTRETVKETRTPKPGVKKNNCKVKVDRVKKSYGSNSDVLVDAHDPWTRIKIKYSEYKCTTSTPYVAYGTNLSKGEEKRWQPNDESISPTGVSSTSYKCLIANNDSGNESDDEEEHEDDSEDESSSPQGTFSCIASTNNDDMENETDDVEEEEIRRFYTHLNKEDKVLLVKLLRRNKEQGEMLLRLEETLIKTNDA

SEQ ID NO: 66776 - protein, 83 aa, Zea mays
  Coding DNA Sequence Number=SeqID_23401
  Subcellular localization annotation: CTP_CleavageSite=59; ConfidenceScore=5.34e-01
MVRPSLVAWCGIVAIPTTAPSLSSPGRGFPAPACTHGDSPAAAARPTRNPAPVQEAQSRCSEEEGSSFRENVLDCIGNKRPDL

SEQ ID NO: 66777 - protein, 876 aa, Zea mays
  Coding DNA Sequence Number=SeqID_23402
MQVVELVPCARNKWGNWNEFWFYVAEGTVEDHEGLPVSEMCSHFYSAYPPFEVAEEDADEGALRCAAGLSSGRDLVEEFVAYGVWPLAHGWALGEVCPRQMPSHGGKMVRSPAFALNLQSRDPAAFVREAEDGAVRLVGRYVPRTEGQRSWDIRGLNDRLNRVFELNQLPYDGYPGQDDVDRRGKKPVVETGDDPAPAAAPCSKKRKLGTAMGGLGVSDGFARELMRTCAAPGGRMSSSELRESSARMLRVTWGWWPRNVPIPRAAGEDFFTSRMAVVRLHEARPKRQRGAVKATAPGGGKPPLAAKSGVPASSKAPEAAAGTGGSKSTKAVPPSSRVPEVAKAARVLPSSGKRVADFATDISVDDYLGGSDEGQLAIVAPAAATTAAAVVPKAKGGALSAGGEMSALAAVRDEAGAVSRRLKEVKEALSQAADFADRTASGALTAVVSAEVERLRTQHADAVREKSAADSKCRKLADKVAALEGEKTDLRRQLAGERRETNEALARAQAAQAEANLARAEGNLARERAEQLQERLSALESCVERAEAATRAEAERTRKQLMDSYHELGARTGDFEVPDRESGLRCLEWVQEELQALPTIVEGFMSYASLVTCEGAMNALSREGCRHFEVFDQADEDFERDIYKVEDPIVKESAGAIYDRMWDPHGREVVRERAETARAQAVRGERVDDFGALNSALPDPEPIPAEAVSGAALEPPPETAEGALDAPVSAAAGGDLPPETAEGAPDAPAAAAPRAEDPATVAAEATAEATAEAPATAGSSQVQDFGPAHATATTNFLAASTVDGGNKCDGSASEFSDFADSGSSVEWTEESSEEDLDYFAALDVAAAEASPHAADTEDLPGPSTGRRRRRAVAKRR

SEQ ID NO: 66778 - protein, 273 aa, Zea mays
  Coding DNA Sequence Number=SeqID_23403
MGRARAAVELRGDGEGKGVVAAGHERHGEEGTTRERHKEKAHLAESLRPGRTRPPRSNSPHQHVEDRRPRRSSRTSKEPKVDAHVKTQALYSPWQTGAKTIKDFEARMIKTSKTIRCDLPHCKRGPMYNLAHIAGSCPWAARAGRASRGLTHKVPTFGTHHGSTIKHSRDGPQESKFEGHRFHRRCSEAALLVEKKGKAPIADDILQEAFDDDVVNSKRQCKDNQPTLEGTVRTCSSEGAPQAPPPGFTHPEGEDTIEDGEIICISAEDQLKL

SEQ ID NO: 66779 - protein, 133 aa, Zea mays
  Coding DNA Sequence Number=SeqID_23404
  Gene Ontology: Mol. function=protein serine/threonine kinase activity; Biological process=protein amino acid phosphorylation
  Homolog annotation: Hit_ID=Q5JK11; Match level="QueryCoverage=52%, HitCoverage=12%, E-value=2e-19, Identity=67%"; Hit description =Putative cell cycle dependent kinase C
MTISSKFDSLPNSSDYSDEEFLYASSSSGATQNIPMTGSARALSSCFWFIDWISGGEHRVVALKKGQVDGIGEAESVRFMAREIALLRRLGDNPYVARLNDLITSRLNLETSIYLILEYMEHDLFGFSTYVKD

SEQ ID NO: 66780 - protein, 114 aa, Zea mays
  Coding DNA Sequence Number=SeqID_23405
  Subcellular localization annotation: CTP_CleavageSite=19; ConfidenceScore=5.08e-01
MPTSSSSAAATPPADASPPADASSEETLSTLVVEELRAGDSVDFGVSRMSSVRVQDMQRLGYFGGRVARVPGTEEVPEPEGELVVFEAFFAAGLRLPAHRFVGEVLRRFNVQIH

SEQ ID NO: 66781 - protein, 231 aa, Zea mays
  Coding DNA Sequence Number=SeqID_23406
MTSPTPVNGGDTRFSFDYLSHEGFPSILWELYEEHRVPRCRVWLTLESHPLQHGWCSLDSKTVGFRADDTTEAIALKALMTFCGYHPLEMMMHPLGLFPVEKRDDPMWCNRVSHVKDVWAMHPDQVGRITVQCMSALYRLHALQSDAIAHLTGLAQSTKITLDNREDFVVDLSSELLEKDSQVEQIVTKPSKVLGPPTNVLVLRTSDSHAGARNGSASSVICIFIISPKSA

SEQ ID NO: 66782 - protein, 332 aa, Zea mays
  Coding DNA Sequence Number=SeqID_23407
MTGSGGATTELSVDDYLVGDVTMFNVQTGLPPSGDRLRRAGCLGGANLAEELESLPSIATGLVSYTSLFTCEGAANALSQEGCRHFKVFDWANEDFDHGVFQIEDDVLNCSTGALYYRMWGPHGCGIVPERADRALAQVEGMHLGLGSGVWPAQANPDDVKINDVLMDVSAMFISGDVSEGSDFGSWSSEDGELGSHFSWADESSKDDIDYFAALDLAASKSPLRFAPREELVTSTDAGAGDSRRRRMGMSKQSIGDFGVDRRVHVVGDSALGDFCLDNVFVEDFAPYGWYRALIVLFRLHPYAIFGRTMSLWKTSPYGWYHSLVVFFWLHP

SEQ ID NO: 66783 - protein, 119 aa, Zea mays
  Coding DNA Sequence Number=SeqID_23408
MAKLSSSTWARALASLAQIPDRIVATTATFFMSWGKLIAGLPYGGVEPVPGRNWADNFATWEEFFVGLYLPPCSHPTPWTSSSSNQSMGSLVMARRRGLSPGSPAFNQVKEDFASPSIA

SEQ ID NO: 66784 - protein, 68 aa, Zea mays
  Coding DNA Sequence Number=SeqID_23409
MANAGAGALLREKIIENGEESEVIEEKTPPPLESQAGTWLYFNICGSEPDSPTNKGKPRCMQPLSLCF

SEQ ID NO: 66785 - protein, 272 aa, Zea mays
  Coding DNA Sequence Number=SeqID_23410
MTHLGCPRHTDFSTEEHYAGEKFTTDPIQSWFEKATDRVGLLFLKVTLVTGFRSVKPTFVFRKKRFCPTVNIPLIPLLSHPDFGAPRPGREHNHQVSEGTCVLNTRRWRSDTYKYPRTVPVRGQINRAIANCRENPVNVNVSPLLDPLATESKFQHLAPTVRATRKPPAMAPKKANSKADEAAKAALLAARKGKALALTQSTHQEATEVDVLRTCEDDTLRTCGPEGQSQPPPGFAPLEGTDLTEDGEVLGISAEEQLQLRALRLKNRNLQR

SEQ ID NO: 66786 - protein, 187 aa, Zea mays
  Coding DNA Sequence Number=SeqID_23411
MALTPQISAPLHNSRWNRLHMELELIGRRNIMSLEEGPCSVVYFGYMSRSACMQELIQKYRINICLRKGLKISELIQELRIKICLRKGLKIYKQRKEEKKRNAKDLAWYSQSPARLGTPDSVRCARPASGEQATLGKNRQRTAIIHRTVRWCTGLSRRETPTCGDSSQMGKEIRKKSRGIQVDHWIT

SEQ ID NO: 66787 - protein, 721 aa, Zea mays
  Coding DNA Sequence Number=SeqID_23412
MADMERREEKEKKPVVGRQQARRHAIGSGSTPSSPPPPTAAADRYGRKASLEAFVFSSLSFSQMLLVAPSWNMDPCCLKRQFAKTVPCLAVLATRLPRRHACFVTLIAAAYRSSSPGYSGKEMRGEEHRAALRQKRLKKAKCFKWRPSKGDMDSKVEAGGAGSGQVCDDAVLCSLSTASFSGLVSWQRVRTLGKVAEGCDAADPPVPRKLRSAINKRAGRFASAPSRHVKKRRHLSAISAQISSVGQETRSNGSSLFTEQEEAIADVLLSLSQVPSHSEVTADKAVADSSNTNDASTSFSKGPTKEDDQTAELPSAANELASQCACINKAVEQSNIVPNADPVAAAANQSSNSIPLLSANEQMQDLSMETAVNLPSPSKDTSINSAQKHHELQFDDSKCHPAQKPEAPLWLVNSDQSEGVLLHEREKAKNNSAQDSVALYPSWVLSKHPVLRNVGAPKAWKRSITHVYVSHVIQMHVNKEKAAASSSLQSQARPEERLLARCPRPPNGSSTTSHKAAAARDERLYTVHFDVRVPAHQPPAGICDAGAGRQKIVSGSSWQNLPATSAAAAAAAQHVRYLHPQMARPPATPRDATPYSFPHFPYSRGSLPPAAALQQMPQYVCGPAYGLRPASSSAMMMKQLQQPMPTQQQHQQMWQYHVSQYQPRPDATLSPAAAWHGISSSLRPMGMLAPPEMPSPPRPPQMELFCAPYQGGRQPQQLRLM

SEQ ID NO: 66788 - protein, 168 aa, Zea mays
  Coding DNA Sequence Number=SeqID_23413
MEDAAETEQLEVAAILCDISRLVRSRHRRRQRARAAAPHLEILSWGRRRPRSMPEVKPSPVPAPAAAERGGAASPDTPLAYPESGGDDAPPEDKGEVAVAPPLDQWAEEEQQLGEAAASLSQPRENARPLQHEFYLKLEEYVVKTQQGARNMVLEPSEFVAYTLSDLV

SEQ ID NO: 66789 - protein, 101 aa, Zea mays
  Coding DNA Sequence Number=SeqID_23414
MSHYCSRDLATLSPPDSRPLICSVLLCCQCRVVVLRCGGRWPAWPVPVLGGDTVTDHDGADVTMGGGKMVLGAGGMQRGHPTAAAVPPTAPPTRRHPSLSP

SEQ ID NO: 66790 - protein, 246 aa, Zea mays
  Coding DNA Sequence Number=SeqID_23415
  Subcellular localization annotation: CTP_CleavageSite=72; ConfidenceScore=5.52e-01
MDFASPDPRARTQPRPRTTNSASPDPRARTQPWPRTTVSASPDPGLGLDLDLRRQTRPRPRRSLRLARPRARTDHVTGGAIITLPLTSSSYGEQDRRPIWLAPEGPGLSTRRLAVRENGLTRKSPALSHADACNPLLQAHPTWAQDNTEAASFPLLPVSFPPSCSVSRRPIWAGTRGGNLLVGPGTPGVETPTHITSYLSVRNREKKKNKRIAKDWLCAAEVQLSLTHRTVWWCTGQCPVRQAGLR

SEQ ID NO: 66791 - protein, 189 aa, Zea mays
  Coding DNA Sequence Number=SeqID_23416
  Subcellular localization annotation: CTP_CleavageSite=35; ConfidenceScore=5.10e-01
MYKKKESLPFYSSTIGPYRGDLFSTESSANTFVVVCDGSRGSAPYGATVRSTASPFVMDMRHLPVCIGIHWYGASIASLPVYGHCRGFDAEVPTSGLTGPIHQWGFTWDSCSTRTWSSASSREVARQGLVAPRLLDQGLGRLLRLVRVLVKDLADDRFKGFLGLSLGIPFLGAQQLVSNYIHGCIIFQA

SEQ ID NO: 66792 - protein, 499 aa, Zea mays
  Coding DNA Sequence Number=SeqID_23417
  Gene Ontology: Mol. function=methyltransferase activity; Cellular component=cytosol; Biological process=biological_process
  Homolog annotation: Hit_ID=A2X094; Match level="QueryCoverage=83%, HitCoverage=94%, E-value=1e-107, Identity=69%"; Hit description =Putative uncharacterized protein
  Pfam annotation: Domain name=Methyltransf_10; Domain location=12-391; Score=144.3; E_value=3.5e-40; Accession=PF05971.3; Description =Protein of unknown function (DUF890)
MGGGRKRRRRDGSETPSMHPRNRYAAAAPDFAALAELYPSFRPFVSVSGSGRASVDFTDFSSTRELTRVLLLHDHGVNWLVSLAPPPPFTLPPSALSMNPSMLRHGREKKMSPNIIPCAEFAAVCDLFGINPFQTVDVTHLLYQLITENGNILHFDGQLCPTVPNRSNYIHWIEDLLSSDLIPPISSSSERVKGFDIGTGANCIYPLLGASLLGWTFVGSDVTNVALEWAKKNVESNPHLAELIEIRNANAAPSESETVVREAASEKILEPAEDVAMPKPHILVGVVKESESFDFCMCNPPFFESTEEAGLNPKTSCGGTAEEMVCPGGELAFITQIIEDSVSLKNSFRWFTSMIGRKANLKLLISKVTLSDEQIEAAILHGDDYAGSLEDSSAKLQCVVKGISFRITVFEQIPGTLLIKGSLLNKALSGTFSSLFSRLEDALRAKCLMTASLWEYQHHVWCAGCLSGFGERLDMTTMGVLLSRPPAVARTVNHSSDTE

SEQ ID NO: 66793 - protein, 470 aa, Zea mays
  Coding DNA Sequence Number=SeqID_23418
MQAACDRTKGAHPFDFDASSMEAQAHTSCNQFAGCYVQETAPPLAPLPCLLDYGTSTAARGNPAHDPTVPTRHIGSRVSQPREKARQSITARNGPESNGGGRRKRKQRSSRQLSSASPPRTEKQATLRLRHNDRVKKGTGKGDTPKGILLREGNGPRAPLLIRGSKAGPSEGFNSRLRALGLRAHYWSEVRRPAPRKGSTAASGQSGSAPTTDQGFVGWPSKGSTAASDAERGMTLGLGLGLGPGRRRTPPRPTLGLGLGLGPGRRRTPPRPTPGLRLGPGLSRRSPPRPTQGLGLDLDLGRQTRPRPRRSLRLARPRAWTDHVTGGTIITLPLASSDYGEQDRRPIWLAPVKQIMMASRVLHDDGGSQPPYGSKETSARTRQPRQLSFRQAPALLRRPRHLMNRGPLTEGWPRGEDGTARAGLSLPPTRTLVTPYCKRTRPRRGTNTKAAGTPGVETPTAVDEHERDSR

SEQ ID NO: 66794 - protein, 18 aa, Zea mays
  Coding DNA Sequence Number=SeqID_23419
MARCGIVVAEQLRVSFHF

SEQ ID NO: 66795 - protein, 135 aa, Zea mays
  Coding DNA Sequence Number=SeqID_23420
  Homolog annotation: Hit_ID=Q8S474; Match level="QueryCoverage=46%, HitCoverage=9%, E-value=1e-07, Identity=50%"; Hit description =Putative pol protein
MRTRLKLMKEKIKEMSPLKMMTTIEGEMQMIKTRRMKNQGHHTQESTKQYNEITPSTPSSATFIRGVEEALQDSDWVMEMQEELNNFTRNEEPSGSFRNKQRRAWCGDKETKLDSWPRGIHKVEGLDFGRKPMHP

SEQ ID NO: 66796 - protein, 149 aa, Zea mays
  Coding DNA Sequence Number=SeqID_23421
MELRSSNDEAKRRRVSPIRGLGRTGDVSGRRSGRRFTFAVITTPKKGPGKGDTPKRILPREGTRLRASLLIRGSKAGPPKGSTAASDRVGPTPTTGQRFEGRPPEGFHGRLRLLGLRAHYCSGVRRLAPEGFTVASDAERGMTRGTFDT

SEQ ID NO: 66797 - protein, 63 aa, Zea mays
  Coding DNA Sequence Number=SeqID_23422
MARCGIVVAEQLRREITASQRAQAFRMAAVAGFKAMHIDGYTVTCRAGPRHVRAVRSHGASKN

SEQ ID NO: 66798 - protein, 88 aa, Zea mays
  Coding DNA Sequence Number=SeqID_23423
MAMVNTRRGGGIDLPPNRHTRRIYRQPQPQPAEMNPPNPPPGGVDPLVAAQMAVMQQMADTMADMCAQMQQERQEMRQEREDIRQELR

SEQ ID NO: 66799 - protein, 166 aa, Zea mays
  Coding DNA Sequence Number=SeqID_23424
MSSLPLKRRTPRNRPSFSVLHLHRSIGQKREAGEEEEREKDDLFELVSEQEGQEGGTPGPGSMYPTVSCVWSSRFSKPPDVRFDPPLEDETAAWLCTIVNGDESACNDDDGDGRLAANDGQEDGVPVMGTSTTTTDKKEKAPITTTDKKEKNLVQPAANQNVCYPS

SEQ ID NO: 66800 - protein, 263 aa, Zea mays
  Coding DNA Sequence Number=SeqID_23425
  Gene Ontology: Mol. function=pyridoxal phosphate binding; Cellular component=cytoplasm; Biological process=amino acid metabolic process
  Homolog annotation: Hit_ID=A3BQM4; Match level="QueryCoverage=93%, HitCoverage=48%, E-value=3e-82, Identity=59%"; Hit description =Putative uncharacterized protein
  Pfam annotation: Domain name=Aminotran_3; Domain location=76-263; Score=-92.5; E_value=8e-09; Accession=PF00202.12; Description =Aminotransferase class-III
  Subcellular localization annotation: CTP_CleavageSite=49; ConfidenceScore=5.05e-01
MTIARRLLRSNASAQAISLLKHVTGTASLQGHAHSPLDASVRHFSSAPSAQSDTTEENGVPMFMTLMGTSTWILMQGSYVYDINGNKYLDSLAGLWCTALGGSEPRLVKAATEQLNNLPFYHSFWNRTTKPSLDLAQEILSMFTAREMGKVFFTNSGSEANDSQVKLVWYYNNALGRPDKKKFIARSKAYHGSTLISASLTGSLIYQHLLFCTLTALTTGDIIFLIAAFIAEPVMGAGGVIPPPKTYFDKVIHYGFQKLLTLL

SEQ ID NO: 66801 - protein, 886 aa, Zea mays
  Coding DNA Sequence Number=SeqID_23426
  Gene Ontology: Mol. function=DNA (cytosine-5-)-methyltransferase activity; Cellular component=chromatin; Biological process =regulation of transcription, DNA-dependent
  Homolog annotation: Hit_ID=Q9ARI6; Match level="QueryCoverage=86%, HitCoverage=87%, E-value=0.0, Identity=88%"; Hit description=DNA (cytosine-5)-methyltransferase 2
  Pfam annotation: Domain name=BAH; Domain location=187-312; Score =48.1; E_value=3.2e-11; Accession=PF01426.9; Description=BAH domain
  Pfam annotation: Domain name=Chromo; Domain location=444-498; Score =65.8; E_value=1.5e-16; Accession=PF00385.15; Description='chromo' (CHRromatin Organisation MOd
  Pfam annotation: Domain name=DNA_methylase; Domain location=344-841; Score=34.7; E_value=1.9e-14; Accession=PF00145.8; Description=C-5 cytosine-specific DNA methylase
  Pfam module annotation: Pfam domain module=BAH::Chromo::DNA _methylase; Domain location=187-312::444-498::344-841
MAPSSPSPAAPTRVSGRKRAAKAEEIHQNKEEEEEEEEVVAASSAKRSRKAASSGKKPKSPPKQAKPGRKKKGDAEMKEPVEDDVCAEEPDEEELAMGEEEAEEQAMREEVVAVAAGSPGKKRVGRRNAAAAAGDHEPEFIGSPVAADEARSNWPKRYGRSTAAKKPDEEEELKARCHYRSAKVDNVVYCLGDDVYVKAGENEADYIGRITEFFEGTDQCHYFTCRWFFRAEDTVINSLVSISVDGHKHDPRRVFLSEEKNDNVLDCIISKVKIVHVDPNMDPKAKAQLIESCDLYYDMSYSVAYSTFANISSENGQSDSDTASGISSDDVDLETSSSMPTRTATLLDLYSGCGGMSTGLCLGAALSGLKLETRWAVDFNSFACQSLKYNHPQTEVRNEKADEFLALLKEWAVLCKKYVQDVDSNLASSEDQADEDSPLDKDEFVVEKLVGICYGGSDRENGIYFKVQWEGYGPEEDTWEPIDNLSDCPQKIRDFVQEGHKRKILPLPGDVDVICGGPPCQGISGFNRYRNRDEPLKDEKNKQMVTFMDIVAYLKPKYVLMENVVDILKFADGYLGKYALSCLVAMKYQARLGMMVAGCYGLPQFRMRVFLWGALSSMVLPKYPLPTYDVVVRGGAPNAFSVQNHQPNDVMEYGGSPKTEFQRYIRLSRKDMLDWSFGEGAGPDEGKLLDHQPLRLNNDDYERVQQIPVKKGANFRDLKGVRVGANNIVEWDPEIERVKLSSGKPLVPDYAMSFIKGKSLKPFGRLWWDETVPTVVTRAEPHNQVIIHPTQARVLTIRENARLQGFPDYYRLFGPIKEKYIQVGNAVAVPVARALGYCLGQAYLGESEGSDPLYQLPPSFTSVGGRTAGQARASPVGTPAGEVVEQ

SEQ ID NO: 66802 - protein, 415 aa, Zea mays
  Coding DNA Sequence Number=SeqID_23427
  Homolog annotation: Hit_ID=A2XTX5; Match level="QueryCoverage=26%, HitCoverage=58%, E-value=1e-19, Identity=48%"; Hit description =Putative uncharacterized protein
MRLGLSSTVSPPPPASSAHTNLLTGNEEGNSEVERQHMDFAQELESQRMQFFLNARMELTQARNHASLATVTRPTAGVSSRRTSVVTDAGGSSNHHSRYRISHGDMHRHAPRSHYQSQYHDNNHAGAGVGDAEREISQMEVRCQTSFCQNEDGFPKLLRACIIRLGIRSQPEYDGREFVEHGTKKRSGRHPTQILSAFQRNRPVWMARMHALEEDAEKLNRKLHVDLTIAQAHVVALESREVIAVEVLKQAKDEHVQKLMEAYLVTHNQRRALRIQEPASSNPVQPRRAEDPQILEGHPVFIRGEKKAWELPEGAIVLEGIPVFPKAMDKQEHPEFSQDPPPELFEPLTIKKITAPSREIKGEATSTPPAPPPSKELQEPVPLEEEFNPVLPSQSPPEEVININSLLTHPEDVSH

SEQ ID NO: 66803 - protein, 26 aa, Zea mays
  Coding DNA Sequence Number=SeqID_23428
MRLHTLRDDVVLYPQRCLLLIKGSGE

SEQ ID NO: 66804 - protein, 743 aa, Zea mays
  Coding DNA Sequence Number=SeqID_23429
  Gene Ontology: Mol. function=potassium ion transmembrane transporter activity; Cellular component=integral to membrane; Biological process=potassium ion transport
  Homolog annotation: Hit_ID=A3AXC6; Match level="QueryCoverage=100%, HitCoverage=100%, E-value=0.0, Identity=69%"; Hit description =Putative uncharacterized protein
  Pfam annotation: Domain name=K_trans; Domain location=49-743; Score =1197.7; E_value=0; Accession=PF02705.7; Description=K+ potassium transporter
MASLSESELTNRGTMWELDQNLDQPMDEEAGRLKNMYREKKFSSALLLRLAFQSLGVVFGDLGTSPLYVFYNIFPRGIGEGEDEDVIGALSLIIYTLTLIPLLKYVFVVLRANDNGQGCVTFGFVVSVVLSASGGIKVQNQNMSTDVVVLVAVVILIGLFSMQHYGTDKVGWLFAPIVLLWFILIGSVGAINIHKYDSSVLKAYNPMYIYRFFRRRKNSDVWTSLGGIMLSITGTEALFADLCHFPVLAIQIAFTLIVFPCLLLAYTGQAAYIISNKTHVADAFYRSIPAAIYWPAFIIATAAAIVASQATISATYSIIKQALALGCFPRVKIVHTSKKFLGQIYIPDINWILLVLCIAVTAGFKNQSQIGNAYGTAVVIVMLVTTFLMVPIMLLVWKSHWILVVTFIVLSLMVEVPYFVACILKIDQGGWVPLVVATAFFLIMYVWHFCTVKRYEFEMHSKVSMAWILGLGPSLGLVRVPGIGFVYTELASGVPHIFSHFITNLPAIHSVVVFVCVKYLPVYTVPTEERFLVRRIGPRDFHMFRCVARYGYKDLHKRDEDFERMLFDCVLFFVRLESMMEGYSDSDEFSVPEQAPPGSGSGSGRGGPAAAFLQGGERTCSTMCSNGELSFSSQDSIVPAAQSPAPRGLRLLQCSASASASAGQAGSCGTVGDELEFLNRCKDAGVVHILGNTIVRARRDSGVVKKLAVDYMYAFMRRMCRENSVIFNVPHESLLNVGQIYYI

SEQ ID NO: 66805 - protein, 92 aa, Zea mays
  Coding DNA Sequence Number=SeqID_23430
  Gene Ontology: Mol. function=oxidoreductase activity; Cellular component=peroxisome; Biological process=metabolic process
  Homolog annotation: Hit_ID=A5AHN8; Match level="QueryCoverage=66%, HitCoverage=20%, E-value=2e-17, Identity=67%"; Hit description =Putative uncharacterized protein
MESPFRADLLRGKAALVTGGGSGIGFEIAAQLARHGAHVALMGRRREVLDKAVAALRSEGLRISSPRGKDLKVLRVDRSPGVSPDDVESPRN

SEQ ID NO: 66806 - protein, 265 aa, Zea mays
  Coding DNA Sequence Number=SeqID_23431
  Gene Ontology: Mol. function=ribonuclease H activity; Biological process=regulation of epidermal cell division
  Homolog annotation: Hit_ID=Q7XD68; Match level="QueryCoverage=51%, HitCoverage=63%, E-value=1e-62, Identity=85%"; Hit description=GRAM domain containing protein, expressed
  Pfam annotation: Domain name=GRAM; Domain location=27-105; Score =40.6; E_value=5.4e-09; Accession=PF02893.11; Description=GRAM domain
MGPKISETIKGKLSFGAKVLQAGGIDKVFREYFAVEKDEKLRKAFQCYLSTTAGPIAGMLFISTKKIAFHSDRPLSFTSPKGGSTRVPYKVLIPTERMKSASVRENLYNPDEKYIDVVTVDGFDFWFMGFVSYEKSQWWPKALKSFASRIQHFLKILGTREENWKKPSNMRAREKISGRGRSYDGRLRSRSPGLNDSPRGRSRSQSRSYSPALKQKHYSSSTDFENDSDFRPSRARRDSYSGQISVILITTSKHISRLIRRPSEP

SEQ ID NO: 66807 - protein, 173 aa, Zea mays
  Coding DNA Sequence Number=SeqID_23432
MAAIEAPLTQETDDGFSNDSAARGIGRGFHAWAAVGVALAGGCSRSSRLGAAAAVGPGGASRAACAGAGTAESGVVAPCARIIVIPYESKGKRGKLLSRRCHGTSQETTKLGCFITYNNMGSKTLSTEVYKGKRLLKDMPACEIQGKADQESKTLFVEMLTNSGSLKSSFITA

SEQ ID NO: 66808 - protein, 322 aa, Zea mays
  Coding DNA Sequence Number=SeqID_23433
  Homolog annotation: Hit_ID=A2XFR6; Match level="QueryCoverage=51%, HitCoverage=53%, E-value=1e-22, Identity=36%"; Hit description =Putative uncharacterized protein
  Subcellular localization annotation: CTP_CleavageSite=35; ConfidenceScore=5.49e-01
MGKRGSDGSHSPNHPRQHQLCPSAPVDPGLPSGSRGSSGASPSRPSGECNQPGDSSEEQLPTPTPLAESLAFVAGSSTSASSAPAFQAPAPGGDDPDDSGDGDDEDDDDEDDGEDGHVNEEADYAQQDNFMGFGPVVEHYTSMFETGHFPNLLQEVLHALGTYVRPLYETRQVSEPPRACYYITRIHVRVMDAGDRGFRTLSAHESLIPLSTYAASVSDAARRTLCVCVEKIQTNIVPGEPGEDRLNTLAGVVAGLNTDLDSATLDLYRVHLELENAHARIAALEAQLQGLDPPEAQVPAVALSPPRKRLRYGEPGSVTRLL

SEQ ID NO: 66809 - protein, 322 aa, Zea mays
  Coding DNA Sequence Number=SeqID_23434
  Homolog annotation: Hit_ID=A2XFR6; Match level="QueryCoverage=56%, HitCoverage=51%, E-value=1e-29, Identity=42%"; Hit description =Putative uncharacterized protein
MDPGTHMMVHTLQTTRVNTSYAPQPRQIPVYPVVVEEVPAHLPPVRVENVINLEDSSEEQLPTPTPLAESLAFIAGSSTSASSAPAFQAPAPGGDDPDDSGDGDDEDDDDEDDGEDGHVNEEADYAQQDNFMGFGPVVKHYTSMFETGHFPNLLQEVLHALGTYVRPPVRDEASDRGFRTLSAHESLIPLSTYAASVSDAARRTLWSLSHTYRQQLQNTRFRHLPQRLHGEIQTNIVPGEPGEDRLNTLAGVVAGLNTDLDSATLDLYRVHLELENAHARIAALEAQLQGLDPPEAQVPAVALSPPRKRLRYGEPGSVTRLL

SEQ ID NO: 66810 - protein, 315 aa, Zea mays
  Coding DNA Sequence Number=SeqID_23435
  Gene Ontology: Mol. function=DNA photolyase activity; Biological process=DNA repair
  Homolog annotation: Hit_ID=Q6YXC2; Match level="QueryCoverage=49%, HitCoverage=21%, E-value=1e-75, Identity=87%"; Hit description =Cryptochrome 1a
  Pfam annotation: Domain name=FAD_binding_7; Domain location=54-223; Score=-20.7; E_value=3e-10; Accession=PF03441.5; Description=FAD binding domain of DNA photolyase
MFWNRCLCMPDPTAPLLPPKRINSGDLSRCPWDELVFEDESERGSNALLARAWSPGWQNADKALTAFLNGSLMDYSVNRKKIDSASTSLLSPYLHFSELSVRKVFHQVRMKRLMWSNDGNHAGEESCTLFLCSIGLREYSRYLTFNHPCSHEKPLLSCRTSGSSPGSSMRLSGVPPDISGAPEDSSANSSPSGKSRGNSTIIHRIVRCTLDSVRCSKEVRPQELASFGKMQRLLRYNSPDMSGRAQRSGTPMLAHQTLYSTCPVRHRTSRRAQKTELQRSNPNGFGDVAGAPDMSGKFYSRVDLRREAHSVRGTV

SEQ ID NO: 66811 - protein, 221 aa, Zea mays
  Coding DNA Sequence Number=SeqID_23436
MGGGLDAGSHKVYKEPELSQRARRLRVTRSFTNKPKGSNSIEQELSMREKGEVAPSGVGGSRIKEDGNQISYVNTRRLVVEVGDDGLGEIEAWRANEMALSLDKLWGKIIHPRAFVLPGKDYNPLPFAGSYHRNWEGYGKGGVGSHNVEGGTNSRRRHKRQKGLGRGTQDGGRRAQDRSDVQAAHVQARRGSWHPGQLQSGPHLGQWPCWGQPGQQGPPKA

SEQ ID NO: 66812 - protein, 835 aa, Zea mays
  Coding DNA Sequence Number=SeqID_23437
  Gene Ontology: Mol. function=cysteine-type peptidase activity; Biological process=proteolysis
  Homolog annotation: Hit_ID=Q5NKQ2; Match level="QueryCoverage=97%, HitCoverage=95%, E-value=0.0, Identity=64%"; Hit description =Putative uncharacterized protein 9C20.3a
MKSMDRPPANPKRITIESSQDLFIVEIPHLASTGDPPNTNHDGHRLAPAERPSVIHESTDQTGTGDDDDDFMTPMKKRNATGIPNKILQKRCTKRMKVVETSRQRLNVRCNPQDVIITIKILNERQRQAVARKGFSNILDMTLDALGSRSHLWWLMDKLDHKDMTIRPGQGNELKITKETVHLILGLPNAGGGKPLGIDEAVAGNNLRAELGLSKDEFIVATLQDRLRKGDDDDLSIRCFFLLLFNRLLFPTSSWGISSHEVLLTEEIDRFHETDWCHLIFNDLCEAAHKWHTRSTTNVSTTIYGCSIVILLYYLDHLHDAATPHNKHGTPRIKFFDKNIIQALTKADKRKPRQSGEPFGHCVFRSSSETCYSTVPTVHVQSEQRGRKNIFDVPRPDPCGHHTIHIQLPLIKDMISSKIKQLQARDRPKFVEKLVEHDSEVGRACSTIKNTLTKMVVKQYELADTFAEMIDDVLRAESVDTHNDAEAPQPAKPSDTSHHLSSEAYIHSGTQNTPDPTMPTSQPTTELTGTQFEEIHEMQQQMRRAFEGCPDDLDVTAPMETNSYSNSKKQDYHFNVGNKLLRDINIPPQHIPDCNIMSSYTSSHLPMFDATPQKHGGDIDASHDTQTYTGTLFDQTPNGHCFIQCFRDDDANHRPSMNNNILVLDVNVGALLNFEEQERHNKSPQGYNQVIHDDYLDKTLPQLDNCVDCKSFRCIHILDSNPYGPELGGTTWKMYHYAQMDIGSRKLPWARVIMNRLNKSLQQVRPNSRIPKFGNFPIDMPPMCPTMKAGSNNCGFFIIWYIQYYDYMDGSIKAYIQLDDSRDLRSLSLYYLIFS

SEQ ID NO: 66813 - protein, 57 aa, Zea mays
  Coding DNA Sequence Number=SeqID_23438
MDEIVDKAISIMQVTSKHLMYIRKEKLHSGKALSAIEVKELHEALEAIDEGCKDSWE

SEQ ID NO: 66814 - protein, 80 aa, Zea mays
  Coding DNA Sequence Number=SeqID_23439
MPGAARPRLLARPAFGVPENSLVEESEELAGEAPEQQLVAMRLMVLGIDSGNGCPHCNHCSGEDEAVEGDFQEFQDYDEF

SEQ ID NO: 66815 - protein, 117 aa, Zea mays
  Coding DNA Sequence Number=SeqID_23440
MASNPICKIGSGGARTWADEHGHVFDAPWQRHSTPLVLSPRRANPAPTPMPAPVAIKATPASTVHPRASLTQPEHEFDRVCPENGVPAAAQATTTVDRPSQPFSAPSDPRVSFFGPQ

SEQ ID NO: 66816 - protein, 273 aa, Zea mays
  Coding DNA Sequence Number=SeqID_23441
  Gene Ontology: Mol. function=endonuclease activity; Cellular component=cytoplasm; Biological process=RNA-dependent DNA replication
  Homolog annotation: Hit_ID=Q2HUP4; Match level="QueryCoverage=92%, HitCoverage=65%, E-value=1e-30, Identity=33%"; Hit description =Endonuclease/exonuclease/phosphatase
  Pfam annotation: Domain name=Exo_endo_phos; Domain location=5-222; Score=-15.0; E_value=0.038; Accession=PF03372.14; Description =EndonucleaseExonucleasephosphatase family
MQREVGVLVFYVSRRQNGKGKKRKEVENTGFKLWYSGIVANKNGVGILIDKTLKDGVVDVKRQGDRIILVKLVMGDVVLNIISAYAPQVGLSESEKRKFLEDLDGMVRAVPTNDKLFIGADLNCHVCSTNVGYELARGGFRYGSRHQEGEDILDFAVAYNLVIANTFFRKRYSHFVTFSSGHRSSQIDFVLIRREHNQACLDCKVIHGESVVPQHNLVVADFRFRISTHRVKQAKIVRMKWWKLKGETSKVFRGRVFVEGAWSEEEDANNMWV

SEQ ID NO: 66817 - protein, 151 aa, Zea mays
  Coding DNA Sequence Number=SeqID_23442
MGKSKKGGSSSHHSGDKRKREPTPPLEEEFSSESEGSLVHASPLASSDDSDDSQGIAAEVWTYIRAVEHAGLEGSDESEYSLDEENSSDSSEESGGDSDGGDDDDDGGDGDDGGEGGEGDGKGGDGSGKGGSGDGGDGSKGSSRGSNKASG

SEQ ID NO: 66818 - protein, 17 aa, Zea mays
  Coding DNA Sequence Number=SeqID_23443
MPPSTVVYALARTIRDL

SEQ ID NO: 66819 - protein, 169 aa, Zea mays
  Coding DNA Sequence Number=SeqID_23444
MGARNRSETHWIAWSTRGGGRPKSGEVDLGPPVKSGLVRGLGELHGLLAELAEALARLEGGWSGLATVAEALATMAGGIELAGAKGMGLAGEDECGAKLGTGSCSVTKVPVSECLVPRSNCAKTVSNEFGLSSNFSRMCSREFGTTLIFGSPGFEFRKIENTDDPWEEV

SEQ ID NO: 66820 - protein, 49 aa, Zea mays
  Coding DNA Sequence Number=SeqID_23445
MAAKSKLRRGSHDSVTDTLGTSATQDGEAGAWNHIFDARILRPERAARI

SEQ ID NO: 66821 - protein, 182 aa, Zea mays
  Coding DNA Sequence Number=SeqID_23446
  Subcellular localization annotation: CTP_CleavageSite=45; ConfidenceScore=5.28e-01
MAVVGGERLPSSSINSVLASPASSHILLPLVVYSLLFSSTPPWVRARKVEVPHTIPAIRGSASRLLPRRTSAIPSNQRRSSPVHASPPASSDDSDDSQGIAAEVWTYIWAVKRAGLEGSDESEVSSDNSSDSSEEGGGDGDGEGDDDDGGDGDGNGDGGEGGDKGGEGDDKDGSKGSNKAIG

SEQ ID NO: 66822 - protein, 151 aa, Zea mays
  Coding DNA Sequence Number=SeqID_23447
MELPLDAQSSGRRLDVDERVEQCRVVVGVLHVLARFVLVLQMQHLRGAHLGMGRGRALPGAGGRTAGGRGAAPPGAMSLGLGSHAARAPEEAALPGAREVAPPGPGTHVGKRVGGRDVRREGEKGRERGRERGEGSSPWDPKPAITIQRIT

SEQ ID NO: 66823 - protein, 126 aa, Zea mays
  Coding DNA Sequence Number=SeqID_23448
MDVLIIRNLGEDQQGLGKGLGVEEEQQGCHNRKEIKSDLAATPSRELALVARSIAQCMVDNQRRSGNDEEARIPTDFDECVSRQDLEANNKLLKEQMEETVHKSVHDAFIDMNLGKTYERLDRRLS

SEQ ID NO: 66824 - protein, 194 aa, Zea mays
  Coding DNA Sequence Number=SeqID_23449
MSAEDDVDISVDAWEGSTSFPFLLLGLSRFSKSPSWWGRRQRLEGSAVPHGMLEVSAVPKGVAHVLVVRALGVEDVIQRAFASARSSSGARGGWSGGVDFFTRPLLPTFVGLLVHVASWCRRCRLCSSDEVLSSFVGGDVEVGFPEQLLGGSRRFLQYGADEGRVIRSPVEVLDHYCFCDLGDTISHGLKSFEV

SEQ ID NO: 66825 - protein, 220 aa, Zea mays
  Coding DNA Sequence Number=SeqID_23450
MGPQVPVGGNPQKSFANRREDGCLRDGVGTEIVQLHPVDVQNRPHKTTCRHSEPPLVKRDEAQHIPRRRGRGGTARRGHPLRLRVTGERTKQTISNKGLQIIHRDGGERPRVARRNNGHPVGHHQAEEVAAERTRFEGWPSEGFDSRLRAPGLRALLLMRGSKAGPSEGFDSRLRALGLRAHYWSEVQRLAPRRGSTTASSHSGSAPTTDQGFVGWPSKG

SEQ ID NO: 66826 - protein, 97 aa, Zea mays
  Coding DNA Sequence Number=SeqID_23451
  Subcellular localization annotation: CTP_CleavageSite=63; ConfidenceScore=5.32e-01
MGNSASPNPRARTQPRPRKMVSASPDPGLGLSLDPGRQTPPHPTLGLGLSLGLGRWSAPRPTQGSELTSTSEEPPPRPTLGSDPPCHREGHHYPTPS

SEQ ID NO: 66827 - protein, 235 aa, Zea mays
  Coding DNA Sequence Number=SeqID_23452
MAYLSISWIQDMKGAAAAVTTPSEISKPKWSSFGRSYVTETGHLQDELAERDLTIDWAINSLSIAWDREAKARAGVAELSAAIDNLQMPSRTRAHDSAGMSHGREDTPNPSPVPPTLAESIAALVNATADNTRFLREIVGNQFQQQGGRAYPQGPRETSYLDFSETRPPLFIKSEDPLEVDEWYEIDQVNTDLKKKNCFMRGLNDWLQRKMATCLDLTYSGAVSTALALEAKNTG

SEQ ID NO: 66828 - protein, 322 aa, Zea mays
  Coding DNA Sequence Number=SeqID_23453
MESHDLRAERESRLVGDNEIDGSDYDYGAGKWYSFRLERMARLRHTARKSVIPFLPSRLAERPLRRPVAGQSSHLERLHHRLHEEQERRRQEQQGSSFSLHQEIESVRSCSPVLPLEAPPAPPLGALASGVAAGGDPDDGGGDDSSSHDTDFSADQEPEGWVARPITRDAARGCHFHDALDTLLRRALNRRTWSIEYRCVVYQHSRGGLPGPLGGDLLGAPSGEQSPSTGGVIVSPVSEDNPRLSSTVNLAVVLNTELDHALDELSRARAEIALLRAERAERRHLDDGSPAPVGTQHPYRSPRRGRQSYGNPDCKTKINLEP

SEQ ID NO: 66829 - protein, 57 aa, Zea mays; identical to SEQ ID NO: 48612
  Coding DNA Sequence Number=SeqID_23454

SEQ ID NO: 66830 - protein, 50 aa, Zea mays
  Coding DNA Sequence Number=SeqID_23455
MDTSVLLLLLPHGCAPLCSNPSATPSTLGMALRVIVMKWNVSAHHPPGVR

SEQ ID NO: 66831 - protein, 67 aa, Zea mays
  Coding DNA Sequence Number=SeqID_23456
MWKDRVEHAKDIWAIYPGQTAHLTEIQDMEANEDVDIEGGDEPASSLDTAGSGRPPSSESSVASFAH

SEQ ID NO: 66832 - protein, 492 aa, Zea mays
  Coding DNA Sequence Number=SeqID_23457
  Gene Ontology: Mol. function=transferase activity
  Homolog annotation: Hit_ID=Q5Z8T7; Match level="QueryCoverage=99%, HitCoverage=98%, E-value=0.0, Identity=70%"; Hit description =Putative HGA1
  Pfam annotation: Domain name=DUF563; Domain location=112-357; Score =320.4; E_value=3.4e-93; Accession=PF04577.5; Description=Protein of unknown function (DUF563)
MKQPRGRQEPRRVGNAAMVVTMVVSLCVLTYIKARYCSNPFRTSPPLRFLLLLLRFLLLPAFSSVHPLTVPTAGYDVAAKAVAEVEVDEDYDSTRYKLTGPVGEEDFDPSRPTCYNTSKRSERCAAVGDIRVDGNHSRIYISPLSREWRTKPYARRHDAVAMDDVREFTLVPFGGPNDTAVPPLCTRTHSVPGFLFSSGGFAGNLYHDYADVLVPLFASTNHLGGEVQFLLADIKDWWADKFRPLFRQLSRYDVIDVNNDREVHCFPRIIIGSTFHRAMGIDPSRSPGGVTVADFKRLLRRAFRLERAVASRSGAPRRRDRPRLLIISRKSSRRFVNERAMARAAAAARFDVRIAEPDNHTDMPNFARLVNSADVMMGVHGAGLTNMVFLPSRAVLVQVVPFGGLEWLTRVTFKDPARDMDVTYMEYNVSLEESSLRDLYPEDHFYLKHPYDVHKKGWDAIKTVYLDKQNVRLNLTRFTRTLEQARDLLPTP

SEQ ID NO: 66833 - protein, 145 aa, Zea mays
  Coding DNA Sequence Number=SeqID_23458
MATSIRAPLRRGPRPRLPTGGGNEAIKAKELEARRQVALVVSPAEAITSAAGSLTRGGDHLSTNDSSHLLTGGLPEMAAVSPRMKRVHQSSAARMRQTYARRDCRPCGRRTAVPRLAALEAAPKPSKPRSQTRGSCRSLRPAGPA

SEQ ID NO: 66834 - protein, 53 aa, Zea mays
  Coding DNA Sequence Number=SeqID_23459
  Homolog annotation: Hit_ID=Q41786; Match level="QueryCoverage=64%, HitCoverage=8%, E-value=1e-07, Identity=85%"; Hit description =Opaque2 heterodimerizing protein 2
MAPASASRSVVDPVECNTMLKQKLEKDLNAIAMWRVGRDPRLEHVYGSVDKEG

SEQ ID NO: 66835 - protein, 30 aa, Zea mays
  Coding DNA Sequence Number=SeqID_23460
MSSTAELPPVRYEPVIPSPKSMADWSNAMR

SEQ ID NO: 66836 - protein, 33 aa, Zea mays
  Coding DNA Sequence Number=SeqID_23461
MGMGREKLGRQSAAHEFEIGLYDNFGKWWNVTF

SEQ ID NO: 66837 - protein, 37 aa, Zea mays
  Coding DNA Sequence Number=SeqID_23462
HYGTSGYEIDGSGYDYGAGEDEAVEGDFQEFQDYDEF

SEQ ID NO: 66838 - protein, 120 aa, Zea mays
  Coding DNA Sequence Number=SeqID_23463
MVSVARGLWAAIGEIDLGEVIGNGSIPCPLLGSTGLGLLRPVYMLAGARLRSAPSGTSSREGIELQGPLCKSSVTHKNSNRTQLQLVKTPRALLQENEEEVEVTEEKTPPPLESQVIGVH

SEQ ID NO: 66839 - protein, 191 aa, Zea mays
  Coding DNA Sequence Number=SeqID_23464
MGERDEADKRALAASERKQREREGDEALTDGARMSARGSETHLHVFDAFCPRQSTLARVPACPAPCPSQTRAVARARAYKALPGFDYTLPCTLHTSPKLARRRLPVRSEPAAAQPLCHHRPASRAISNPVLPSEKLVHTSVKLPEQGIGVSFAGEASPRSPELSTPAGVHGLGKPLNHPSIPCAHSRCVTP

SEQ ID NO: 66840 - protein, 46 aa, Zea mays
  Coding DNA Sequence Number=SeqID_23465
MGAEQGYEDMQGTFRDSEVFEFVGKVLQSVRMMQYSSSACTSTKVS

SEQ ID NO: 66841 - protein, 156 aa, Zea mays
  Coding DNA Sequence Number=SeqID_23466
MGKSNKRKREPTPPSEDFGDSEYSEEEFSSESEGSPAPVSPPASSDDSDDSQEIAAEVWTYIWAVERSGLEGSDESEFSSDEEDSDGGEDEDDDDDDGDDDDGGDGDGDGSDSGGGRGGSSTGSTRGGSSKGSTRGGGGNGSTRGGGGGSSSKASG

SEQ ID NO: 66842 - protein, 392 aa, Zea mays
  Coding DNA Sequence Number=SeqID_23467
  Gene Ontology: Mol. function=helicase activity
  Homolog annotation: Hit_ID=Q53R78; Match level="QueryCoverage=59%, HitCoverage=28%, E-value=4e-35, Identity=41%"; Hit description =Putative uncharacterized protein
MEQFSKWVLDISDGALPAVTRGDESEPTWVTIPEDLLIHTDGDAVASLISEMGDILIPTLMVGDCSHSLCVRVSRLWEFLDPQDDSRLLHTNLVLLDEEGNNIHAQIYPPLCQQFSALLDEGGIPPAFPVCTYNLTPIEQLQPRVDYKEYFTDVLGVVSVISHVSSLRTRGRQAEVMKRTVTISNARDTGPTVDVVLWGERATAFPAEQVHRDSGSSPQIIIFVGTLVRSYAGQGSGVPQNKGTTFIHEPSLTPESRKVSSSAKTSPHQGDNLLLGTEIIPAPPNVQTPSGAHNTPGANTLRLCFWTRAPQAMEARFWEPRLAFGNCPSSSSDYIRGVAASHQSPTSAEPFASTVATPEKKPYPPATVAEEVVDDKGVKSLALFPAKFQKSF

SEQ ID NO: 66843 - protein, 376 aa, Zea mays
  Coding DNA Sequence Number=SeqID_23468
  Gene Ontology: Mol. function=oxidoreductase activity, acting on sulfur group of donors, disulfide as acceptor; Biological process =sulfate reduction, APS pathway
  Homolog annotation: Hit_ID=Q5EUC8; Match level="QueryCoverage=14%, HitCoverage=12%, E-value=4e-14, Identity=70%"; Hit description =Adenosine 5'-phosphosulfate reductase 2
MNDEPMHMNPMQRRKGMETKEIGIRRKGTDDGDGVDEKKGAPASQRGKEDNNRGTSYNGIGRKQRHGRCGGRTGTHGPQQRELRRGTDREKRRSAGRHGRTGRHRRAGPDPSRSMEDPSPPASDKDAQAEAPRSTNGNGSAATPDIFESPAVVSLTHTGMENLFRLENRAEPWLAVVTSGRSHRGRSTADGRPQRGSREARRICERSAPRSLGSVSRMSGRRRQRPSPDRAALPRPSCTDRASQLGAQADRRRPPIPHSTETSPTLSGALLLPPCLAAVPSGGGQEPDKEMTSAAIAGGVKECASCGCREDDEGYAVGYDDDEVFNHASFSRLLRKASLGEAREYSMMSYLCNITYMIPRIQLVLGEFGIAFSKCT

SEQ ID NO: 66844 - protein, 134 aa, Zea mays
  Coding DNA Sequence Number=SeqID_23469
MGKNNKRKRELTPPSEDFGDSEYSEEEFSSESEGSPAPIPLRESSDDSDDSQGLAAEGSDESEYSSDEEDSYEEDGGGDGEDDDDDDDDEGGGGDDGDDGGSGGSGGSKDGNGGSSRGGSGDGGSRKGSNKASG

SEQ ID NO: 66845 - protein, 158 aa, Zea mays
  Coding DNA Sequence Number=SeqID_23470
MGRRETEREGGRQPETGMREVEIPRPSCLSRAQVGRKERIQSSPSSGAEPQVRALGRAERSSSSSGAKPESEPWVGRSRVRRLFGAEPESEPSVGRSGVRHLPGLSPSLSPGLGVAEFAMVPEAGPGCLSASLCRVAQQSERRKRRCPSVRPVSGAAK

SEQ ID NO: 66846 - protein, 42 aa, Zea mays
  Coding DNA Sequence Number=SeqID_23471
MAEDKTELGVGASAGHGEEQKSGRERRTGIHGRGYRLWARYF

SEQ ID NO: 66847 - protein, 50 aa, Zea mays
  Coding DNA Sequence Number=SeqID_23472
MAPTCGSSRNRGNGSAGRYNDSEPSQFSGGKSHGGTEMAITGHPPPRSGE

SEQ ID NO: 66848 - protein, 599 aa, Zea mays
  Coding DNA Sequence Number=SeqID_23473
MDKDRQGAAQKRQAAIRIVEARPKRQKRGSAKAAAPDGGKPPLAAKSGVPASSKAPEAAAGAGGSKPAKAVPPLSRVAEAAKAARALPSAGKRVADFATDICVEDYLGGSDEGHLATVAPAAAIATAAIVPKARGEALGSGGEVSALAVVRDEADAATRRLKEVTEALSQVADFASRNASGALTAAVSAEVERLRTQHADAVREKSASDSKCRKLTDKADAKLARAEGNLAKELAEHLQERLTILESRAKGAEVAMRAEAERTRTQLMDTYRELGARTGDFEVPDREPGLRCLQWVQEELLELPAVVGGFMSYASLVTCEGAMNALSREGCRHFEVFDEADEDFDRDVYKVEDLVVKDSAGALYDRMWGPHGHEVVRERAETAMAQALCGERVDDLGALNSVLPDLEPTPAEAVSGVALEPTPETAEDAPDAPTSAAAGEDLPPKVAEGAPDAPAAAAPSTEDPAAVAAETTAEAAAEPMAEASAAPGPSQVQDFGPAHATATAKFLAASTVEGGNECGGSGSEFSEFFDVADSRSSVEWTEESSEEDLDYFAALDVAAAETSPHAADAQDVPGPSTGRRRRRAVAKRRVSTEERSRLR

SEQ ID NO: 66849 - protein, 262 aa, Zea mays
  Coding DNA Sequence Number=SeqID_23474
VAMRLMVLVMTMVLQEIESVRSCSPVLPLEVPPAPPLDALASGVAAGGDPDAGGGDDSLSHDTDFSADQEPEGWVARPITRDAARGCHFHDALDTLLRRALNRRTWSIEYRCVGAEACSEHYSISERDSAEAAMQDAARRALSHYCSVLGGVADGLNLKYYPHRPSGSTGGVIVSPVGEDNPRLSSTVNLAAVLNTELDHALDELSRAGAELALLRAERVERRHLDDGSPAPVGTQHPYRSPRRGQQSYGNPDCKTKINLEP

SEQ ID NO: 66850 - protein, 46 aa, Zea mays
  Coding DNA Sequence Number=SeqID_23475
  Subcellular localization annotation: CTP_CleavageSite=22; ConfidenceScore=5.30e-01
MAPAPAPAALAPAQAMPSAPARAASRRLRHRGPCPSRRAVHAPARA

SEQ ID NO: 66851 - protein, 190 aa, Zea mays
  Coding DNA Sequence Number=SeqID_23476
MAGTHTQTSEQQSGACESELGDGEGGGRRKEFGCSFIEDGREMQGRPGCFMANNGVSINGERSNGANNSEKRSVDAPLHSEAQGRGVGCTASHWFLAARSASDPAGLDRGRRRAWLERAAGTSWRGGFGVGALARSLNGVGRSGSGRLASMRLGGLGASERGARGRREKEAGGRERKRLLTARWRARTEG

SEQ ID NO: 66852 - protein, 320 aa, Zea mays
  Coding DNA Sequence Number=SeqID_23477
  Gene Ontology: Mol. function=kinase activity; Cellular component =ornithine carbamoyltransferase complex; Biological process=amino acid metabolic process
  Homolog annotation: Hit_ID=A2X9N5; Match level="QueryCoverage=23%, HitCoverage=9%, E-value=2e-12, Identity=47%"; Hit description =Putative uncharacterized protein
MALPVDVAGLCPRQGDVGAPPKPRLSLSSVTEAESEPWGRARRRLFGRGQGGVRALGSGEAEFRRLPGLSLSPSRGVGRSGVRRLPGLSPSPSPGSGGAEFAVFRVLARVRALGSGGAEFAVFRVLARVRALGSGGAEFAVFRVLARVRALGSGGAEFAVFRVLARVRALGSGGAEFAVAPLARPDCLSDSLCRVAPQSEWRRRRCHSVRLPYTRRPNQLAAASAARPVRQMRDAHRPESRCIVVDAPNAVDEEIDEGVEAPATGLDETLDANIVDDINTSFQYDIFDPRIWDSLNPKMVDTLLKKGPKRDLSVEHGVTL

SEQ ID NO: 66853 - protein, 190 aa, Zea mays
  Coding DNA Sequence Number=SeqID_23478
MAGTHTQTSEQQSGACESELGDGEGGGRRKEFGCPFIEDGREMQGRPGCFMANNGVGINGERSNGANNSEKRSVDAPLHSEAQGRGVGCTASHWFLAARSASDPAGLDRGRRRAWLERAAGTSWRGGFGVGAHARSLNGVGRSGSGRLASMRLGGLGASERGARGRREKEAGGRERKRLLAARWRARAEG

SEQ ID NO: 66854 - protein, 248 aa, Zea mays
  Coding DNA Sequence Number=SeqID_23479
MEAEKTDLCRQLAEERREANKAISDAQAAQAEAKVARAEGSLARQSAEELEVRFNALCSRMDKAESLTRAEVKRTHAQFVDAYHELGARTADFEVPGQEAGLRFLEWLQEELLVLPTIVTGFMSFASLVTCEGAMNALSREGCRHYEVFDQADENFEREIFKVEDPMVKQLVGALFDRMWGLHGREVVRDRSDRAIELMAHAEDVEDLVGLDGTLPEAAEVLGSGPAHATATDNDIFVAASTVAADDD

SEQ ID NO: 66855 - protein, 326 aa, Zea mays
  Coding DNA Sequence Number=SeqID_23480
  Subcellular localization annotation: CTP_CleavageSite=59; ConfidenceScore=5.25e-01
MNLSRIREVGWPSTPPLPELLGQPRTCSGKPISTSPPTNELRTSSGERSLRQRHRNVTRTSNLTSAGRRGLEKRSTPPDRPPLAPEEDLEEANARWTTSSTPSVRTTRTCATPSGTGGTSSIPSGTVDPSNLYLLPRREEGQENRDSPSSRRREEVEPSRTLAEKSTSFSADTDRAGADTRRLLGIGESPPSPSSPTPRPSVLGDRQRPSLCDQQPAPARHGQPTRPRPAMPATPAPAPSARLTPSALPPSASPALEAVTASPGGQRPDELHSRPDLALPAQPASLTHPCARVPGGSTPFPSVVGWQQWRSAWRPTTPVNGQRLRV

SEQ ID NO: 66856 - protein, 350 aa, Zea mays
  Coding DNA Sequence Number=SeqID_23481
  Pfam annotation: Domain name=zf-CCHC; Domain location=101-118; Score =19.2; E_value=0.0019; Accession=PF00098.14; Description=Zinc knuckle
MNPNEDKVNNVNDKIPTSIVVKRKDESHRYLLNGMKNNKRTRKMFGYKIKPPQPQAEALELMNTQTGESNQAQLFSMQATGHPSSAGNQAKLTHREVKVRGACFYCKEEGHFICQCPKKRLDRLMKKAFKQNSTSDDPEENVFTRSKYKRPSLCNQQPAPARHGPADEASASHARAPNPCSLSASDPLCLAPFREPSTRGCRGQPRRPAHRRAPLPARPGAPCPARLSHASLRASSWRFAPARAVARRPASDSPCVASKAWLKPLPISALSFRRLDSFSLCPRLAAMALGVAANNPGERPAAPRLAAPVLPRSSPMADPLSFLLPMLFSVLFPEIEEDRERVVVRFVLRR

SEQ ID NO: 66857 - protein, 25 aa, Zea mays
  Coding DNA Sequence Number=SeqID_23482
RYSSGKGGSGDGSKGSSKGTNKASG

SEQ ID NO: 66858 - protein, 25 aa, Zea mays
  Coding DNA Sequence Number=SeqID_23483
MAAAKLREQLNALLSSMITSGLVYE

SEQ ID NO: 66859 - protein, 303 aa, Zea mays
  Coding DNA Sequence Number=SeqID_23484
  Gene Ontology: Mol. function=nucleic acid binding; Biological process= proteolysis
  Homolog annotation: Hit_ID=Q84Z40; Match level="QueryCoverage=21%, HitCoverage=20%, E-value=6e-20, Identity=73%"; Hit description =Myosin-like protein
MGRAINKTVMVVELIKVLLMALVLANITYHLILIVTVITVKRRIVGLHQNTTTGSTDITDMWEPLEEGLLPLETTRHVSMITITLSKKELDTSYIGKRMDRALKDLEEKQNKKKESMFTLFRIIVGSTISVIISFMWKLNVAADIQTMLEETQLKFEEERQNLLKVLSNTSKEQCEGSLNEEYNKFQETYDMFCKEKDAHMQTFRGRAHPVPAEAHVRLRHLHVCRDGEGHPEQGNPHFVRDVRMLVKPYKEKGKVPGRFRKLQHAHHGGAEFAGCASPTGLLDSRDPYALLLLSGAQVFFWA

SEQ ID NO: 66860 - protein, 406 aa, Zea mays
  Coding DNA Sequence Number=SeqID_23485
MQQLGYFGSGVGRVPGAEEVPEPEGELVVFEAFFTAGLRLPAHRFVAEVLQRFEVQVHQLTPNVVVALANARNKWGNWWDFWFYVSEGEVKGHPGLPVAVMCSHYYVAYPQFEVAEDDEDEGALRCAARTSSGRDLVEEFIGYGEAASATKKRKLGTVVGGVGVSDSFAVDLMGDVRSPRGKDVFARAPRVFGVNDGVMERDRQDTAQKRQAVVRITDPMREAKKARGSAKAAAAGGSKPVSAAKPAAPGHGNESVSTKVAAPGGSKPPPGGVVKGRRPLLPVRRIADFGTDISVDDYLVGSGEGQLAVVPPPVVTTSPTVVVGAKGAARGPWATFCVSGEIVSAAAAKDVAGSMSQRLREASQQLSQQLKQAVDFADLIASGALTTDVAAEVERCNTPGVTVSKN

SEQ ID NO: 66861 - protein, 80 aa, Zea mays
  Coding DNA Sequence Number=SeqID_23486
MSQPWCHTDPMIAGRAATKTRKKLKYKKRRLRHHHLMNISQADVSIFDICGSEPYSPVNQGQAPGACNPFLVFLNNFCTI

SEQ ID NO: 66862 - protein, 195 aa, Zea mays
  Coding DNA Sequence Number=SeqID_23487
  Subcellular localization annotation: CTP_CleavageSite=45; ConfidenceScore=5.16e-01
MNKNTGIRSAITNGTPVPPPQVRTTPLRGGRPAEQRKADERRAVTCSSSGDDDDFCSGGSNSGSTGLRAGAAARRPPPTPKLVRQGRAEVCRVEGEPLQAAVADAGAASGFEATRVQEPGTGPGKGNTPKRILLCEGTGLRAPLLIRGSKAGPPKGSTVASDRVGPTPTTGQGFEGRPPEGLHGRLRLLGLRAHY

SEQ ID NO: 66863 - protein, 358 aa, Zea mays
  Coding DNA Sequence Number=SeqID_23488
  Gene Ontology: Mol. function=transferase activity, transferring glycosyl groups; Cellular component=chloroplast; Biological process =tryptophan biosynthetic process
  Homolog annotation: Hit_ID=Q10SD6; Match level="QueryCoverage=61%, HitCoverage=55%, E-value=3e-95, Identity=82%"; Hit description =Anthranilate phosphoribosyltransferase, chloroplast, putative, expressed
  Pfam annotation: Domain name=Glycos_trans_3N; Domain location=58-122; Score=58.7; E_value=2e-14; Accession=PF02885.8; Description=Glycosyl transferase family, helical bundle domain
  Pfam annotation: Domain name=Glycos_transf_3; Domain location=127 -354; Score=225.6; E_value=1.1e-64; Accession=PF00591.12; Description= Glycosyl transferase family, ab domain
  Pfam module annotation: Pfam domain module=Glycos_trans_3N::Glycos _transf_3; Domain location=58-122::127-354
  Subcellular localization annotation: CTP_CleavageSite=48; ConfidenceScore=5.67e-01
MAAASLKFASPKPLASAPSALLCGRRAQARPLPASRLPPPTRVAVQPPAAPVATRIGSFDKVLEALIGGTDFSEEDAEATLKLLLDEKDEARISAFLVLLRAKGETFEEIVGLAKAMLSCCIRVDGLDDAVDIVGTGGDGADTVNISTGSTILAAAAGAKVAKQGSRASSSACGSADVLEALGVNIELGPEGIKRCVNEVGVGFMMSANYHPAMKIVRPVRKKLKIKTVFNILGPLLNPARVPHAVIGVYHENIVTKMAKAAQKFGMKRALVVHSKVSLCRCHCFGCACSRSTLYILGPLCICGRTTDPTGQIAQVVGWGTGDWAQEGRRRWGAVVTLARSRSGRRSQETLASSRKPE

SEQ ID NO: 66864 - protein, 95 aa, Zea mays
  Coding DNA Sequence Number=SeqID_23489
  Homolog annotation: Hit_ID=A2XC00; Match level="QueryCoverage=32%, HitCoverage=27%, E-value=8e-07, Identity=87%"; Hit description =Putative uncharacterized protein
  Subcellular localization annotation: CTP_CleavageSite=62; ConfidenceScore=5.42e-01
MANGCGYVWALAAGFNAALAAISAKFFSTLATVTNFAANFISSGLAGCFLFDEPLPSKSSTQAFYARNSFASDHYLKNLPETDSSKSNFLGATFM

SEQ ID NO: 66865 - protein, 487 aa, Zea mays
  Coding DNA Sequence Number=SeqID_23490
  Gene Ontology: Mol. function=endodeoxyribonuclease activity, producing 5'-phosphomonoesters; Cellular component=nucleus; Biological process=sodium ion transport
  Homolog annotation: Hit_ID=Q6Z130; Match level="QueryCoverage=43%, HitCoverage=65%, E-value=1e-100, Identity=81%"; Hit description =Hydrolase, TatD family like protein
  Pfam annotation: Domain name=TatD_DNase; Domain location=200-466; Score=83.2; E_value=8.6e-22; Accession=PF01026.12; Description=TatD related DNase
MQRLAGHAPGGALGLISRLNIGALELGDYLALGAIFSATDSICTLQVLSQDETPFLYNHVFGEGVVNDATSVVLFNAIQNFDPRNISGAKLLNFIGSFLYLFGSSTILGVASGLLSAYTIKKLYFGRHFAFFKSKHSCKLLLTGCLFIACLCNIVVYLRDFSVSLCCCYVPYMILVIQVIVWWAGLMRGAVSIVLAYNKCEAFWEVVSASLGTFIFVMMLSFRLQCHTVMQLSDLYTFSCPEIKSVRPGMRIHEHCYSIMGKTLAILHEFQVLQVVAIGECGLDYDRLQFCPADMQKKYFEKQFELSEAVKLPMFLHMRAAGEDFCEIMTQNLHRFPVGVTHSFTDLAEDWDRLLSFENMFIGVNGCSLKTNENLEVLRGIPVERLMIETDSPYCDIINTHARSPYVKSVWPFKKKEKYEPDSTVKGRNEPCLVRQVLEVVVGSKGISGVEGLSRTLYHNTCRLFFPQDLDASANAQLESGTAVQDC

SEQ ID NO: 66866 - protein, 281 aa, Zea mays
  Coding DNA Sequence Number=SeqID_23491
  Homolog annotation: Hit_ID=Q9FIJ2; Match level="QueryCoverage=12%, HitCoverage=37%, E-value=3e-08, Identity=69%"; Hit description=NADH dehydrogenase 10.5K chain-like protein
  Pfam annotation: Domain name=L51_S25_CI-B8; Domain location=137-218; Score=13.6; E_value=0.0059; Accession=PF05047.7; Description =Mitochondrial ribosomal protein L51  S25  CI-B8 domain
  Subcellular localization annotation: CTP_CleavageSite=73; ConfidenceScore=5.55e-01
MEGRPIRTLSPPRIAPPPPRIPHPPRIPQPRRSRSLPCSLRARPWISNSERRRRRLASANPAPGRQLPPVGPRVQRREAVRDPAAGPTKVSVFIASNDAEQACDFRITGIYHDGTNLAPSSTLPVRFDYLKLLFLIRCAGDLVARREFVKKNYGDIKARNPSLPFLVRECSGVRPQLWARYGYEFGSISVPTGLLMGSNGNPTASGVMATLLVFLSVGLVGATDGIGFHLTGKALDLSIIVRDGLDLAWAPRHHRTSTNTTSRGHMESNYFDLSVSFLSTL

SEQ ID NO: 66867 - protein, 367 aa, Zea mays
  Coding DNA Sequence Number=SeqID_23492
  Gene Ontology: Mol. function=phosphatidylinositol binding; Cellular component=clathrin coat; Biological process=clathrin cage assembly
  Homolog annotation: Hit_ID=Q8LJJ6; Match level="QueryCoverage=51%, HitCoverage=36%, E-value=2e-44, Identity=56%"; Hit description =Clathrin assembly protein-like
  Pfam annotation: Domain name=ANTH; Domain location=125-365; Score= -26.4; E_value=8.1e-06; Accession=PF07651.7; Description=ANTH domain
MTVTTMDSRVPKNSDGVHTERSAITFCHRAPPRNPRRRAQPPAVLQFRRPHSPRHIHRAIAPAFPSLRPQFPPRPAVHAAEHSRPSRPQSPPRARSPSRLQSALPSPPPQTAVSPQPPSPRSWRQRGCVGRRRTPRGGCGRSSTPSGPPRRWQPDPAIEPPNRADPKEVFLATRRGRRMLDLSRFRDRDRARCHDWCFAAFVHAYATYLDDRLKERMQARRAGGASPGKWHVDGDPVGMACQVAEAWELVPQGRSASATETTAAEDVIGKAQQLKHLLGRFIQCRPTGKAMTNPVVTAALYRLVKESAAMYCELTEVMVVLLDRFADLGTPACVRVHSIFTSTAWNLGMLSSRFTDRTAWNLGMLIF

SEQ ID NO: 66868 - protein, 331 aa, Zea mays
  Coding DNA Sequence Number=SeqID_23493
  Pfam annotation: Domain name=Lem_TRP; Domain location=112-121; Score =3.0; E_value=74; Accession=PF08262.2; Description=Leucophaea maderae tachykinin-related
  Pfam annotation: Domain name=Lem_TRP; Domain location=131-140; Score =1.9; E_value=1.3e+02; Accession=PF08262.2; Description=Leucophaea maderae tachykinin-related
  Pfam annotation: Domain name=Lem_TRP; Domain location=150-159; Score =3.0; E_value=74; Accession=PF08262.2; Description=Leucophaea maderae tachykinin-related
  Pfam annotation: Domain name=Lem_TRP; Domain location=169-178; Score =3.0; E_value=74; Accession=PF08262.2; Description=Leucophaea maderae tachykinin-related
  Pfam annotation: Domain name=Lem_TRP; Domain location=188-197; Score =3.0; E_value=74; Accession=PF08262.2; Description=Leucophaea maderae tachykinin-related
  Pfam annotation: Domain name=Lem_TRP; Domain location=74-83; Score =1.9; E_value=1.3e+02; Accession=PF08262.2; Description=Leucophaea maderae tachykinin-related
  Pfam annotation: Domain name=Lem_TRP; Domain location=93-102; Score =1.9; E_value=1.3e+02; Accession=PF08262.2; Description=Leucophaea maderae tachykinin-related
  Pfam module annotation: Pfam domain module=Lem_TRP::Lem_TRP::Lem _TRP::Lem_TRP::Lem_TRP::Lem_TRP::Lem_TRP; Domain location=112 -121::131-140::150-159::169-178::188-197::74-83::93-102
MALPVDVAVCALGQGDVGVPPKPRLSLPSVAVAEPEPRGRARRKSFGRGQGGVRALGSGEAEFRRLPGVSLSPSPGVGRGGVRRLPGLSLSPSPGVGRGGVRRLPGLSPSPSPGVGRSGVRRLPGLSPSPSPGVGRGGVRRLPGLSPSPSPGVGRSGVRRLPGFSPSPSPGVGRSGVRRLLGLSPSPSPGVGRSGVRRLPGLSPSPSPGVGARRSSPSSGPSPSPGVGPGAEFAVFPGLSPESEPLGSGGAEFAVFRVLARVRALGSGGAEFAVFRVLARVRALGSGRAEFAVAPLARPDCLSDSLCRVALQSEWRRRRCPSVRLASGAVE

SEQ ID NO: 66869 - protein, 883 aa, Zea mays
  Coding DNA Sequence Number=SeqID_23494
  Homolog annotation: Hit_ID=Q10SC2; Match level="QueryCoverage=99%, HitCoverage=99%, E-value=0.0, Identity=64%"; Hit description=FHA domain containing protein, expressed
  Pfam annotation: Domain name=FHA; Domain location=82-158; Score=52.7; E_value=1.3e-12; Accession=PF00498.17; Description=FHA domain
  Pfam annotation: Domain name=Filament; Domain location=215-490; Score= -191.4; E_value=0.056; Accession=PF00038.12; Description=Intermediate filament protein
  Pfam module annotation: Pfam domain module=FHA::Filament; Domain location=82-158::215-490
MAPDPCGDLVVTPKTAAKDEASCSVPTPPKVTPDEVRAVARKFADQPIQETEPDVWAVLTAISKKARLRPQGMNILLSADEHCLGRSVEERFRIFAQQISGMHCKIYRDTVLGELNRHEPVPVFLKDTSSNGTFINWKRLKKNSSPVKLNHGDIISLSSPPHDDNSFVFVYREVNAISRVENGAPILKRKSVEGGSGSKRLKGLGIGSPDGPVSLDDVRRLEKSNADLREQLEAHVVTIETLRAEIKTAQVQHGKELEELRETISSSYLDQTKSLRSALEEKQKQIDSLSTSNTELQNSIKDLDERLNASKQSRADADEIISSQKGMICELEGQLNEERNLRREERDKAAHDMKSALHKVQAEAQEEIKKQAESYLRQQREQKEVISKLQESEKETRLFVETLRSKLEDARDNLVTSEKRVRELEAQLQDEQMVSANNRKKTENLEAELRKLKKELDNEKAAREEAWAKVSALELEIAATIRDLSIEKQRYQGARERIILRETQLRAFYSTTEEISSLFAKQQEQLKAMQRTLEDEENYESTLMGVDLNKVPLTTDNAGMKPVDCSKNTVGASSASPENTQVSEHDSSDEDANMTEQQDDDGTAIGGSTQGLECTSPERSEGRLKSGFHGNPVSTAPEREVTDTEQVPETDSQAGNAGCDDQRCDNTGGETMPLEDDMLLPDNEEPTALLKDVGQPQANVVPIPIPGDGVGHCFEEKHEGACSESKREDTHAGAIRTADLLASEVAGSWAVETAPSVNGENESPRSLGDATEHDEAGGSVAGDALVTLVNSEGQAAGSQNNVERGSSKITHHHHHHRHHHRVLSAMIGIVDPEFRKQMSGRSGVGNEEPMSDAETGEGIEEGDSDSGSDGSDSEEAMVEDSVV

SEQ ID NO: 66870 - protein, 240 aa, Zea mays
  Coding DNA Sequence Number=SeqID_23495
MEKEPLDMVESSVRVIETHVDIIRSLVTDGVVDTSEPESVYTLKTTLFQIGDVCDMLEKCALSIKKYADSKRAKIIQDEALQYAEDDEAADDLEELPSPDLLTQADILEKYFGIDDIDDPKKRLSPVVYHLPLFVGFTDGWKHLVIANDLRVEDVCELVKGPDDADIREEKRTDEAGAALNFVTTHPDIVHRLTIVWPLNKLADVSTRRSFAITKCFQPRSRPQLRELHTSGLSLLGSTP

SEQ ID NO: 66871 - protein, 383 aa, Zea mays
  Coding DNA Sequence Number=SeqID_23496
  Gene Ontology: Mol. function=protein dimerization activity; Cellular component=nucleus; Biological process=regulation of transcription, DNA-dependent
  Homolog annotation: Hit_ID=A2XC02; Match level="QueryCoverage=73%, HitCoverage=72%, E-value=6e-90, Identity=63%"; Hit description =Putative uncharacterized protein
  Pfam annotation: Domain name=bZIP_1; Domain location=240-303; Score =31.3; E_value=3.5e-06; Accession=PF00170.12; Description=bZIP transcription factor
  Pfam annotation: Domain name=bZIP_2; Domain location=240-294; Score =28.3; E_value=2.7e-05; Accession=PF07716.6; Description=Basic region leucine zipper
  Pfam module annotation: Pfam domain module=bZIP_1::bZIP_2; Domain location=240-303::240-294
MYSRARRFRRHHSGVRVPRCALCGPSPSLRLGSEMMLDVASYLVGLPSVNWMSRVWCPDALLAAAKAQGSGPAPAHGAPALPQRRPVRGTTSAARGTSCRRPKVEAGWGGHLHGGGGDDDLFNAYLNLEGLDGLNSSDDRRQYYDGDSRGSSVRTNGADSSENDSEECAAAGPPVAHHVRSLSMDSSLIGKLNFSAGAAAANGGVIPGPNRFSLEFGSGEFTPVEMNKIMADEKLAEMALADPKRAKRVLANRQSAARSKERKMRYIAELEQKVQILQTEATALSAHLTLLQRDSAGIATQNNELQFRLQAMAQQAQLRDALNEALTAEVQRLKLATAELGDSCSSNSLAQQMQIQLSAHDQTFELHQQQAMPIAFYQLRQAQ

SEQ ID NO: 66872 - protein, 90 aa, Zea mays
  Coding DNA Sequence Number=SeqID_23497
MAHWIARSTCSGEWPKSSDDDLAVPVRQGFDPCLEKLHGSSGKLSKGSVEAEGLWKWLVVVAGARVARAGGAELAGTKGGAWLAKAYGFC

SEQ ID NO: 66873 - protein, 110 aa, Zea mays
  Coding DNA Sequence Number=SeqID_23498
MWVTIRQKLSPLIRSVRRSEERFQWYSTAKDQQMHHTSPLVTFALGFTPALRFVLSGVRIMTNSGKDLTTDKVVCWPPYPHALQPAEMILAGVGCLPLVRHVINGVTTSQ

SEQ ID NO: 66874 - protein, 150 aa, Zea mays
  Coding DNA Sequence Number=SeqID_23499
MAPKRASSKAAPSIDEAVKAALLAEKKVKALADNTHQEACEDDALNKRQRNDQPTPEGTLRTCSSRGQPQEPPPGFTPLEGKDATEDGEVIGISAEEQLRALRIKNRNLQKQKEILEAKRLRVSVQAKVRQMIRDEEQRAPELEQEIALM

SEQ ID NO: 66875 - protein, 231 aa, Zea mays
  Coding DNA Sequence Number=SeqID_23500
MEKHYFPEVLAVKLFAIVDYELERDSESANNVLPEEFLAVFDVIMDTTLASIHLVKYSTATKMNLRKSLIVIPHQTRPYQWTQTIRIGFNSAQRGKDGLAFVEAFLAQKIYFLEIGLRPFFRDYGFRINGPRFFYVRTRKGAGLAAAQGVANRPFAGEKPGRWWARQRFAAGGPVLGQWVVALARGGSGEPRGEINLARGVREGAVRVEVAELPQRESSTVSSGRGIGVGE

SEQ ID NO: 66876 - protein, 153 aa, Zea mays
  Coding DNA Sequence Number=SeqID_23501
MDKNQNLAYAPYIMALIKAKTRFEGRCEIAHTPFRPFKIEIGFFTRPLILSQMMRKKLAMMKELLLKLMQLSRCLLLHLLLSLSSSGSLSRFDDNLDALNSELSEFRSHIQETIHDPLTTRMNNMQQSFQDNMRALSSQFDNLSTNESIQDIC

SEQ ID NO: 66877 - protein, 19 aa, Zea mays
  Coding DNA Sequence Number=SeqID_23502
MGTVCSVSAESIFVKAKTA

SEQ ID NO: 66878 - protein, 359 aa, Zea mays
  Coding DNA Sequence Number=SeqID_23503
  Subcellular localization annotation: CTP_CleavageSite=35; ConfidenceScore=5.15e-01
MSPSSLMRRVFSPPKPPDGGYPPSSRLIVGGTQLRGSWERALTGPAGGPDFDNAGLGRRRASSPLACRARRLGSRRPLLSEGGCCAVCTGGPPKMPRAARAAFVFWGGPAFAPGWRPHEEVDAPLTREGLSGDLPGSRWALPSVPRRRRLEKSPSPTGSPPPSAPLAPSSSHLSSPLERRCGRGQDCSSAHPEACAAAARPSEAGVVVVVVRTGGGEPLESLGSIGLVVWGSSSLVKETPWPLFDEPRPGVAISVRAEAELARKWEPGWPEPSRVVRQRGRRRSRSAEASGRAGALGRWSAEVPGVTGRAACSGRIPGEVPRLRRRPRLGRISLKVSSMPRVLAPFQREDPSLQDQIAL

SEQ ID NO: 66879 - protein, 652 aa, Zea mays
  Coding DNA Sequence Number=SeqID_23504
  Subcellular localization annotation: CTP_CleavageSite=56; ConfidenceScore=5.17e-01
MQAACNRAKWTRSSDSQRASTEAQAHASRKQRTGCCMQATAPPLAPPPRLFGCGTNAATRGDPAAPAWRDGQYGRNKRASSHDVKTVRLGPVPRTARARATAAPPTTRPVALTPRRDRRRLWQEKRATLHLRRNNRAKKGVRRLAPEGFTVASDAERGMTRGDRVRQITRRYFWACLWAPSRPPTNGARTSTRITRLQLTGDTMFGAHRGARTRAKTRKTANSAPPDPGLGLGLRPGRRRTPLRSAQGSDSGTAPEDDELRFARPQGSDSALASAERSLPRPTQGLGLGLGHGRQTRPRLRRILHVVRPRAQARHVNGKRHHHPTPSRLGSQRTRPMSHLASSTRWAMMAPHKLCDDGGSQLSYGSRGTHDITPAGCQDLSGCHIGMAFLEKVGRAGPRTGQALSWGCSLPSPAWTLVTPLLQAHPTWARDEHEGRGISTSLTPVSGHLAFPPFVLAHALDPSGLGHAAHSVVGLGTPRSRNADKSDENFERKIFQVEDPVLKQSVGALFDRMWSLHGRKTVWERSDRAIDQMAHAEEVKDLGKLDSTLPVATEVEVVPPSDAGEGPSTAPATTAPTGAGEDFAPAPGQMGGDASKVMVETAAKDHAAAAGPSQTEDSSDEGLDYFVALDVAAAETSSRMECAEDLPSADGG

SEQ ID NO: 66880 - protein, 62 aa, Zea mays
  Coding DNA Sequence Number=SeqID_23505
MASLDNFGEDEQIDARKLQERMQADLVARFPTCAGERRWVVVGGFGGEVSGVRRWAEVGVGF

SEQ ID NO: 66881 - protein, 200 aa, Zea mays
  Coding DNA Sequence Number=SeqID_23506
  Gene Ontology: Mol. function=transferase activity; Cellular component= membrane
  Homolog annotation: Hit_ID=A2X255; Match level="QueryCoverage=58%, HitCoverage=6%, E-value=7e-48, Identity=82%"; Hit description =Putative uncharacterized protein
MWNRLKEVEKHFEYQYPSQTDDVVQMIWKAIARKVLDLLEVLQFRCFDTSTKYPQLLSSLGIESKIEEILRNSANFENGGVYYYSERGDRLIDLDAFHEKLLQISQELNSQLTEPEKAGLKESVHCFLKWAWRYNKNLEEQAAQLHMLTGVGTMLRRRRSCRRKQLRLKLLIHDDRSYHSRSFGVITYPKMKGRTDLKIE

SEQ ID NO: 66882 - protein, 290 aa, Zea mays
  Coding DNA Sequence Number=SeqID_23507
MSSSSSSVANTPLGESSSEDTISDLAAVELHPGHTVEFAFVTCASFCGGGVVEKRKVGSKIAQFRSCTFTPRTGKTSAEVVELVPCARNKWGNWYDYWFYVAGGEVEDLPVLPAAVMCSHCYVVFPPFEVAEDDSDEGALRCVARMSSGHNLVEEFIGYGVWPLAHGWALGVVCPRQMPSLGEQLVRSPAFALDLRGRDPAAFVREVEDGAVRIVGRYVPRTEALQSWDIRGSNIRLNRVFELNRLPYDGYPRDDVVVAVDRHGKRPVAVTEEGPSQEAACGRTARIIPA

SEQ ID NO: 66883 - protein, 82 aa, Zea mays
  Coding DNA Sequence Number=SeqID_23508
  Subcellular localization annotation: CTP_CleavageSite=57; ConfidenceScore=5.25e-01
MPHRAVGKTVAPRGPVRSSRYPLPCPSDGVSPVGSWIWAPGASRSVAVGVLHRVACGAAALGSQGKKRDRSRPFSVGRTRLD

SEQ ID NO: 66884 - protein, 167 aa, Zea mays
  Coding DNA Sequence Number=SeqID_23509
MAGGGAASAVEECTRWRRGGAGSVVRRSGGAACEHVREGRRGLRACSRLFLAQQEQQQQELSDSTTSTSTPNCSYQGTVYYRSWRHTILVMVVGQPTSFSNKFSTSIINHRKIGPIFYPLGLSVDNSDKNLAGQCMQWHDIQVTGSSKSGSNLFHAIMPTTSFYNLF

SEQ ID NO: 66885 - protein, 359 aa, Zea mays
  Coding DNA Sequence Number=SeqID_23510
MMVTRSAITERKGWRRKGQGGRFPLLWLSLSGCENLRGRQEAEQRTVTRPSPEYIKTKARPVQTFRPDRTRNSKTQSETAVPRTVRARATAAPRTTRPVALTPRRDRRRLWQEKQATLRLRHNNRAKKGTGKGGYPEKDPSPGRNQAPCLPTDQRPTPRKGSTAASGYSGFAPITDQGFEGWPPKETSGSDLVTESHQREASSPRTPSPGDRLTGDTMFGAHRGQHGAFPLSSLRKGDAGAQSGPAGGIIGSSASPDLGLGLGLSPGRRRTPLRSTQGSDSGSAPDDGELRFAQPRARTRAQPRKTANSAPPDPGLGHGLSPGRRRTPLRPTRGSDTGSAPEDDELRSARPRARTRAQP

SEQ ID NO: 66886 - protein, 169 aa, Zea mays
  Coding DNA Sequence Number=SeqID_23511
MHQSLCCGRVSMFNSVMVRTIQTTWINTNYIPLPKQVPVYPEVVEEIPLELPCIRVENGVILEDNSEESLPTPTPLAESLAFATGSSALAPPAPAVQAPAPGGDDPDDFGDDDEDEEEEEENVNEEPNDEQQDHYAGLWPVTEHYSSMFEKGHFPNLLQDVLHALGTYV

SEQ ID NO: 66887 - protein, 151 aa, Zea mays
  Coding DNA Sequence Number=SeqID_23512
MGDPVSGRMRDKVRARLHSDTRFTGYHISLHVLSTFKSLTQAGELVGGEESGLSRAQLTDQTGQRASPGIKEGGRPMSGEGDLDLPVKFCRVRGLGKLHKLLAKLTERLARLGSDWSGLAMVAEALAAMAGGKKSSPELMRGVWPANVRTG

SEQ ID NO: 66888 - protein, 65 aa, Zea mays
  Coding DNA Sequence Number=SeqID_23513
MVLSRSTSEDISTAGININRNVGQGEDADQQSTEGERAASGNEMRAEDAGSKGAGEGLGRRQDMS

SEQ ID NO: 66889 - protein, 113 aa, Zea mays
  Coding DNA Sequence Number=SeqID_23514
MKQAPGKDDGARPVNPLEHDDAALDDVEPGPLLLEGLAESPLPPLASDEQLHLAVSHDQDSPKLATARTSYAVIAEEEKGERGPTRGVQGGVGDGQRGEIPLVALLPGKAHAG

SEQ ID NO: 66890 - protein, 171 aa, Zea mays
  Coding DNA Sequence Number=SeqID_23515
  Homolog annotation: Hit_ID=Q7XBD4; Match level="QueryCoverage=67%, HitCoverage=10%, E-value=5e-08, Identity=35%"; Hit description =Cinful1 polyprotein
MAVMGSTSEKMYLCQEMSKETAAGSSQGGLVYLKYTLRYRSQFDELNDDWLHAIEATSEVPKLIEGSISMPEPSRSVPVKSRTESAEEPELEKAVEQLKTLSPTRKTELPKASRIPATTPRKRRMASVLDAVMESVKASTPASAEVPSTKDETLKKSDEAGTEQAVSESGP

SEQ ID NO: 66891 - protein, 157 aa, Zea mays
  Coding DNA Sequence Number=SeqID_23516
MGSSSLRAERESRLVGVNETDGSGYDYGAGKWYSFRLERMARLRHTARKSVIPFLPSRLAKRPLRRPVAGQSSHLERLHHRLHEDQERRRQEQEQQGSSFSLQQEIESVRSCSPVLPLEAPPAPPLGAPAPGVAAGGDPDDEGGDDISSHDTDFSTD

SEQ ID NO: 66892 - protein, 106 aa, Zea mays
  Coding DNA Sequence Number=SeqID_23517
MRNTEATRRIGKWAAELNEFTIDYVEARENTIEVLKYQLQTTQQQLDEANQHLGLHHQEIEDMEAEGADEDVDIEGGEEPEPASSLDTAGSGRPPSPESSVASFAH

SEQ ID NO: 66893 - protein, 286 aa, Zea mays
  Coding DNA Sequence Number=SeqID_23518
  Gene Ontology: Mol. function=oxidoreductase activity, acting on single donors with incorporation of molecular oxygen, incorporation of two atoms of oxygen; Cellular component=cytoplasm; Biological process=gibberellic acid mediated signaling
  Homolog annotation: Hit_ID=Q3I411; Match level="QueryCoverage=88%, HitCoverage=67%, E-value=1e-117, Identity=80%"; Hit description =Gibberellin 3-beta-dioxygenase 2-1
  Pfam annotation: Domain name=2OG-FeII_Oxy; Domain location=111-212; Score=116.2; E_value=9.9e-32; Accession=PF03171.11; Description=2OG -Fe(II) oxygenase superfamily
MFALPADDKMRAVRGPGDACGYGSPPISSFFSKCMWSEGYTFSPASLRADLRKLWPKAGDDYTSFCDVMEEFHKHMRALADKLLELFLMALGLTDEQASAVEAERRIAETMTATMHLNWYPRCPDPRRALGLIAHTDSGFFTFVMQSLVPGLQLFRHAPDRWVAVPAVPGAFVVNVGDLFHILTNGRFHSVYHRAVVNRDLDRISLGYFLGPPPHAKVAPLREAVPPGRAPAYRAVTWPEYMGVRKKAFTTGASALKMVALAAAADLDDDGDAAVVHQQQQLVVSS

SEQ ID NO: 66894 - protein, 180 aa, Zea mays
  Coding DNA Sequence Number=SeqID_23519
GTIRQPGDLSQAATTVHLAEPNPRYCSSREDLQNQAYMADSKDLNSASPNSDTRLTNLSAAEHENLEDDMKQMDEEIQRQQDQMLKVAKKWYLSHFKVDRHQKVVKEREIDADYMSSVLQQLPTIGDASAPTQATLTHDRAHQSPPAAKTFVHLIHHGEAAPSSLTVVRHRLRIRSSLTR

SEQ ID NO: 66895 - protein, 171 aa, Zea mays
  Coding DNA Sequence Number=SeqID_23520
  Homolog annotation: Hit_ID=Q5VRV9; Match level="QueryCoverage=89%, HitCoverage=91%, E-value=1e-26, Identity=48%"; Hit description =Putative uncharacterized protein P0013F10.20
  Pfam annotation: Domain name=DUF822; Domain location=41-169; Score =60.9; E_value=4.4e-15; Accession=PF05687.4; Description=Plant protein of unknown function (DUF822)
MERQAGAGREEGVAAAPRKGCIRSTQGPWTVRRRGRGGGLTTSLRHPTPRERENNRQRERRRRQVAARIYAGLRARAGYALPKHADQNDVLRALCAEARLPRRRRGQRHASQGVGDGAAGPSCSSDHQKPSSISGTVEAATLQQEQEQQHQGQREEGVNMSLELTLSFAYM

SEQ ID NO: 66896 - protein, 1069 aa, Zea mays
  Coding DNA Sequence Number=SeqID_23521
  Homolog annotation: Hit_ID=A2WLA9; Match level="QueryCoverage=100%, HitCoverage=100%, E-value=0.0, Identity=68%"; Hit description =Putative uncharacterized protein
MVSANLRLVAAFLLPFLAIASAFDLFHQTGPRMDPKMVPMGGGQPLFIPHEYVRSADVKRQCRSVLSAATELTFDANRANALMPELSFVKGDWKQDDDGVPLMPFDGTDVSGDQAPDPLRLASFMLTHVDVGFRGKTALNVSGVLGVAVSRNGTGPVMGTYVSPELKVWPGSTELKILFEGVYTENGDGESVLCMVGDALLPRRGSDGGNPWDWAKDTGRDSFQPPVTKDGNLLLVLRYPTTLTLTTRAVRGELTSTSAKSDVAYFDAVHLLSQLGAYSNYKFGSEKLVDRACSAHPYRDDILGGGRGLYRGNSFCGILDRFTSEDVLAVVPNWRCNSTDAFCRRLGPFETDKTVDATDGAFTDVRVVMQDVRCEPRNAPGGESTARVSAVFRAVPPWEHKYSAGKRSGLGGTTLSAEGVWRASTGQLCMVGCLGVGAEACHSRVCLYVQTTFTATRRSLTVGQITRVDGGGGGVAHFPLTIKHTVHPMELWSREPFEFGAALAKSLLSYPKKAEGLNDDAMSLSSLAADLTLHVAAVPDPFPRERFERSFFQLEVLSLGSLVGRTSIEQLATEFPGMPGELGGGKASSWTSSQSESSSTTSSSSQPAESSLLNVSAEVSLSGNPYGNVSSLFMEGVYNPVNGRMYLIGCRSIQATRQTFSALKEVEDGMDCSIEMRVDYPPTTARWLINPTVKVHVASTRDPGDPLHFNATKLQTLPIMYREQRQDILSRRSVEGILRIATLAAAIAVELSQLMYIKANTDVMPYVSLVMLGVQAVGYSVPLITGAEALFARIAAGSDDGAVPPSYEVDKSSLYWTIDCIVKILILAAFLLTLRLAQKVWRSRIRLLTRSPLEPGRVPSDRKVLVYSLGAHLVGFAVVLAAHYVNVYSRPVRDDGSYMDARGRTHALREWAVTLEEYIGMAQDFFLLPQVVGNVVWRINCKPLKKSYYVGVTAVRLLPHLYDYIKAPAINPYFAEEYEFVNTSLDFYSRFGDVAIPLVAVALAAAVYVQQRWNYKIISKTVKTQQKKLQHLGSRVYERLPSMSSGNFEAELVSGVNEGVGLRRDTSLS

SEQ ID NO: 66897 - protein, 166 aa, Zea mays
  Coding DNA Sequence Number=SeqID_23522
  Gene Ontology: Mol. function=DNA binding; Biological process =regulation of transcription
  Homolog annotation: Hit_ID=A2WLA8; Match level="QueryCoverage=33%, HitCoverage=12%, E-value=3e-18, Identity=83%"; Hit description =Putative uncharacterized protein
MPAPPAPATAAPQLVVLGGIWVPPEYASQAAGQAIYGAHPATQPHYTAAAAQEYYPSPAAVHHLQHHPAAAAMVHRAAAAPPPPQQAAYSKAAAMAGSPPGSEGRGSAGGGSIGGGGGRERSESIEEEGEVEEREEDDEDDDDDMTANKADGEGAAAGAGVGAAMY

SEQ ID NO: 66898 - protein, 258 aa, Zea mays
  Coding DNA Sequence Number=SeqID_23523
MTVTPCPVREADYLPSTMCPLCEDSHTRDRTALSTCAKGTLANADRAERRGHWAAAELNCNSAWPGAWAPCCAVFLFSGWCRGRLPRLRQRLQYLRQPPAVQDSRAGLALPVPHVLLLPPIERRTGRHEHDDGSGPFLVALVPRLSIASSVATGAAGTGGSGGRLAAPPCRRAAAAAAVRWVATARQAPDRGGAAASAHPYQLLQRPTLASIAPIATPVAYCLSSAVWPCKGLYATTCAVLNGYSSAADADSEEELRE

SEQ ID NO: 66899 - protein, 105 aa, Zea mays
  Coding DNA Sequence Number=SeqID_23524
  Subcellular localization annotation: CTP_CleavageSite=66; ConfidenceScore=5.28e-01
TSPTSGRPDADIWDAASGVCTANANVGASTSASASVTIPYGISDTTRFSCRTWRWVWTMKDKKQVETSSNSSSLSKDEDENEDDDQAFSSSSNVDEETIKLIKKV

SEQ ID NO: 66900 - protein, 334 aa, Zea mays
  Coding DNA Sequence Number=SeqID_23525
MTLTSLSTRGNAPPLPILAAEAAWARQALLAVGEVCLFASAGRTTGSSDGWSSGVYLLTSPLLPVPIKLLVRVTPWRGRCRFRTSDEVLGPLVSGDVEVCLSKQLFGGGGRFLSYGSDEGRVIGSSVEIFNHRCLADFGDAVPHGLKPLEEAISYLGQHPSNFARCVHCTSEVGVRVSSEEMVLSVQPSALLGLLPLSVLSLPAIMAARIPYFSVYSLVGSFSHFRNFVLRYGLCRVPLPSLLMSPNILASVPSSSRLTLGRAKAPERRLGEVLSPYSGRGCATRCSAPVFPGITEERFFSGGSAMRCRVPFSSTMDEIVPKQNSDPGRRAILH

SEQ ID NO: 66901 - protein, 171 aa, Zea mays
  Coding DNA Sequence Number=SeqID_23526
  Subcellular localization annotation: CTP_CleavageSite=89; ConfidenceScore=5.37e-01
MGRGRRGRGWPRRADGKRRHAPSPPRRTLGTRSTWRRPPPSLTARLLRLLPRHHLRTQMTTWGSPPRPGRTSAPSSVPGSVGRISRGVSSVEEDSDTSEEWSCGDDDDEGDGSSDDSSEGDGGDGYNDSSGEGDGGGDGCSGGSKGDGGDGGGDGGDGKASGIMPPVKLLV

SEQ ID NO: 66902 - protein, 106 aa, Zea mays
  Coding DNA Sequence Number=SeqID_23527
  Subcellular localization annotation: CTP_CleavageSite=70; ConfidenceScore=5.52e-01
MRCFKILLLVSLIPLVLRGVSLLGNVIPAPSPRGQPSSSSPRTNGAATVPSPLSSASSRVGVGRGRAQLPAAAVAQRRFGGDGGGGGFFRDDKRFSPTGSNPLHNL

SEQ ID NO: 66903 - protein, 336 aa, Zea mays
  Coding DNA Sequence Number=SeqID_23528
MALGKQGNLGTGKDIFAECHCQGTRQRDWQRGPLEGSLPSTCPTDTRQRSLLCRVPTRALGTGTGSGVHWVSLCRGPLDQTLGNIDLFAECHRRHSAKDPSPLLGAVTVTFLCRVPFGTRQSLCRVPDKKYSAKRLLPIRAGIGLESLGLAPNCILLLVPEQCGWGVDDSQVVQRVGAGRGEPLVVPEEAAAAAVAAEPPLGDGGGGELGTATAHAHARGGRRKRRRNGGGAVRPGAGRRRLPARRWCRDDVAQKRDPPEHERDEGYQQEDLEAPHLVCLCTVPYTVPCESLAAAPSPRRGGSKPERAEPEGGREGVQVVRELVIGLANGSAAEMA

SEQ ID NO: 66904 - protein, 42 aa, Zea mays
  Coding DNA Sequence Number=SeqID_23529
MGFLLPVIFKIKDDEYPLVSSTNTKNLTLVLVLDKEGSSGPL

SEQ ID NO: 66905 - protein, 77 aa, Zea mays
  Coding DNA Sequence Number=SeqID_23530
MEVKEPGRGGSAPVLYRRDSQASSQLTEEGNNDSCSEDCRIRISRGCDILSSSQGANDCGLERFPQTQEESSSQVNN

SEQ ID NO: 66906 - protein, 91 aa, Zea mays
  Coding DNA Sequence Number=SeqID_23531
  Subcellular localization annotation: CTP_CleavageSite=42; ConfidenceScore=5.05e-01
MESCRLTAGQETNKRKTTEGCTSVQRAQSAHPFSTAAVNELSASQGRRRQKGVKSGGVASGMGRRRKQDSEQTDLGGVEKIRVRQLTVNWF

SEQ ID NO: 66907 - protein, 99 aa, Zea mays
  Coding DNA Sequence Number=SeqID_23532
MGLSVGERAYLHSIKCASFDDSKESEEEEKDDEDGYDGGKAVQPERSAAATTTMVAATIKVAATVTATGEATMAVASDSIKHLGVGAIGNVYNIAWQDE

SEQ ID NO: 66908 - protein, 154 aa, Zea mays
  Coding DNA Sequence Number=SeqID_23533
MAHDILVGSSIVKMVESVLEEADSREPLARENELNYIGINKLGYADIVRKINSLLPQRKYESIITILHNLEFLSQMTLTFVIGKIVEFEISRNMGQEEATSSKPYAFACDEKKKGKKTLISSSSSEEEEYEEEEDDDDEDDQASTSSSEDKEMI

SEQ ID NO: 66909 - protein, 34 aa, Zea mays
  Coding DNA Sequence Number=SeqID_23534
MAPSVIGEMPDLTWEYGEEIRDGFRCKYYRKVKS

SEQ ID NO: 66910 - protein, 206 aa, Zea mays
  Coding DNA Sequence Number=SeqID_23535
  Gene Ontology: Mol. function=sequence-specific DNA binding; Cellular component=nucleus; Biological process=regulation of transcription, DNA-dependent
  Homolog annotation: Hit_ID=Q2QLM6; Match level="QueryCoverage=83%, HitCoverage=26%, E-value=9e-57, Identity=64%"; Hit description =Associated with HOX family protein, expressed
MAAWGWEESVSLCLLRWLQLPARSKVEDWNGRERNKDKPPSSEEKEDHKTSMSQVCQTSQLGESKANIGGVMSFGGVPAGGFHNDANPDDSFMSLMLKAQRPRETDGSGLLHDVITHHSDESARFMAYHLTEFGRYGNNNVSLTLGLQHAENTQPGFPGVRDQDIYNSTAPLNVTSTSSEYDSASQIDQQQRQRFEVSPLMHDFVA

SEQ ID NO: 66911 - protein, 78 aa, Zea mays
  Coding DNA Sequence Number=SeqID_23536
MEMEARMMVKREAERVARLADKQRMAKMLQYMQSLDAAQGTICNIKQPSWIAQPIVEPVQSLTSLITFVLVTCLRNLL

SEQ ID NO: 66912 - protein, 225 aa, Zea mays
  Coding DNA Sequence Number=SeqID_23537
MKTINVRYSENCNFEQPTVKQQYNTSRHAAAHGHRLTVGVKSIVNWGLETTVSTETAPLLHGAPLSTHICRARHPRTLAAIAQSKEDQISLLIGTQQALPPLQDGQLVVLAVGNLQPGANPGPWPPRPRPGARFNGSRGKRGWRMLPHPHLPVGEEFPHLHPCGGETPSSPSSNDPDEQGKKMVCLLGEDLSIALRIQSAGQAVGDLGQNFADFTRHVHGSNEVG

SEQ ID NO: 66913 - protein, 19 aa, Zea mays
  Coding DNA Sequence Number=SeqID_23538
MAYCLALSSCFAKRLYIYV

SEQ ID NO: 66914 - protein, 173 aa, Zea mays
  Coding DNA Sequence Number=SeqID_23539
MESNHSSEASRATPGGVRLTAAKSGLGRHRKLRLARPQGSDSGSAPEDDELRLARPQGSDSGSAPEDDELRLARPQGSDSGSAPEDDELRPRPTSGLGLGLGPRKRTNSASSDPRARTRPRLQTTVSASPDPGLGLDLDLGRQTRPRPRRSLRLARPRARTDHVTGGASLPYP

SEQ ID NO: 66915 - protein, 156 aa, Zea mays
  Coding DNA Sequence Number=SeqID_23540
MQAACNRTKGAHPFDFDAFSMRAQARTSCDRRAGYCVQETAPPLAPLPCLLDCGASTATRGNPAHDPTVPTRHIGHGDRERGYPERDPSPRRKRAPSPPTNKRFKGWPLGRVQQPPQSTRGSAPTTGQRFEGRPLERVQRTPQATWAPHPLLIRGS

SEQ ID NO: 66916 - protein, 607 aa, Zea mays
  Coding DNA Sequence Number=SeqID_23541
  Gene Ontology: Mol. function=binding; Cellular component=cytoplasm; Biological process=phosphoinositide-mediated signaling
  Homolog annotation: Hit_ID=A2XE28; Match level="QueryCoverage=98%, HitCoverage=95%, E-value=0.0, Identity=80%"; Hit description =Putative uncharacterized protein
  Pfam annotation: Domain name=HEAT; Domain location=128-163; Score =8.7; E_value=1.4; Accession=PF02985.13; Description=HEAT repeat
  Pfam annotation: Domain name=HEAT; Domain location=289-325; Score =14.1; E_value=0.21; Accession=PF02985.13; Description=HEAT repeat
  Pfam annotation: Domain name=HEAT; Domain location=3-39; Score=3.7; E_ value=7.5; Accession=PF02985.13; Description=HEAT repeat
  Pfam annotation: Domain name=HEAT; Domain location=87-123; Score =37.2; E_value=5.8e-08; Accession=PF02985.13; Description=HEAT repeat
  Pfam module annotation: Pfam domain module=HEAT::HEAT::HEAT::HEAT; Domain location=128-163::289-325::3-39::87-123
MAADALSIIPGAVLRNLSDKLYEKRKNAALEIEGIVKQLAMAGEHERISAVISLLTNDFTYSPQTNHRKGGLIGLAAVTVGLTSEAAQHLEQIVPPVLNSFLDQDSRVRYYACEALYNIAKVVRGDFIIYFNKIFDALCKLSADSDANVQSAAHLLDRLVKDIVTESDQFSHEIRQQADAALSEFLQEIKNSPINEFVKLGGEQLVPYYADILGAILPCISDEEEKIRVVARETNEELRAIKADPTEGFDIGAILSIAKRELNSEHEATRTEALHWFFTLLDQYRAEFLAYLNDIFDPLLNALSDPSDVVVLLVLEVHARIAEESHHFHHLVSYLICTFHNNHFLLEKRGALIVRRLCVLLGAEKVYREFSTILESEVDLDFASVMVQALNLILLTSTELGELRSLLKKSLVDSCGKDLFQSLYASWRHSPMATISLCLLAQAYSHASCVIQSLGEEDINVKFLVQLDKLIRLLETPVFAYLRLQLLEPGKHTWLLKTLYGLLMLLPQQSAAFKILRTRLKTVPFSENIKRTSSANPYSQILQVTEDGNRNQDTQNYSAINFPSLLQQFEHMQLQHRNHLKDQLQSRKSASALTLSQVPFFGFCSHI

SEQ ID NO: 66917 - protein, 135 aa, Zea mays
  Coding DNA Sequence Number=SeqID_23542
MGKNPHQQPTSGNGIRAAGDRAGRTAEEQASSRSPTGDGTDGAGGLLDAWTVDADLVPWSPGRLDSWSSGACVRYSAGAGRLGAEHRSKHRMLQLASLDSHRGEGCPNSGFPVTASLISAVNFDLRPVLRGGKGN

SEQ ID NO: 66918 - protein, 127 aa, Zea mays
  Coding DNA Sequence Number=SeqID_23543
  Subcellular localization annotation: CTP_CleavageSite=47; ConfidenceScore=5.47e-01
MPLSLPWVTAPGPSHDRTSALVRRAVEVPRGTGKAVQGSQCGESSSRATAISHRRSCSSVESHVAASVCLCAKNLVRGYESSEEQVGTWKLKSQTSCALDHFFLPNHVLINHNDLHRLILMAPNRLP

SEQ ID NO: 66919 - protein, 57 aa, Zea mays
  Coding DNA Sequence Number=SeqID_23544
MESHDLRAEWESRLVGGYEIDGSGYGYGAGCQHCNHCSGEDEAVEGDFQEFQDYDEF

SEQ ID NO: 66920 - protein, 108 aa, Zea mays
  Coding DNA Sequence Number=SeqID_23545
MVMLAPPRCRCHCHGSPHPDLAMTGPLLSWGGRGGSSWHGEAVHGVSVEKVHPGLRRFLTGDGVPPWSRTLPRACVCARRISDWGAVTAVAGLPTTAGAQGATVPGRR

SEQ ID NO: 66921 - protein, 25 aa, Zea mays
  Coding DNA Sequence Number=SeqID_23546
MGTNGHLNIDTGGSRQILRKFTLGP

SEQ ID NO: 66922 - protein, 154 aa, Zea mays
  Coding DNA Sequence Number=SeqID_23547
  Subcellular localization annotation: CTP_CleavageSite=49; ConfidenceScore=5.65e-01
MAPLSPSPSSKQRPSLCSSRPPLPTLLLLASGCSRGPSPPARRELPPFLSMASSPTFQPWYMSHPRLPHLPHAAADLLLWLVLPLLSDQQEASDLSSLPVVLGWPAPLPGPTLASARSLSMSPMEHLGVLAQIPAGIELTNPAEHLQQPWHPPS

SEQ ID NO: 66923 - protein, 46 aa, Zea mays
  Coding DNA Sequence Number=SeqID_23548
MGREIGSFQAEWESRLVGKVCDLCRVLETGISIVLTVKSSLEILFD

SEQ ID NO: 66924 - protein, 136 aa, Zea mays
  Coding DNA Sequence Number=SeqID_23549
MGKDKKGQGSPRRSGDKWKREPSPSSEDFGDSEYSEEEISSESEGSPGIAAEVWMYIRSIERAGLEGSDESEVSSYEENSSDSSEEGSSGDSDDEGDDGDDGGKGGGGDDSGKGGDDDKGGSSSSNSKASGKAPLA

SEQ ID NO: 66925 - protein, 451 aa, Zea mays
  Coding DNA Sequence Number=SeqID_23550
  Gene Ontology: Mol. function=transposase activity; Cellular component= mitochondrion; Biological process=transposition, DNA-mediated
  Homolog annotation: Hit_ID=Q8LJ71; Match level="QueryCoverage=79%, HitCoverage=65%, E-value=1e-170, Identity=79%"; Hit description =Putative uncharacterized protein B1097D05.32
MPKPATANRRRKRGGGGGEGGAADEQASSKRRPATSVLTSLDVNDAPRPELPLFQLSRPRQQAEQDDEEEEVTGGGGGGGAGSSLSSVVNGHGQSPHQQRRLWVKDRSRAWWEQCSSADYPEADFRSAFRMGRATFAMLCDALGAAVAKEDTALRAAIPVRQRVAVCVWRLATGEPLRLVSKRFGLGISTCHKLVLEVCAAIRGLLMPRFLRWPDDAAAEAFKSRFQAESGIPSVVGAIYTTHIPIIAPKVSVTAYFNRRHTERNHKTSYSITLQGVVDPDGAFTDVCIGWPGSMPDDQVLERSALQQRAAAGMMAGSWVVGGVSFPLTEWVLAPYAQANLTWAQHAFNEKVAEVRRVAVDAFARLKGRWACLQKRTEVKLQDLPVVLGACCVLHNICESRGEGMDPALRCDIDDDETVPENPVRSDGATKARDDIAHNLLHSGRAGTKFF

SEQ ID NO: 66926 - protein, 52 aa, Zea mays
  Coding DNA Sequence Number=SeqID_23551
MTTDRPLELLRMDLFGLIAYISIGGRKISNPRNLKGILEMSSKRVRLKDQEN

SEQ ID NO: 66927 - protein, 173 aa, Zea mays
  Coding DNA Sequence Number=SeqID_23552
MARIIHRRVGVLAESPSLMNGSTVRGLLLFLSIQSAHHYTDGPRSSSISRHQVALVPIPATAVHTDARHPGNQRPKSPPDLSYTMLHAPPARWEINSYSEPTQRHAMDRSGSAASPPCPREIPGDSDPHTPNPTPIITGEMHTVKMQEIIPGIRMQGYPATTYGGFEGEVLRR

SEQ ID NO: 66928 - protein, 21 aa, Zea mays
  Coding DNA Sequence Number=SeqID_23553
MAGKRLGLNNRENWGLERKNA

SEQ ID NO: 66929 - protein, 136 aa, Zea mays
  Coding DNA Sequence Number=SeqID_23554
  Subcellular localization annotation: CTP_CleavageSite=57; ConfidenceScore=5.03e-01
MVTSSSMAGESKPGCGLCPSFSLKDFHYQGWGGDCRVPGSRTRVASEPLSAPAPATTAGRGSSADEIAVTPGFSGQSRRLRIFTHKSCYPSAKRWPIPYTSTEEARQGFLPDRHRSKINQGPPYTDHSPTALAPFG

SEQ ID NO: 66930 - protein, 259 aa, Zea mays
  Coding DNA Sequence Number=SeqID_23555
  Homolog annotation: Hit_ID=Q6QP51; Match level="QueryCoverage=20%, HitCoverage=27%, E-value=1e-10, Identity=62%"; Hit description =Putative growth-regulating factor 1
MAERYQLPRSCVPPTTRRKDYGHPPSGGSEGGKTRCIREHEDMVAFQGGHPPFKEQKKPNCRARCIQPPSGYKRPSTFALTSGRKGGQPCRRHATAPSGHTSPTSNTPSMEAQAHASCNRRTSRYVQATAPPLTPLPCLLDCGISTATRGNPAYDPAVPARRDGQCGQKWADSDGGGRRAGAAVTSGSEQRFAFAIMTASKKAPSLPTDQRFEGWPHGGVQQPPQSAWAPHPLLVRGSKAGPSEGFNNRLRLLGLRAHY

SEQ ID NO: 66931 - protein, 103 aa, Zea mays
  Coding DNA Sequence Number=SeqID_23556
MKINAGRRDDGIAAATLLAAVLFGCLATSVQCARVVPADATTGDGERGQEAELALPPPFCYKACGNGRCDFCCASQYTPTFCWDTQAMCKRECHPPISPPSSV

SEQ ID NO: 66932 - protein, 48 aa, Zea mays
  Coding DNA Sequence Number=SeqID_23557
MGISSPQAKWELRLMGGDKDDGYDYGNGKEEGVEANLQEFQDFDEFED

SEQ ID NO: 66933 - protein, 149 aa, Zea mays
  Coding DNA Sequence Number=SeqID_23558
MGKSKKGGSSSHHSGDKREPTPPSEDFGDSEYSEEEFSSESEGSPIHASPPASSDDSDDSQGIAAEVWTYIRAVEHDGLEGSDESEYSSDEENSSESEEGGGSDGSDGNDDGGDGGGGDDSSNGSKGNNRGSNKGSNKGSNKGSNKASG

SEQ ID NO: 66934 - protein, 256 aa, Zea mays
  Coding DNA Sequence Number=SeqID_23559
MWGTDIPWVHQKDKMPPEGPVGPIIRKVIPSWADARAESEPWGRAKRSSSSFGAEPESEPSGRARQSSSSSGAEPKSEPWGRAERSSSSSGAEPESEPWGRAERSLPSFGAEPESEPWGRAERSSPSSGAEPESEPWGRAERSSPSSGAEPESEPWGRAERSSPSFGAEPKSEPWGRAERSSPSSGAEPESEPWGRAKRSFLWRLRSDLAAISLTLSSGTAVGAAQAALSSCQTGQWSGEVTTVTSALSTGGRASG

SEQ ID NO: 66935 - protein, 34 aa, Zea mays
  Coding DNA Sequence Number=SeqID_23560
MARRCTDFEERKKNVSSLLLATIWIDCTEILAIR

SEQ ID NO: 66936 - protein, 160 aa, Zea mays
  Coding DNA Sequence Number=SeqID_23561
MGKSNKRKREPTPPSEDFGDSEYSEEEFSSESERSPAPVSPPASSDDSDDSQGIAAEVWTYIRAVERSGLEGSDESEYSSDEEDSDGGGEDEDEDDDDDGGDSDGSGDGRGSGDGGRGSTKGGSGDGRGSGDGGRGSTKGGSSKGNTKGGGGSRGRASGV

SEQ ID NO: 66937 - protein, 113 aa, Zea mays
  Coding DNA Sequence Number=SeqID_23562
MEQWREAEAMPAEAERSREVADVRGQVTSWLQNAMGLPTLFDVASDATLGALAADANEFLDSAGVRAALGVRGDAPPFVLDGPTVDTSTKRLKAYGDDIFLQAVSVIHRLCYF

SEQ ID NO: 66938 - protein, 108 aa, Zea mays
  Coding DNA Sequence Number=SeqID_23563
  Gene Ontology: Mol. function=serine carboxypeptidase activity; Cellular component=extracellular region; Biological process =proteolysis
  Homolog annotation: Hit_ID=A2Y7Y3; Match level="QueryCoverage=96%, HitCoverage=26%, E-value=5e-21, Identity=52%"; Hit description =Putative uncharacterized protein
MKCVKPHVEELLEASTHVLLYEGNHDAKDGMPTAEAWIRELNWDGLAAFQDTAQAVWRQGNGGAGQGQKLAGYVRKHGVPVHVAVYEAGHLVLGSQPQVGLDKILVAR

SEQ ID NO: 66939 - protein, 20 aa, Zea mays
  Coding DNA Sequence Number=SeqID_23564
MARRLMMIQARVLGKVVRYI

SEQ ID NO: 66940 - protein, 147 aa, Zea mays
  Coding DNA Sequence Number=SeqID_23565
  Subcellular localization annotation: CTP_CleavageSite=31; ConfidenceScore=5.11e-01
DSNSNSSPSGNSRGDSAIIHRTVRCTPDSVRCSKEERSQELASFGNSLQLLRYNFTGTVRCTPDCPVYTGLSGVSAGQRLFRRQRLPAGAFNARQHAQKSGTPMLAHRTLYSICLVRHRTSRRAQKTELQRSEPNGFGDVAGAPDMS

SEQ ID NO: 66941 - protein, 97 aa, Zea mays
  Coding DNA Sequence Number=SeqID_23566
MKNPSEVYWSAWIKRVTENFSSGLLLRRGAACVVGSIYGGPIPRYETLIELVMFPIMRSTYSIWGSHSRAPWLCSPASSVGRCGTAVSGCWQGRGRD

SEQ ID NO: 66942 - protein, 308 aa, Zea mays
  Coding DNA Sequence Number=SeqID_23567
MVQNVKNKRNNPCISYKYLYWLNSKCQRFIYNYTKSTVRNTVDYSGQEKLFGKTGQAWTVRALAADRPQHQDDPRTEPMQKYKSTLRTVRRKSKDRPRPCADRPASGADRPVSPIHPPWRLSDPQVKTSRVGVPGRGSLRVDTTFPSRLWKANPQHPLRLDMIIWFRSLEFMSLGIEYDMVLLPPKHPAHAEEQPDFCPRPPCHRRRRWNKRNRIVGSAPRPVDAPRLANNANSLVRDLTSVSLTPRASASTWVALAPTLLAPPPIAWGAGSTGSPCHGSSHTSFVDSPTCGLGGASFAKPECVGSII

SEQ ID NO: 66943 - protein, 129 aa, Zea mays
  Coding DNA Sequence Number=SeqID_23568
MAPKKRKQSATIPVIPPIDLNSQLPFAEICALNDRGLTIEVVVVVDFVFKNIQPLKDRVYPAYLYTRTTTDDAEVNVVLSMLAVAPVEGKKRKKILRRSSGLELGAEPTGSVLSGGLASANLKDDIEKL

SEQ ID NO: 66944 - protein, 164 aa, Zea mays
  Coding DNA Sequence Number=SeqID_23569
MALQSGLRGARRGARLYKPKDDGFARVVGIKPRDSAAGQLQRRRGRQCQVGEDTSDNGTHHDSVGHGLYVGSIMEERSTGTHLSAKGRLTARSQIGADSFLPKPDLASLELEQKVLLGCLLAEEQLVPVEFAAWNCHELGSNQTVQKELLLLLIVFNIPRSISR

SEQ ID NO: 66945 - protein, 189 aa, Zea mays
  Coding DNA Sequence Number=SeqID_23570
MSAIDHALEEIIPEDLLLEPPETESVVVCTEVLDDIPLASNPVRQGITRAVSHASSTLEGGLARGNTLALDVAGQGYSALVCMIEGASASEEVSDPDTGNPLLAVETEVSLSDALNIASTDTPSSDSVPVPPPMGFSLFLSILQVPLLTFVLAECPQLYVGPVEVLWCPCSRSSFVLDAVESPPLEANR

SEQ ID NO: 66946 - protein, 141 aa, Zea mays
  Coding DNA Sequence Number=SeqID_23571
  Homolog annotation: Hit_ID=Q5NKP3; Match level="QueryCoverage=87%, HitCoverage=48%, E-value=3e-25, Identity=53%"; Hit description =Putative uncharacterized protein 9C20.7
MCVKRCAQGFLSSTVEALVLASLIDDKNKFGDCQFDLRKQSYVVACAVVDDKLRRSRRLDVVQSGCTALSIIKQGTSRSSPTSANPRLFWAPHPTMMPSRCLAHRPPEAQPTTGVAERSLVGFGGLDDNPIIGLIGVLSVE

SEQ ID NO: 66947 - protein, 29 aa, Zea mays
  Coding DNA Sequence Number=SeqID_23572
ARPKHIASDEARCLPWGRELAMEASALGK

SEQ ID NO: 66948 - protein, 30 aa, Zea mays
  Coding DNA Sequence Number=SeqID_23573
MADVCPGRTNPPAHPAMSSLESIPVPITLY

SEQ ID NO: 66949 - protein, 205 aa, Zea mays
  Coding DNA Sequence Number=SeqID_23574
  Subcellular localization annotation: CTP_CleavageSite=51; ConfidenceScore=5.35e-01
MGDARNPFALSLEERNSVGVGTFQPSFGFKGFSSCSPAAPLRWRSPKTVTSSSMAGESKPGCGLCPSLNLKDFHHQCWGGECAELGSAPAWAAARSFPQRSGGRAFAVRGAGSCRVPGSLTRVASEPLPALPSATAAGRGSSADEIAGAAHGPTSNSTAFCPSLPHEFGHGRGSHGSSIRREVIAAVVRLLELALCCKGFQQGEW

SEQ ID NO: 66950 - protein, 421 aa, Zea mays
  Coding DNA Sequence Number=SeqID_23575
  Homolog annotation: Hit_ID=Q6J9V9; Match level="QueryCoverage=20%, HitCoverage=43%, E-value=9e-08, Identity=39%"; Hit description =Putative uncharacterized protein
  Subcellular localization annotation: CTP_CleavageSite=45; ConfidenceScore=5.31e-01
MVAFQGGHPPFKGDSPYLRPQPSWAESSPTRSKILPLRRRGWVPRVMQAGPEQKKPNCRARCMQPPRDYKHSSAFAQTSRRKGGQPYRRHATAPIGHAPPTSNAPSTGAHAHASRNRRAGRYVQATAPPLAPLPRLLDCGTSTATRGDPAYDPAVPAWRDGGASGRGSERCFAFAIMTASKEGPGKGDTPKRILLREGNRLRASLLIRGSKAGPSEGFNSRLRARGFCARYWSEVRRPAPRKGSTAASGYSGSVPTTDQGFVGWPSKDLGGVKPLLRGLGGYTRRGLLSGTIIRGTLKTPDSQLSRSDRSHFAAPLTGLTKGQRRLRRFDCCVTRQSEADKQPGPASGTIGNSASLDPGLGLGLSPGRRRTPLRPTQGSDSGSAPEDGELRSARPRARTRAQPRKTTNSAPPDPGLGLGLS

SEQ ID NO: 66951 - protein, 177 aa, Zea mays
  Coding DNA Sequence Number=SeqID_23576
  Gene Ontology: Mol. function=rRNA binding; Cellular component =ribonucleoprotein complex; Biological process=ribosome biogenesis and assembly
  Homolog annotation: Hit_ID=A2XZT5; Match level="QueryCoverage=39%, HitCoverage=37%, E-value=7e-28, Identity=83%"; Hit description =Putative uncharacterized protein
MTKCSSSLGPVLDVWGRRRRRQRRDLAGAGTREEAETATALEADVAVRGRKEAISAGCPGGIDALMCGSGERGGGERSGVDVVGGPSVGAGEAGGASTGPWWRVGDKNSDMAAAVASTRWEALRPCARGMNAWLFVRSDEISSAIKPYRDFQEWKLQLNDFSGAVYEGRLYGPDDFP

SEQ ID NO: 66952 - protein, 201 aa, Zea mays
  Coding DNA Sequence Number=SeqID_23577
  Gene Ontology: Mol. function=exonuclease activity; Cellular component= intracellular
  Homolog annotation: Hit_ID=A3A029; Match level="QueryCoverage=49%, HitCoverage=13%, E-value=5e-35, Identity=60%"; Hit description =Putative uncharacterized protein
  Pfam annotation: Domain name=XRN_N; Domain location=29-188; Score= -40.8; E_value=1.2e-06; Accession=PF03159.9; Description=XRN 5'-3' exonuclease N-terminus
MDLDITVEFWSLQALRSFFSSYQTSSTGPKLDEHFVMSNNHAARAQYFFQQMEICLFKVHLFQLYNLVCINSSGQQKDQVIIQSQAPTPAHPQRSIFLCLQAANEERLREEFVRESRKLPPKQQSQTCDSNVITPRTEFMAVLSVALECYIHLRLNYDHEWKQNKDVYLIMLALQTHEVRFSILREVFYTPGQQDKCFLCI

SEQ ID NO: 66953 - protein, 33 aa, Zea mays
  Coding DNA Sequence Number=SeqID_23578
MTGPVEPPPDNPGDLTASLTGRLQLRGQGAGKA

SEQ ID NO: 66954 - protein, 913 aa, Zea mays
  Coding DNA Sequence Number=SeqID_23579
  Homolog annotation: Hit_ID=A2Y773; Match level="QueryCoverage=98%, HitCoverage=97%, E-value=1e-139, Identity=39%"; Hit description =Putative uncharacterized protein
  Subcellular localization annotation: CTP_CleavageSite=56; ConfidenceScore=5.61e-01
MKSGTASAPSGGGGGLAITERQKPAPSRVAALFQMFAKRKLFSSSSKKSKLLPPVRAHKFSPGRPLAGGDKTRPLLIDSADYSRSRTECNGTSHYPQPQPGQDRNCSENGMRAPGVVARLMGLSSMPAAASHQRQTRATTNSPEPGDHWNSGRQDRSGSSRGIYTSPQQQQQQKTRQQPVDDRHHGNAGQFSAPDTRPLWPRRHAHRAASPVKSPRSLSSRNRARLIEAAVRVLEPGLQSRNRRLSKRHAYLEYPCSNGDGAPSSAAAAAVRHNVSDQFLRNICDADIPASGAHNLGAASLHNSISNRRTEEDTCKKSIPPSRRSDQSTSCQLQPEYLLIGSTEKAAGFADTNQDAPREQLKSNISRDSAPRGPLKQNNLKQNALPAADPGCVIQSKKHGSGERNVRNRTQDFVSLNKRMDGSASLRSKRKALDRFGEPRCSAEDRNMMSTKGCRASSLHGGTSNKLELRTGTPKAMVTAKGAGLISEKPKPASPNRARSGLQRQTVPHNVSRANKEPGTISLTSGSPVKAARGDSASGTGAGTAVQVDSCPERRSRRDCQKTCPQGEIVFWEDLKRTSNPSHTEPGFSSQDEVKNRVILGGTAASSLSGKKSGGQVTEESLSEGLLRQRNSLDCAVYDNKDPYEVASLRGTRKKKHAAGAKGSKPSPSPCISSPTSTPHSGHAGDACVPGIPRRTAAEATSTTSHPWQDTAAERNPRGGDPNNSGQHGVQFQTSEPHAGEATITTSVELLLANVRASTTPRKPEESPKAFLLRTTERALAALTAGSKQGFGSTAIEGKGASPLRNLALDCVWDCLDSTCSRLCDSGYRSFSELLALVCTEKRLADRVGKEVARCCGAAGKGLDELAVGEVERAVEAGMGSSMLEAVQIGAQIEQDLVQDLIDEIGADVFRRW

SEQ ID NO: 66955 - protein, 316 aa, Zea mays
  Coding DNA Sequence Number=SeqID_23580
  Subcellular localization annotation: CTP_CleavageSite=71; ConfidenceScore=5.11e-01
MALPVDVAVCALGRATWGFLRSRGRVRLLLPWPSPSHGVGRGGSRSAEAKPEPWGRARRSFVVFRVLARVRALGSGGAEFAVFRVLARVRALGSGGAEFVVFRVLARVRALGSGGAEFAVFRVLARVRALGSGGAEFVVFRVSARVRALGSGGAVVRRLPGLSPSPSPGVGRSGVRRLPGLSPSPSPGVGRSGELQYRSFCFDPDRLEHVRGLALTDDALGHYTTFEALSSGKSCLQAGIEPYVGASVGDGRRVRSGRRKKRVEVACISIQVHEKGAIEMRTTEVAGDLAPLRCLRSEQPVRGVEAGAQYRSTLLT

SEQ ID NO: 66956 - protein, 78 aa, Zea mays
  Coding DNA Sequence Number=SeqID_23581
MANKGITRVEPRSGHDVVMLLLHAWRMATQWLRQGQRHLNRGEPTDGHRPDGNGVAWLSFEAHHDGAMNINHEETPDS

SEQ ID NO: 66957 - protein, 159 aa, Zea mays
  Coding DNA Sequence Number=SeqID_23582
MGKNKKNRSSSHHSGDKRKREPTPPSEDFGDSEYSKEEFSSESEGSPVPASPPASSDDSDDSQGIAVEVWSYILAVERAGLEGSDESEVTSDEENSSDSSEERGGGGDGEGDDDGGGDGDGDGDGGEGDDKGDDGKGDGGDDNGKGSDKGGSSSGRASG

SEQ ID NO: 66958 - protein, 58 aa, Zea mays
  Coding DNA Sequence Number=SeqID_23583
MTENTSSCRSKELLKRNPIELNTSSLEDMVAGVTWSSTLPPGWTVEWDPTSAEEEHEE

SEQ ID NO: 66959 - protein, 91 aa, Zea mays
  Coding DNA Sequence Number=SeqID_23584
MPEGAYKYPECATVCPSLRFTARAPRGLLHPPPLPEPWPPWLAPSSHFKVAPVARLASPVAREAFQVLGPGRASPETQDRPRRTSIARSRA

SEQ ID NO: 66960 - protein, 113 aa, Zea mays
  Coding DNA Sequence Number=SeqID_23585
MARAGTYKAPRDLDRTPPHALDLTGAQTHRRLPVHGVSAAARSPYHHRPASRPLPSPVQPSEKIVHTSVKHPERGIEVCFAGEASPRSPDSTRPPASVDQPLCHPVKLTVPLD

SEQ ID NO: 66961 - protein, 207 aa, Zea mays
  Coding DNA Sequence Number=SeqID_23586
  Gene Ontology: Mol. function=protein binding
  Homolog annotation: Hit_ID=Q75K58; Match level="QueryCoverage=18%, HitCoverage=7%, E-value=2e-10, Identity=79%"; Hit description =Putative uncharacterized protein OJ1131_E09.12
MRGGASVWAVNNSGCHSPRCTGVALLVVCLDEVAANWLMSVLVCKAAVARSQRHTATKYQEGRERFTVWREAGPHHPHFDIKRCLHRYRRPALRSTARPPKAKPEIAAPTHHHHPAGAAERTAPARGRDPRARAAIMAPAPSSSRTRALPPAILYILLSLQIAAAAAAMDPVERETLLRVMESVSSDRDWREAAGADPCGSPWPGLE

SEQ ID NO: 66962 - protein, 225 aa, Zea mays
  Coding DNA Sequence Number=SeqID_23587
  Gene Ontology: Mol. function=carboxyl- or carbamoyltransferase activity; Cellular component=ornithine carbamoyltransferase complex; Biological process=amino acid metabolic process
  Homolog annotation: Hit_ID=Q8SA97; Match level="QueryCoverage=32%, HitCoverage=13%, E-value=1e-12, Identity=56%"; Hit description =Ornithine carbamoyltransferase
MAPPVDVVGPCPGLGDVEAPPRSRSSLSFEAEVESEPQGRARRRPSAEARAESEPWGRAKLSSSSSGAEPKSEPWGRAKRSSSSSGAEPESEPWGRAERSSSSSGAEPESEPWGRAKRSSSSSGAEPESEPWVGRSGVRRLPGLSPSLSPGVGRSGVRRLQGLSLSPSPGSGGAELPMAPRAGLGCCQPHSVEWHSSRSGAGGAVLLSDRSAVTSPLSTGGRASG

SEQ ID NO: 66963 - protein, 363 aa, Zea mays
  Coding DNA Sequence Number=SeqID_23588
  Subcellular localization annotation: CTP_CleavageSite=75; ConfidenceScore=5.08e-01
MGRRETECEGGKGSRRETGVRGGNPAAFVFVPRPGRSVPWVGRRGGPPRSRSRSSLSSEAEVESEPPGRARRRPSAEARAESEPWGRAKRSSSSFGAEPESEPWGRAKRSSSSSGAEPESEPWGRAERSSSSSGAEPESEPWGRAKRSSSSSGAEPESEPWVGRSGVRRLLGLSPSPSPGVGRSGVRRLQGLSPSPSPGLGGAEFPMAPRAGLGCCQPHSVEWHNSRSGAGGAVLLSDRSVERRSDCGHFGPVDRRARVRIKLCADGGYQLRFRSVEGWYVDAVNGFAGAGFARAAPEPLHRARGRAPNMVSPVSCWRVIRVDARAPFVRGQLEARRRAQKYLWVICRTRSPFDGVRGLDASL

SEQ ID NO: 66964 - protein, 101 aa, Zea mays
  Coding DNA Sequence Number=SeqID_23589
  Subcellular localization annotation: CTP_CleavageSite=57; ConfidenceScore=5.09e-01
MAAPPTTRPVALTPRRDTWRLWREKRATLRFRRNNRVKKRVQQSPQIAWARHPLLVRGSKASPPKGSMAASGYSGSAPITDQGFEGWPPKGSQSPQTLSEG

SEQ ID NO: 66965 - protein, 33 aa, Zea mays
  Coding DNA Sequence Number=SeqID_23590
MALDMHHLKPDEMVDHLKQGLGKEGHIFTYITF

SEQ ID NO: 66966 - protein, 115 aa, Zea mays
  Coding DNA Sequence Number=SeqID_23591
  Gene Ontology: Mol. function=transferase activity, transferring nitrogenous groups; Cellular component=endoplasmic reticulum membrane; Biological process=biosynthetic process
  Homolog annotation: Hit_ID=Q2R3K3; Match level="QueryCoverage=100%, HitCoverage=29%, E-value=1e-49, Identity=75%"; Hit description =Serine palmitoyltransferase 2, putative, expressed
MSPPAVQQVISAIKVILGEDGSNRGAQKLARICENSNFFRSELKKMGFEFAVVTVAFPVTPLLLARARICISASHTREDLIKALDVISRVGDLMGIKYFPAEPPKIAGADHDKLE

SEQ ID NO: 66967 - protein, 263 aa, Zea mays
  Coding DNA Sequence Number=SeqID_23592
  Gene Ontology: Mol. function=transferase activity, transferring nitrogenous groups; Cellular component=endoplasmic reticulum membrane; Biological process=biosynthetic process
  Homolog annotation: Hit_ID=A2ZEQ2; Match level="QueryCoverage=75%, HitCoverage=42%, E-value=1e-96, Identity=87%"; Hit description =Putative uncharacterized protein
MMNEVQINKKTNTGVVCSLGSYFPTNFSNLAGHVDSERMYNELVSNTIYEGGPFDSKASSIKLLRRTSNTTRCLNLGSYNYLGFAAADEYCTPRVIESLKKYSATTTKLHNELEELAARFVGKPPAILFGMGYVTKSAIIPCLIGKGVLIISDSLNHNSIVNGARGSSAIVRVFQYNSPAHLAEVLREQIAGGQPRTHRPWKKIIVIVEGIYSMEGELCKLPEIIAVSKKYKAYTYLDEAHSIGVVGQSGRGVCELLGCHTRF

SEQ ID NO: 66968 - protein, 52 aa, Zea mays
  Coding DNA Sequence Number=SeqID_23593
MGLGVCGSLCQVWVRPLGRSGYEIDGFDYDYGAGEDEAVEGDFQEFQDYDKF

SEQ ID NO: 66969 - protein, 278 aa, Zea mays
  Coding DNA Sequence Number=SeqID_23594
MAERYQLLRSCVPPTMRRKDGGTGGATGRSSGRRFAFAVITAPKKGPGKGDTPKRILPREGTRLRASLLIRGSKAGPPKGFDSRLRSRGPYTHYWSEVRRPAPRRVPRPPQATRAPRPLLIRGSKAGPRRVHSRLRRRARDDQGYVRYITKARATLPESHQREASSPRTPSPGDRVRQITRSSPETPCSAPIEGNMALSPLLLAERRRRGVCKKAESVPDRPLALCRGSGAALANPAPAEPLTASTYQPENLGPDRTPGLRPVRMREQPDQPKHYARH

SEQ ID NO: 66970 - protein, 478 aa, Zea mays
  Coding DNA Sequence Number=SeqID_23595
  Gene Ontology: Mol. function=helicase activity; Biological process =viral genome replication
  Homolog annotation: Hit_ID=A3ASR7; Match level="QueryCoverage=100%, HitCoverage=43%, E-value=1e-118, Identity=42%"; Hit description =Putative uncharacterized protein
MYHNIKSFGREGGAEHKHLELYFYDDDPTLEHRYRKCREEHQQKDKKVIPQIVYILRGNSYSEHLRTMGHVENLDDYRIALNLDQTLNQKTYNTPLILEVAAVWIEETEGRGQFSKSVMLHGKDSSSHYIRSYHGCYDALSYPLFFPRGELGCHANIPKVGVSMDEVDAYCAIHRASNANDEDADLYQGLVDSMLDGDIRAEKVGKRTVLSASFIGGPRDMRRRYMDAMTLKRGLPHAHVLLIMQRKYKLACPEQYDLLISAEIPSNKRRDDDRKEKVRGCELDNRWVVPYNTYLLRLFNCHINVEACGSIKAVKYLFKIIYKGHDRASVVMKDASKADDDVDEIKQYRDARWVTPLEALWRIYDFELSQISPPVMQLQLHLPNMHMVAFHERQMVERVVNRPGVDRSMLTSYFEANRLHEEARGILYRDFPEWYTWQSAEGERYYLRVLLNHVTGTASYVDLRTVDGVTLPTFREAA

SEQ ID NO: 66971 - protein, 36 aa, Zea mays
  Coding DNA Sequence Number=SeqID_23596
MRRKMNHGEKVDEDNKRRKWVKPHYGIGIPKRRLVL

SEQ ID NO: 66972 - protein, 192 aa, Zea mays
  Coding DNA Sequence Number=SeqID_23597
MNCRDFSSYRSGTSDIQTDSPTACNVVYHLSADVAAPQAGPVPTQRQIIAVPQTDNLCPSLFTLLSLRPILSVSSVRGRGFGGLRKKLAGRFKSKRPRGNDDDYTPTTDSEAQSSAGGTESMDAEDFPHVHPDYPIDTQGWTYPKRRFSMAEYCSRRTVNQYTLPSDTNIQFFHTQLQFDVFWGTLVDTNFS

SEQ ID NO: 66973 - protein, 138 aa, Zea mays
  Coding DNA Sequence Number=SeqID_23598
MNEEHWHTRCRYQRNYGSPLRRAPPPLTIAARAVSSSPVELRRALSPAATVDPSLRRVPVAAEESPEPALSRETPPPSRPAVNRPPPVSLPRPKPYRRTPRALPDLPDHSDGPRAPPIARAPRLRRALRRGDERRRPS

SEQ ID NO: 66974 - protein, 23 aa, Zea mays
  Coding DNA Sequence Number=SeqID_23599
MAPPVDVAVCALDFFDWGFLRSR

SEQ ID NO: 66975 - protein, 383 aa, Zea mays
  Coding DNA Sequence Number=SeqID_23600
  Gene Ontology: Mol. function=kinase activity; Cellular component =ornithine carbamoyltransferase complex; Biological process=amino acid metabolic process
  Homolog annotation: Hit_ID=Q6QP54; Match level="QueryCoverage=28%, HitCoverage=36%, E-value=4e-10, Identity=45%"; Hit description =Putative kinase
MALPVDVAGLCPRQGDVGAPPKPRSSLSSVAEAEPEPPARVRALGSGGAEFAVFRVLARVRALGSGGAEFVVFRVLARVRALGSGGAEFVVFRVLARVRALGSGGAEFTVFRVLARVRALGSGGAEFAVFRVLARVRALGSGGAEFVMAPLARPDCLSDTLCRVALQSEWRRRRCPSVRLLYADGGYQLRIRRLEGTPNYGPRQKGSVFAFAPTFALRGTSSTKSSGAKDIARWWRCCLDSLQDIFYRELIFSLPSSYIFRALRLPSARRPAPFLAELASSLFFSPSVPNAGVQFLSALSLCFQFLMAPGQVSLRAVLSVALLWCPSPGALVVGSASPRARPCLPARFLVLASTSITGADCPAPAPSMVDCSSLLHPWSAAAR

SEQ ID NO: 66976 - protein, 89 aa, Zea mays
  Coding DNA Sequence Number=SeqID_23601
MGVGKGRLDDSKGLAAEVWTYIRVVERAGLEGSDESVVSSNSSEEGGGGDGDDEGNDDGGGDGDGGRGNDKGEGKGDGKGGSGSSKASG

SEQ ID NO: 66977 - protein, 313 aa, Zea mays
  Coding DNA Sequence Number=SeqID_23602
  Gene Ontology: Mol. function=protein serine/threonine kinase activity; Biological process=protein amino acid phosphorylation
  Homolog annotation: Hit_ID=Q69KT1; Match level="QueryCoverage=87%, HitCoverage=81%, E-value=1e-132, Identity=82%"; Hit description =Putative uncharacterized protein OSJNBa0034G14.6
MEEIMTHPHLHALASTTLAIVAVMVMVLPSTTAGGGLCRESCGDIPVRYPLGIDDGCGSPYYRNMLACADNATLRLRTPSGTYPVGGADYSDPHLVVTDPSMWTCARPFTSVHAAPFSLDTSTRFSLSPRNEYLFFDCDEARVIVAPRPASCDRYPGRCDSACDSAGYLCRNLPGCALEEGSNQSCCAYRPRAAESLRAMLRHCGAYTSVYWRAAGDRSFPPYDQVPAYGVRVDFEVPVTTRCLQCQDKRRGDGGTCGFDPATRDFVCICGDGRNSTTDCADGHSSGHHGSAGVVAVLFFNLLLTVLAVGWIL

SEQ ID NO: 66978 - protein, 103 aa, Zea mays
  Coding DNA Sequence Number=SeqID_23603
MVLKAIHKKDRSEQDLKDLAQKLEKVLPFSPPLIDLPFELDSALTVLFASDIRTVFVMRLSFNRDAQFGLFDGDGKLAKALDARPLTNVVKDLEAKMKGGQSS

SEQ ID NO: 66979 - protein, 224 aa, Zea mays
  Coding DNA Sequence Number=SeqID_23604
  Pfam annotation: Domain name=Protamine_P2; Domain location=69-173; Score=-8.7; E_value=0.1; Accession=PF00841.10; Description=Sperm histone P2
MRLKELDAVPLEVTVREGGIATEDRFAADVPVVGSVLLLHSRLARGGLHHLVNRIHDKGWGLTWIWMMMAKVRFAAASISSTSLLRHHLNLLFAGAGEDDVEAKEDEQGARAGGPDDVGSAGARRAWRRRACASRVGVGAARRTSGAAMARWRRMSRGSRISSRRACWGCATRDPGEHRERRGGGERPRFLAQRRGATDGAGYGRVRGWAEPCAILLWMPTLRF

SEQ ID NO: 66980 - protein, 401 aa, Zea mays
  Coding DNA Sequence Number=SeqID_23605
MGSARVAFVLSPLEERNFAEVGTFQPSLGFKDFHQAARLHPLAGASKIFIILARAEGEASRSSTSRTGQWATSSSSFWGGNHPPALRRRRPPAMPGKANCCCPARVQHSVLCPHFRGEDGGEDLPVCFGAAGACWCGVGERVDAAVGADVVAAGESFSADEPVSATRGPTSGSLALISGSRPLSGDANESLPTAASVLGPSLLLQRSLASHRGFVAPQALQSKETLDRSAMSRSRRQRCQHGQRQSWLEKKLRRPEPGRAVHWRDRRRSRVAEATSRADVLGGQLAEATEWPVEPSARAEFLEETPATMAQAWCRQVPSRWRSSDCVTLRGWVGFRRRSPSARSALPLMCTLTRPLDSVIDIVEKKVMSEVSVSQRHRSPSARSALPAYVYSVVFRIPLSE

SEQ ID NO: 66981 - protein, 317 aa, Zea mays
  Coding DNA Sequence Number=SeqID_23606
  Gene Ontology: Mol. function=sequence-specific DNA binding; Cellular component=nucleus; Biological process=regulation of transcription, DNA-dependent
  Homolog annotation: Hit_ID=Q9C519; Match level="QueryCoverage=13%, HitCoverage=7%, E-value=1e-19, Identity=95%"; Hit description=WRKY transcription factor 6
  Pfam annotation: Domain name=WRKY; Domain location=271-316; Score =75.7; E_value=1.5e-19; Accession=PF03106.6; Description=WRKY DNA -binding domain
MDLVPKHQQQQQQRGIKEEEEMTVFAEHGDQQATSGAGHGGGGGRRSEIKEVDFFSAAAGGAVSRRITDEDDGGEDGGREPAGAVARGCRNTTVNTALDLLTRPAAGDGGEGTAASGRDDDTEMDVAAVEGELRQAGEENRQLRRMLEELTRSYGALYHQLIQAQAAQHHHHQASGAAKPMLPTSGVQFMDPAGRVPPPPAPAMAAGAAFSGERGGDSEGGSGSGGEAGPNDGTGTPERGENADNRAPAPAEAPLRRARVSVRARSEAPMISDGCQWRKYGQKMAKGNPCPRAYYRCTMATGCPVRKQLEHDVHAKC

SEQ ID NO: 66982 - protein, 539 aa, Zea mays
  Coding DNA Sequence Number=SeqID_23607
  Gene Ontology: Mol. function=aspartic-type endopeptidase activity; Cellular component=lysosome; Biological process=sphingolipid metabolic process
  Homolog annotation: Hit_ID=P42211; Match level="QueryCoverage=77%, HitCoverage=85%, E-value=0.0, Identity=83%"; Hit description =Aspartic proteinase precursor
  Pfam annotation: Domain name=Asp; Domain location=89-490; Score =406.3; E_value=4.5e-119; Accession=PF00026.14; Description =Eukaryotic aspartyl protease
  Pfam annotation: Domain name=SapB_1; Domain location=375-413; Score =66.9; E_value=6.6e-17; Accession=PF05184.6; Description=Saposin-like type B, region 1
  Pfam annotation: Domain name=SapB_2; Domain location=317-351; Score =61.9; E_value=2.2e-15; Accession=PF03489.8; Description=Saposin-like type B, region 2
  Pfam module annotation: Pfam domain module=Asp::SapB_1::SapB_2; Domain location=89-490::375-413::317-351
IMGRGRGHLLLPAAAACLWALSCALLLHASPHGAGAGAGGLLRVGLSRRGGGLDQRALAAAKAARQQEASRLGASGGGDVPLVDYLNTQYYGVVGIGTPPQNFTVIFDTGSSNLWVPSSRCYFSVRYKSAKSSTYKADGETCKITYGSGSIAGFFSDDDVLVGDLTVKNQKFIETTRESSITFIIGKFDGILGLGYPEISVGKAPPIWQSMQEQELLAEDVFSFWLNRSPDAAAAGGELVFGGVDPAHFSGNHTYVPVSRKGYWQFDMGDLLIDGHSTGFCAKGCAAIVDSGTSLLAGPTAIIAQVNEAIGADGIISTECKEVVSQYGEMILDMLIAQTDPQRVCSQVGLCVFDGARSVSEGIESVVGKENLGSDVMCSACQMAVVWIENQLRENKTKELILQYANQLCERLPSPNGESTVSCQEISKMPSLAFTIANKTFTLTPQQYIVKLEQGGQTVCISGFMAYDVPPPRGPLWYVWDMALLCFATPDICLLPHLAQSESLRMKQLKDSWGRLHGSLPHEEQMDASRHACPMCIEK

SEQ ID NO: 66983 - protein, 209 aa, Zea mays
  Coding DNA Sequence Number=SeqID_23608
MESPRYTVHRVLHSRSTKICWEIGFRVASIVGEEPVAEDPGEQQVEVAEQELIEGKLGDSAKIHRTVRCTPDSVRCAKGGRPQELASFGKSQRLVRYNSPDCPVCTGLSGATPGQRSSPRQRLSATHSMRRLRAQKSESPMLAHRTSNSTCPVCTGHPGGPTCQELQRLESNGSDDVAGGTGLSGVHRTVRCAIAQTPPANGQVWWLGL

SEQ ID NO: 66984 - protein, 83 aa, Zea mays
  Coding DNA Sequence Number=SeqID_23609
MTTGRSAMQRRGPIRRVQASRRVPGITAEPVSAIRSLRGRRAVRVERGEGDTDGDGPHAVTAPFPHGWTKAGKRGLAGSQWRA

SEQ ID NO: 66985 - protein, 546 aa, Zea mays
  Coding DNA Sequence Number=SeqID_23610
  Gene Ontology: Mol. function=protein binding; Biological process =ubiquitin cycle
  Homolog annotation: Hit_ID=Q6Z1B3; Match level="QueryCoverage=59%, HitCoverage=63%, E-value=5e-48, Identity=40%"; Hit description=F-box protein-like
  Pfam annotation: Domain name=F-box; Domain location=18-66; Score =23.6; E_value=0.00073; Accession=PF00646.24; Description=F-box domain
  Pfam annotation: Domain name=LRR_2; Domain location=167-190; Score =8.0; E_value=1.4; Accession=PF07723.4; Description=Leucine Rich Repeat
  Pfam annotation: Domain name=LRR_2; Domain location=248-272; Score =12.1; E_value=0.4; Accession=PF07723.4; Description=Leucine Rich Repeat
  Pfam module annotation: Pfam domain module=F-box::LRR_2::LRR_2; Domain location=18-66::167-190::248-272
MSSLPLPESPMAAENEACDWGEMPSDALVSVFGKLDVIEILTGAGLVCRAWHRLAASDPMLWRRVDMRHMSYGYEGERLQTEKVEDMARAAIDPSAGTMEPFFADTIVNDDLLRCLSQRSGKRLQTEKVEAMARAAIDRSAGTMEAFFADIFVNDDLLRYLSQRAPSLKCLHLSACNFTDQCFAEAINCFPQLEELDVTLCLLYGSACEAVGRACPQLKRFRLNELWSISRKEDIGMEALGIASTMPRLQELELIGNNLTNDGLMSILDRCPRLESLDIRECFNIQMDDALKLKCSRIRDLRLPHDPIFFDDTRYWPYYINSGVFDSDIDSEVGTYDDPLDDMGLRHRYQQGQMQRVAIVRDPKILLLDEATTGISSFAVCSKHTAKAILHSAKALPSVTLGKERSANCTSATASLPSTFCRALGKDFAECYLALGKEKSPSRRQVTVTDPLPSAYGDTRQRLVQWTPQPVPVPRALVGTRQRRFLCRVSGGLTLGKEPSSGPLCQYLCRVPWQKHSAKMSLPVPRFPSLSSATVSTRQRCLYRFP

SEQ ID NO: 66986 - protein, 218 aa, Zea mays
  Coding DNA Sequence Number=SeqID_23611
MRRDPLGLQAGGSMPKQAGVNQRFQICIGNGRHRPRVAGREDGDLFHHRNKQEGEEVSRRKAKATFEGKKIATAKDQANHPRVLLGCVSGPQADSDRKELGPPLGSPINNSMETPCSLPTEGSMTHSPPSSSRRGDEGAYKPQVKASLDRPLALCKGSGAVLASRGKSSNRSTKDQTEPIQKNKKSLEEVTYCFGASGATPDGCACAHPPKNKHVPSF

SEQ ID NO: 66987 - protein, 144 aa, Zea mays
  Coding DNA Sequence Number=SeqID_23612
  Subcellular localization annotation: CTP_CleavageSite=33; ConfidenceScore=5.08e-01
MASSELRPQACHYLGRAVASGKLWPPANYNLRRAMASGERRPRASRGLGRTGASGLKRVLLSVFGPPVLDQLPLNLKLIKIIGLRIKQLVPLSDLGEVGSNTRADEVVGEVCGNPTLELTRRWRSLPESTKQRVGEASDDPAPE

SEQ ID NO: 66988 - protein, 207 aa, Zea mays
  Coding DNA Sequence Number=SeqID_23613
  Gene Ontology: Mol. function=lipid binding; Biological process=lipid transport
  Homolog annotation: Hit_ID=Q6Z5K8; Match level="QueryCoverage=35%, HitCoverage=25%, E-value=1e-16, Identity=54%"; Hit description =Putative uncharacterized protein P0685G12.32
  Pfam annotation: Domain name=Tryp_alpha_amyl; Domain location=50-138; Score=21.6; E_value=0.0028; Accession=PF00234.13; Description =Protease inhibitorseed storageLTP f
MALFKCMCIFLVSLLLALTFTNAQEESSHRTLPPFPCIPGQPRPPRLPPCPPAPTECYTSLSGMMPCADFLTHNEVPPMPPTVACCDGLRSLVTNASICLCHIVNGNINKLLPAPMIPVRMVALPRFCVVRFPRAILRRRAFATDEPSASTRGITVGTTIYFASSITAGITTNSTNIITTNCIATRVTANSTTNCIATRIAVDTTTR

SEQ ID NO: 66989 - protein, 200 aa, Zea mays
  Coding DNA Sequence Number=SeqID_23614
MALHKLYDDGGPQLCYGSRTTLRRTSDSHDITPAGCPDLSGCHIGMAFSEKVGRAGPRTGQALSWGRSLPSPAWTLVTPLLQAHPTWARDEHEGRGTSTSLTLDSGRLASPPFALAHALDPSGLGHAAHSLVGLGTPLSRNADSIPKELLLIELAISIRIMPNAKLIGKGSASPEVTTAHSALLEVIATQPISLEPASGR

SEQ ID NO: 66990 - protein, 246 aa, Zea mays
  Coding DNA Sequence Number=SeqID_23615
MGDIRRLSASSLEERNSAGVGTFQPSFGFKDFHQPARLLPLAGGHPRRFKDVHHPRWGGGRAEPELYLPRGLVGHPLLRRLRERALAGPAGGSDFDNTGPVDGRRRLPQRVGLAGLAPSALSCRKAAAASCAREDNPRCRALLGRRSCSGAVLPLHRDGASTRRSEPCSSGRIRVGICQWADGPCHRCRGGGGSRSPRRRRDHRHHPRFGPPALCTCPRPSSVGVGEGKVAAAFALRPSPLQFGHP

SEQ ID NO: 66991 - protein, 232 aa, Zea mays
  Coding DNA Sequence Number=SeqID_23616
  Homolog annotation: Hit_ID=Q6QP51; Match level="QueryCoverage=18%, HitCoverage=20%, E-value=2e-09, Identity=70%"; Hit description =Putative growth-regulating factor 1
  Subcellular localization annotation: CTP_CleavageSite=60; ConfidenceScore=5.60e-01
MVAFQGGYPPFKGGSPYLRPQPSRAESSPTHSKVLPYGVGAGSHRSCKPTQSRRSQTAARGAYNRPAVTSDPPLFAQTSGPKGGQPCRRHTIAPSGRTSPTPNTPGMEAQDHASCNRRAECFVHATAPPLAPPPRLLDCGTNAATRGGPVHDPVAPAWDRERGIPRKGSFPEKEPGSEPPTDQRFEGWPPGRVRQPPQITWALHPLLVRGLKAGPSKGFHGRLRLLGLRAHY

SEQ ID NO: 66992 - protein, 395 aa, Zea mays
  Coding DNA Sequence Number=SeqID_23617
MQAACNQTEGAHPFDFNASSIEAQAHASCNRRAGRNKQETAPPLAPLSHLLDCGTSTATRGNPAHDPTVPTRHIGHGPASESSGQVVSQAHVPSWDSGRALSHGVKTAHPRSGRRFTFAIMTASKKGTGKGNTPKGILPREGNGPRAPLLIRGSKAGPSEGFNSRLRALGLRAHYWSEVQRPAPRKGSMTASGHSGSAPTTDQGFVGWPSKADPGGFTSRPRTPSSNGHTFGSPEAQTSPRSNLGQAATPTDRIAGAFNAKGSDSGSAPEDDELRFARPQGSDSGLAPEDDELRFARPQGSDSGSASEDDELRFARPQGSDSALASADSLCLARPRGSDSTSASEDRLDLDLGGASASPNPGLGPTTSQETPSLPYPKLTQATGNKTGVPSGSPR

SEQ ID NO: 66993 - protein, 55 aa, Zea mays
  Coding DNA Sequence Number=SeqID_23618
VLHLEHLGEPCEDVKDAGDCTALLDACRQVLADPTGCGGGPDPDVVGDAVLEALG

SEQ ID NO: 66994 - protein, 123 aa, Zea mays
  Coding DNA Sequence Number=SeqID_23619
MERTTDSATGGKDAGYGIGFPSDGFRKARRGRLGSKERRRGAPGTQICSSIRSDVSGRLALRGPRSLPRCSAGNSLGCYGEEDDYGWWGTHATVTQSTHRRRGQAGQPTGSTGQKELGGGTTD

SEQ ID NO: 66995 - protein, 93 aa, Zea mays
  Coding DNA Sequence Number=SeqID_23620
MPGKSARDFGNENGYDGGTSTVKEAATLIALESIELATVLNSECDSATTPSNLPWRGSDDPHAEHEIQTGIALGGGHGRTETDTKGAASAFKN

SEQ ID NO: 66996 - protein, 55 aa, Zea mays
  Coding DNA Sequence Number=SeqID_23621
MKDFLRCEAEYEARADVVATTSCKKLVVDNWTFPPSTNPGHRQLPRLRIKLDSSE

SEQ ID NO: 66997 - protein, 65 aa, Zea mays
  Coding DNA Sequence Number=SeqID_23622
MGNMCFGAGVTVRWLWAVVRATLGATCGWAQGQDYGVSTLAQNKIFDPIIQELLVLYVMELPLDA

SEQ ID NO: 66998 - protein, 71 aa, Zea mays
  Coding DNA Sequence Number=SeqID_23623
MYGDRVHEESYPGIKPSTQNLSPNFAAAAAPPRAVAMSTWATIHDEQATVESEVQQVEVAEQELIEGKLCP

SEQ ID NO: 66999 - protein, 184 aa, Zea mays
  Coding DNA Sequence Number=SeqID_23624
MTDRLAKDEMTTWKAHTRGDDPGRTGDGTRSIKVTEMTEEVSTLESRIGVKFGKDVAGSVVKVPEKFGLNWSIFGWFGHFTEHVACGKLGFRRNGHMRSENPPEGAKNLQGYTMGTIEHIPPTRFIGFVKNLKNLQEVEKGAYCNTAGKETEGKRQMNGLLTKRKKASPGTRSPEHGGRRLDKS

SEQ ID NO: 67000 - protein, 250 aa, Zea mays
  Coding DNA Sequence Number=SeqID_23625
  Subcellular localization annotation: CTP_CleavageSite=47; ConfidenceScore=5.56e-01
PAPPVSRVVVFLAYDAPPSPPSPSPRPSPHRTGEFGTAPSSPLDRVLARYRPRREVPSSPLCDINAGAVHLTGARRAPPLPSPRAPIKGSPRAPPSPHRPQPPPSSPRLSSIREAPPSSPPPNTTPPPQSLAQSSPTVIPAAELRHLPADSPLPASSSQIKPTPSGEAEAFDKILSEGGDFYAFAGEKFYSEVWMKGGHEIADEAIRKNEKESHDAQEEAKRAEEAAEPELSLPSEPYNPEADPDSEESA

SEQ ID NO: 67001 - protein, 60 aa, Zea mays
  Coding DNA Sequence Number=SeqID_23626
  Gene Ontology: Mol. function=mRNA (guanine-N7-)-methyltransferase activity; Cellular component=nucleus; Biological process=mRNA processing
  Homolog annotation: Hit_ID=Q6K833; Match level="QueryCoverage=55%, HitCoverage=9%, E-value=2e-09, Identity=90%"; Hit description=mRNA cap guanine-N7 methyltransferase 2 (EC 2.1.1.56) (mRNA (guanine- N(7)-)-methyltransferase 2)
MVLKLKCRKRASKTKYQKNVDASHNKGLKTVPNSIRSENNTITFEVEEEKYELKLYTKYT

SEQ ID NO: 67002 - protein, 112 aa, Zea mays
  Coding DNA Sequence Number=SeqID_23627
  Homolog annotation: Hit_ID=A2X0W7; Match level="QueryCoverage=82%, HitCoverage=3%, E-value=1e-23, Identity=64%"; Hit description =Putative uncharacterized protein
MSTEVQKPYEVYDFGVVYVVNFMRSSDECIKLIVEQLVMAVKTSQNSNEGSTKELKAIVLELQHELQAKDVQISTISFDLSCQLRAVESSAKQFLVDLEDARMELQNLEKQV

SEQ ID NO: 67003 - protein, 862 aa, Zea mays
  Coding DNA Sequence Number=SeqID_23628
MCLHYYSAYPRFEVEEEDADEGALRCAAGLSSGRDLVEEFVAYGVWPLAHGWALGKVCPRQMPSCGGMLVRSPAFALDLHSRDPAAFVCEAEDGAVRIVCRYVPKTEGQRSWDIRGSNDRLNRVFELNRLPYGGYPGQDDVDRRGKKPAAETRDDPAPTAAPSSKKRKLGIATGGLGVSDGFAMELMGTCAALGGRMSSPELRESSARMLKATGGWWPKNVPIPHAAGENFFTSRMVCDLRVFPYGRNIVAVVSAVMDKDRQGAAQKRQAVIRLPEASPKRSRGTAKAAAPGGIQPTLVAKSAAPGSSRVPEAVKAAGTGGTKSAPAGVAKARELPPPGKRVADFVTDISVDDYLVGSGEGQLVVVPPTVAAAAASVVPMAKGSALSVGGEIPVLTAVKDEAGVAADFADRVASGALTAVVSTEVERLRAQHADAVREKSAADSKCRKLAEKAEANLARVEGSLARQRAEEWEERFNALQTRVERAEASTRSEAERTRKQLMDSYHELGARTADFEVPDQEPGLRCLEWLQEELLALPAIMEGFMSYASLVTCEGAMNALSREGCRHYEVFDRSDEDFEREIYKVEDPVVKESAGALFDRMWGPHGREVVRERSDTTRGQAARNEKVEDFGALNSVQPEAESNPVAAVSEVAPAAPPETVEGSLAAPAATATGGGISPTALPRAEDPPKTATELAAEDPTAAGSSQFQDFGPVHATATANVLPASTVDAGNESDESASKFTDFGDSGSSVEWTEESLDEDLDYFAALDVAAAEASPRAADAEVVPGPSAGRRRRRAVAKRRVSEADGGRLRVGRAGRRELLSSPAVASVGEGELRSLFEGEELRIMLFNYRKMGIIPKVEPM

SEQ ID NO: 67004 - protein, 299 aa, Zea mays
  Coding DNA Sequence Number=SeqID_23629
MAVEQKNEKSRKRREVSQQNKGPPIQPEASREDINMKTCEMVNFEISGDVHLGSVSLSDGYFTNFATQDGDENVNVNQDDGIDWLHRNETFKADDVFTTRDLLTPGGVHETVGNTPNHNLERVAYFRERYKNLTPAEREFRRERLRLYNNTPKRKGSKIEYIRKRRALLADTLSQESIAMEYPTYTLELPLRWVIPEIASNPFLLASTQTEDVDPLHMSTGPLRRKQHVPRGGRQAILARRNRQFEASISRNMATATEDTISDAGEGDDWTQPHMNAKINNNGNYYHCFQVGRVVGHFG

SEQ ID NO: 67005 - protein, 78 aa, Zea mays
  Coding DNA Sequence Number=SeqID_23630
MSKLLLTPRVALLHRLLLRKALPSRNTEYIHELYVYVINVPEYSLMRHRDHPKMSDRKHVILGRVGVSMLHRLKSLPT

SEQ ID NO: 67006 - protein, 58 aa, Zea mays
  Coding DNA Sequence Number=SeqID_23631
MSLLSAGRRTIRRVTHATCPHRVNLLILHMSLLLTLLTLHMSILLRSLLLTLLTLHFV

SEQ ID NO: 67007 - protein, 109 aa, Zea mays
  Coding DNA Sequence Number=SeqID_23632
MGLGKEAGMVRAGRANGAWRGAAWQWGTARGGAAMGHDEEAGTARGVRAAWRGRAGGTARGVRAARRAAAHRFKIAKRAREKLRARDRDDLGPLFSSASLRPTKIVVGQ

SEQ ID NO: 67008 - protein, 17 aa, Zea mays
  Coding DNA Sequence Number=SeqID_23633
MAHRTIRCATGGDTKGP

SEQ ID NO: 67009 - protein, 70 aa, Zea mays
  Coding DNA Sequence Number=SeqID_23634
MPSLLSHLLCPFASELSVPLCLQGVESEPSWGSAFRMSWWPASSSSIWRKRMFTSLAKEANFGYAVSAGP

SEQ ID NO: 67010 - protein, 642 aa, Zea mays
  Coding DNA Sequence Number=SeqID_23635
MPSSSSSADAPSPAAASSEETLSNVMVEELRAGDSVEFGVSRMTSARIEDMQRLGYFGGGVARAPGTEEVPEPEGELVVFEAFFVAGLRLPAHRVFELNQLPYDGYPGQDEADRRGKKPAVETGGDPALVAAASSKKRKLVMDKDRQGAARKRQATVRVHEARPKRQRGTAKAEASGGGKPPLPAKVGASAPGKAPEVTVGAGGPKLTKVVPSVSGVAEAAKAARTLPPPGKRVADFGTEINVEDYLGGSDEGPPALVVPGAAIATAAPAPKAGGETLGAGGEVSALALVRDEAGVATRRLKGATEALSRATEALSQVADFTSRTASGALTAALSAEVERLRTQHADAVREKSASDSKCRKLAEKVAALEKEKADLRRQLAGERREANEAVAKEQAAQAEARLARAEGNIAKELVGELQRRLTALESRAEGAEAATRAEAERTRTQLMTAYRELGVRTGDFEVPEREAGLRCLEWVQEELQELPTVLAGLMSFTSLVTCEAAMNALSREGCRHFEALDQADEDFGRDIFEVEDPRGEGIRRGPSMTRMWGSYGCEVVRARAEAARAQAERDERVDDFGALNSALPDPETTPAEAATGVAPGPTPGDCGRCTMRPCTCCGRRRPSPKGGRRRARCPRSCCAER

SEQ ID NO: 67011 - protein, 221 aa, Zea mays
  Coding DNA Sequence Number=SeqID_23636
MAAPEQRYYESESGRAATPLIPNMVTMWPEKAIHSKMPTVGPDTHGKVSDPCTCRPDLRSKIQDPRECSPDLRVGSRIPLRGIRTTHSRVPGLRGREYPGLAQARVRCRHVSRPSLVWTCPHSATAPRLDGDPMLPHGLPRVTWQAASRPSCRRQACPLPNSMPVLRGALCSSIITRTLPGKLPLHANAAQIADIRAFLLVFLLDAMVHIVEHHDFIPENT

SEQ ID NO: 67012 - protein, 141 aa, Zea mays
  Coding DNA Sequence Number=SeqID_23637
  Homolog annotation: Hit_ID=Q10ET5; Match level="QueryCoverage=46%, HitCoverage=63%, E-value=1e-22, Identity=83%"; Hit description =Expressed protein
MQAVARAARGLAAAAAAAAARPSATEAGHRGQVQQARGIVVQVRDGNLERALSIMERKMRSSGMERLIRARTHHHVKDSEKRVLARKGLMQRVRSQELGKKLREILIKKIRASLTTLFFQGISIFPMENELNFLGKMRLPN

SEQ ID NO: 67013 - protein, 535 aa, Zea mays
  Coding DNA Sequence Number=SeqID_23638
  Homolog annotation: Hit_ID=A2XKZ1; Match level="QueryCoverage=20%, HitCoverage=97%, E-value=2e-17, Identity=48%"; Hit description =Putative uncharacterized protein
MSSDNDLFGDAHDLWNRIKVKYCVANCTASTPYIACDANLSKGEDQERWAPNDESTSSTGLVSTNNKCFVANNDGGDKSHDDEEYEDDSEDESSSPQGTFSCLASTDINDRKNDTDDVEEEEIRRFYIHLNKEDKTLLVKLLRRNKEQGDTLLRLEESLIKTNNSLEKMTIEHEELKCSHDDLVQSSVLESGGRDACRFATAQAQLCAAQLQDDTNDRLVSRTTPLPACLQPLNRALSSTGQKPQQRAPAVPRAQRRNDAHPPARVRNAAAVPPRGHGSRHGLTAVSQARRGEARERTKGTPTSFQKSLHARQRSPNLIRVVLLLVSCGKRLAAAGSEPSVTLEHTLTPHKGLAAVDQHTTPSFVRRAHGPSPLRSLLISSHITAASARARSGGRQTQLLALPCSARERDGGAVLPRWWETMATVPVPLPWPSVRRSLQEGAASAASYERRAPWQGAARPAATVRSVETLVVIVAAIVLAAVLAGVLARVCGGRHVVPSAQYHDEEGWVERRCRSCLDSGLPPPEQGASKTSEAK

SEQ ID NO: 67014 - protein, 222 aa, Zea mays
  Coding DNA Sequence Number=SeqID_23639
  Gene Ontology: Mol. function=protein serine/threonine kinase activity; Cellular component=extracellular region; Biological process=protein amino acid phosphorylation
  Homolog annotation: Hit_ID=O04212; Match level="QueryCoverage=99%, HitCoverage=47%, E-value=6e-72, Identity=56%"; Hit description =Putative ABC1 protein At2g40090 precursor
MEFMDAKEVTDVSGIKSIGVHPVDVSKPRWKRPQLVLLDHGLYKELDYNTRISYASLWKALVFADAKAIKENSAKLGAGEDLHALFAGVLTMRPWKRVIDPSPDHLVLGKNTDYSELQNYASLYFTEISELLRRLPRVILLMLKTNDCLRAVSHALVGGSSLESFMIIGRVSSEAVLDAKRMNRRSFLDGLKIWLEEALLEARFFTLKLMLCVMQLRKLLPG

SEQ ID NO: 67015 - protein, 378 aa, Zea mays
  Coding DNA Sequence Number=SeqID_23640
  Pfam annotation: Domain name=zf-C2H2; Domain location=194-216; Score =17.7; E_value=0.042; Accession=PF00096.17; Description=Zinc finger, C2H2 type
  Pfam annotation: Domain name=zf-C2H2; Domain location=312-334; Score =12.3; E_value=0.53; Accession=PF00096.17; Description=Zinc finger, C2H2 type
  Pfam module annotation: Pfam domain module=zf-C2H2::zf-C2H2; Domain location=194-216::312-334
MVVGEQDYYYSSSDSDDEDVSRYVFLARQPVPVGRHHPEEDDRDASFANDDDDGDGGDGTAGEEESEGGVCRRKKRPLLEILDDDAPPPTKKAQVELIIASPLATQTPPSGSESNLASPPLAGESGSEGSHEHRAPREQGRAKNATKNQRGACGKRGRSSGCDVDGDRDAHRHAVAVAAKTGASSSATSGRFTFTCSLCDRCFDSHQALGGHVLGHHRKRAKIAIAAGAVHDVVDDKVHGKGKGGVGEPVFAGSHDIAVSSGHGFTYGNSRSDKKMDIGTASPNRKVVVAGTCREGANGNGNGHGDGCRTRYKCKVCGTECLTGRALGGHMGKHQKRLPVGGGGKADRSPSPATRTTTARPLAQLFGAERLQREIRPS

SEQ ID NO: 67016 - protein, 138 aa, Zea mays
  Coding DNA Sequence Number=SeqID_23641
  Gene Ontology: Mol. function=catalytic activity
  Homolog annotation: Hit_ID=Q5NKP3; Match level="QueryCoverage=93%, HitCoverage=40%, E-value=3e-27, Identity=55%"; Hit description =Putative uncharacterized protein 9C20.7
  Subcellular localization annotation: CTP_CleavageSite=60; ConfidenceScore=5.08e-01
MYDKLWRRHRLDAVQSGCFALSIVKQGTSWSSPTSVTLGLFWALHLTTTPSRRPAHRPPEAQPATGVCIRWCNGQGYYLADEPGVHFVLQPSQESLVLGMSRAFDDYYIQDCGVILAPEVTQRRTDNNDQFVILATVG

SEQ ID NO: 67017 - protein, 142 aa, Zea mays
  Coding DNA Sequence Number=SeqID_23642
  Gene Ontology: Mol. function=cysteine-type peptidase activity; Biological process=proteolysis
  Homolog annotation: Hit_ID=Q5NKP7; Match level="QueryCoverage=51%, HitCoverage=8%, E-value=7e-22, Identity=64%"; Hit description =Putative uncharacterized protein 9C20.3c
MAHRTVRNIIDFGEYRANCRDIQQSFADGACLDNVFMQCFIECVRVDCSKHIPPLNAHQLILDVNVGAILNFEEQEQHNNGTHATLWTLDIHYDYMVGAMNAVIDPDNSEDIRSLVLQYIIFHRLNRNNSMVSHLDRFKFSQ

SEQ ID NO: 67018 - protein, 447 aa, Zea mays
  Coding DNA Sequence Number=SeqID_23643
  Gene Ontology: Mol. function=cysteine-type peptidase activity; Biological process=proteolysis
  Homolog annotation: Hit_ID=Q5NKQ2; Match level="QueryCoverage=46%, HitCoverage=24%, E-value=4e-45, Identity=50%"; Hit description =Putative uncharacterized protein 9C20.3a
MAQSTVGIQRAVGAPDMSGAQLHQPLSDFLAVDDKEITGPYNTIDVNYTYLYEVMVDILMWKQAAASIMRKVDRPPTNPKCLIIESSQECFSVDIPRLTDIGDPTNTRSDGDPLQHRKRGVPADAKKIPMPNVDDDDDFEPPKKMCNISMDAPNKTHRLNIRCNPGDVLASIQILNERQCQAIVRKGFSSILDMTIDAIGCRTLLCWLMQKLDPRDMTLRIGPDKELKITKQTVHQILGLPNLGGGKPLNIDEANVAATLRASLNISKDEFVISKLRDRLRLGQDDDLSIRSVLFGSFAPCRCSKQQKWHSTHKFRSSSETCYVSKSPSTGQLEKFQAKLIDYDLEVGKIFATIKQCLNNIGTKQSNLAATFGELIDEVLRADESVTPNTQGQTVLGGTVDHDSGPVFDKTPIGSVCAPCIFLSELECARALWAYLCSKVIELDRYC

SEQ ID NO: 67019 - protein, 225 aa, Zea mays
  Coding DNA Sequence Number=SeqID_23644
  Subcellular localization annotation: CTP_CleavageSite=23; ConfidenceScore=5.13e-01
MAASDPAPCGGVSGPKEARYRVRRFTPRSFRTRNPSHKLSRKARDHIGVYYFQTRPDLAIVYIPTFGRARWENWRSDWVIASTEANDRLILPTNGPALDRKQWRTKPSLSPEFLPILDRIKTSGRDPLRGIRISGAPARGPQPVGVAPSANPTMPPSPLDKGKGAASSASAGSSGGSKEERRCRLCRADGSLVSELAQKRQKAADGTKEASSQAHDAQRHVSPPI

SEQ ID NO: 67020 - protein, 144 aa, Zea mays
  Coding DNA Sequence Number=SeqID_23645
MGKSNKRKREPTPPSEDFGDSEYSEEEFSSESEGSPAPVSPPASSDDSDDSQGIAAEVWTYIRAVERSGLEGSDESEYSSDEEDSDGGGEDEDDDDDDGDDDDGGDGDGSGNGRGSGDGGRGGDDGSSKGSTKGGGGSRGRASG

SEQ ID NO: 67021 - protein, 61 aa, Zea mays
  Coding DNA Sequence Number=SeqID_23646
MKHDSASEAAFLEPKRLLVSVCSTFPKERLLNFFAFYFGSIRVNFSRFALYFGGISVDFSL

SEQ ID NO: 67022 - protein, 452 aa, Zea mays
  Coding DNA Sequence Number=SeqID_23647
  Gene Ontology: Mol. function=ubiquitin-protein ligase activity; Cellular component=intracellular; Biological process=defense response to bacterium
  Homolog annotation: Hit_ID=Q8LLW2; Match level="QueryCoverage=99%, HitCoverage=99%, E-value=1e-169, Identity=67%"; Hit description =Receptor-like kinase Xa21-binding protein 3
  Pfam annotation: Domain name=Ank; Domain location=138-170; Score =37.1; E_value=6.4e-08; Accession=PF00023.21; Description=Ankyrin repeat
  Pfam annotation: Domain name=Ank; Domain location=175-207; Score =25.7; E_value=0.00017; Accession=PF00023.21; Description=Ankyrin repeat
  Pfam annotation: Domain name=Ank; Domain location=59-91; Score=31.0; E_value=4.4e-06; Accession=PF00023.21; Description=Ankyrin repeat
  Pfam annotation: Domain name=Ank; Domain location=93-125; Score=13.5; E_value=0.37; Accession=PF00023.21; Description=Ankyrin repeat
  Pfam annotation: Domain name=zf-C3HC4; Domain location=311-359; Score= 3.0; E_value=0.041; Accession=PF00097.16; Description=Zinc finger, C3HC4 type (RING finger)
  Pfam module annotation: Pfam domain module=Ank::Ank::Ank::Ank::zf -C3HC4; Domain location=138-170::175-207::59-91::93-125::311-359
MGHGVSCARTGDEHDYFRAAQVGDLEALEALLDADPSLARRATLYDRLSALHIAAANGRLETPLMLAAMHGKTDCVLKLLQAGANILMFDSQHGRTCLHHASYFGHVGCLQAILTAARTTPVANSWGFARFVNVRDDHGATPLHLAARQGRPGCVQALLENGAIVSALTGSYGFPGSTSLHLAARSGSLDCTRKLLAWGADRLRRDSAGRIPYAVALKRNHEACAALLNPSAAEPMVWPSPFKFISELEPEAKALLEAALTEANREREEKILRGTKHSPHPPTWDHASDAADADAIDDASSDASASDAELCCICFDQACTMEVQDCGHQMCAPCTLALCCHSKPDPVTLALPSPACPFCRGSISRLLLVARASSDDADTEKSAAAAAAAAASSPQLVRRRSRRSHNLSDGGSSSFKGLSSAVAGSFSKIGRGSSRTMADSDGCGVDKPEHDP

SEQ ID NO: 67023 - protein, 275 aa, Zea mays
  Coding DNA Sequence Number=SeqID_23648
MATREIDSRCHSFSRSKARRTRRLCSWCYGGAVVHQGAAGSEIFLYSEAKVGPGEGISLDQVTTDPEEMVRLVHAALSSRGRRRPDDLRKADGARERRPSIATAVLHDELLMCVEDEAPIFIPPSRFPRLPRSPCLPRTHTSTSGFGGGAGDEVLRGGAVPEEGNSRRAVASCATAGGGARRTVACSDGTAYGFSRIISPSLLDDAFFGGARMTNSYVSGWTAGHFVKQRGDEEERGRAPTTRSKRASGYGSGIYDEEIGRRRSSVSAVRSSRGR

SEQ ID NO: 67024 - protein, 46 aa, Zea mays
  Coding DNA Sequence Number=SeqID_23649
MVDCSRCPFGTVNPLVVMAWLPQNFIPGRETYRTGGHVQAMASSWG

SEQ ID NO: 67025 - protein, 79 aa, Zea mays
  Coding DNA Sequence Number=SeqID_23650
  Homolog annotation: Hit_ID=A0EVG2; Match level="QueryCoverage=43%, HitCoverage=3%, E-value=5e-07, Identity=73%"; Hit description=Milt1a putative polyprotein
MQVDTEPFPVNVIDFEGKRVLIQPSMANKGKGKEVPECPASWVKDACALRRPASLAKASSEGWRLRLRPNICPPRDQFG

SEQ ID NO: 67026 - protein, 550 aa, Zea mays
  Coding DNA Sequence Number=SeqID_23651
MVALAKYVWATTSYDGQPSVEVFAKHYCLHWQKRRIGHKIAQFESCTFTPKSGKTSMEVVELVPYARNKWGNWWDYWFYVSEAEVEDHPGLPAAIMSSGRDLVEEFIGYGVWPLAHGWTLGEVCPRWVGGKCEVRFFALDVRRRDPVAVVREAEDGAMRIVGRYMPRTEAQRSWDIRGSNDRLNRVFELNGLSYGGYPGVDVVDRRGKTSSIDGDMRGPRGKDVFARAPGVFGVDAGGYRGSMAQERSYPRAAGKDFFTSRMARDLRVFPYGRNIAVVVSAVMNKDRQDAAQKRRAVVRLPEARPKRARGSAKAAVPGCSQPSLAAKPVAPGSGKLQESMKAASAGGTKSAPEGAAKVREQPSPGKRVADFGTNISVDNYLVGWRFQRWRRGFGGHCRQGGGGHCVPPAAGGIAAADIAAESSKLRYASLCAAFMAADFADRVASGALTADVAAEVERLRAQHADAVREKSAAESKSRRLAEKVAALEGKRMDLWCQLVEERREANQAITKAQTAQAEAKLARAEESLASPARRGMGGAFQRSAGPHGEG

SEQ ID NO: 67027 - protein, 223 aa, Zea mays
  Coding DNA Sequence Number=SeqID_23652
MALSREGCSHYQGFDRSDEDFGRKIFKVEDPVVKDAARALFDRMWGPHGREAVRERADRARDQMARAEDVEDFGHLNSALPEADVNLVVAEAEVDPAPLPKTGEGSHAAPASTVSGGGSLPATVPMAEDPPKAPMEPAAEDPVAATRSSQDFGPAHATATANFVAASTVVAGNESNESTSKFSEFDDSGSSVVWTEESSDEGLDYFAALDVAEAEASPACYGC

SEQ ID NO: 67028 - protein, 471 aa, Zea mays
  Coding DNA Sequence Number=SeqID_23653
  Gene Ontology: Mol. function=protein serine/threonine kinase activity; Cellular component=plasma membrane; Biological process =protein amino acid phosphorylation
  Homolog annotation: Hit_ID=P93520; Match level="QueryCoverage=52%, HitCoverage=43%, E-value=6e-45, Identity=44%"; Hit description =Calcium/calmodulin-dependent protein kinase homolog|CaM kinase homolog|MCK1 protein
  Pfam annotation: Domain name=Pkinase; Domain location=129-396; Score=- 93.7; E_value=0.0053; Accession=PF00069.16; Description=Protein kinase domain
  Pfam annotation: Domain name=Pkinase_Tyr; Domain location=132-341; Score=-159.6; E_value=0.012; Accession=PF07714.8; Description =Protein tyrosine kinase
  Pfam module annotation: Pfam domain module=Pkinase::Pkinase_Tyr; Domain location=129-396::132-341
RPKEGGREADCHPLSRAGTPRGGQSPGTTLEPISQAARQTPGRGAHSAFPDDIAPSPATSASTPRRFFRRPFPPPSPAKHIKASLARRLGHRSPVSVSQVPRPPVEVPILEQGAGGAGEVERELDRSYGGAGKEVGRGHFSHTCLTRARKGDMRGQMTTAISIEDVRTEVKILKALSGHSNLVKFYDACEDALNVYIMMELCEGGELLDRILSRYYIFLRNHFANTTTRGGRYNEGDAKIIVEQILKGVAAPAAVSVPEGKSAKKGKRNAEDEIEKAVSAKKQKTVPEKVVPVKKQPPPKKVESNNSDEDSSDSEVELCCPGHLFQCCHSGASNGPILFEVKFFWPAVMMISAAFQATASIIKEFVFIKGAKRLEGKRPDIFVVNSFGSGFQALFIFLLLPFLSNLKGIPFAELPSYLTHGVACFLNVGGNLKGEYCFSYHIQVVYFSGGANFADICLNFSGGATNNNPMS

SEQ ID NO: 67029 - protein, 452 aa, Zea mays
  Coding DNA Sequence Number=SeqID_23654
MVSPVSCKRVIRVDVRAPFVRGRLGAQRHAQKYLRVICRTRSLAMGSEGSMPPSDGIPLQDRSRWSRKCPRVPRERSPSLGYVSNVPLVIPRSASEATGPRDLRRLLKPFGGPAFEPLISKEARSLVPSRGRILFGGELPLKGGRPLSEGDHVFSLPYASRLSTFQAPDGGYPPSFRLIVGGMQLRGSWYLSAIVRLQGFSSASPAVPPRRRSPETVTTSSWVGRSKPGCDLGPTLSFKDVHHPRWGGCRAEPELYLPRGFAGHPLLRRSRERALAGPAGGPDFDNVGLVDGGRRHPQRVELVGLAPGGAFCRKAAAAPCARGDHPRCRALLGWRSCSGVVLPLHRDGAFTRRPAEAAREVPVADGITATIRASGLRLLKLSQRDPLAALRRAEARAEASGQAGALGRWLAEAPGSGDPWTASPFEARSDLAEGVVDAEGVTAPFQRQDPSL

SEQ ID NO: 67030 - protein, 85 aa, Zea mays
  Coding DNA Sequence Number=SeqID_23655
TRNPTLSPLLHAVRRYNGERNVEVGVIDYVLWMEDEDKVFVRVDEVGTELAANLRALAANLRALPEPAVIIVIAMGVFLFFTNIC

SEQ ID NO: 67031 - protein, 124 aa, Zea mays
  Coding DNA Sequence Number=SeqID_23656
  Gene Ontology: Mol. function=ER retention sequence binding; Cellular component=integral to membrane; Biological process=protein retention in ER
  Homolog annotation: Hit_ID=Q69SG3; Match level="QueryCoverage=84%, HitCoverage=94%, E-value=5e-33, Identity=89%"; Hit description=ER lumen protein-retaining receptor-like
MRGTKRPLGVVTSWVRRQPPKVKAFLAVVTGMAALVFIRFIVHDHDNLFVAAEAAHALGIGVLIYKLTKEKTCAALGYGLWPSMVLLSEIVQTFILADFCYYYVKRRDTLNNSYALVPNLGAFF

SEQ ID NO: 67032 - protein, 62 aa, Zea mays
  Coding DNA Sequence Number=SeqID_23657
  Subcellular localization annotation: CTP_CleavageSite=25; ConfidenceScore=5.14e-01
MVCNSRTTGTVPVLLGGGAVGRRVRNMKSATPDAASRSFGVESISEAFTDVLQQKTTRQRKS

SEQ ID NO: 67033 - protein, 437 aa, Zea mays
  Coding DNA Sequence Number=SeqID_23658
  Gene Ontology: Mol. function=hydrolase activity, hydrolyzing O -glycosyl compounds; Cellular component=integral to membrane; Biological process=cell wall organization and biogenesis
  Homolog annotation: Hit_ID=Q5Z9P8; Match level="QueryCoverage=91%, HitCoverage=88%, E-value=1e-142, Identity=56%"; Hit description =Endoglucanase 18
  Pfam annotation: Domain name=Glyco_hydro_9; Domain location=25-424; Score=529.9; E_value=2.9e-156; Accession=PF00759.10; Description =Glycosyl hydrolase family 9
MKRKPGGRHIKPLPVPGPPGAIDSKYGDALGVALQFFQVQKAGKLENNQIPWRGDSALTDGKEAGLDLSKGMYDAGDHMKFTFPMAFTATVLSWSVLEYGDQMSAAKQLDPALDALKWITDFLIAAHPSDNVLYIQVGDPDLDHNCWERPETMTEKRPLTQINKKTPGSDVAAEAAAAMAAASMVFKSRDTTYSDVLLQHAQKLFTFADTYRGLSSESYPKLQDFYNSTSYVDELLWAASWLYHATGDQTYLSYVTVQNGKSYADWGRPTWFSWDDKNPGTQIRLKPLPAELEFDISVDYMLSTRTAAVQCSGKYYSPTDIRNFAASQANYILGDNPMKLSYLVGYGSSYPKQVHHRGASIPADAKTGCKGFEYLHSPSPNPNVATGALVGGPFQNDTFVDSRDNAVQTESSTYNSGTLVGLLSGLVTTSSVVQSFT

SEQ ID NO: 67034 - protein, 86 aa, Zea mays
  Coding DNA Sequence Number=SeqID_23659
MGLVGWLAGRGWLVRCGCGCGAVGVALNAQQTASDWLATSSILVVAVATRKFALQRSAAPRPLEMGSGISDHHLPQTVIYGHDFAR

SEQ ID NO: 67035 - protein, 480 aa, Zea mays
  Coding DNA Sequence Number=SeqID_23660
  Homolog annotation: Hit_ID=A3C0Y5; Match level="QueryCoverage=57%, HitCoverage=60%, E-value=1e-113, Identity=71%"; Hit description =Putative uncharacterized protein
  Pfam annotation: Domain name=Seipin; Domain location=238-435; Score =311.0; E_value=2.2e-90; Accession=PF06775.5; Description=Putative adipose-regulatory protein (
  Subcellular localization annotation: CTP_CleavageSite=72; ConfidenceScore=5.49e-01
MDADDPSAATASSSDETFFDALDSLPSPSPSPSPSPSPSPSPSHISSSTLHRRPRRAKSVKQPDSILSSPPSASAATSTVTAVEDEHLKPDSSEATSATSRTDPAPKEEEEQEEEEEEDIKATDVDAVVEVEAPAPTATPSPAPSILEYLAVLVVKAVVFQVSALVSCLAFPVRLLQWWFLFVTDPLGLARRARAWVLGMAGDAAGTLIARLGGGDGMGKVARRIVWGSLWAAYVCAVLCALLIMAFLGGGLLVGRIVEEPVQVTETLNFDYTKPSPMAFVPVPRLVPPNQRMQLEVLLTLPESDYNRRLGVFQVRAEFLSADGKVISTSSQPCMLKFKSVHMHFIETFLQSVSLLSGYSSESQVIRLKMRGITQGLEPTTAVRIILEQRAEFGRGAGIPEIYVASLKLEGELPLVRRLLWNWRWTFFVWSSTGLFAIELLFGLEKERCGARQVEQAGDVLGEGEEAERGVVGDGYDRDV

SEQ ID NO: 67036 - protein, 71 aa, Zea mays
  Coding DNA Sequence Number=SeqID_23661
MAQCVVFYAVDLDLAYREGSHRASGKRDHRACLGVGRTPKKSLVDVEPKREGGVKTHTLMKEGRETLSKAI

SEQ ID NO: 67037 - protein, 128 aa, Zea mays
  Coding DNA Sequence Number=SeqID_23662
MERGIKGVKTAPLKSKETDAGLRYLGCSDAVMMLGRWQGVRQPVSGAGAARRGWLGAGARLAAGVRSVGPSAGEGERLQGGRCRGPGAGGTARCDARDAKSQPGDGAIALQTATTASVPRQSVSGRTR

SEQ ID NO: 67038 - protein, 576 aa, Zea mays
  Coding DNA Sequence Number=SeqID_23663
  Gene Ontology: Mol. function=triose-phosphate isomerase activity; Cellular component=chloroplast; Biological process=reductive pentose- phosphate cycle
  Homolog annotation: Hit_ID=A2Z3G7; Match level="QueryCoverage=43%, HitCoverage=91%, E-value=1e-103, Identity=70%"; Hit description =Triosephosphate isomerase
  Pfam annotation: Domain name=TIM; Domain location=379-566; Score =268.3; E_value=1.6e-77; Accession=PF00121.9; Description =Triosephosphate isomerase
MYLDTLVDFVAARPGMHLVSDEVYASTALADPGFVSVLEVAAAAAREDANAGSLAERVHVVYGVVQGPGPAGVPRHLLASLLGDGGFMRRYAAENARRIGARRARLAAGLAAANVACLEGSVGLFCWADMRRLVGLNVSPGSSCHCSEPGWFRVCFANVSAKTLDVALQRLADFAEAKATRGPARRLLAAAGQERTGNIGSRWINGRRVVLHGHRYPWADKGDGSAIQKGRGRGPAHGSLSLACPAAPSPFPPCPVVAAARIIFPPCERGRTATPSPRPRRLLLSSSPPPTAAARARLRMAAAPSSLVSSHLSRLADLRRAAAPATPTVPQQLRVGFSRRRAQRVVAMAGSGQVLRRRQLEVRKCMFCFFSFTRLGDANGTKDSVSKLVSELNAATLETDVEQLVDIGCQWVILGHSERRHIIGENDEFIGKKAAYALSQNVKVIACIGELLEEREAGKTFEVCFEQMKAFADSISNWADVVIAYEPVWAIGTGKVATPEQAQEVHAAVRDWLTTNISPDVASSTRIIYGGSVNAANCAELAKKEDIDGFLVGGASLKAPDFATIINSVTAKKVAA

SEQ ID NO: 67039 - protein, 300 aa, Zea mays
  Coding DNA Sequence Number=SeqID_23664
  Gene Ontology: Mol. function=translation initiation factor activity; Cellular component=transcription factor complex; Biological process =regulation of transcription, DNA-dependent
  Homolog annotation: Hit_ID=Q8W0W3; Match level="QueryCoverage=65%, HitCoverage=59%, E-value=7e-95, Identity=92%"; Hit description =Transcription initiation factor IIB
  Pfam annotation: Domain name=TFIIB; Domain location=192-269; Score =29.0; E_value=1.4e-05; Accession=PF00382.10; Description =Transcription factor TFIIB repeat
  Pfam annotation: Domain name=TFIIB; Domain location=98-162; Score =55.1; E_value=2.5e-13; Accession=PF00382.10; Description =Transcription factor TFIIB repeat
  Pfam module annotation: Pfam domain module=TFIIB::TFIIB; Domain location=192-269::98-162
MAKQQVTDCLSFRITKVIKALRRDMASSSRGTDEEEEQRKPPCIGWSRQQRKAPGHWMEQLAAARRMEEVGRRMEEARAGNEPSQARLGSVQLGGGKARAWLGSLDRANEIYKKVEDLKSIRGRNQDAILAACLYIACRQEDRPRTVKEICSVANGATKKEIGRAKEFIVKQLEVEMGQSMEMGTIHAGNFLRRFCSTLGMNNQAVRAAQDAVKHSEELDIRRSPISIAAAVIYMITQLSEDKKPLKGIDSGESVADISLATGVAEGTIRNSYKDLYPYASRLIPNTYAKEEDLKNLCTP

SEQ ID NO: 67040 - protein, 116 aa, Zea mays
  Coding DNA Sequence Number=SeqID_23665
MAPRMLHDNGGSQPSYGSKETKEVHIFQHPLSDKVPKTVPSCAVSLIEPPVASVKRIRTDKRTGDTSAIALAVHFSTCCRGLARVGGCARDDSLHGNHWNRVVGGHGCDDGSRYIV

SEQ ID NO: 67041 - protein, 187 aa, Zea mays
  Coding DNA Sequence Number=SeqID_23666
  Homolog annotation: Hit_ID=Q6J9V9; Match level="QueryCoverage=34%, HitCoverage=33%, E-value=6e-07, Identity=44%"; Hit description =Putative uncharacterized protein
  Subcellular localization annotation: CTP_CleavageSite=87; ConfidenceScore=5.68e-01
MQAAYNRAKWAHFSDSQYARHGGPGPRVMQPTRRMLRACNCTATCATTTPPRLRNQCRDSRRPSARPSSASLARRRSVRRFAFAIMTASKKGPGKGDTLKGILPREGTRLRASLLIRGSKAGPSEGFDSRLRSRGPYTHYWSEVRRPAPRKGSTAASGYSGSAPTTDQGFECWPPKGSQSPQTQSEG

SEQ ID NO: 67042 - protein, 340 aa, Zea mays
  Coding DNA Sequence Number=SeqID_23667
  Homolog annotation: Hit_ID=Q8SA97; Match level="QueryCoverage=26%, HitCoverage=20%, E-value=8e-08, Identity=45%"; Hit description =Ornithine carbamoyltransferase
MNFGKGQGLAKGKRKGKGNARILASKEKKKFNCKIRGVTPRPGDVGAPPKLGSNLPSVAEAESEPLGRARRKSFGRGQGGVRALGSGGAEFAVFRVLARVRALGSGGAEFAVFRVLARVRALGSGGAEFAVFRVLARVRALGSGGAEFAVFRVLARVRALGSGGAEFAVFRVLARVRALGSGGAEFPMAPLARPDCLSDSLFRVAPQSEWRRRRCPSIRPMSSRTRGQDGAGTSRGREATPNPPPVPPILAEAIAALVNATADNTRFLREMVGQQMQQQGGRVYPQGPRKTSYLDFSEMRPPLFVKDEYPLEADEWIWVIEQKFGLLRCTETQKPLFAAQ

SEQ ID NO: 67043 - protein, 167 aa, Zea mays
  Coding DNA Sequence Number=SeqID_23668
  Subcellular localization annotation: CTP_CleavageSite=46; ConfidenceScore=5.03e-01
MAPWLLEAPSWKGAGVGGGRRRRGRRATGANRGVAPWRKKPLLPTRCFMEWGAREEQAGWSTRSLDSMAVGRAPSNRDCWWPQSKRGRWERESRGATPWTPVSSLLELGPEEMPRPGWSRGGVGEEGPLSQPLARRNREGVAPWLALLPALCLLRVGEEARERRNGG

SEQ ID NO: 67044 - protein, 219 aa, Zea mays
  Coding DNA Sequence Number=SeqID_23669
MAMMGSTSEKMYLCQVKKQQTFVASVPRWCPKKEIKTEAAGGRVKRSWERFCHTPGLQTLKAIGGCSLGHLIIFYPSLIPRAIYDTPSTVGGTRRAPSTLHVNGDMRMKYGAERSTIGIMKSLHEVRPLELSRQWLQLVAQPGDDRDSTSATPLPGTGTTVTDRKTRVEYLRSLRVSGPFNGPQTSRSPTSTNTSLSRTREAGWPSIQPLPRPLGQLKM

SEQ ID NO: 67045 - protein, 478 aa, Zea mays
  Coding DNA Sequence Number=SeqID_23670
  Gene Ontology: Mol. function=metal ion binding; Cellular component =nucleus; Biological process=regulation of transcription, DNA -dependent
  Homolog annotation: Hit_ID=Q49I54; Match level="QueryCoverage=100%, HitCoverage=100%, E-value=1e-151, Identity=62%"; Hit description =Teosinte glume architecture 1
  Pfam annotation: Domain name=SBP; Domain location=104-228; Score =108.1; E_value=2.7e-29; Accession=PF03110.5; Description=SBP domain
MDWDLNAAGAWDLAELERDHAAAAPSSGGHAANAAAAGTGTESRPPAPGAAGAPAECSVDLKLGGMGECEPGAARREREAAAGAAKRPRPAGPGGQQQQQQCPSCAVDGCRADLGKCRDYHRRHKVCEAHSKTPVVVVAGREMRFCQQCSRCRVVSCTATVSLQNVFCSSMKRLCRLINYPNSKNPVVLIDYAIIHWFHLLAEFDADKRSCRKRLDGHNRRRRKPQPDTMASASFIASQQGTRFSPFAHPRLEASWPPGVMKTEESPYHITHQIPLGSSSSSRQQHFVALGAATPAYAKEGRRFPFLQEGEISFATGVVLEPPAAAPACQPLLRTGAPSESSGAGGSKMFSDQGLARVLDSDCALSLLSAPANSSGIDVSRMVRPTEHVPMAQQPVVPGLQFGSASWFPRPQASTGGSFVPSCPAAVEGEQQLNAVLGPNDSEVSMNYGGMFHVGGGSGGGEGSSDGGTSSSMPFSWQ

SEQ ID NO: 67046 - protein, 39 aa, Zea mays
  Coding DNA Sequence Number=SeqID_23671
MTPYETNENGPISPSEGKWIDIWTSGPTTGSRELLQFDF

SEQ ID NO: 67047 - protein, 74 aa, Zea mays
  Coding DNA Sequence Number=SeqID_23672
MAPTPWGKDTHRPQWGILAAATGGPCAILCHRRELERQTVLGDRRLLLRVLDDSSGKAVNLGRGNSSPVSDLSP

SEQ ID NO: 67048 - protein, 37 aa, Zea mays; identical to SEQ ID NO: 44099
  Coding DNA Sequence Number=SeqID_23673

SEQ ID NO: 67049 - protein, 59 aa, Zea mays
  Coding DNA Sequence Number=SeqID_23674
MRRQYQKVALRAVHRGIQQGELEADTFWLKVHHTLVTTKSCLDDSIKRDRECHGHTNGW

SEQ ID NO: 67050 - protein, 150 aa, Zea mays
  Coding DNA Sequence Number=SeqID_23675
MVDCDVEWVPKEVIRFGNLNFVLDGNEKRVRALKVRPLPPRSLNATARARGSPCVILTPRAIARFVSLDFVINNDDNVYNEERLSRHDGSGYSPHMFPPSLCHAPGVITALAQGHIPTTDDLEFIMTVEDVGDLIFDALRSDQARTLAPR

SEQ ID NO: 67051 - protein, 182 aa, Zea mays
  Coding DNA Sequence Number=SeqID_23676
MACTLRWSPPLGRLPGVEVVASAGEPLGAEVAAAADEPSVQRWSPPLTSIPKKELAMAPRRPTVWDQAERLHGSGPPQETSFRVRDQAKRPHRLRTSPWNGLPFFRTGPQAIGPSFFRREVLNCKPGYSIRMPSYQQAGLMRADLTGLAYTKRYSFSHGKIVTLGSAYSRHLEGSFPAGGEL

SEQ ID NO: 67052 - protein, 200 aa, Zea mays
  Coding DNA Sequence Number=SeqID_23677
MPVPAANWSMTSALDGFTGSRAGCLGTAALILKFHLHCLLRQPLGELAPKEDDSWAQAPVPGTRLSVSAVAKRGWTAGCGEDEGAHYRGAGGGMLFVRRFAFLALEDQRASCLTRGTGPPCHRMDTPTEWVLDMVYHLLGWDAPAPSTPDVHQPRGGGERAVPRLCLPHGLVTRLFLQHSEEKDDHQPCKGGELRLRGPG

SEQ ID NO: 67053 - protein, 196 aa, Zea mays
  Coding DNA Sequence Number=SeqID_23678
  Subcellular localization annotation: CTP_CleavageSite=40; ConfidenceScore=5.46e-01
MRQIGGCQARSSLRASRAFRDAARSKIAPHVSPSLLARRRASLARRPWKCRLLGTSGTSPFARTRAPLSLALWIGEPPPPTWESPPLLRIEEPPPPRVEVMELRPPAGGPSSRTLWDRWEQPSSQMLEEGPSGGDMWETNMRGGNSEGKRDNPDDEDMWEPEPPEDPLLLGQETHAATGTLFSSSDDSGGHYSGQA

SEQ ID NO: 67054 - protein, 116 aa, Zea mays
  Coding DNA Sequence Number=SeqID_23679
  Gene Ontology: Cellular component=membrane
  Homolog annotation: Hit_ID=Q7XBT3; Match level="QueryCoverage=35%, HitCoverage=5%, E-value=5e-12, Identity=80%"; Hit description=Early -responsive to dehydration protein, putative, expressed
MRCSEVGVMALRAGSHAVALCLGVVHPMYSSVGESTNHMLHLLSASIELTVWFVSHPHLIGHKCHVGKAHMSREVRIPKTIGVAIPMKATFFMTYMMVDGWADIANEIIQVKDMVI

SEQ ID NO: 67055 - protein, 48 aa, Zea mays
  Coding DNA Sequence Number=SeqID_23680
MTMDFAMTTVLPPYEASHMESVSWFVSSGCRAAPGAVVFFGGMMKVDA

SEQ ID NO: 67056 - protein, 289 aa, Zea mays
  Coding DNA Sequence Number=SeqID_23681
  Gene Ontology: Mol. function=metal ion binding; Cellular component =integral to membrane; Biological process=positive regulation of I -kappaB kinase/NF-kappaB cascade
  Homolog annotation: Hit_ID=Q6H885; Match level="QueryCoverage=88%, HitCoverage=40%, E-value=1e-122, Identity=83%"; Hit description =Putative ankyrin repeat-containing protein
  Pfam annotation: Domain name=Ank; Domain location=104-136; Score =37.5; E_value=4.8e-08; Accession=PF00023.21; Description=Ankyrin repeat
  Pfam annotation: Domain name=Ank; Domain location=137-170; Score=0.1; E_value=32; Accession=PF00023.21; Description=Ankyrin repeat
  Pfam annotation: Domain name=Ank; Domain location=171-203; Score =28.8; E_value=2e-05; Accession=PF00023.21; Description=Ankyrin repeat
  Pfam annotation: Domain name=Ank; Domain location=204-238; Score =33.4; E_value=8.3e-07; Accession=PF00023.21; Description=Ankyrin repeat
  Pfam annotation: Domain name=Ank; Domain location=71-103; Score=29.5; E_value=1.2e-05; Accession=PF00023.21; Description=Ankyrin repeat
  Pfam module annotation: Pfam domain module=Ank::Ank::Ank::Ank::Ank; Domain location=104-136::137-170::171-203::204-238::71-103
MASSEIEVVEDATPAATSGGAGRAVAEVARQEGEGEALKDDVYTGAAYGDLEKLHRLVEREGRSVTVQDALGYHALQWAALNNRVATAQYILEHGANVNAIDHTGQTALHWSAVRGHVQVAELLLKEGAKVDATDLYGYQTTHVAAQYGQTTFLCHIVAKWNADHDVPDNDGRSPLHWAAYKGFADTMRLLLFLGAYSTRQDKEGCTPLHWAAIRGNLESCTVLVQAGKKEDLMVQDNTGLTPAQLAADKNHRQVAFFLQIFHVFFLGNYFISHIKKNQNQYILHGKGD

SEQ ID NO: 67057 - protein, 247 aa, Zea mays
  Coding DNA Sequence Number=SeqID_23682
  Gene Ontology: Mol. function=metal ion binding; Cellular component =integral to membrane
  Homolog annotation: Hit_ID=A2X1P6; Match level="QueryCoverage=69%, HitCoverage=24%, E-value=1e-48, Identity=60%"; Hit description =Putative uncharacterized protein
MREDMEAICVAKSPSWRWTSARAVVIAANSDGWAEAAVSASSDPGISDTGLVELPRLRRLYEWLMVGGLEEEVKDPGYINKNIRDSQNQRDDEPLLKMGLDSPELLDGNWSRLCITCKWPHLPSINRLSGLYAQNIALHATAVLSNSIITALGYQIALESLSYSGLKLQRNKWDFFMFLILEVSAMIITGVMAIIRSVGDPASPASFGGWLGYTAINHSWVVSFVIMDLLLFLGVITLTVIQASQGD

SEQ ID NO: 67058 - protein, 204 aa, Zea mays
  Coding DNA Sequence Number=SeqID_23683
MPPFSRPPPQWFDGSVTLHSARVLTAEPQIRRELPLLSSTCGLLPPFPISASTQGKPLKDFPINSDYSSEDPRSTSAKMDSADSIADKAIGRMQEISDKIFSVARETIRPGRGLTSFDATKLRVALEEIACMLEQDSLVLQEHLDIVNNVNIPVDSSYEPSTLSSPPPSDDDLTLDWDFAEHFQNFWGVEYDSDQMPSFSDNDV

SEQ ID NO: 67059 - protein, 183 aa, Zea mays
  Coding DNA Sequence Number=SeqID_23684
  Subcellular localization annotation: CTP_CleavageSite=25; ConfidenceScore=5.53e-01
MEAAPSAAFSSRLGLNLNRFRPDFRSVAASSGDRAPLNVKRRLNLESLCRPRHQSAVSSSPRPATPPCSSSTYRTAQSSGFALETSLRGRKVLPRIRVTPRAGQSGNSSPVLAPNLSPHPVVACFRHSSACSVVSVGEISRQWAILAVAGKLAAAEALCAAAFCLVAALLAGDDESRAVRSES

SEQ ID NO: 67060 - protein, 216 aa, Zea mays
  Coding DNA Sequence Number=SeqID_23685
  Gene Ontology: Mol. function=enzyme activator activity; Cellular component=centrosome; Biological process=positive regulation of exit from mitosis
  Homolog annotation: Hit_ID=Q6V5L1; Match level="QueryCoverage=22%, HitCoverage=10%, E-value=2e-17, Identity=93%"; Hit description=Cell cycle switch protein CCS52a
  Pfam annotation: Domain name=WD40; Domain location=1-41; Score=21.1; E_value=0.0042; Accession=PF00400.23; Description=WD domain, G-beta repeat
MSKLATLTGHTYRVIVLYLAISPDGQTIVTGAGDETLRFWNVVPSPKSQPGCQCSYVYLVVSHEQKYIIVGVSTPGGRMRLQLGVTSVREGERESLSVSPFSRAATFSYEGPRPSFYRCKEKAQVESKPWGRARRRPSSGVEVESEPWGRARRSFLWRLRLDSAAVSLTLAGGTAVGAGQAALFSCQVILALNAPAIWSVGMAIRPRLFHCEACPS

SEQ ID NO: 67061 - protein, 148 aa, Zea mays
  Coding DNA Sequence Number=SeqID_23686
MARLGHAVANGEGTSAVSSFIHDGEQGEGYRGCGSQLDGGEDLLPREGTLSSWACGRRAASLIEGEGFVVILHGEPLEVPSFNVVLEGDVKVLYFPPPAKIQTGTTDKLMLFSGPYRADNGKDTSRAQNGEEFQERPRKGARKWQFEE

SEQ ID NO: 67062 - protein, 206 aa, Zea mays
  Coding DNA Sequence Number=SeqID_23687
MGRGRRGRGWPLRANGKRMRAPSPPSEDFGDSEYSEEASSEYDRSPAPASPVVSSKDSDDSMGLSTAVRAYWRSIERAGLGGSDDSEEVSSEEVNSSDSSKEWSGGDGDGEGGSGDDDDEGGGGGEGDNDDKGNSDDDGGKGGGDGEGNDYSSKDNGDDSKGNDDGCKGDGGKGDDNKGDGGKGEGSKGDGGKGDGDKASGIMPLV

SEQ ID NO: 67063 - protein, 142 aa, Zea mays
  Coding DNA Sequence Number=SeqID_23688
MEAEDSTTVARFATRVTGDDDALECPYVAYSFIMVDVGLSDGSYAREPYQAAHQLGSDSTSTPEDGLRLARPQGSDSTSTPEDGLRLARPQGSDSTSTSEDGLRLARPPGLGLNLDLGGVTASPDLGLRPTMLQGGTSLPYP

SEQ ID NO: 67064 - protein, 100 aa, Zea mays
  Coding DNA Sequence Number=SeqID_23689
  Gene Ontology: Mol. function=oxidoreductase activity, acting on single donors with incorporation of molecular oxygen, incorporation of two atoms of oxygen; Cellular component=cytoplasm; Biological process=fatty acid biosynthetic process
  Homolog annotation: Hit_ID=A1XCI4; Match level="QueryCoverage=67%, HitCoverage=7%, E-value=6e-29, Identity=92%"; Hit description =Lipoxygenase
MAPEAGLGCCQPHPGGWHSSRSRAGDAVFLSEDKFAWLRDDEFARRTVARINPVSITRLTIFPPVSKMDPAIYDPPESSITEAHITGQLNGLTVQQVPSV

SEQ ID NO: 67065 - protein, 244 aa, Zea mays
  Coding DNA Sequence Number=SeqID_23690
  Homolog annotation: Hit_ID=Q7XBE0; Match level="QueryCoverage=27%, HitCoverage=9%, E-value=3e-09, Identity=44%"; Hit description =Putative gypsy-type retrotransposon
GSDIPMQALSALVSLKGLSISDFDQALEEIIPENLLSEPPEVDNPVICSEVSDDVLLPCNPVGQEATWTVSRASTTLEGGLAREGAPALNAADSSDPTPMGSLSVASMDVHAGSPPVQSEEAAVTHLSATLIGLDVLDSVSAQLKSCGAPVPDQVSSLMQWNPLWLDDALILKRRGKRALIASHDNLDRLYCDASTSLTILERSHRFTMSDLDHHRDELRASQYEEMETARLHIKALEDDRVIM

SEQ ID NO: 67066 - protein, 101 aa, Zea mays
  Coding DNA Sequence Number=SeqID_23691
MARLGHAVANGEGTSAVSSFIHDGEQGEGYRGCGSQLDGGEDLLPRESPDSQDFRAKLLLNFNGNTRQALAAYCSAINHLTPLLLWNGHKKNSKLWHELGS

SEQ ID NO: 67067 - protein, 113 aa, Zea mays
  Coding DNA Sequence Number=SeqID_23692
MGSARFAFDLLLLEERNFVEHSGERALTGLAEGADFDNAGPIGRKRRQLQHAWRWLSWPWHSFRCHLPPLSGVRLSARRTGGCCVACTGGPPKTSRAARAAFVFLGCPALAPA

SEQ ID NO: 67068 - protein, 530 aa, Zea mays
  Coding DNA Sequence Number=SeqID_23693
  Subcellular localization annotation: CTP_CleavageSite=78; ConfidenceScore=5.35e-01
MSSRSLMHRVFPPSEPPDGGCPQSFRLVVGGTQLRGSCYLSAIVRLQGFSPVSPAASPRRWSPETVTTRPWVGRSKLSCDLGPTLSFKDVHHPRWGGGRAEPELYLPRGFVGRPLLQRSRERALTSPTRGADFDNAGLVDGGRRQPQHVGLAGWAPGAPSCREGGCRAVRSGGPPKMSRAARAAFVFWGGPAFAPVRRLHAEVGAPLVREDLSGDLPGGLTAPVVGAEVEAAREVPVADGITATIRTSGLPALCTCPRPSSIGVGEGKVAAASALRPSLLQLGHPERGPLSLLPERATASRPSVFCCSAGPPIEWGCSYLRRWNRSSVCNGTLNADSPVGCLNRFTKRESPRAKVTRTPRPLFDEPKPGVAVSARTEAELARKEDLVGWSLAGLSVSGINAGVDLPRPRAGLMSSGDSWPRPRGDQPSRLLGPDSRRRPWRRWPVRGDDVVLQSGDPRTVSPSEARSDLAEGVVDAEDLALAVGQLVRSGIQNFGDDERPFPGRRTAGTVPSVVRTCPEPLPAGPASLLD

SEQ ID NO: 67069 - protein, 326 aa, Zea mays
  Coding DNA Sequence Number=SeqID_23694
  Gene Ontology: Cellular component=plastid chromosome; Biological process=positive regulation of transcription, DNA-dependent
  Homolog annotation: Hit_ID=Q2RBI6; Match level="QueryCoverage=69%, HitCoverage=71%, E-value=2e-88, Identity=70%"; Hit description =Expressed protein
  Subcellular localization annotation: CTP_CleavageSite=61; ConfidenceScore=5.56e-01
MATTTTTTPLIVSFSRSCSCPYPHRHFPGKPKLPAPTSCSLSLRLLAAPLAVLPRRPRDVSAAYGDGDMDDDFGDFDPDDADGVGEDDDVDNEQDYDVDYDRLLAPVVKPPSPPGASASPGEEGDIAMVAADSFVSTRDSASDTVVDYAVDEDEFHKIRLLHCDFLIRKVPDPDDDVFDFREMYVTPPDTDIYSIPRVLAPMPQKYARCTKKNFGRYHVSEPPVEHLRDPLYKTEREIMKEIYVIDSRTRSITRAKVMVSVPEGKKRDRRNDLLLIRDGGESFRIIDKTKRDDASTIIQREEWAKSRQDVEKHFRKLRDFDYSNWF

SEQ ID NO: 67070 - protein, 246 aa, Zea mays
  Coding DNA Sequence Number=SeqID_23695
MWRRSGVRGQFIAYRPESDENRGHLIAQLFVSRQGFPSWLYNDTGGDFRNYPLNRPFRADLMGLDVLYPAESPKSMLTPFSGANHSTRTSGGCSLHRGGRSVARGRTFLWDIRHVIELAYKHVPIVMYKLDECIFLFIGQTDPNGHYLEDVEEVERDLLSMHNWSNVEVAWLRLELMIAVLHSSENPRLILLVSSVGRIEVAADASFQGIVKPSFACLSLTYVGRATEGPTVIAVYVAPRKHSAAP

SEQ ID NO: 67071 - protein, 92 aa, Zea mays
  Coding DNA Sequence Number=SeqID_23696
  Gene Ontology: Mol. function=peptidase activity
  Homolog annotation: Hit_ID=Q654G4; Match level="QueryCoverage=53%, HitCoverage=9%, E-value=9e-12, Identity=70%"; Hit description =Putative potyviral helper component protease-interacting protein 2
MEEPMKRVMKTPLPAQEICGVLAFLTLLGTMQVKTVRESMNRMIEAWREIPDLDEEVCSFDVPPSSQSTSSLTGDVSLFKVYDWFGLHTLSA

SEQ ID NO: 67072 - protein, 149 aa, Zea mays
  Coding DNA Sequence Number=SeqID_23697
MGKSNKRKREPTPPSEDFGDSEYSEEEFSSGSEGSPAPVSPPASSDDSDDSQGIAAEVWTYIQAVERSGLEGLDESEYSSDEEDSDGGGEDEDDDDDDDGGDGDGNGSGRGSGDGGRDGDGGSSRGSTKGGSSKGSTKGGGGGRGRASG

SEQ ID NO: 67073 - protein, 150 aa, Zea mays
  Coding DNA Sequence Number=SeqID_23698
MRLGVPFIAPRQLGAVESIPGRQFLPSIAWRTGQSGAPPDPVRCGFFPYLAKPTVADSEPLAHWTLSGAHRTVRCPLLAVGSATCPAQIARSTVGPADRWLTGQSGTRRTVRGILAVRRRRIPESGHFTPSQLGAPDTVRCTTGQSGVPD

SEQ ID NO: 67074 - protein, 217 aa, Zea mays
  Coding DNA Sequence Number=SeqID_23699
MYHSGLGGLLDVQPDTVALARFLGAYWRDLFNSCPECSRHHHLLDHMALGYFPYVELATAPTKCSMLVLNCGAYSVPNPSQASPVGFIQSTPSSPAPEIQDTLARGHGGVSDLLRNGAAVGAHMVLRQLDPLHTVTEIIATGASPNSSPLAPNTASTPPSTEAADLRCPTSPPSARPPAGPSLPTTFCWSQLKQPIRKWHATMEATAAVQRLANLEV

SEQ ID NO: 67075 - protein, 136 aa, Zea mays
  Coding DNA Sequence Number=SeqID_23700
MDALNFEYLDYERLDKGAKGVKRKRVVSILSQQAARLVKEDEKVLKKTKTSPELKATISKRRRLDTAPSAEPKVDESREEAPLTPSAAEVAEILKHKKQQNRSYTKFHLKQRSDVVYRKSAVGEFGWPQNGVNKLL

SEQ ID NO: 67076 - protein, 194 aa, Zea mays
  Coding DNA Sequence Number=SeqID_23701
MTAGANCLTGLLEGQMNSGINMRNVGRRTIFLGSVDASSEVANANMLEIVTPQQSAFSLLPHATPPSQPGVDPGRGAGPKEKLQLLRSVAAHGQTLKTNPSHASSRTPVLARPPSQALCAIAHSRGHGLRLCGSGCEPAACGSPRSPGACQATRRAPSRLRLTAHQSPRPAPAQPRVVRPSCVSPSLVVHGLEL

SEQ ID NO: 67077 - protein, 175 aa, Zea mays
  Coding DNA Sequence Number=SeqID_23702
MALSFMVEPAAAATSEEADATDSPSKERLKTQKEDDKRTEVLISVSSKRTEDQRRDYQTCSSPFEPLRDNSTVEQGQVTGGQLHVGADAAGRSKQLRATSQRQMRVVALSTSKQMRTADGDAQGNSNVEGYSSRAGFQLGQNIVYLPWWADPNGKEHIHASSAGAQNREPSQTQP

SEQ ID NO: 67078 - protein, 225 aa, Zea mays
  Coding DNA Sequence Number=SeqID_23703
  Gene Ontology: Mol. function=heat shock protein binding
  Homolog annotation: Hit_ID=A2WSY6; Match level="QueryCoverage=47%, HitCoverage=10%, E-value=7e-10, Identity=42%"; Hit description =Putative uncharacterized protein
MAMNWSCRDRDVGHGDAGKDICWNRERAGVAVHAPRLQAEAESLRHSGCQCVCPWSADVSDGRHGSATVYAVQGEEAPPERQRRRERWGVGGVGGGGAAAARAAYGDVFGGPPRFAAPFGAAPLEYAEVFGGVAATCSIPYLDLPPAPSLAAAEGFFACRGKGDYGEIFGRFDFADFALPYEDLFGEPQPEPVPDAAGETDPEIASSSGSSTRVVLASEKLFMQH

SEQ ID NO: 67079 - protein, 134 aa, Zea mays
  Coding DNA Sequence Number=SeqID_23704
MKRGAKSRGWGGRGLESVGLVSSRRRRAIRNTLAGETAVGLGVLALDGVNNRLLLLKSTSGVQGPLASHRNGDPDGDEDGCGVIRRSGGTACGTVVAAAEEERGEAGGSTERGDGGALAEEDVEREAREVPDGG

SEQ ID NO: 67080 - protein, 95 aa, Zea mays
  Coding DNA Sequence Number=SeqID_23705
MEWVFLKRKIPGDISVEYLGNISGNNLRGITGEISGRYFWKEIEGDHWGNICREPYWNTTPLKKNEGRTLESWGFELLEVPHNKGVTGPSSAIAA

SEQ ID NO: 67081 - protein, 57 aa, Zea mays
  Coding DNA Sequence Number=SeqID_23706
MAVVGALQRGVGGGSALQRGHGRRLFQASRVSFPVSSWGSGQSEEKLHYPMHAEDWV

SEQ ID NO: 67082 - protein, 111 aa, Zea mays
  Coding DNA Sequence Number=SeqID_23707
  Subcellular localization annotation: CTP_CleavageSite=58; ConfidenceScore=5.22e-01
MALFSQSLLGLGAPDSVRCTRLALANRLLSGLRRRCTAIIHRTVRWCTGLSSGAPDCPGALKDGGKKSFEVPSAWEKVKETRNPKPGVKKKTCKVNVVRVKKSYGASRITT

SEQ ID NO: 67083 - protein, 36 aa, Zea mays
  Coding DNA Sequence Number=SeqID_23708
MKVVLWALGSGATRGLDGGGAERESEMRDKRIRVRE

SEQ ID NO: 67084 - protein, 517 aa, Zea mays
  Coding DNA Sequence Number=SeqID_23709
  Gene Ontology: Mol. function=cysteine-type peptidase activity; Biological process=proteolysis
  Homolog annotation: Hit_ID=Q109R5; Match level="QueryCoverage=59%, HitCoverage=29%, E-value=2e-29, Identity=29%"; Hit description=Ulp1 protease family, C-terminal catalytic domain containing protein
  Pfam annotation: Domain name=Peptidase_C48; Domain location=80-288; Score=27.8; E_value=1.2e-06; Accession=PF02902.10; Description=Ulp1 protease family, C-terminal catalytic domain
MESLFVGLSHNKPKTSVATAIVREVLSHDCLLLDYICTQGDLALIDFIKEIPCEPTVEVVLIDDAFVERKWMECLFQPNTYLGDEVIDYYINLIKAQKHLKCRSGGRVHIENAFQFNFLKRDGDVEIKTEELYAIKDMTHICSAERRVLLYLDHDMVFILINIRETHWYLVVIHARNMEIQVLDSLGTTQDHKDLTDSIKGLQRQIDMISQRKELKDHKWPDLQVASWSLREIDMGYAKQTDSSSCGLFLLNYIEYWTRDELSDSFTQGKMAAILLSSDLNKRRGCLLYKNEKEVDSGSPSDVEILENPTDSNKRKLLHMLDDSEVVYEDEEGPITQADLQRWFVDDWDKRAPVKVSTDGCTNDFLMVLMPWKFNGCHTLFVIDHVKKHVTFIDFTPTQDWCKHMPYKRFAEAIIMASKKYKISYSKKRSGWAEDIFKWEHTIQTRVPIDLRGFNTSYLILQAMSMWGNDRRMKFVGDAKIIRRNFVIDLLSYEDNSCQYAIPANIQQRLIDIAKKD

SEQ ID NO: 67085 - protein, 128 aa, Zea mays
  Coding DNA Sequence Number=SeqID_23710
  Homolog annotation: Hit_ID=Q6ASU1; Match level="QueryCoverage=71%, HitCoverage=27%, E-value=7e-22, Identity=59%"; Hit description =Expressed protein
MAPLLNDPGVASAVTTRLRGSGSGAENDSLCRWLYDTFWSNVPELQLAVLLLVPSLARAHLCRAMSRKPLAGFEAVLLALYAHAASQHGAGEVETRDHVTPEPGKDFGTSKREPVGKIEQVQSIGEVH

SEQ ID NO: 67086 - protein, 168 aa, Zea mays
  Coding DNA Sequence Number=SeqID_23711
MERGAFLVQQAMRGGVEIFRKMKVACIRDTMSTTIGSLSQFLAHRAYGLWVVFMRQQQQQLLWQSKLMKLMWLLIQKISTLKQQDLVEKGIFSSYKDIEKLLQALSKEEEAVRPCLVTFYANVLLNLYVKLDPLATTFRLFVGMLERNMVSFVMLMQGYNTHADMYKA

SEQ ID NO: 67087 - protein, 795 aa, Zea mays
  Coding DNA Sequence Number=SeqID_23712
  Gene Ontology: Mol. function=helicase activity; Cellular component =nucleus; Biological process=viral genome replication
  Homolog annotation: Hit_ID=Q1EPC6; Match level="QueryCoverage=99%, HitCoverage=57%, E-value=0.0, Identity=70%"; Hit description=DNA helicase homolog, putative
  Pfam annotation: Domain name=DUF889; Domain location=460-696; Score =427.4; E_value=2.1e-125; Accession=PF05970.5; Description=Eukaryotic protein of unknown function (DUF889)
MQRKYKLTCPEQYDLLISAEIPSNKYPELQKMVIKHMMHGPCGSLNPNCPCTKGRKSCKNHYPRPFSDTTLQGKDSYPIYRRRDDDRKEKVRGCELDNRWVVPYNPYLLRLFNCHINVEACGSIKAVKYLFKYIYKGHDRASVVMRDASKADDDVDEIKQYRDARWVTPPEALWRIYGFELSQISPPLMQLQLHLPNMHMVAFHERQMVERVVNRRERMGLLESDNTLDECLTERAIFQMPSSLRRLFATILVYCEPSDVAVLWQKHKDSMSEDYQHKSQNKTHVEQMVLIDIRNMLQSMRKDIKTFPLPPIIDAYDDAIGTARAAYDKIMSAVDTDQGRLFFVDGPGGTRKTYLYRVLLATLCNQGKIAVATTTSGVAASIMHGGRTAHSRFKIPLTIDDGAVCSFTKQSGTAELLRKASLIIWDEASMTKRQAMEALDNSMRDIMGRLALPFGGKTIVFGGDFRQVLHVVRKGSRAQVVASSLRMSYLWESMSHLKLVSNMRAKNDPWFAEFLLRVGGGIEDTNSDGDIRLPDDVCVPYSGSDSDLDNLMYFAFPNLNENMSDSTYITSRAILSTRNDWVDMINVKMIDRFQGDHMVYHSFDSTMDDPHNYYPPEFLNTLTPNGLPPHVLKLKIGCPVILLWNIDPANGLCNGTRLVVRGFQRNSIDAEIVLGQHVGKRIFLPRIPLCPSDEEMFPFQFKRKQFPVRLSFAMMVNKAQGQTIPNVGVYLPEPVFSHGQLYVALSRGTARSNIKILVIPTVDERKKSRKGVKKNPTVDCGTYTKNIVYKEVLTN

SEQ ID NO: 67088 - protein, 128 aa, Zea mays
  Coding DNA Sequence Number=SeqID_23713
MGMRQTPLLKLHDIDVGSNLTKNIMEKLPPYLIPVRVICHGIDSTRLSTIHPLNYYGRVSSSVPLTGKREAEEKELLEKHNLWLDEELKAKAKNLAKLGKTNMDEMSANIAKANALAAAGGGSGSVKL

SEQ ID NO: 67089 - protein, 184 aa, Zea mays
  Coding DNA Sequence Number=SeqID_23714
  Gene Ontology: Mol. function=nucleotide binding; Cellular component =nucleus; Biological process=ribosome biogenesis and assembly
  Homolog annotation: Hit_ID=A2XGC4; Match level="QueryCoverage=66%, HitCoverage=13%, E-value=2e-45, Identity=64%"; Hit description =Putative uncharacterized protein
  Pfam annotation: Domain name=DUF663; Domain location=1-133; Score= -151.6; E_value=0.0034; Accession=PF04950.3; Description=Protein of unknown function (DUF663)
MDVSVGSRARHLTDVDGDLWDLVRRDLQLKATFLYIDLNRCRQSNIDYTSSQVPFRITATGWVQEFNNTARIVKKIKLTCTPCKIFKKTTLIKGMFTSDLEVARFEGAAIRTISGIRGHVKKVNVEVPTYSNPVTTALQPREQTWQGMRTTAELRKAHNIPTPHNKDSVYKVLSLQQFPHNIIA

SEQ ID NO: 67090 - protein, 177 aa, Zea mays
  Coding DNA Sequence Number=SeqID_23715
  Gene Ontology: Mol. function=catalytic activity; Cellular component =membrane; Biological process=metabolic process
  Homolog annotation: Hit_ID=A2ZSM3; Match level="QueryCoverage=25%, HitCoverage=10%, E-value=4e-17, Identity=91%"; Hit description =Putative uncharacterized protein
SPGLSLTIGSPDQVRGPHRTDQRRRLSSPIPDLKHLKPPLCPRSRSTQLLRRARGDGGGGGPECTEMLNYDQVFIRDFVPSVLAFLMHGETEIVRNFLLHTLQLQVWPSSRGLSRAASSAADALPPAACVRSAASRGSDRLWHQQVKLLGLELLSGVLHPTLFGNITRFIPAYTDLF

SEQ ID NO: 67091 - protein, 66 aa, Zea mays
  Coding DNA Sequence Number=SeqID_23716
  Subcellular localization annotation: CTP_CleavageSite=55; ConfidenceScore=5.09e-01
MEPGGGTAVGAVESLLTSSCFRKGVESRRRHRVGRCGSSSEAEVESVFRGRGRVRAPGSGEAETVG

SEQ ID NO: 67092 - protein, 148 aa, Zea mays
  Coding DNA Sequence Number=SeqID_23717
MGAQVGCPWRPASGTALDAGPRCHGDVSPDERQSLDPQTSNKMHHIKGPPIHPPLGVLTNVDVVGTFALGATNKTLVHKLRRKTSRMERGLVDIVTGHSFGEDAVRAIHGLHKRKAGRDKGSDESVDDRFDTEGKEADDSEPMCQRLW

SEQ ID NO: 67093 - protein, 44 aa, Zea mays
  Coding DNA Sequence Number=SeqID_23718
MADLLARPAQRLLPLLPLLGLPCPYASSYGLPAAPSTREIWHRK

SEQ ID NO: 67094 - protein, 288 aa, Zea mays
  Coding DNA Sequence Number=SeqID_23719
MQVACNCTTEMHPFDFDASSVEAQAHTSCNWRTGCYVRKTAPPLTPMSRLLDYGTDAATRSNPAHGPIVPTKHIGHRAGDTFGRAKRAMLHLHHDDRIKKRDRERGYSERDPSPRRKRAPSPPTDQRSKLRPLKGHDLASPEPSLGQEQQTQENSAACPAPTTVPPARVRLTAAKSSLRRHRKLRLARPQGSDSTTTPEDGLRLARPQGSDSTSTPEDGLRLARPRGSDSTSTSEDGLRLARPQGSDSTSTSEDGSPPRPTPGLGLNLDPRKTVSASPDPRARTQPRP

SEQ ID NO: 67095 - protein, 151 aa, Zea mays
  Coding DNA Sequence Number=SeqID_23720
MEEASTPGYCVDGKDDVRGLGEHRLAAGDCGEERGRRRRVHGGGAGAPGFTVERGDERLGAKRGAPWGITVEDWASAGYYPDIESRIRVGYGIASTRLFYTKRTETLTVKLQEQQMPLPNNPTSFISQEWFSMKNKITRQEPHKSNSTTID

SEQ ID NO: 67096 - protein, 118 aa, Zea mays
  Coding DNA Sequence Number=SeqID_23721
MKIEKGWAHLVDNDKAFADPDGGNIKPRSRIIGGMMKSASREKEESIETYRGECVRHAHLEEAVFWLVVAEWDDARASGLDELDVGGHGDVADPTARAVPRVRDDSVGIHKNRTAPPT

SEQ ID NO: 67097 - protein, 98 aa, Zea mays
  Coding DNA Sequence Number=SeqID_23722
MAQNIAILLPSLNVTKEEAIEKIKSVRNKSSQGRWLMQEDIRFILVRAREGPTFSEGDETYIILHLGAHGRGTSWSREGVSPKSLRVIEACANIGSEE

SEQ ID NO: 67098 - protein, 124 aa, Zea mays
  Coding DNA Sequence Number=SeqID_23723
MGWGGVVNGAARPTGGVDGAARGAGRGSSEGIEAARGAGRGMSGGSGATHGAGNGVRQGRVEARAKVVFVAKEAEDRRSPEITMDTIKGLSNPGRGGGERKTRVTAELISMTEALRGTSVVGDI

SEQ ID NO: 67099 - protein, 184 aa, Zea mays
  Coding DNA Sequence Number=SeqID_23724
MPREICGGASLEFVDISQPIPLAYKTGHLLSSKASSESTEERGVGENPAVPSKGNGVREKRMPPHLEPILTGATEAWWAVEELRQGMNFMGEAPRDRKNNQAPQISCWSGSSAVGPLWRVDGYSHPKSRCLITSENHNFLTVTPNSAILVPTISYQHHYVNWNMERPPGKTVLPQGFNGTPLAD

SEQ ID NO: 67100 - protein, 117 aa, Zea mays
  Coding DNA Sequence Number=SeqID_23725
MAREASPRGHSTPHNLWGNSKAPSGRQLQGAEVPGASEEDLGIIPGRFIAYSVVKTRATLQECVESPFRSRRRSLKPKLGRISRSSSKIVEAQKSFLRECRAKNHSQSFTEATKRRS

SEQ ID NO: 67101 - protein, 286 aa, Zea mays
  Coding DNA Sequence Number=SeqID_23726
MEVIFGRRLRSGAEPDATPVPLPRVLSRAHQVLNETEAAFLREWEALESEHQRLSDWRTQLEERTKAASRQFASEWSELARDRNEYKRDLQKVFARELEASQWEKKVARREEAASHREALAAEYQSKLSALDKTLEAQRVQQVEAIERMKKWQQELDDKASDIALAEVNLKEMEESLGRREANLAKRETDLAFQEEMLERRGMLLAEHELEAEEKEKKLEERILGARLEAEGSRLCRAVVDYVLTCFRSHDPAMTLVSVLDGLVAATEYAARESVQDAMETVAARF

SEQ ID NO: 67102 - protein, 185 aa, Zea mays
  Coding DNA Sequence Number=SeqID_23727
MGEGDGTDKWALAASERKRREREGLQEAEAPEASEEDMGTNPESSTAYFVVKTRAILQECAKSPSKTRRRSQKPKPGKVNRSRSCTLLRVTHPTYYNMWVTILQLLLLRLVSHRLLGHNFHLYRHYNLPIHEVSSQKGAIRLISSEISGRNLKLAQSTVLCQNQNTSIERYPTSEASLHSLSFSF

SEQ ID NO: 67103 - protein, 314 aa, Zea mays
  Coding DNA Sequence Number=SeqID_23728
  Gene Ontology: Mol. function=hydrolase activity, acting on acid anhydrides, catalyzing transmembrane movement of substances; Cellular component=integral to membrane; Biological process=metal ion transport
  Homolog annotation: Hit_ID=Q10QZ3; Match level="QueryCoverage=34%, HitCoverage=12%, E-value=1e-31, Identity=69%"; Hit description =Copper-translocating P-type ATPase family protein, expressed
MEREIELSMFMAATTTMRMHTMEPRPPTDWADQPAFWAHENFYLMAHFTHAFLYPNCSHLYLPKARSRRQFLLPPSSSSSQRRCYISRLPLLRADPLSSATARLLFPRVEMAAVNLLAESVAVRLRAPAPPSAGEELAARLTECGFPATARRGGAVAGVGESARKWREMAARKEELLLLSQGRVAWTIVALWCGSHASHILHSLGIHVRHGTHGDGEQAGRHPASASRLSSGSAAGVVVVASLTSLHPSVRDRSMGRVVPGHTERRGRPGQFLASSGNELRVEWKSGKPRTAEQIGGPGWKRGSSGAVDRDAAG

SEQ ID NO: 67104 - protein, 113 aa, Zea mays
  Coding DNA Sequence Number=SeqID_23729
MVDEVQIINKNQRKSKRKKTWLEQPRLCAVWVHRTVSGGAPDSVRCARLESGQLATLGNSSAMYGYKSPDCSGSGTFPWGSGLTVDALEYITFSGHVAAPEPPTWWGQVLFLA

SEQ ID NO: 67105 - protein, 235 aa, Zea mays
  Coding DNA Sequence Number=SeqID_23730
  Gene Ontology: Mol. function=binding; Cellular component=nucleus; Biological process=lateral root development
  Homolog annotation: Hit_ID=A2ZAA2; Match level="QueryCoverage=40%, HitCoverage=9%, E-value=1e-23, Identity=61%"; Hit description =Putative uncharacterized protein
MVRPLCRPRVHPRWRPGPDPEVEPDGDGRRSRSGARTAPRPSQLGLERLHQLHEVLDGGLSHGDGVVGGGSGRGRGWWRARAGGMDEVALVGASSASSSKSVNIEGARRIAFKHIETFVLTFSDPQMFSTAAASSAPAALSHVAEAVFIQEAGHLRCSRSEIGRFVVMLRNPSPILRACAAFALLQLYLEALLFETWAILSITRAVLAALLTVILLSLSFICLSILYSTIKHMSL

SEQ ID NO: 67106 - protein, 163 aa, Zea mays
  Coding DNA Sequence Number=SeqID_23731
MWAVTQSELVRSNPRVMKAGEHREDKKGECFVRFGHGGGLTPSEKGDRPPGTSNCITFESQRIGTLQVKEDGFPKLLRACTVRLGIRSQPEYDGREFVEHGTEKCVVTVYIGSSPHHVEWSVPAGGHRFKDTCQVVARKALRALCQIYEEEVADTPLRFFPPF

SEQ ID NO: 67107 - protein, 560 aa, Zea mays
  Coding DNA Sequence Number=SeqID_23732
  Homolog annotation: Hit_ID=A2Y9N4; Match level="QueryCoverage=38%, HitCoverage=9%, E-value=2e-16, Identity=30%"; Hit description =Putative uncharacterized protein
MNASPHSYKEALLATPTNHVASTPVTTEKQASEEKTVVGSRPEVQSRLVPQRLGKDGWQVVQCRTKKNSVWQQLSNQSERASVWQRLAGQQKHPPPFAADSHRRRSVWRRINTPLEPALKEDTSRMFAAGDSQRSLRNKKKRRSKRGKGSLMPGAGPGSMSPVSSDNVEAPRKVHMPALRSGGQMEIFKKTLPSCVLKFTTEMAREEVTLRRALFVTVVGTRPEVLGVEVLEEVAHNFDVNIEAMWIHQVLPEDFLLILPDEENASRVLNDGKAYRGAHFSLKFKRWSRFTHASSTIMSGMVEVEIRGIPEHAWFRSTAANILRDSCWISEVHPDTLQKKDYSSFRVSAWCFDPGRLHRVMDLHIVEPGLHTLEKRCLTYKISVSATQTDLLAADMGPPPPPPPAYGRRPDGDGGGGEDQDPQSRRSSGSQFQRRPVHLRLGPQLSLGRGAATLVPRAALPAPSRTSGGETSNPERDPERDALSSLRIEETPVSEEPQEDREVPEAVIEGQISPGKINSPRCHLIAACDRTVETVLVDMSIGEQTEPGSPRSLNGPREMA

SEQ ID NO: 67108 - protein, 380 aa, Zea mays
  Coding DNA Sequence Number=SeqID_23733
RNSASDSNAEKLTNKVAAQEREKADLRRQQKAERREANEAIANEQAAQAEAKLARAEGNLAKELAEHLQERLTAQESRAKGAEAAMRAEAERTCAQLMDTYRELGAPDPVTSRCRTESPDFVVCNGCRRSCRNSPLSWGGFMSVRLPWSPATGVDERTLPAEGCPALSRVLAQADEDFERGCLQGERAETARAQAARGERVDDFGALNSSLPDPESTPAEAASGAALEPTPETAAIVTAAPTSAAAGEDLPPKVAEGAPDAPAAAVPSAEDPAAEAAESTAEAAAEATAEAPAASGPSQVQDFGPAHATATTEILTASTAEGGNGYGESASEFFDFTDSGSSVQWTEESSEEDLDYFAALDVAAAEATPIRRGRTRRARH

SEQ ID NO: 67109 - protein, 158 aa, Zea mays
  Coding DNA Sequence Number=SeqID_23734
  Subcellular localization annotation: CTP_CleavageSite=39; ConfidenceScore=5.08e-01
MGQITRGPQSWTRPSRGMTSPQAFVWCRMERRISTYVVSESLAWERAGFRGAERAREAHEDDGEATFIFNECISFNESVGATLIKSLRVCLIQSNCAALDQQLPASSTVGATLIVNPNYTTWYNKDQQILRGLLSSMSEEILCDVIDAKTSKDVWDSL

SEQ ID NO: 67110 - protein, 179 aa, Zea mays
  Coding DNA Sequence Number=SeqID_23735
MTGETLLGELAPRHEESSNGSNDPIGDLEAQVEQLRTELHHRNRVWVEDGQRMNELRADIRHLQDELAERDLAIDWAVNSRSIAWDQEAKARARVAELSAAVDNLQVYCNTLHEEVHVLYSRLHPDVPADPIEMGAGPSGTTCEGLGGVLDLFKPPPSMNLADERSPTTDSEATKDDKN

SEQ ID NO: 67111 - protein, 190 aa, Zea mays
  Coding DNA Sequence Number=SeqID_23736
  Gene Ontology: Mol. function=carbonate dehydratase activity; Cellular component=chloroplast; Biological process=carbon utilization
  Homolog annotation: Hit_ID=Q41728; Match level="QueryCoverage=87%, HitCoverage=66%, E-value=3e-83, Identity=87%"; Hit description =Carbonic anhydrase
  Pfam annotation: Domain name=Pro_CA; Domain location=15-185; Score =283.4; E_value=4.6e-82; Accession=PF00484.10; Description=Carbonic anhydrase
MGNRSNLVLRAPVLPLFADLTYVVFACSDSRVCPSVTLGLQPGEAFTVRNIAAMVPAYDKTKYTGIGSAIEYAVCALKVEVLVVIGHSCCGGIRALLSLQDGAPDNFHFVENWVKIGFPAKIKVKKDHASVPFDDQCSILEKEAVNLSLENLKTYPFVKEGLANGTLKLVGGHYNFVSGEFLTWDNKQPS

SEQ ID NO: 67112 - protein, 357 aa, Zea mays
  Coding DNA Sequence Number=SeqID_23737
  Gene Ontology: Mol. function=nucleic acid binding; Biological process= RNA-dependent DNA replication
  Homolog annotation: Hit_ID=Q10HA5; Match level="QueryCoverage=36%, HitCoverage=33%, E-value=4e-13, Identity=35%"; Hit description=Zinc knuckle family protein, expressed
  Pfam annotation: Domain name=zf-CCHC; Domain location=65-82; Score =14.0; E_value=0.012; Accession=PF00098.14; Description=Zinc knuckle
  Pfam annotation: Domain name=zf-CCHC; Domain location=84-101; Score =22.1; E_value=0.00069; Accession=PF00098.14; Description=Zinc knuckle
  Pfam module annotation: Pfam domain module=zf-CCHC::zf-CCHC; Domain location=65-82::84-101
MRGVLGVLPPGLSSPRSAPNVNEGGWSVVRPRHWWRKILQDPGGAPRNLQSDKKGSRLFKLKLRGKCYNCLSSAHLAFRCSAPTRCWHCLKSGHRARSCSQKGYQGPFNATLVNTEPTKQSSRGSNYQELLPMPSIPHKYQVPSQESSHGQLHPILKKSYLQAVQEGHGMEARYPGDPRGRPARAFCAVSATGSFRRRRDELIDKAIVCSFDGNSHEVDTLSAGDMLREKFNLHHEPDRELPPVNSPLTLVGAQHDAPADLKPGHVYTLRNHIEVVEDLSFLSGRGASGRGARGGPSNRKQRREFVWSYGAPDSVGEKRDRAEDFRGRETVRRDWDHDDDNGDFQRDRRSGGMPRET

SEQ ID NO: 67113 - protein, 164 aa, Zea mays
  Coding DNA Sequence Number=SeqID_23738
  Homolog annotation: Hit_ID=Q10PM7; Match level="QueryCoverage=54%, HitCoverage=43%, E-value=3e-15, Identity=44%"; Hit description =Expressed protein
MTTPCDGAARESDARSSSAREKRRGAFGGKGGGKLLLREGAWKEGGRHEEQNNGYKSSQMKLIYRLQGTLKAIYSRILNPETSSKKLKREGKDEHVLPTKTAMTVTVEAEDGDLEESPGFGFGNTQRNIILEPSKPPMNLENRDEAKPNGGDPSLSAIHKKGIV

SEQ ID NO: 67114 - protein, 62 aa, Zea mays
  Coding DNA Sequence Number=SeqID_23739
  Homolog annotation: Hit_ID=O24586; Match level="QueryCoverage=56%, HitCoverage=5%, E-value=9e-07, Identity=71%"; Hit description=Gag
MDPKGKGIVINDKEKESFVNEPKDVQEKHRSYEHKSIKHSGFKIPHQMACSKCYETTAVLSL

SEQ ID NO: 67115 - protein, 186 aa, Zea mays
  Coding DNA Sequence Number=SeqID_23740
MSRAFDDYYIEDCGVILAPEVTQRRIDNSDQFVILATVRHCPPRTDGPTDHSAADSRAGVGVGGGGGGGGGHQAMGVVRAERKARSAVDRCRCLQEGRAARLVSSILCSPIPYSQADSGKARLSRSCAILVKAQERDVPGTAKPIRFRLVPHCRLPFITLAGPGLLFGVRAPFKMFGELHDAYATS

SEQ ID NO: 67116 - protein, 142 aa, Zea mays
  Coding DNA Sequence Number=SeqID_23741
MPSTCLPKSDSPFLFDHLFEDVFTSLSPQPPVYSSKAARQKLSDILEDGGNEFIIGVVPDENVDQDEDHEGAHDEPSQEPSISKAQLLAKRKRHGHPRKKKLRSFKSLLSGDLERATCASSSESEDNESMQIEASNSDSGDE

SEQ ID NO: 67117 - protein, 26 aa, Zea mays
  Coding DNA Sequence Number=SeqID_23742
MRLHTLRDNVVLYPQRCLLLIKGSGK

SEQ ID NO: 67118 - protein, 391 aa, Zea mays
  Coding DNA Sequence Number=SeqID_23743
MSSRSLMHRVFPPSEPPDGEHPQSFRLVVGGTQLHGSWYLSAIVRLQGFSSGSPAAPPRRWSPKTVTTSSWVGRSKPGCDLGPALSFKDVHHPCWGGGRAEPELYVPHGFVGQPLLQHSRERALTGPARGADFENAGLVDGGRRQLQHVGLAGLAPGAPSRRKGGCRAVRTGGPPKTSRAARAAFMFWGFPAFAPVRRLRAEVDAAREVPVADGITATIRAPGLRLFVLVLAPRASAWVRARLQQHSPVGYLNRFTKRESPRAKVTSELEQRQSWLRKKDLVGRILAGSSAGGTDAGVELPRPRVGLMSSGDSWPRPWGGRPSRLLEPDSWRRPWRRWPGHGADVVLQSGDPPTVSPSEARSDLAKGVVDAEGAAAPFNYQDPSLQDRIIL

SEQ ID NO: 67119 - protein, 465 aa, Zea mays
  Coding DNA Sequence Number=SeqID_23744
  Gene Ontology: Mol. function=kinase activity; Cellular component =ornithine carbamoyltransferase complex; Biological process=amino acid metabolic process
  Homolog annotation: Hit_ID=Q6QP54; Match level="QueryCoverage=15%, HitCoverage=25%, E-value=4e-17, Identity=64%"; Hit description =Putative kinase
MAPPIDVVGPSPRLGEVEAPPRSRSSLSSDAEVESEPLGRARRRPSAKARAESEPWGRAKQSSSSSGAEPESEPWGRAKRSSSSSGAEPESEPWGRAKRSSSSSGAEPESEPWGRAKRSSSSCGAEPESEPWGRAKRSFLWRLRPDSAAVSLTLSSGTAVGAAQAALSSCQTGQWSGEATFALNAPAIWSVGVAGWPRLLLGEGWASGEPRLCADGGYQLRFRSLEGRIFHWNSHIRDSHRCQEEVCAEFMARFARLRSLQTLEQGKKQTSTCSTRRGIARARPDAQPRAHRAAPSQTRAPARARAYKASQGFDHTPPLALNLAGAPVHRRSLCARRASGHPRTDHRRPGILAIPRPIRPSRESPCVSVKLPKLGIELYLAGDTGSTSPDFTRSPAYVDRAPRLEHTPPTSPTAYARGPTDSCHHRRRAIPRRDCKDFPELTPPFVGPPSPSISRAALFTSAVTA

SEQ ID NO: 67120 - protein, 168 aa, Zea mays
  Coding DNA Sequence Number=SeqID_23745
MPFTKDYNHDSNPYGLKSHSTFKSVRSFIFGYAIIPKLHECSVKSLKSIRSTIRGVLVIPLVVVLLGCPWVTPGAVVGIVAKFATLETAIGLNWISCIIILGRALCLVVIVSTLVSGAELRTLGVVLPGVSAGLPLVLSFVIRQFFPFVFKANCLVQQSLEVGETVAL

SEQ ID NO: 67121 - protein, 355 aa, Zea mays
  Coding DNA Sequence Number=SeqID_23746
  Subcellular localization annotation: CTP_CleavageSite=56; ConfidenceScore=5.32e-01
MGHGRPLGLPASSSPETPCSAPSEGNMALSPLLLAERRRRGVCKKSSLSLTVLSPCAEARGLLSQTVDSVNIPARELGTRPCTRATASSHEGTTRPAEALREALRPQRSQTTPPRPWGLHPAEGQRRLRRSDCCATRLSEADRQLGPALGTIGNSASLDLGLGLGLSPGRRRTPLRPTQGSDSGSAPEDGELRSARPRARTRAQPRKKANSAPPDPGLGLGLSPGRRQTSLRPTQGPDSGSAPEDDELRFARPQGSDSALASADGLRLARPRGSYSTLALEDRLDLDLGGASTSPNLGHRPTTQAMMAPRTLYDDGGSQPPYGSKRTSARTRQLRQLSFRQAPALLRRPRHHTNQ

SEQ ID NO: 67122 - protein, 164 aa, Zea mays
  Coding DNA Sequence Number=SeqID_23747
MEILQVRGLLVSIRRDPASLLLDAQCLTLGGRGCLGPKRGCLGPSRGCRGLSRGYLGLSRGYLGQGRGCLGLGRVVDLDGGLMQVSGEDVRGNRCSPRGYFSQLVHSLIVVSGDVVELELIELVFQAPNLIAVGLHLRVAAVGVLHDLVDDELRVTASVEASDP

SEQ ID NO: 67123 - protein, 20 aa, Zea mays
  Coding DNA Sequence Number=SeqID_23748
MAPPCASAVPLLVFAADDCD

SEQ ID NO: 67124 - protein, 171 aa, Zea mays
  Coding DNA Sequence Number=SeqID_23749
MGDIWPREQLDGEVGPGAWNREARIWASLSRAPSVEAWGARARHGKGGREGWRWAERSHPKGEQGSGRLAGRGGRQEKGPDLLEETERRSDGMDGRSRDIAPWLRARGARSSQGPAAMEVVGVGRSSSVPGEGKRSLLLARCAREVAFGAPAGDLGHHGWEREEIPADRRW

SEQ ID NO: 67125 - protein, 90 aa, Zea mays
  Coding DNA Sequence Number=SeqID_23750
MAEAKSILSAGRGRGKTLGGSVDREMAWGGRRQASYVGSLAARKWKKGAATDNEQSEVPECIVGDLPEQQPGGDAGNMDDFEEFQEYDEF

SEQ ID NO: 67126 - protein, 166 aa, Zea mays
  Coding DNA Sequence Number=SeqID_23751
MKMAPIRCTTRKSVIPFLLSRLVKRPLRHTVPEAFSKNYSITERDTAEYCSLFSGVADGLDLKYYPRCSTGSDGGVIVSPVGEGNPRLNNMVNLVTVLNTELDHALDKLGKVRAEVAELCGECAARHYLDGGSPALVGIQHPVRLPPRGRFDYGTPVCRTQIDLDP

SEQ ID NO: 67127 - protein, 273 aa, Zea mays
  Coding DNA Sequence Number=SeqID_23752
MNALSREGCRHYEVFDRSDEDFEREIYKVEDPVVKESTGALFDQMWGPHGREVVRERSDTARGQAARDEKVDDFGALNNARPEAESNPVAAGPEDAPAQPQKPSEAPLMPPQPLRPAVQDFGPAHATATANFLAASTVDDGNESDKSASKFSDFGDSGSSVEWTEESSDEDLDYFAALDVAAAEASPRAADAEVVPGPSVGRRRRRAVVKRRVSEADDGRLRVGRAGRQELLSLPAVASVGEGELRCLFEGEELRIMLFNYREMGIIPKVEPM

SEQ ID NO: 67128 - protein, 474 aa, Zea mays
  Coding DNA Sequence Number=SeqID_23753
MPSRGGMLVRSPAFALDLHSRDPAAFVREAEDGAVRIVGRYVPRTEGQRSWDIRGSNDRLNKVFELNRLPYGGYPGQDDVDHRGKKPAAETGDDPAPAAALSSKKRKLGTAMGGLGVSDSFAMELMGTCAAPGGRMSSLELRDSLARMLKVTGSWWPKNVPIPRAAGEDFFTSRMVRDFRVFPYGWNIAAVVSAVMDKDRQEATQKRRAVVRLPEARPKRARGTAKAATTGGSQPTLAVKSAGPGSSKVPDVVKAAGAGGAKSTSAEAAKARELPPPGKRIADFGTDISVDDYLTGSGEGQLVVVPPAMATTVSATVLVAKGGALSASGEISALAAIKDEAGAVSHRLKEASQRLSQQVPQLAEKVAVLEGERTELRCQQAEERREANQALAKAQSAQAEANVAQMEGSLARQCAEEWEERFNALQARVERAEASTRSEAERTRKQLMDSYHELGARTADFEVPDRESGLRCLE

SEQ ID NO: 67129 - protein, 112 aa, Zea mays
  Coding DNA Sequence Number=SeqID_23754
  Subcellular localization annotation: CTP_CleavageSite=62; ConfidenceScore=5.09e-01
MAHWSCSSPPETLSPSFSPLCPWIHGLFPTIEFAVAPSSPPPNSGDPGATQARACLNFGDFTAAERSGAASRMSVFPDNEQSEVPECIVGDLPEQQPCEGKCPLTHYVLHTL

SEQ ID NO: 67130 - protein, 324 aa, Zea mays
  Coding DNA Sequence Number=SeqID_23755
MARIRCTAHKSVIPFLPSRLAERHLCRTVPGQSSQLERLHRRLHEEQERRCQEQEQEQDQEQQDSSPLPQQEGILTAGGDPVGDGDDDDASGSSSHDTELSEESEPEGWITRPITRDATRGCHFHDALDTLLRRAFDRHTWSIEYHCVVYQHRRRLYPDQWEATCLLRRPDDDLWGAEAFSKHYSITERDTAEAAMQDAARRALSQYCSLFSGLADGLDLKYYPRRSTGSAGSVIVSPVGEGNPRLNSMVNLVIVLNTELDHALDELGKVRAEVAELCAECAAHHYLDGDSPTPVGIHHPYRSPPRGRFDYGTPDCRTRIDLDP

SEQ ID NO: 67131 - protein, 293 aa, Zea mays
  Coding DNA Sequence Number=SeqID_23756
MQSQKNALLQYQIRHLQNGHWELAAGELLSLGNGSPNGRVHHSGNMHDFLLELALLDCSGWLLGKEDRLPGFSDAGIDFLLAGCSDGTAAAEEIASGTTAAGSDANVGAGAGREGVVHQLIVEGIDQSSQEAVLSLGIRAEILWGITQHLQKLVPVLTNGHGTLLQGEKLLLPHYHQSLGHMVAAEAIPKLLSSDSFRVGMCGEALVASGLALEAGAVVAAGAPTAWLLRSNQLPGLLGFASRTSAQWSSWVAVTNAAARLLPLGVSAVQTEHASHLCACSQTSVEITHIYQI

SEQ ID NO: 67132 - protein, 348 aa, Zea mays
  Coding DNA Sequence Number=SeqID_23757
MRLMVLGFDSGNALHTKPPHPQVVSIATTAQEKMKPWKETSRSSKTTTSSRHGWLVLDTPHGSLSSPSYPLVSLSVRFAVPWPQEIESVRSCSPVLPLEAPPAPPLGAPTPGVAAGGDPDDGGGDSSSSHDTDFSADQEPEGWVARPITRNAARGCHFHDALDTLLRRALDQRTWSFEYRCVVFQHSCGVYPDRWEATCLVHHSENSLRGAEVCSEHYSISERDSAEAAMQDAARHALLHYCSVFGGVAEGLNLKYYPCRPSGSTGGVIVSSVGEDNPRLSSTVNLAAVLNTELDHALDELSRARAEIALLRAERAECRHLDDGLPRSRRDSAPVPLTSAWTPVLWQS

SEQ ID NO: 67133 - protein, 76 aa, Zea mays
  Coding DNA Sequence Number=SeqID_23758
MAWAELGVYSLDWIAPGLGHWGGFLKLAVMAPPRPEFRAVVDVSGGGDRDEQTTEDSGVQLVESAEQELVEGKLCP

SEQ ID NO: 67134 - protein, 304 aa, Zea mays
  Coding DNA Sequence Number=SeqID_23759
  Subcellular localization annotation: CTP_CleavageSite=37; ConfidenceScore=5.00e-01
AETNAHVFDAFGRASARPGARPRARRAVPCQTRAHARARAYKADRGLDCMPPLALNLAGAQDHRRSLYARRASGHPRSDHQPGIELYLAGDTGSTSPDFTRPPAQVDRAPRPEHTPPTNPPACARGPTDSGHYRRRAVPRRDRQDLPKLIPPFARPPSPLGAGYTTPPQYAVQLFEEHRVPRCMVRMTLEPHPLQSGWRLLDSESFGYRAKDTIEAIALHELRTFCGFRPLELSTHPIGLFPAEKEDDPMWKDRVEHTKDVWALYPGQTAHLTVRCMNAMYRLQAVRGEAMSQLMGGPCGSPVH

SEQ ID NO: 67135 - protein, 203 aa, Zea mays
  Coding DNA Sequence Number=SeqID_23760
MARLRHTARKSVIPFLPSRLTERPIDRPEVESMRRCSPVPPLETPPTPPLGVSAAGVAAGGYPDNGDSDDNSSSHSTNLSEEQEPEGWVARPITRDAAPEVAMQDVARRALSHYCSVLGGVAYGLDLRYYPHRPSGSSGGVVVSLVGEDNPRLSSTFNLAAMLNTELYNALDELSRARAVIAQLRQSAHLVDGSPAPVNTQHP

SEQ ID NO: 67136 - protein, 69 aa, Zea mays
  Coding DNA Sequence Number=SeqID_23761
MENKAPQITLSEQLKMMAMQSKDLGTGLARTRSRLCSSYPLGLRLAGVILTGVSRLMIMRHASWKLSTS

SEQ ID NO: 67137 - protein, 104 aa, Zea mays
  Coding DNA Sequence Number=SeqID_23762
  Gene Ontology: Mol. function=kinase activity; Cellular component =ornithine carbamoyltransferase complex; Biological process=amino acid metabolic process
  Homolog annotation: Hit_ID=Q6QP54; Match level="QueryCoverage=53%, HitCoverage=19%, E-value=3e-15, Identity=73%"; Hit description =Putative kinase
MAPPVDVAGLRPRLGDVEAPPKPRSSLSSMAEAESEPLGRARRRSLVEARAESEPWDCNLADGEYVLIPEQGVVHEEDQEQAPETAIEDLPAAPAIEGKPRFYA

SEQ ID NO: 67138 - protein, 121 aa, Zea mays
  Coding DNA Sequence Number=SeqID_23763
MDRHPPTTIAGDAHLDVIAKESRTSPDHSPEQPHRRALDSNEDYMLIPEQGAVHEEDQEQAPETAIEDLPAALAIEGKPRDNSDLAVDDPCDPTKTSKPEAPMQSLNQLPVVNDLANARSA

SEQ ID NO: 67139 - protein, 55 aa, Zea mays
  Coding DNA Sequence Number=SeqID_23764
MGTGKPDLTENFSSEFSVAADSFRRIDEHLTTSIMMGNMTCGYRVQPLQSVKLVY

SEQ ID NO: 67140 - protein, 279 aa, Zea mays
  Coding DNA Sequence Number=SeqID_23765
MWRLGDVRYPGESSGSRGGEKSKRAVVPSLATSIHLGEGASRRGSSAEPGKLGSKRPCSSGSGGGPLSVVAGKEVAREETEIQGSGATVGVCRRRTAIAKKLRRSTAPTKEGAQKRKRISSPPSSSASTSSGAPHPKRKRSRVYGYANTHSMLVGFIDQLTMDSENAKLRRALAHLIRVVEERCADIVDVVHGAFQPVSGPVLNEMNRALVQIEDLANDLDQLALEKDWEMEHMTPTPIAESSQTEDELLIDYDSELNNDDIVGYDDGRDYSTNDTYPY

SEQ ID NO: 67141 - protein, 136 aa, Zea mays
  Coding DNA Sequence Number=SeqID_23766
MAMMGSTLEKMYLCQEGAAQFDEVVAWANFSDEHEGAELETNEGGTIVLGEDEFAEVDGATRAHARKQGQPAMAHGTTTTQGTFNGVHGSELQQRAKARSRPCVMASRKHQGAGRSTGRTWGKSSAMGRTSASWEE

SEQ ID NO: 67142 - protein, 244 aa, Zea mays
  Coding DNA Sequence Number=SeqID_23767
MDESGVKKEIGSQMEVCCQTRFCQNEDGFPKLLRACTVRLGIRSQPEYDGREFVEHGTEKETVPFGWPGCVHWKCSSCLRTTPQSRTSLHTCSPWMHSMISWLGNHRQMIAQAEDVEKSNHQLHVDLTTAQARATALESREVIAVEALKQAKDEHVQKLMEAYLVTHNQRRALRSKSPLHPTQFNPGELKIPRFLKAMNKQEHPESSQDPPPELFEPFNMKKIPAPSLEIKEEAASTPPAPPPS

SEQ ID NO: 67143 - protein, 28 aa, Zea mays
  Coding DNA Sequence Number=SeqID_23768
MAGGKELAGANEGCLAGEDSKGRKRGWV

SEQ ID NO: 67144 - protein, 207 aa, Zea mays
  Coding DNA Sequence Number=SeqID_23769
MVLPLVPSLLLCSVSYNAILLGDGQVDQLIEAISPDSVESFSQLGVKTPAKAISLLFIRISMYRAGSLIKRQKLIQLAIQNASWDVVSSESSLEFLPRHFTISGEHGTEVVPPSPRRAAKLLRGEASLGFIRAVSREEGKLGLNDAEPHVGVQWILCLGEQGWLRTQKLLVRNEDNMVTNIPQISKSSQGYIRGKGARKASPKSDIN

SEQ ID NO: 67145 - protein, 76 aa, Zea mays
  Coding DNA Sequence Number=SeqID_23770
MEGKPSRERKSELKRVSPPLAGVGEFICGRESKYKGSSSLISCEKQMIRIEFYPCKWGSGGYKYTGFLLSILGLVL

SEQ ID NO: 67146 - protein, 206 aa, Zea mays
  Coding DNA Sequence Number=SeqID_23771
MGKMIIQKVGIRKASWKDPVITKVQEVQDKHHGKDRGMTRVKGWKRGGFKGYVQDKHEGKGIDITRVLKVIMDKDVGEEVEERGFLKSRNKYEYQGKMLDDKVRVIENKNTSRDRINTKLVRRQEVNRNQGRDIEVSRVKVIIIIKSITKDGVKARLAKWQNGENNHRYLRTQVGTTVDQNNTKVDTAPKEPLYPKGNNASKDEGL

SEQ ID NO: 67147 - protein, 220 aa, Zea mays
  Coding DNA Sequence Number=SeqID_23772
MELVRGGGASAGGYGRSTTATTAGLDAAHARDRGSEPRRWPPWLTRDYCCRAQGKGRPDLEGHDEREVGHALEPGRPGLAATLEEVARGRAWAEVPRPRLVREPGLAATLGKKGAWELGCALAGGEAGQGRAAAQGLLDATTGGAAGLGRTTEGKGSTRGIAERERTSRPGDREDCSPGKENDATRGCREGPSRGREDGEGKRGERTHREPPCGGTTASA

SEQ ID NO: 67148 - protein, 70 aa, Zea mays
  Coding DNA Sequence Number=SeqID_23773
MATCLDLSYSRAISTALAVEAKYAGPGKSKGYEGDRPNQGPEKRQRLYKGSSSLISCEKQTIRIEFYPCK

SEQ ID NO: 67149 - protein, 137 aa, Zea mays
  Coding DNA Sequence Number=SeqID_23774
MHISYTLHSLDCNLADGEYVLIPEQGTVQEEDQEQAPEAAIEDLPAAPAIEGKPCYGGYKCGHCTAAAGVSGALYAKAVRPGRERGINGDGCHVRGWSTLTCRAIQEMVDGVTWPTTLPPGWTVEWDVAPAGEEHEE

SEQ ID NO: 67150 - protein, 46 aa, Zea mays
  Coding DNA Sequence Number=SeqID_23775
MNVLSALKLDEPIKKVLLMKMEKHGRTIPKSKAKEVGRVLICMKDR

SEQ ID NO: 67151 - protein, 104 aa, Zea mays
  Coding DNA Sequence Number=SeqID_23776
MAAVALMARRCYTISSLPLRGGLSGIGPTEAKLIYDEACGQLKENEEEIEVEEARTTPPPLEEPQTGNYFYFDICGAEPDSPVTQDKPRCICHLLAILKSFSLT

SEQ ID NO: 67152 - protein, 1135 aa, Zea mays
  Coding DNA Sequence Number=SeqID_23777
  Gene Ontology: Mol. function=protein serine/threonine kinase activity; Cellular component=chloroplast; Biological process=protein amino acid phosphorylation
  Homolog annotation: Hit_ID=A2Y755; Match level="QueryCoverage=26%, HitCoverage=88%, E-value=3e-66, Identity=78%"; Hit description =Putative uncharacterized protein
  Subcellular localization annotation: CTP_CleavageSite=39; ConfidenceScore=5.22e-01
MAASGLGLSTSFLPGHDTLLRRRRRRPAGHAAASFRPVTAELGGVATELGRQLVEAVGVGLPCTVMQCGDVIYRSTLPRNDGLTITAPGLTLALATVSYLWSTPGVAPGFFDMFVLAFAERLFRPTFRKDDLVFGKKLGEGAFGVVCKASLANPEAAKKAFPSLRTDSNLIQFNRQLKRCDYDLQAWRNLVEPRASAELRRGFDIMDLDGGIGWELLTSMVRYKARQRTSAKAALAHPYFNREGLLGLSVMQNVRLQLFRATQKDYSEAARWVIGLMARSGTEDVGGFTEAQLQELRATLRDEPLVSHPASSPQLLVSHAQPLVSHAQLLVSPPQPSHLHPGRQRPPPPPHLAGLHHETGDHLPKPPIPSTLWLFCAHSAHRFGSPGWAGKVSEVEGRQPCPFEFRRLWDGELDVLHLILVDGPQRISEKNTEKTARSHRARQSPRVPVWQRLTRMQGSSSQGGDFQMSRRKESVWKRISPLQSATGDEYHSPLLLASGSGEAVPPVHRRKRKRRRAKRCQGAAMQQLSPTSVSSDDAVALTALEETTTVEQKYDQQGRPKFSPLCVLEFSAEMAREDAALRKALFVTIVGTRPEVLGAEIINEVARSFNIDGGSMSIHQAMPEDFILFLPDERTASRVFNDGSIFRGPQFDLVFKRWTRCANASATSLPTLIDVEIRGIPAHAWSRSTAEFLLRDSCIISELHPATALKTDLSSFMLKAWCLDPRNLHRDMTLIISEPGPAAGEKRCLSYKISLKVTPVDASEKAIVIPTPLSDNDPPDGDGDSFFPGSPQRRSMHSAGGRRSVHSRLGPQLPSRRMEGGQREAGEPSLKMHSSVESALGTTSDPCMRRNCLLGGSSLGLLAGATEQTAGLVSKETIMLDSVWDGRLEETQSEEGQLEQDSLRDGRLEETHSEDGQLEQVALLSPQQSAGPLKSNGPLQQDEGTLGPVTHSDVGPLGQVTLISPQHSVGPLETDRPVSPQRQSCRMHPNVYGTSLKVYSRRRQRVSVGQVDAPEDVSPSKQQFFEMVSKKIGCLLPTPKAKKRREPAIPSQGLRRSRRVAGLGAEHIPQIPRAKILVMKTIHNTSDKNQLNSEDLETYAKLFCHPLSYSQIQALAALFGWAVPDDLGGAATMVC

SEQ ID NO: 67153 - protein, 65 aa, Zea mays
  Coding DNA Sequence Number=SeqID_23778
MSRDSPWSAVRRVHRSTPHVLSTYTGDAGGRSWVDSSPKSWVAATSPCFVGACSCSIIAASLKLI

SEQ ID NO: 67154 - protein, 504 aa, Zea mays
  Coding DNA Sequence Number=SeqID_23779
  Gene Ontology: Mol. function=methyltransferase activity; Cellular component=cytoplasm; Biological process=metabolic process
  Homolog annotation: Hit_ID=A7XZC6; Match level="QueryCoverage=100%, HitCoverage=100%, E-value=0.0, Identity=84%"; Hit description=S -adenosyl-L-methionine: phosphoethanolamine N-methyltransferase
  Pfam annotation: Domain name=CMAS; Domain location=200-430; Score= -151.1; E_value=0.00015; Accession=PF02353.11; Description =Cyclopropane-fatty-acyl-phospholipid synthase
  Pfam annotation: Domain name=Methyltransf_11; Domain location=258 -354; Score=101.2; E_value=3.2e-27; Accession=PF08241.3; Description =Methyltransferase domain
  Pfam annotation: Domain name=Methyltransf_11; Domain location=69-157; Score=40.1; E_value=7.7e-09; Accession=PF08241.3; Description =Methyltransferase domain
  Pfam annotation: Domain name=Methyltransf_12; Domain location=258 -352; Score=71.6; E_value=2.6e-18; Accession=PF08242.3; Description =Methyltransferase domain
  Pfam annotation: Domain name=Methyltransf_12; Domain location=69-162; Score=21.3; E_value=0.0037; Accession=PF08242.3; Description =Methyltransferase domain
  Pfam annotation: Domain name=Ubie_methyltran; Domain location=235 -413; Score=-105.1; E_value=0.00011; Accession=PF01209.9; Description= ubiECOQ5 methyltransferase family
  Pfam module annotation: Pfam domain module=CMAS::Methyltransf _11::Methyltransf_11::Methyltransf_12::Methyltransf_12::Ubie _methyltran; Domain location=200-430::258-354::69-157::258-352::69 -162::235-413
MDTVGVPVVAVANGIGEVERKVQKSYWEEHSKCLTVESMMLDSRAADLDKEERPEILSLLPSYKGKSVLELGAGIGRFTGDLAKEAGHVLALDFIESVIKKNQSINGHHKNITFRCADVTSNDLKIEDNSVDLIFSNWLLMYLSDEEVQKLVGKMVFKEGHSFDQDGGSFELSLVTCKCIGAYVKNKKNQNQICWLWEKVKSTEDRDFQRFLDNVQYKTSGILRYERVFGEGFVSTGGIETTKEFVGMLDLKPGQKVLDVGCGIGGGDFYMAANYDVHVLGIDLSVNMVSFAIERAIGRKCSVEFEVADCTTKDYPENSFDVIYSRDTILHIQDKPALFRSFFKWLKPGGKVLISDYCKNPGKPSEEFAAYIKQRGYDLHDVKAYGQMLKDAGFHNVIAEDRTEQVITLSGNHPLVVERFLFLYIIMLAEGINYAMDILPISICFFPQFLNVLQREIGEVEKNKDAFLADFTQEDYDDIVNGWNAKLKRSSAGEQRWGLFIATK

SEQ ID NO: 67155 - protein, 55 aa, Zea mays
  Coding DNA Sequence Number=SeqID_23780
PENSSGAHASTVQSRCVSVYVASMGDLAEGYDGVWRGAPSACVGVSTPGGPWTDE

SEQ ID NO: 67156 - protein, 555 aa, Zea mays
  Coding DNA Sequence Number=SeqID_23781
  Gene Ontology: Mol. function=phosphatidylinositol binding; Cellular component=clathrin coat; Biological process=clathrin cage assembly
  Homolog annotation: Hit_ID=Q5N9P9; Match level="QueryCoverage=100%, HitCoverage=100%, E-value=0.0, Identity=67%"; Hit description =Clathrin assembly protein AP180 short form-like
  Pfam annotation: Domain name=ANTH; Domain location=29-313; Score =389.8; E_value=4.4e-114; Accession=PF07651.7; Description=ANTH domain
  Pfam annotation: Domain name=ENTH; Domain location=29-157; Score =22.2; E_value=2.7e-07; Accession=PF01417.11; Description=ENTH domain
  Pfam module annotation: Pfam domain module=ANTH::ENTH; Domain location=29-313::29-157
MASMQSWRKAYGAIKDTTTVSLANLNSDFKDLDVAIVKATNHVECPPKERHLRKVVAATSIARPRADVAYCIHALARRLAKTRNWIVALKALVVIHRLLREGDPTFREELLNFTQRGRILQLSNFKDDSSPIAWDCSAWVRTYGLFLEERLECFRVLKYDVEAERLSKQGQGPEKGHSRTRELDSQDLLEQLPALQQLLYRLVGCRPEGAANNNYLVQYALALVLKESFKIYCAINDGIINLVDKFFEMPRHEAHKALEIYRRAGQQAGNLSDFYENCRGLELARNFQFPTLREELPERLLLTYKPEESEDIPEPASVEEENAPVEEPVLVPPVTEVVSPPKTEVADTGDLLGLDDPNPAVSAIEESNALALAIVPTDGASTTGNTAFQDKGFDPTGWELALVTAPSNTTSSASVGQLPYVLETTYALCQVFPWIKGGGFDKLILDSLYDDGAYRQRQQQQVYGSAVPNPFMTNDPFVMSNQVAPPPSVQMAAMSQQHQQIPTMMQPNPFGPPMQPQVGMGPATNNPFLDAGFGAFPVANNSHQQHNPFGSAQLL

SEQ ID NO: 67157 - protein, 79 aa, Zea mays
  Coding DNA Sequence Number=SeqID_23782
  Subcellular localization annotation: CTP_CleavageSite=68; ConfidenceScore=5.19e-01
MEDRLDLGFGGASTSPDLRPQASHVNKEAPSSPYPEPTSVRRRNRTGVPSWLAPARIKPMNGRLRKPLCERTANFSSSL

SEQ ID NO: 67158 - protein, 92 aa, Zea mays
  Coding DNA Sequence Number=SeqID_23783
  Gene Ontology: Mol. function=kinase activity; Cellular component =ornithine carbamoyltransferase complex; Biological process=amino acid metabolic process
  Homolog annotation: Hit_ID=Q6QP54; Match level="QueryCoverage=95%, HitCoverage=33%, E-value=3e-20, Identity=63%"; Hit description =Putative kinase
MALPVDVAGLRPRSGDVEAPPKPRSSLSSMAEAEPEPLGRARRRSFGRGQGRVRALGSGEAEPESEPRVGCTVLRRLPGLSFESDPWSSVSQ

SEQ ID NO: 67159 - protein, 314 aa, Zea mays
  Coding DNA Sequence Number=SeqID_23784
  Homolog annotation: Hit_ID=Q7XBD4; Match level="QueryCoverage=39%, HitCoverage=13%, E-value=5e-09, Identity=32%"; Hit description =Cinful1 polyprotein
MDKLKCAKEEYKVEANKIRQATTEIAIDLSTAQVKIEDLKDEVNHVANYYALGNICCNELLKTFSSAGATSREKNFADGEGLMWWVLSETRAYKSILSAREDYCAWIGTRSTALVLLNAGCNHVRTCTDLDFKVFVDHIRRRFLTSHDTLRALTSPPRHHRCRRHALHSPCREGLGFSPLNRYSQPRTGDIVTNHPRATSDGRRSHDSPKAIPGQETQSRLVRGQPRAGDIVTTRPRVGDMLMTRPMPTLGRRCSHDSLEANLGREMVTTRLRPTPDRTCSHDSVKANFGWETQSQLTRDQSWAGDSHDSPKAI

SEQ ID NO: 67160 - protein, 82 aa, Zea mays
  Coding DNA Sequence Number=SeqID_23785
MRCMSIRSPQLVTTGALTPHYLKRMNLMAFRPRYVVIPSNSEDTRMCKGENLCIKAHLDCWDYASSPKVLQGETASAEAVRM

SEQ ID NO: 67161 - protein, 53 aa, Zea mays
  Coding DNA Sequence Number=SeqID_23786
MEAELAVVEVVAAFHEGVGEVECLDELRLKETSGAEANRTAQMRSKWADTGRI

SEQ ID NO: 67162 - protein, 355 aa, Zea mays
  Coding DNA Sequence Number=SeqID_23787
MILRAFSTASVTEPYGRVRVRARILTVEGSSNTLGINYTFGEESGSSRRLGRPPRGLGRLSPEVMSPARGLGNSIPASVPLVDDPARLWPTKSSFRANSVSVRADTATPDFGSSKSDRGVPLTKQEKPRTARSTEPRDSYASGIRIPHSSPLHEATHAWYEQPHTIGGPAEQQKTDERLAVARSSSVDDDDFCSGGPNSSNDDLRADAAAMRPSPMPSLERQGRAEGRRVGGQSVGGTGYLVGGGTSSSCRGERRRRERLRSHSGQRARHAAAASATNGERPSPRSLREGAGHRPRRDRPQLGTLPSPALMIKILEAEEGQRAQPGLLFPAIELEVTALGDHRRGGAAGLHDENP

SEQ ID NO: 67163 - protein, 322 aa, Zea mays
  Coding DNA Sequence Number=SeqID_23788
  Gene Ontology: Mol. function=protein serine/threonine kinase activity; Cellular component=integral to membrane; Biological process=protein amino acid phosphorylation
  Homolog annotation: Hit_ID=A7NV49; Match level="QueryCoverage=86%, HitCoverage=80%, E-value=1e-48, Identity=39%"; Hit description =Chromosome chr18 scaffold_1, whole genome shotgun sequence
MAHGLDALQRSPHACLSAAFLQQAAALLRSLHSQLLHLVQRLHLPPGESWLDEYMDETSRLWDACQLARAGAAGLDTYCAAAARVAPALRDWLYGGSGGSHAAASARHLQRAITAPRRHAAALHQDNRALADARLDPASLLLDDRSPLEFKLNAFNGFRGVLYALRNATSFLLILLISGTVTCLPDLTAGCCSASANHHQLRASAGGGYVASIARLRQRVVEEMEECIIAGDHRSHSAGIMMHEFRQARAAIDGLKQDFDRAVAMGGYRDDISDSLVQRAEIINGWVGMLRSGAEAVIAELDDFFDEIVEGRKMLSDLCSHR

SEQ ID NO: 67164 - protein, 1584 aa, Zea mays
  Coding DNA Sequence Number=SeqID_23789
  Gene Ontology: Mol. function=phosphatidylinositol phosphate kinase activity; Cellular component=mitochondrion; Biological process =phosphatidylinositol metabolic process
  Homolog annotation: Hit_ID=Q6ZJN4; Match level="QueryCoverage=98%, HitCoverage=99%, E-value=0.0, Identity=62%"; Hit description =Phosphatidylinositol 3,5-kinase-like
  Pfam annotation: Domain name=Cpn60_TCP1; Domain location=120-659; Score=-238.8; E_value=0.00083; Accession=PF00118.15; Description=TCP- 1cpn60 chaperonin family
  Pfam annotation: Domain name=PIP5K; Domain location=1307-1538; Score =179.6; E_value=8e-51; Accession=PF01504.9; Description =Phosphatidylinositol-4-phosphate 5-Kinase
  Pfam annotation: Domain name=SpoVG; Domain location=1304-1383; Score=- 27.1; E_value=0.026; Accession=PF04026.3; Description=SpoVG
  Pfam module annotation: Pfam domain module=Cpn60_TCP1::PIP5K::SpoVG; Domain location=120-659::1307-1538::1304-1383
MYGGPHPHRFPFCLTQHNREAAPEANGYHHSPHGVDQSQVVDADKHINHHSTDDNAPSSASGHRHGGISRHASTSSVDDRSIKSGDDSDGAESTNGRSSNTEISFLENDTVWIPPQAADKEDEAQSFATSIAYDDDDDDYSDGIKWGQSSFPSPGKQHDAGTSNHREVREKAMLEAMNGQLKILVSRFLASVGIPSSNEEASDSWLDIVTSLSWEAALLIKPDGSMGKEMDPGSYIKVKCIASGTRRQSEVIKGLVFKKNAAHKHMPTNCHNPRLLLVKGVLGHSDVGLSSFNSMGQEKDLLERAIGKIMEICSPNVVLVEKTVSRNIQELLLKEGVTLIFDLKLNRLQRIARCTGSPIISFSEVLDKPKLKQCDYFHIGKFTEEHNNASEGGKMTSKTLMFLEGFPCPLGCTILLKGANSEELKKVKQVMHFTVFAAYHLILETSFFEDQRVFLNDSTTKETSATATEGTYGVAALSGPIPNFPSHDDSPALRLFHATSNSYADVNKPLISPRNVDKFSAVSSSSSNDLEQGANVRSNNAERLTLPVQGPLRKLFADMLCHQNIYLPVTSLQEANDNRKEVRVESSQETVSNGFHRPKTGESVISIENGESINDAQTQEITQAIMPTGSSVSDKDAESPVMGDNGAHSTTSIIIKEKHADGDQADDALDSHSILILMSSQCTEKQVICEQSHLTRIKYYGSFDVSLGRYLQDILQNQKLSCSSCGEPPESHMYSYTHRNGNLTVLVKRLVPKHYLPGESEGKIWMWTRCSRCDHEHGVSKPTPRVLISAEARNLSFGKFLELSFSSHSAARRLGSKVAMFRYSPVEIYTTCKPQPTLQFVNPIRQDWFEGQRRNVHAKSMALFSGVARFLQNLKNEHPDAITLAVNCGLTLPVKDFTELEELLIKEKAQFESSLDKATDENGKPFGSVHGVLNINWYYQDLLLKLYIWDRRLYQLFYCKSVQLESCSNYKNPAGTVDGNCDDNFGVDKKIGEITSDEITAALGVSSTMESASNKLDHQSGDTTALLLHKSQEAGHSEFPCNGGSKAEESSIAHGQIKVDGTTETTNDPCFEISNDMEVQANLTVADPIPMEQERCSTPQQFKYPYWDDRERWIWNSFSESQMAYRDDIEIGYLGKFELINNYLPHYLSPLFEQHDDSYSPQFAVGPGSNILCIMEDEISSIIARALAISDERHHLIDLKFENGMDYSKGEYAKAIEKSFSFLSESSFSSSPWSSTDSEASLSSLSSFSSDDFSGYDSSSLLSPMHPEMTVNGKVTLKDKYSVTVVYDNQFFALRKKCCPSELAYITSLSRCKKWNAQGGKSKAYFAKTTDDRFIIKQIKKTEFESFIKFAPDYFKHVYHSLDTGSQTCLAKILGIYQVKQIKHGKEVKIDLMVMENLLFGHNISRIYDLKGATFSRRITDSNDHDTVYLDQNYVEDMGFSPIYIGGRTKHLLQRAIWNDTAFLTSVNVMDYSLLVGVDKEKHELVFGIIDYLRQYTWDKQLETWVKTSLVVPKNVLPTVISPKEYKKRFRKFMAKYFLSVPDTWSPDNPSKPCKSLGQSNRKLAEVQNGDNLSEHPNEVEGCA

SEQ ID NO: 67165 - protein, 150 aa, Zea mays
  Coding DNA Sequence Number=SeqID_23790
MGKNNKRKREPTPPSEDFGDSEYSEEEFSSESEGSPAPIPLRESSDDSDDSQGLAAEVWTYIRVVERSGLAGSDESEYSSDKEDSSEEGGGSDGDDDDDGDDDDDEGGGSDDGDGGGRGSSGGGKGDDGGSSRGGSGGGGNSKGSNKASG

SEQ ID NO: 67166 - protein, 96 aa, Zea mays
  Coding DNA Sequence Number=SeqID_23791
MTDSPRTHVDERRSARDCDHGRGQQVGVEEQGEGMEDEWDIRRRRKRWCAYDVKYPRGRAIATARVGVEAYVGRIQGGGACSYTLYREWGGMEVEA

SEQ ID NO: 67167 - protein, 62 aa, Zea mays
  Coding DNA Sequence Number=SeqID_23792
MKKHRRAVISWGRPKRWEFGEMKASAVVGARATVSGHGLEKTHGYRSFTKQGSRLDRSGGWL

SEQ ID NO: 67168 - protein, 132 aa, Zea mays
  Coding DNA Sequence Number=SeqID_23793
MAVGPDSEEPTGSPVVFATMSYALPPGFRPRTTDQAKDGGKKSFEVPSAREKVMEAEEPKAKGESELCLPPRLPLKESEMRLPPRLASGESERHEQVPWAVQTAKGKWATMERRGVGPWKRKGEWVETEVAA

SEQ ID NO: 67169 - protein, 98 aa, Zea mays
  Coding DNA Sequence Number=SeqID_23794
  Subcellular localization annotation: CTP_CleavageSite=66; ConfidenceScore=5.73e-01
MQAACNRAKWARPSDFQRTQRGGPRPRVMQPACRSLRASNYTATRTTAMPPRLRNQYRDSRQPCVRPSSASQARRDRERGIPRKGSFSVKETGSEPPY

SEQ ID NO: 67170 - protein, 339 aa, Zea mays
  Coding DNA Sequence Number=SeqID_23795
  Homolog annotation: Hit_ID=Q2R9D1; Match level="QueryCoverage=86%, HitCoverage=44%, E-value=5e-60, Identity=47%"; Hit description =Expressed protein
  Subcellular localization annotation: CTP_CleavageSite=55; ConfidenceScore=5.17e-01
MAQYRQQYGVGFSDSRGHHHQVLPDWHRPHHASAKSSSRIRRPGKPAPRRRSPAAAAAVAAALLLAAVFLLSRRISRSPAEISQDSSARETLPDWNQSKSWKELKFGHGGGGRSARDSRYWDRDDRRRDEDYTEDEKEKISGGSGTSGDAGGSSDKGTTSEGGGEDKGLTTGSDAKDVPEVSEGGKGGTLYNEGGRKELEQYEAAAMGATGTGVKEVDPDDEYDDGIDTQDEMEDAHLHSSDGGRKLGGGSHEGAEKKDEVATERHTEAGGGIAGSHDISSPDKKKVSGTGDKKHGPKKKPKRKKSDAAAPSNYQRLKSVNNMPIVPSEDVSCNTNNMT

SEQ ID NO: 67171 - protein, 134 aa, Zea mays
  Coding DNA Sequence Number=SeqID_23796
MGYHSPMRVDRRRLKTANEKRAQEAMEMEAARAEKQMLRNLAGRLSAKNGCAGKYIADEARARYVQQKIAMMELMEEKDDSSRLSELIVLAKAGLNGEEEDDASRLSELIMLAETLEHGAEEDLAVLGRLGGEE

SEQ ID NO: 67172 - protein, 192 aa, Zea mays
  Coding DNA Sequence Number=SeqID_23797
  Homolog annotation: Hit_ID=Q2R9D4; Match level="QueryCoverage=51%, HitCoverage=26%, E-value=3e-33, Identity=70%"; Hit description=Non -imprinted in Prader-Willi/Angelman syndrome region protein, putative, expressed
MPTEELMVDRARWEDHGCGVGADLEENRGACQCGDIDVNVAYASGCPALGTYWEASSIEGFIFWVCFALEASWRMARRSSYKQVFLGLPALVEQDWDHQNPTQIVTEMCGFMTILSGTFLLHKTKDMTESPGQCLSTRRSKHASQNAFAIEVVPLKCQDSIDDETLTLSLPQVENGYLKEEHLLRYKDSSIV

SEQ ID NO: 67173 - protein, 174 aa, Zea mays
  Coding DNA Sequence Number=SeqID_23798
MKSSIEIYPVKTKAVVVLTVGIEVVGGLLTVAEGRDARSTVRGATIAAYVLRVHQSRVQLRAAPLRDPSARRATVSITSSTSTSTFVGLSIASRGLISHPGLGKGSRWGGESGVEGVSVTRAEAGTVFVGVRTSRLPWPSKTPPTVPRGGADPMMRRQFQWHKGLVVENGPQFG

SEQ ID NO: 67174 - protein, 108 aa, Zea mays
  Coding DNA Sequence Number=SeqID_23799
MEEGEEAEHEEKVLKADARGKAETAEAEEKRKRKKNGYPYPTRISGYLSGSSRSVSDPNMKLQYPDITRIRPEYKITRIRIWVFALSISGTRRMQSMEKYRGNSEDSL

SEQ ID NO: 67175 - protein, 166 aa, Zea mays
  Coding DNA Sequence Number=SeqID_23800
MAQRGEAWRQGEEAGMAGRQRSGARRGCRGGRWSKGRRSCHRGAGEGRRLGVCQTGEERSRDALVMSWGQHARAHIGGDDVYSCARGGCGGGGLACLRGGGRVHRRGGGAHDWCREVRRRRGGGGSDGRDEGVAPEGDGGASCGRPDLGCRWRRLWGCEVAIGRVG
